United States Patent Application Publication US 2004/0214272 A1 - sequence listing, part 5

SEQ ID NO: 17418 - DNA, 1505 bp, Zea mays
  Clone ID: MRT4577_115886C.1
aaaagagaagagttctatgtgaagtggatcagttacaagcctaaagccttggagttggacattgtatatcttcagggtagatttgggactttgttcaaaacaaaaaaaaaaactatccaaagcagagtttcccttctcaacactctcagcttgtagatagatgtaccaactctgaaccctttggcaccccccttttagatgaccagctggtcactgttgattcttgttgccattagttggagcatggcaatgtgatatatcactgggagaatagctggcacactaaaaagaatgataaacacacgccgcgtggtgaaggaaacagattccttatgctgctgccagatctcaaaccttgagagacaacactgaggagatgaaatggcaggattctctttgtctaccattcaaaagatgctgccacataccctctgtctataaatagggtctcgccagagacttgcgtgatcaaccaaaaactttcgcttctcattacttcacctcatttcaatatacatccagccagagactagagatcgacatggcttgccatcttaggtcgataagcttgccgtctaggcctcagtccggcgaagccgcagtgcagcaagagctgtgtattctagatgcaatcatctcctcgccatcaacatgtatcgtcacgatgtgtgacggtttgaggaggcttggagacatctacaacagcgttgtggagatgactcacttgccaagcaaccaagtctgctcttcccagcaaaggaagatgctggatggagaaatcgaatcttccctcgagctgctggatctctgcaacaccatgcaagagatctttgttgagttgaaggccattatccaagagctgcaagtggctctaagaaaaggagatggtgcaaccgttcaagccaagatccagtcttacagccgcttggtgaagaaggctaagcagtctttcaagaagtcaagcaagaaggccacttctgacaagacagactgtgcaatggtcaggctactgaccaaggccagggagatcgccatctctctacttgagtccacggtgcagctcttgtcaaagcaaattgaagtgccgaagcagtcacttgtctcaaaggcgttttccaagagaaaagcagttgtctgcgaggaggaccagttacaggcgttagagtgcagcattggagatcttgagagcggagcgggacacctgttcaggatattagtctagagcagggtctctctcctaaacattcttagctcatagatactccttgttgcttttgacatcctgtgattggcatcatccgcatttttgaggattagctaatcttgatgctgctttacaatatgtatatagagtacaaatgtatatgaaaaaatcggaaatgaaaaaaaggacagttttgatccaattcatttttgttgacgtgattttgtgcattcagtaaggattgctttgttttcggatgcttaatttgtggatcttgccctgcgtacaagaagcatgccag

SEQ ID NO: 17419 - DNA, 384 bp, Zea mays
  Clone ID: MRT4577_115887C.1
ccccggcaaaacatacaattttttaggggggcaaaaacccctgccggatgaagctgaaaaaatcccatttttgcccgcttttcccctcaaaaggccgcccatacaaacacaaaagtttttaaggggtttttcgataaaaatccattttcaaaattgggcccaagtttgtttttaaagtttctgacccaaaaaaggctgttccatttaattttggcaagattaatttgcctttcaaattataccctaaccgccaaaaattaagttttgaatccaatgccccaaaaaaagaagggaaatttttccttgggaggggggttttctccaccatgtcctttccttaggatcaaggggccagatttgccgggacttttgccaaaatttttt

SEQ ID NO: 17420 - DNA, 439 bp, Zea mays
  Clone ID: MRT4577_115888C.1
cttctcctcccgtaccctcctctagttttccttatcacgttctaacggtagctttgggtttccctcccacatcctcctcccggcaattgctctactggtcggtcttttccgtcaggtcctgaacgacacgatacgcacgaaagtatagacgagtcgcgctgcgcgcacagaatttagtccacggggggcgggtcccgctgacccagagccagcaaaagcaccttcttccaaatggcctgcagcacggatcccttccagggcaagaactgcgggtggatatgaccaatgtgggcgctcaaccggacgaacacgaacgagtcgtcgttgaacgacctctgcaccatggggtggaaccacgggaccacgaagacgacggcttccttaaggcggcaacaacggatctcctgacggacgcgtgaggaaacccgctaatatcgag

SEQ ID NO: 17421 - DNA, 307 bp, Zea mays
  Clone ID: MRT4577_115889C.1
catatgcacctatgctcaagctatggtgttcacgactgtcttggcgaaaattctgaccttcccggcgttgccctgtggttgctggaggacgggaagatggctagcatcttcaggagtactgtacttgcttctgcaccttgtggctttctcgaccgacgtgcaaagcgccctgtgtgaatatccatctgtagaaaaagtggatgccctgcgatccctttcttcatggacatggtgtgcagacctcttttactctatggcacttgatccacgactgtagctgatcctttgtactggatgcgagcgacac

SEQ ID NO: 17422 - DNA, 143 bp, Zea mays
  Clone ID: MRT4577_11588C.1
aaactggcagccgtactagcacactttagggagcagagttggaatctagtttatgcgcccatactcgacgtcctgggcgcgtcccgtggatgacacatgcaacaataatccatacccgatcgtcacagagacagtcacagctc

SEQ ID NO: 17423 - DNA, 567 bp, Zea mays
  unsure (1)..(567): unsure at all n locations
  Clone ID: MRT4577_115890C.1
ccttgncatcttttactgtaatggttttcattttttggtctctcgttgtttttgacgttgtgtcgattaactgtattttttaccctttgtatcaaatgatgaaacatcagaacaatcttaggacaccttctgacacaatgctggtagcactgtgagtgagaaggcaattctttgctgatggtactgcaattactccatgattctgccctttattttcgtttttgtctctccggtcttaagcattgattgctcgagatagttatctttacaaccttgcattgccatctgatctgtacataagccaatgatgattagctattacatctggaattaccgtcagatttactcatgacgaaaatcgtctggctctctgaggcatatgtaagtatatatacgtattatacttatacatctccttttctggttaggtactcgttctagcttaatctgatcgtgtagactcagttgcagtccaataatcccaatgaggatcacaagaccgaccgataggaagtgccgtttgacactgtaagcaacagctgcttccaccggctgcaggtgtctata

SEQ ID NO: 17424 - DNA, 364 bp, Zea mays
  unsure (1)..(364): unsure at all n locations
  Clone ID: MRT4577_115891C.1
aaaagagntttttttttttttttttttttttttttaagccaaaataaaacggggccgccttatttaaacacgacaactaattggggggtaactatgggggggaacccccaaaacggggaaaaatttaacattttttgacaataaaaaaaaatatccctggtaagggggaattacattaaaagggtggccaagtaaactaccccattgaaatgcatgtcccccaataccaagacaaaatttaatttttgatatggcccttccaccgacctccaatacaactggcagaatggaatatttggataaaaaccccccatttttaaaaatataatttacccctttcccaaaaaataaacagggcccattt

SEQ ID NO: 17425 - DNA, 211 bp, Zea mays
  unsure (1)..(211): unsure at all n locations
  Clone ID: MRT4577_115892C.1
cttcactactctccctcaaactgtaaacacgggttcacgcagacgttgtttgttctcgtcctcacaggcacctcnatccagaaggcgcctgccgccgcccgcgggaacggaggcccaagcaggaacgggactggggacggctaatctggagcccggcggacctgcattgccgcgggacctccgcgcgtaagcagatctacccccgacccct

SEQ ID NO: 17426 - DNA, 198 bp, Zea mays
  Clone ID: MRT4577_115893C.1
ggattgggaaaaaatccaggcatggccatggagaggttttggaccttaattccttattccacttaccgaaatggacctcttccttatggggcccttcttgggttcccgaactaaaaccaaattttgggggaatggctttaattggaaggtggcggtattgggccggggcctttggacctcccacggggtcattatttg

SEQ ID NO: 17427 - DNA, 642 bp, Zea mays
  Clone ID: MRT4577_115894C.1
tccgcattcccggggttaccggccggtcagcctctagtccacccgcgcgcggccggccggtccgtccgtccgccgcagcagagcctctagcctgtagccagttggttccccgcccgcggccggcgacagatcgatgcggcgtgcgtggacgcccgccgacgagcgagcagcgacgacgacgagcgagcaccggcggcggaggcggatggggaagtacgagatggggcggacgctcggggagggccacttcgggaaggtgaggctggcgcgggacgcgggcacgggccggtccttcgccatcaagatcctcgaccggcagcgcatcctcgccatgaagatcgacgagcaggtgtgcgcgcggtgtgcctgcctgccgtctgagtcgttttccgatcgtacgtcgtacttactccggtgctgaccgactgtgcggccgggtcaccgggcgcagatcaagagggagatcgcgacgctgaagctgctcaagcaccccaacgtcgtccgcctgtacgaggtttcagctagcaagaccaagatatacatggtcctcgagtacgtgaacggaggagagctatttgacaaaatcgcactcaagggtaagctgacggagaaaggagggaggaaactgttccagcagctgat

SEQ ID NO: 17428 - DNA, 938 bp, Zea mays
  Clone ID: MRT4577_115895C.1
aatttccgggagagacccgaccggtgacccaactacccagcgtcgacctacctcctaccctcatccatccattgatccattgatttgattgattaattcatccgccaccaccgtaccgccaccgaggaaggagggatggcggcggcgggcggggggccgaggcggacgacgcgggtggggccgtacgagctcggcaagaccgtcggcgagggcagcttcgccaaggtcaagatcgccaaggacacccgcaacgccgccacctgcgccatcaaggtgctcgaccgcaaccacgtcctacgacacaagatggtcgagcagattaaaagggagatcgccacaatgaagctaataagacatcccaatgtggtccagctgcatgaggtgatggctagcaaatcaaagatatacatggttcttgagtttgtcgaaggaggcgagctattcgataagatcgtcaattctgggaagctaggagaggatgaagctaggatatacttccaccaacttataaatgcggtggattattgtcatagccgaggagtgtaccatagagatctgaagccagagaatctgcttctggattcatatggagctcttaaagtttcagacttcggcctaagtgcatttgctccacaaacaaatgaggatgggcttctgcatactgcctgtggaactccaaactatgtagcacctgaggtgcttgctgataaaggttatgatggtatggctgcagatgtatggtcctgtggcataatcttatttgttcttatggctggatacttaccctttgatgatgcttatctgatgagtctgtacaaactgatctgccaggcaaaaaaaaagcgtacagtcccaaggggtattacccaggtgatctatttgaatggggcaatagggctgtttttcttgcccaccatggttttcttctggagcaagga

SEQ ID NO: 17429 - DNA, 890 bp, Zea mays
  Clone ID: MRT4577_115896C.1
gtggctttccaaagcatcgccgcgcctcgaggcgggccggggaggtcaccaccactcttggcgaagcgaaatccaccgtacaccgctgcctccctctccctgtctcgtctcgtcgaaccagccgaggaagccaacgcagacccagcgatcctcgtcgcgcgtcctcctcccccacggagggaaggatggcggagcccaaagcggcggcggcggcgaggaagacgcgggtgggcccgtacgaggtcggcaagaccatcggcgagggcagcttcgccaaggtcaagcacgcgcgcgactcccgcaccggcgccgtccgcgccatcaaggtgctcgaccgcaaccacgtcctccgccacaggatggtcgagcagatcaagcgggagatttcgactatgaagctgatcaaacatcccaatgtggtacagctgcatgaggttatggcgagcaaaacgaagatatacatggttcttgaatttgttgatggaggcgagctattcgataagatcgtcaattctggaaggctaggagaggatgaagctaggatatactttcatcaacttataaatgcagttgattattgccatagccgaggagtgtaccatagagacctgaagccagagaatttgcttctggattcaaatggagctcttaaagtttcagacttcggcctaagtgcatttgcaccacaaacaaatgaggataggcttctgcatactacctgtggaactccaaactatgtagcacctgaggtgcttgctgataaaggctatgatggtatggctgcagatgtatggtcctgtggcataatcttatttggtcctatggctggatacttaccctttgatgatgccaatctgatgagactgtacaaactgatctgccaagcatat

SEQ ID NO: 17430 - DNA, 2112 bp, Zea mays
  Clone ID: MRT4577_115897C.1
aaggcaatcaccggcgccagaggcctagcccacctcgttcctctccactctccagggcgagcggtgtcgccaaacgccgctcaccggaggcaagtcaccagcaccaggatctggatctggctagacgcaggcgcatagcagtagcagaggccaagcggttgcagggctagggcaagggcagcggctaggctccaccgcgccagcagggctaggtggcctgtgtagatcaaacgggagatttcgactttgaagctaatcaaacatcccaacgtggttcagctgcatgaggttatggcgagtaggacgaagatatacatggttcttgaatttgttgatggaggcgagttattcgataagatcgtcaattctggaaggctaggagaggatgaagctaggatatactttcatcaacttataaatgcggttgattattgtcatagccgaggagtgtaccatagagatctgaagccagagaatctacttctggactcaaatggagctcttaaagtttcagacttcggcctaagtgcatttgcaccacaaacaaatgaggatgggcttctgcatactacctgtggaactccaaactatgtagcacctgaggtgcttgctgataaaggctatgatggtatggctgcagatgtatggtcctgtggcataatcttgtttgttcttatggctggatacttaccctttgatgatgccaatctgatgagactgtacaaactgatctgccaagcatatttttcttgcccaccatggttttcttctggagcaaagaagtttattaagcgcattctcgatcctaatcctgatacgaggataacaattgcagaaattttggaagatgaatggttcaaaaaaggctataaaccaccacgttttgaacaaggtgaagatgttagccttgacgacattgatgctgcattcaatgattcagaggaccgtcttgtggcagagaaaagagaaaagccagaatccatgaacgcatttgctcttatttcgaggtcgcagggcttcaaccttggaaatttgtttgagaaggagatgatgggaatggtaaagagggaaacatctttcacgtctcaatgtacagcacaggagatcatgtcaaaaatagaggatgcatgtgggccacttggtttcaacgtgcggaaacaaaattacaagatgaaattgaaaggtgacaaatccggaagaaaaggtcacttatctgttgcaactgaggtttttgaggttgctccttcacttcacatggttgagcttcgtaaaaccggaggagacacattggagttccacaatttctacaagaatttctcatcagagctgaaagatatcgtgtggaaagctgaatctgatgcaagtatgaaacagacgaagtgacacccagggaatctgtgtaacttatgatgtcacattgtgagatagaccaccacctcgggtgataccgcttgtttggtactgtatgtttttttttactggtaccacattggcaatcaatctcttgtacagagctccttctgaatgagcgcagctgtacacgagacatatgaagaggccctccctgagatgctccaaacgttgcaatggaactaaaaatttgtataaatgggtccttggcgtcctaccaatcgggcctgctgcaggggcaaccactagcggaggagcggcaggtccccttctctattgtatagagcaccgactttctgtagtttctactgttgtcacttttacaaaaacatttttttctaatcgaccacggtcaagcttccccgcaaataataaacagccgaataagtgatacccagagaatctgtgtagccctcatgaggccacattcagatagatcccctcttcgggtgataccacctgcttggtactgtatgcttttttttttactggtaccacattagcagccaaaatctcttgtaaacgggaactccttctgaatgagcgcaattgtacaaaacacatatgaagaggcccctccgtgagatgctccgaacactgcaatgggatgtcaaatagttctgaatggtgagtgctgtttttgcatctaaaaaaaaaaaaaaaaaaaaaaaaaaaaaaaaaaaccaagggccggcccggctc

SEQ ID NO: 17431 - DNA, 506 bp, Zea mays
  Clone ID: MRT4577_115898C.1
acaatacaaaggttacccatatctatctttattgcgtcaagccaatcggtgggaaaggaaaaggccggacgaagaacatagcctcaatccataaatcatctcttcggctcgacctttgattggaaagaatatcctccgctgaactcgaaggcagtcggcgctcacgtccttgatctttttagggaggggaggatcgttgtcccggtggcgaggagcccccttcgtaaccacgaactccgccgcgggcgttgaggcaaacgtggaggcgctgctgaacccctcgctctgcagcatgatctcgatctccttgacgacctagctcatggaccgccgggctgtggccacctcgttgacccacctgacggccacctggactaacttgccaaacgccacgaggtggctattggtgctcatgatccttgcgtgtaccatgtccttgagcccgcagaactctgcgtcgtccgcgtggaacaccctcttggcctcgcggactatgtacttgccct

SEQ ID NO: 17432 - DNA, 375 bp, Zea mays
  Clone ID: MRT4577_115899C.1
atctcatgcatatcgtttattccttacactgaagctctctttggggggggggcattatcggtgggtggaggtgctacctactccaatctaatcagcgactgttctactcttacctttagttaacactgtgatcttgtgctggtgtagaccttgtaggtgtacatcacaggctgtaaaaacaagaaattgtgtggctaatgttcataggtggttctgtaaaaaaactggaaaactgggcttttacttttgctgaacaagctgtaaataatcatcgacccatcttttcttggtggtcataggttaagattaccgctttatgttatttctaatttattactatacaccgtactactattaaaatatcatcctatttta

SEQ ID NO: 17433 - DNA, 534 bp, Zea mays
  Clone ID: MRT4577_11589C.1
atggccagagtacgatctactgctagagtgtctcgtgagggatacgaagctgaagcaactgagacggcaccaatatcagaagtgatgagacagtcgggtcttgttgtgctagaggggcctgttgctgaaggtactttgactgctgaacttaagcaaatcgcaattgaagggagccataacaaagatgtagaggattacactattctgagcccagtgaaacccagtcacattgagtttggtaaatctaatgtgacagaagacgatatggttatgatgaagaaattgggctattttggggaggccgagagtaaacttattcgttttgctagcgaggaggtgattccggagccgaaggatgatgaagttgttgtctttaaaagcttcttcaaagcagaacttcggttccctctgtatgatataataggagaggttttgaagaactttgaaatatacctacatcaactaacacctaatgcaattgttggacttaatgtctacatttgggccctccgaagccagggacacaacctgtaa

SEQ ID NO: 17434 - DNA, 540 bp, Zea mays
  Clone ID: MRT4577_1158C.1
tttttttttttttttttagcaggcacatgaaacttaaaaaaacattattttatagcacactgacgaagattatgaacacatgctacagcaaccaaaggaactgtatgattcagatctgagcgaattatttttttaaaaaaaacacgcaggagaactgcgcatttgaatatattaggaggatagaaatagaggtctattaatagaccgaacatccagagtgagcgcattatttaaggatcgagatttatggggcacatcacagaaaggctgctagcaaaaaatgcttctgagatgccaaaacatgcaaggggcaatacttaggtatctaaagttcacatttatcttggtaggtccctacacttgaacaatttgccacctgagacaatttagtagtttagggacaaaaatggcaacactgtgtaagtatagcaactttcgttgcaagtttcttcatgtcgtgttcatcagttcatgcaactacatctgttagccattagttctctgtctatcatcattatcaagatttgaccttgttagaag

SEQ ID NO: 17435 - DNA, 761 bp, Zea mays
  unsure (1)..(761): unsure at all n locations
  Clone ID: MRT4577_115900C.1
ccggccgggacctttccagccggcagtgcaaccacccgagaaaacgggctcgatcttatatttaaaccatgtctttcttgtctcgccgcgaatgaccttatttgtttccatcactcatcaccaatttgacactcaatacaaaaatcgtcgaaaatgatacaaagacttgagaacaatccatatagccaactacccccgggccacatacgtctgcttcgaatctctagaaatgcctcggataaaaatgttggataccttgaagtcgtaccgctggaagaagcaccacctttctacgctctcagtcacacttgggggacccatacttgcaaacaagatgtccaaatccatggccatatcctaaacattacggccgaacttgcctgcggcattcgcaatttccagcaacttgctatcaacggctcagctctcgacccgccgctactatacatgtggatcgacaatctttgcgtagaccaaaacaacatcccggaacgatccactcaagtcggccttatgagaaagatttactcacgctctgtcaggaccctgatctggncttggagtggaccatggttcccactccacgngatgggacttggtcgatcaaatttatgcccgaattccggtctctgcaccctactgtcagtaaccccggccaaattccagtcaaagcctattccgacgcatcacatgctgtgtccaaactgcccgcgtgggataatgaagcctgggggcagatgaaaagccttcttgatcttccc

SEQ ID NO: 17436 - DNA, 273 bp, Zea mays
  Clone ID: MRT4577_115901C.1
aaaaaaaaggccccccaaattaaaaaaattgtggaaaaaaaggtggtaggggctacaaaagtttaaaatattcccttttggaccatgccctgcataaaattccaaagatttaaaaggtttaaagcctctcccaaaaaccaaaaacagggactacaacccttgtttttttatttttatccccccaattatccccatattagaaattattttttcccgaggtgggaaaccagccttccaggggccatgttttatagggggcgcagactcaagaca

SEQ ID NO: 17437 - DNA, 568 bp, Zea mays
  Clone ID: MRT4577_115902C.1
tgacaccgctccaccagctgcgagtcgaccgcaaacggtggttgtggcggcgaccacttctatgctggccacgctacgcccggggttaccacagcagacaaagataggggccgatattgcgggatcccctaccctggcccgaacggaggacctgaaggtacgactggtgtctttctgaaaggcgaagagcacgttcacggatacccagactagctgaaagtgacctggggcctacgatgtggaagcaaatggtgaaagctgcgatcacgtacatccccagaagtcccttgtcacactactacgcagtctgttgatgccacagtgatgctaggaggctatcccagaaaactactctgggactgcaggacaaactgtgtcgatcacctactcgtctatggccagggcaaatgtcactgtcactgccatgcagatgaccacacggtctgatacaaactagcactttattgcgcctacactaaccccaagcaccaagctgacatactctacttacaaggttgcatctacacacacggaggcaaaggcactcagctttgcatacagccccagc

SEQ ID NO: 17438 - DNA, 485 bp, Zea mays
  Clone ID: MRT4577_115903C.1
ggcagcccgccgcggtacgacctgtggccgggcacagctgctgcttccgatgagctcgccgcggacaagccggagctactgctcctgctcctcgctggtcccccatagccggccgccaaggctgaggctgctgctcctgcagcagccctatataggccagtgcgtgatgccgagcccacaccacggtggcagccagggcccaggccccaggggatcgctgtgcgcgcgtggctgtgtagtctatctcgcgcgtacatggaagaatgacacgggattatgctggttattacgctaccgttactgccgactatctgcgtgtgctggcgtgtgcatcgtactgtgcccgccactgtacctagcactgactgttccgtgtacctgttcggagcgggctgcgagtgacgacagctaaataaagagtgcgtggggtgaccatggtggcaggggcccgctgtcagagcactcggtgtcccatgcctggcgcg

SEQ ID NO: 17439 - DNA, 368 bp, Zea mays
  unsure (1)..(368): unsure at all n locations
  Clone ID: MRT4577_115904C.1
ccaacccgaccgacgcattcgtacgtccgctcnatacatctctatctccttttgttaccgcaacctaaaccccccttcggggtgagtttctatacaatccgcgcagggtcctaaacatgtctactgtgctccagcgtccgacctcctgcacgtttcactgcttccatctcaagaacacctctgcacccaatccctacacctatcagcggcaccaacttatcatcgccaactgcgtccagattgagctcatcagaccgcacattctacatcttaatgacttcgaactcatccttctgccagagcactctacgttcaaggacatctacatgatgatacgtttacgacgccattttaagacatatcagatc

SEQ ID NO: 17440 - DNA, 721 bp, Zea mays
  Clone ID: MRT4577_115905C.1
agattctacacttcacccgcctcaggcaatacctccccactagctatccgccgcagcgctggagcccgcatgcgagcccccatggacatctttatgaagattttcacgaagaacatgatgacttaagaagatgacgttgtaggagaagattgcggatgccatcgacaacatgcaggacaagatacaggtccaggaggacatcccgccggtcctcttccgcgtaatcttcgtcgaggaggagctcaaggacggccgctacctcatcgactacgacatccacaacgagctgacgctccacctgcgggtcggcctccgaagtggcgccaagaagagctagaacaagacgtacaccatgcccaacaagatcaagaacgagcacatcaacgtgatgctcgtatagctggagttctacaacgcggacgacgccaccggcctggtgaaccagctccgcaaggagtgccgcaacaccgagtgcgtcgtgggcgacttcttggacaaccactactgccgccactactgcctcaagtgtggcctcaactacaactactatctgaatgcgcaatttcatgtgatgctttgatttatccggctatctaacgaggattcacctgatggtaactcgattagaatagcatgtagatctgactgaggtggagacgtagatgctgccgtagtttctgtcttattatattgttacctctgctactgacatgatgtggtc

SEQ ID NO: 17441 - DNA, 304 bp, Zea mays
  Clone ID: MRT4577_115906C.1
ccttcattctcggctacctccacaacaaaggatctgtttcttggaggtcttgaccctactccactagagggccacgaacatctatggcatggcggagaaggccgtaggggtgcactgctcgagcacgtatgcatgtgatattgtcaaccacctagaagtcgtgcaaatggaagtcgaagacccaacggacacactggccaggcgtacgatatgccctgtggagaagcatcaccattctggtggctctcaagagcaaaggctcggccgatgccaactgccacagacacgcttgctggataacgga

SEQ ID NO: 17442 - DNA, 158 bp, Zea mays
  Clone ID: MRT4577_115907C.1
tcccggtcgacccagcgtccgccccgcgtccgcacaggtgcaggggccccagcttcggttcctactggtgatggctgggatcaagctggggcccctgcacctgtgcgggagcgtactcggcctcgtgtggctgctcgtgctgtttgggacgaagcatg

SEQ ID NO: 17443 - DNA, 254 bp, Zea mays
  Clone ID: MRT4577_115908C.1
gccccaagctcccataaattttccatattattcaggggaaaagttttctgagcccccccgggcttgaaaaaatttgaaatgggtttacagggaacaaattggaaattttgggtttgacaacccttaatcgaattggtggtcccacttataaccaaaaacttttaaattgaatttccgggaaggggattttttaggcgggggccccttttttaagttggggaggcttttgaatgaaaccccccccctttttaatt

SEQ ID NO: 17444 - DNA, 384 bp, Zea mays
  Clone ID: MRT4577_115909C.1
tgcataccctcttgtcaccttagaagcacgcctcgagcgcagttctaatagccaactgggctgtgatacaggaacacagtgtaggtcagggacctaccactatagcccagagcaagatatggcctcatgtgaatacctactgaatcattcaaggctagggagccgtatgaccaccaccgagatcggatgaagacttagatcttctagcactgaaaagtaccatactaagtacctacagaagggcggacgaatcatgcttggggctagatgcagccattggctggacagaccgactacgatgcttgcgtagagcgacatggaccatgcgtgcatggtgtgaatcgtaatgaataagggatgcatcaaaggccgattcgatactga

SEQ ID NO: 17445 - DNA, 480 bp, Zea mays
  Clone ID: MRT4577_11590C.1
tcgttccgatcacctattacctagttagcccagaacggctgctggctgtctctacggttcgacgcgtcaggagggagggaggatggtcccgggaaccagagtttgagacgtggccgatgcaccgcttagcgactagcgggaggagatgaagtatcataattggcacggcttctggtgtgggtgaccgcgtggccatactgaaggcgtttcacatgtcgggcgcgcagctcctaaggctcaccaccatcttgggcaactggaccgcacatgatgccccacacaacggcttgatcctgtgcgagaggcatgacatctactaggttcaagtacctgtaggtagacatgagcctgtcacagaaggaaagccgctcgttgctgactacgctcttggacctcgtggactgctgaagccagactttcgctgatcccactgtccagaacgtggaggaaagtgctaccgactccttaggagataaggtg

SEQ ID NO: 17446 - DNA, 312 bp, Zea mays
  Clone ID: MRT4577_115910C.1
atccagcgcccagagagacaccagagaacccaccatggccccctttgagcccctggcttctggcatcctgttgttgctgtggctgatagcccccagcagggcctgcacctgtgtcccaccccacccacagacggccttctgcaattccgacctcgtcatcagggccaagttcgtggggacaccagaagtcaaccagaccaccttataccagcgttatgagatcaagatgaccaagatgtataaagggttccaagccttaggggatgccgctgacatccggttcgtctacacccccgccatggagagtgtctg

SEQ ID NO: 17447 - DNA, 311 bp, Zea mays
  unsure (1)..(311): unsure at all n locations
  Clone ID: MRT4577_115911C.1
ngtacgtcgcagtcaccaattcgcaagtcgagggacgagtcaggcttctcttcaccacttctgatctcctccttgccgtaccgttgtattagccggtcaggagggcacaccgcgagagcctagcatggactaccgatcgtgccatcatgttggtaggtaacgcggtggtggaggacaccgacatgcctgcgtagatgtaggcccaggcgatgttggcggcgtccatcgtcctggaccgcttcgacgttctcgattgccggatcatcggtcccacatctagtaggagttttacgcgatccatggcctcggat

SEQ ID NO: 17448 - DNA, 202 bp, Zea mays
  unsure (1)..(202): unsure at all n locations
  Clone ID: MRT4577_115912C.1
gagttttcaccnacccccacccgtacatcaagaaactttatcggtttacaagcaacacacaaaaacaancttccattcaacaacataatacactccctataaaccatacctagatctttacctacaactaaaaccaaagacatcaaaagtgctcttagagccatctaacccactcagccatgacattctcacaaaatccctt

SEQ ID NO: 17449 - DNA, 3322 bp, Zea mays
  Clone ID: MRT4577_115913C.1
gtattctgataattggtaattgatgtccttctcagcctatacaaatgtacttttatagttgtagaaacccacttgctccctagcaatggccccacatggcagccactcctaacattccccaccgcttgaaatgtggcttgccctcaagccgctgaccatattcgccaagttgcgggaggacatgcacagtccaagcactcaaactccataggtggaggccacggttgcttgaatcctacactttgagcaagtcctgttgtgaaggaatggcttggattggtttgttcaactgttttccataacgtagctgagattgaatcactgatgatggatgatacttgaatctccctctgttggtgcccattaagctgacccaagtcatgaaccaggggctgcatccaaacttggtcacctcctctctgagcgttcaccacacagcctgtatgccgggaccccaatggaggaggcgctactttagacagcaacctgtagcacttttgatgataattgagccacttcgtctttattggataacttgagcacccaagaacaccaagtataactgctccatcatcaccaggatcccaaggaaaggctgagaaattgcctttgttcgctgccacgctgagaaggcagccacacagttgcaccagattgttggacatgaagttggtggtgagcgcatccattatgctaccatggtcacagcaagcgacgacaagaggatgcaaggctgtcaacggtgagaagagcttatgattcgcaccctgagcatagccaagcagtgcacccattaaccatccaattaaaccatacttcatttggaattcatatccacagtccgctggcagcttgattttatggcagttgaaccaagaatcatcggtctcatccatcatgacactatcacctgtcatcatcttctggatgcgcagtggctccttcggcttgctttccagcggttgaccgtcatgtacaaagatcctcctgtagttcagctggatgatgacgcccataatgttgaggagtatcttagccttgttcaagtgtgtggcgtcgaattcctcggtgcagctgggaggcagtgtcgcataggcatactgctgggaggtgaccgagagtaaccgtagttccactacatttgcaactttcaccatcagtcccactatttgcactcccaataactgaggactcaagcgatcactgaagaaagtgggagaggatcctaactcaataagcaccatcaactcgagttgctcaatttcaccactgaaggatggccaaggtggaatccagtcttgagcaccatctcccggtatcacaaactgcacgggctgcacaggtggtggccatggtggcttatgtaacgcagaatcccatctgcaactgcatgagtgcgagtggaagaggtcagccatgttgcagctcacgctgacgtacacttgcttgctcttcctcagcgccgttgcgatggccatgtccatctgctcctgtgcgtcgtccagattgttgatgatggcttggtagtaggtgatagcctggaagccccgtagctcctgggagaagtccgggaggctgatggtgtggtgcaggacgcggttggtgccgtattcgttggagttgggcccacccacgatgcagaccacggggaggtcgaggacggagtaggcgtcgcggttgaggtccattctcgaacacctggtgggcatagcgacgggtacctcctcctctataacttgctcgacgctgaaaatcgtcggtgtgaaactgtagaggccgagctcgacgtggctgttgtagacgacgggaggacgcgcggactccagctcgaatgactccaccacctccgcctggtttggtgacggcaaggagtggaggaggcgggctgtcgttgtcggatgcgaagtacaccgcgcgtggaagctggacttcctccttggacttcgatgggtggtcgagctcgttgccgtcgacgaacgtgtcggcgagggcctggacggtggcgaggtcggagggacttcggagtgttcgcatgcctcctcggcctccacctcgttgataatgccttccgttggttcctgctcgacctcgcctgccgcggttagcacctggcgtcggcggtgttcgacggactccagcgcagcggtcctgctggtagcctcacggatgagtccttcaatcgcatcggtgatgcgagcctcctcgttgtactctagtagcgcgagcacctcaacgatctcgttgtggttcggctcgtcgtagcggtcgtagacgacgggaagagggacgggatccgactcgaaccccttgtccaagtgattggtgtcgaaatcctcggcgcagtccagcctccggtcgtcgggcacagggatcctgctagtgcccgcgcagatgggcgtgaggtggggcagcacggatccgtggccgccatggacggagctgttggcgaccgagtcgagcgaggcacccaaatcgtcgttgaaggaggaaggagtgtgtccgcgtgcggactgctcgccgtagcagccagccagcgtaccgctgaggaggtcgatgcgctcgatgtcgacggggccacgctggacgagctccatggcgttgtcaccgagatccgcatcgcagtattggtcgaagacgggagcgccatagatggtcgtggatgtggtgaggctaggcttggtgctggacattttgtcgacgatgatatgctccgtagtcggtgctgtgaagccgccgaaggcgttctggcagttcaccgaacacttggcaggcacaccttcgatgcaagcaatgagacgcttctcgcacgccgcgagctcctggaggaggtcgtcgtcggggttggcgagagtatcgacaaacggctgtggcgtggtgtagcggtcgtcgtcgtagagcggcgggatgtagcggtcggataccgagccggcgaggagcgtggtcgacgaagacatctcgtcggaccccaggaacgcgagcactgtggcggtctgctcgtcgcggtactgtgcgttgacgacggaagaaggaggcgcgaatccgtcgaaggaggaattgcgctcgcatgcggactgctcgccgcagcgaccagccagcgcctcggtcaagcgtgcctctgtgcacgccagcgcgtcgagaataccctgcatcgccgcctccatggaatcctcctctgataccaaatgttagcgacacagaagcttctagagaggtagcaggtagagagaaggtagcagtaacgtgcagagagggtccaggaaaggagaaggaaaggagaagacaagaggatatgtgataataggtctgtgccaacccggccggc

SEQ ID NO: 17450 - DNA, 359 bp, Zea mays
  Clone ID: MRT4577_115914C.1
ttaatgtggcgactacgaaggtataccatacgatcgataacgtcacctcatacaggctaatccacttgaacacgcatgatgtcagcgtatgcatacacaggaacatagatcaggtcaagatccaccaggtgaacgaggacttcgccaacttcatacggctgctgacaggtgccagctgaaaacaaggaactttgactaccagtggataaggctcagggcatgacttgtgctccgccaggagagaacctgatggttgcacatgcatctgaaacgcctcagcttctggtgacggagcaacaccttgtgcttcaggccgattacatcggtatcaagggggcatttgtggaggatggcacctg

SEQ ID NO: 17451 - DNA, 587 bp, Zea mays
  Clone ID: MRT4577_115915C.1
cccagcgtccgttctacgaaaaagaaatatgctaacttgcattctgttcaatgatttgaaaggtaaaaaaaaaaaaaaaaaaaaaaaaaaaaaaaaaaaaaaaaaaaaaaaaaaaaaaaaaaaaaaaaaaaaaaaaaaaaaaaaaaaaaaaaacccaaaaaaaaaaaaaaaaagggccgcccctttaaaaaaaccaaatttaactaccccgtccttccaacgtaaaattttttttatagggcccccaaaataaaatcaatggcccgccttttaaaaacgtggaaactgaaaaacccctggcttccccaaattaaatccctttgaaaaaaatccccttttcccaagttgggtaaaaacaaaaaagcccccccccaaccccctttccaaaaatttccccaccctaaatggaaaatgaaacccccccttaaccgccccttaaaccccgggggttgtggggtttccccccagggaaacctttacatttgcaagccccttaccccccgctcttttcgttttttccctttcttttctccccactttccccggtttcccccgtaaagtttaaaatgggggcctcctttaagggt

SEQ ID NO: 17452 - DNA, 503 bp, Zea mays
  Clone ID: MRT4577_115916C.1
agcacaagaccgcacgcgcgagggggtaggaccaaccgaacggagaactagagcaagatgggcggagcactgatgatggccatcctccacgtctctgctgctgccgccccacaggcacgaggagctgacaatggagacaatcacaggagaaccatccaagaggacatcatggcaacaggcaacaaccatcccagtgctgagcggacagccacacctaacccttactttccaaacatataccatggcgcaattcaagcacatacttggagtgaaaccaccagcacagacagcactacgcaatgctcctgtcaaaactgattaaagatcactggaacttccaaaagagctcgacgctagatgtgcaagggcccgcggcagcacaataggcaacatacttgaccaaggtcactgaggctcttgtggagcttttggtgctgcggagtgccttaaggaccgtttttgcattcacctgaacatgaccactttactttgagacagggacc

SEQ ID NO: 17453 - DNA, 510 bp, Zea mays
  unsure (1)..(510): unsure at all n locations
  Clone ID: MRT4577_115918C.1
ctcatcctcttcttctcctcctctttcttctcgaaccatcatcatatatatatatnagaatcaatatggaaggagcggccgaccataagcggcaggtggacgacaagccgccgtacgccgccgtggacgacaccatgaccaccaccacgaagaagatggtggaggagcagctctcagacgacgccgtgccgtcgctccaccctgccgccaacagcagcaccaccggcggcccctcgtccctccagatggccgtgctcctcgcctccttcgcgctgctggccgtcggcgccggcggcatccggccctgcaacctggccttcggcgccgaccagttcgacccgcgcaccccagccggccgccggggcatcaacagcttcttcaactggtactacttcaccttcaccatcgccatgatggtctccgccaccgtcatcatctacctccagagcgacgtcagctgggcgctggggctggccgtgccggccacgctcatgggcctttcctgcgcgc

SEQ ID NO: 17454 - DNA, 603 bp, Zea mays
  Clone ID: MRT4577_115919C.1
tcctcttcttctcctcctctttcttctcgaaccatcatcatatatatatatagaatcaatatggaaggagcggccgaccataagcggcaggtggacgacaagccgccgtacgccgccgtggacgacaccatgaccaccaccacgaagaagatggtggaggagcagctctcagacgacgccggcggcggcggcgagctgccagagcagaactaccgtggatggaaggccatgccctacgtcatagggaacgagacgtgcgagaagctgggcaccatcggcaccacggccaacctgctggtgtacctcaccaccgtgtacggcatgtcgggcgccagcgccgccaccctgctcagcctctggtcgggcaccgtcaacctggcgccgctcctgggcgccttcctcagcgacacctacatgggccgctacgccaccatcgccttcgcctccatggcctccttcctcggcatgatcgtcctcaccctcaccgccgccgtgccgtcgctccaccctgccgccaacagcagcaccaccggcggcccctcgtccctccagatggccgtgctcctcgcctccttcgcgctgctggccgtcggcgccggcggc

SEQ ID NO: 17455 - DNA, 362 bp, Zea mays
  Clone ID: MRT4577_11591C.1
accgtccatcatcctgcttctcctgctcattgtgaccaccgatgtggcgcaggctgtcatggaatgcaacatggacaccgagcgattccttggggcattcatggtctccgccaactgccccaacgtgtgcctcggtgaaggcttctcctgcggcatgtgcatcaccttccacagcagctgcatctgcactaagccgtgctacattaactgactcccggcagttcgatggtggacgtttattctagttactggcatacgtgattttttccccactaacagtcacacgacgcacgtgctggcatgtacgttgtgtagtacatgcatgtcttgctggcttcagttgctgactagtgatgagttgt

SEQ ID NO: 17456 - DNA, 327 bp, Zea mays
  Clone ID: MRT4577_115920C.1
ccaacccatagggtccaccgccccaataatccatagggttcaccgccccccctttgcccaatgccccccagtggcggggttccttaccaatcaaccccagcccaagcctttgggatagataaataccacccgctgggtatttcaccaaaccagccccatttttttggcttctcccaaaaccaagctgaatggcaccaccaatcctaggcttgggcccccaaggaggccaggcctgcaaaccccctgggggcctcacgccctgttttttagggcccccataagcaaattaaagtttttgacgggtggaagaacccttttttttcctcc

SEQ ID NO: 17457 - DNA, 358 bp, Zea mays
  Clone ID: MRT4577_115922C.1
cccacgcgtccggcctttctttcctggcggcggcgacgccgactactgggcgagcagcgccgccatacccagttcgtcgggcccttcgaccttcgtcggcaacgagcttccaccaggtcaagaccaggtaccacaagataaggagcatgaaggatgccgcgatgagttcgtgaggtctaggctgtcgtctcccagtcaactatggttgcggggatcattatcttcgtatgatgtaattatttagctattttgtatagaacttctattaaatagtaaatatgtgatattcgtttctaaaaaatgagtcattatatgtgtgagacttgatcctaagacaaaaaaaaaaaaaaaaaaaaaa

SEQ ID NO: 17458 - DNA, 506 bp, Zea mays
  Clone ID: MRT4577_115923C.1
gggtcttcggggcgagcgccatgttttggactttgttgaggagcctcagaaaaccctggtcttccttcaagatcctggtggatcgcgcccggctccgcgaaattcccttgatgtctatgtaggttcgtcctaaagattcgattttgttggctcttttgatccgacgcagatccgtacggttctcgcctgattctgcaattcaggagccaggaggcttgctggctgtttttggattggtgtcttctcccatggggtcttgcaggtgtaggagggtgtattctgtctgattaatcagcgggaccaggaggcgcatggatctaaacctgtatctcggactccctccattgccgaggcctccagtctggctaggcacagcgatgattgccccgacgttgatgcccaattcgactgcgccggaagccccaagacaggcgagcctgacgaatcgctcgccccggccgcggcagcctattcgccttcgaatgcgctttccacccccgaggagc

SEQ ID NO: 17459 - DNA, 1135 bp, Zea mays
  Clone ID: MRT4577_115924C.1
gctacatttttttttttttttaagggaaacttattttagcatatactgaagatattcaaattatttacagcagtaccttgaacaagtcgcatgcgtgctataaacgaattagcacggctttgaaacacttctctttcttgctgccaccatctctccttttcaacatcagtcccataagactcggctgatttccccatcaaaaggttccaaaccctcgtcgtctcaaaatccaagtcaaccttagcacgaggccgctgctttttgactaactgcaagggcctctcattgggaaccatcaccacaccaccatatgggacaagagcatttgaaggaccacttgttccctcaaaagaaataacagctggtgtggtcagagataaatgcatctcagttctctgcacctgttcagtattcaaatcaagatgcttcaactttgatgcaactccttgaacgtaatccatatagggtcctgttgatgtgttggttgatctcccttctgctacttcacaatgagtatcaacgttgattcttttattgtccatggtctgagatgaaaagtttggagaactctcttctgatattttgcatccattagttgcgccataaaaagtgcttccagctgaaagcctgtccttcagctcatcacttggttgaattacactggaacagtgcggtcttgccttttctgaacgttttttggtcaaaaacttaatgcaagaacttctatgcagcgcatccatgcatggctgtggcagtcttgttgatgcttgtagagtattattcttaagatccatagtataaaagggggaatttctgcggagtcgggcagatcgcttcttttttattgcacccgcttggaaaaatgcgaacatctcagctgcagccctcaagacaacagagtcccgtgtgccaggtagcgaaccattgctatggtgtgtggggttttccacttccgacaccttacccatctgacttcttgtgggatccatttgaggtaaagacctagctgaggaaacaagaccatcagcatcagaatagtttaattccaagtcctttttgttcccttctattgtggggtttaccaccctttcatcagcaaacaaactgcacttacttttgcccctcgtgccgaatt

SEQ ID NO: 17460 - DNA, 724 bp, Zea mays
  unsure (1)..(724): unsure at all n locations
  Clone ID: MRT4577_115925C.1
agaagagaaaccaatattatacctctgtctgcttctcttgcctgtgttctttccctttcttctctcttctctccggtgatcactggcgataatccaccggatatcacaccgcgccgccgccgcgccgcccacattcccagcgcccgctgcccagacccagcgcccgctgcccagacccagcgccgcctgcggttgtgagcgcgaacaggagagagcgggtcttcggggcgagcgccacgcgcagacgtcggttgaggagcctgagaaaaccctggtcttccttcaagatcctggtggatcgcgcccggctccgcgaaattcccttgatgtctatgtaggtgaggnnagggtgtattctgtctgattaatcagcggagggcaagcggctactgtggctgcgcgaacatggcgggcgagcaggctccggagggcagcgggaccaggaggcgcatggatctaaacctgtatctcggactccctccattgccgaggcctccagtctggctaggcacagcgatgattgccccgacgttgatgcccaattcgactgcgccggaagccccaagaacaggcgagcctgacgaatcgctcgccccggcggcggcagcctattcgccttcgaatgcgctttccaccccggaggagcaaccaatgcttgatcccatagtttattcctgcctcgatggcaaccagaccgatggggaaaaacacactgatgcttctg

SEQ ID NO: 17461 - DNA, 172 bp, Zea mays
  unsure (1)..(172): unsure at all n locations
  Clone ID: MRT4577_115926C.1
gcacgcaggggcacaacanggcaagaanccgggcanacnncagcaaanggggcggcaaaaanagangacgcacaagnnaccgaggaangaggaccacaagcagcnccagaaaggncccagnccaccaancaaccaagcagccnnccaaaaancgnacgancacgaanagaac

SEQ ID NO: 17462 - DNA, 264 bp, Zea mays
  Clone ID: MRT4577_115928C.1
gtactgcagcgtcctcaatctgcatgtaccacgtaaagattatcattcactagccatagcatgttttggacagatccatctgcaaagtgttggtacttgaatggcgcatcaggtctcaatatgaagttggatgttggcttaagtcatggactaatgtatatgagcttggacagtgctagctctggcatgtcgcttgggcatgcataccatcaagagagttttgtatctaatcctatagtatgggctccacatggatggtgtggc

SEQ ID NO: 17463 - DNA, 712 bp, Zea mays
  Clone ID: MRT4577_115929C.1
ttgggaccctcgaggccggccgggagaccagtttaccgctccactccccagtccccactaccgccgccacccccagaacacaaaccccgcgcccggccgtaggggatagagagcggaaggaaggaggcgaacaagagcaacccaccggcggggatgcagatcttcgtgaacgcaattacggggaccatcacgctggatgccaagagcagcgacaccatcgccaacatcaaggccgtggtccaagacagggaaggcatcccgctggactggcagcggctcatcttcgcagggatgcagctggaggatgaccgcaccctggccgactactgcatccagaaggagtccacgctgcacctgctgccccgcctccgcggcggcggcaggggtggctacccgctcaccagcgtcccgtaggacctcatcaaccttgcccgcaagcacaacacaacgagagcaagatgatctgccgcaagttcgtatcgagtctctaattctcctggctctattgatctcttatgaaaatgatatgatttggtacagtatgtgttgtgtggtgcgttgtcttgtttaagatccgggtaagtggtaactgaacgtcgcccaagaggtcgctctctgttttcgtgtatatggtcgttgactgcccccaaacgaagtacatgtaatgagattgatgcagttacatgtatgattgtatgataatgatgagtgc

SEQ ID NO: 17464 - DNA, 440 bp, Zea mays
  unsure (1)..(440): unsure at all n locations
  Clone ID: MRT4577_11592C.1
ctccccatanaccggttgatccccaaagcccagtatttatccgacgccgagtaggcctatcgtaaccaccgccgctgactctgcttccttctgcgtcgtccacctccgctgctgctgtcgcgttagttgttgctgatgttgatgaagacgcgttgctcgctagggttcgtgggggggggggatccattcgacaactggtaagctatggatctctcgcggcccgtatcgtcagacctcttggtcgggctgcactcccatgcccacgcgcacgctcgcgtgcacgcggcaaccgcaccattgcgcctgttttacgacacatagccagcacgcctcgtggcccgtgaggccgactcggagagggaccacggggacggtggcgaccaggactaatgatttctggggcgctccctctgcgtgaagggcgctcgctcaacattgaa

SEQ ID NO: 17465 - DNA, 427 bp, Zea mays
  Clone ID: MRT4577_115930C.1
gcgtcgtaagctcggaattcggctcgagctgccgaggtgttggggtgtgcaaacacgacgcagctggagatcctgggggtcatgaaatccggcatggtctctattgtcactggccagggcctatgttgcaccagcgagctagatgagatgtttctgatgacactgctgccgtaacctgaactgtaagagtgcccttcctgtggaccactgcgagtgctagatttgctccaccaagaaaggcttttgcactgcgtttatgtgccccacgagccacaagctcgattgtgctagcaatacatgcagctgcaccggacgcgactgctgctcctattgctaccatgctacatgcgcgctagagaagaacttgatacggccaggtccgacacatgaagggggcgatggggacgaccgatatgcaactgcagtg

SEQ ID NO: 17466 - DNA, 792 bp, Zea mays
  Clone ID: MRT4577_115931C.1
aaattcctatcctcctcctcctcttcctcctccaccagacttcttcggcctcccagcgctaccagcttccttccttccttccttcctcgagaaagatttcgatcgggaacggtggcgtgttcacttgttgtccgcgtgcgcgcgttcccgtttgcgtttgcatggggctggacgtcggcgagatcgggatgcccctcgacctgggcctcgacctcaagctcttcgtcgccaagaccgccggccggctcgcgaaggaggcgcccgccgtcgacgcctgcatccgcggcctcgaggaggagcgccgcaagatcgaggtcttccgccgcgagctgccgctctgcgcccgcctcctcgccgacgtgatcgaattcatgaaggaggaggcggccaagaggagcgagcgccgcgacgccgacgacaacgacaagcggaaatggatgagcacggcgcagctctgggtcgacacccgcgccaccgacgccgccgatcccgtcaaggagcagatgaaggagagctcgctgtccaagccgatgctgctcggcggtgccatcggtgcgccgatggcagtcagctgccgtgcaatgccgccgccggcggctccccagtatttcggcagggacgacaagattgttggctcacaaggcctgcttgctctgcccatgatttctccggctgcgaacaggcagttttctccccctgccgacgaccgtcatcaggccttcgccgcaaaatttgctgcccccatgccacctccggggcctggcttgcagactcatgagcagcagtcgagga

SEQ ID NO: 17467 - DNA, 389 bp, Zea mays
  Clone ID: MRT4577_115932C.1
aaacactaatgttattggaattcttttttttaacaaatactttatctttattaaatactaaagatttatatttgttaattttcccccccggaaaaaatggaattgtttattacagtgtaaaacaaaaattcctgtttatttacaagggggggaacgcctttttatggtggggagaacccaattggcaaaaaatttaagtggggggggttgtgttaaggccaatccctccaaagggaaaaagggggtgttttaaacaccacagcctatgggttttttggggtgaaaaatataaaaaatttggttttaaccccgcgttgttgggcttaaaaatggacatattaggggggtttttttttttttcccaaaaattttggggaaaaaacattttt

SEQ ID NO: 17468 - DNA, 446 bp, Zea mays
  Clone ID: MRT4577_115933C.1
aaccggcaaccaattttttacattttttcaggtcgaaaataaaacagggggccccaatttacattgccaggacccgttttagcctccccccctcgggcccggctaaaaccgggggaaagggcctccattttcccccagcccaccaaaatttttcaaatcctgaacggcctcctggccaaaaactataaatggggggacaaaaccatttttcccctccccccccggggaacaaggaattaaccctttcacgggcgggtttcacaaaagccaaaccattcacattcacccccacataaaactataaaagctttgtcccagggaccggggaccttttttgataccggggcccccttggtcaacccctaaaaagccttaaaaacccgggcgacaaccttgatggcccccatgcggggcaatgccccatcccccaatttttggcccttgga

SEQ ID NO: 17469 - DNA, 487 bp, Zea mays
  Clone ID: MRT4577_115934C.1
gggaccggccgtattccagggctataaccccccgttcaaccccggaaggacaagcgcacgcgagcccacaagacagcacgcagaaacacgccagggggagaacacaccaaggaggagacgcgaccgcaagaagcccaaggcgagccgagacaccgggaaaaaaccaaggccgggaaacgcgacacaaacgcggacggacacccgcgcgcgaccaaagggagcggccgaagcgaacgagccggagcggccccgccagaacggcaccggagccgaagagaagcacacggaggcaaaggcgaagcgcgcggccaacgacaacgacacgaccacgagcgaagagcagagcaaccaacgcccggacgaccaggacacacgaggggccagcaaagacccgggaaacggaacacacacagcggggggaaggaaaaaggaccccgaccgccaggacgtaaggaaggccgaaagacataaccccaaggggcaaaaa

SEQ ID NO: 17470 - DNA, 186 bp, Zea mays
  Clone ID: MRT4577_115935C.1
cgcacaccctaggagaggtggaccaagctcaaaggaatggggtgtatacttagcaccaaaaggaggggccatgccaggcaaggctgaggcattagagtcgactgactgacatgcgaagtttcatgttacagcagtagaggaacagccacaacggttcggaaaatacatggctctatctgaatgaaa

SEQ ID NO: 17471 - DNA, 525 bp, Zea mays
  unsure (1)..(525): unsure at all n locations
  Clone ID: MRT4577_115936C.1
ggcccgccctctttttttttttntttttttttttgtttgggggggggtggggtttttttaaattttttttttttttttttttnttttttttttttttttttttttccaggggggacaaaccggggcttcatttttcattcagggcgaacaaaggggcccaccccaaccgttttatttttattattaccagggggggggggaccgcatgccagctagctcgtcctagtcaaaaaacccttggtttacttttcgggagggggccacccccaccattttttgggggccagctacccctagcaggagccatgggtacaacggggacccccccccctaacaagggagggtgggccctggggcgaccccgagcttctggcaatactttttgtaataccccacccccccctttatttgggggggggtgttccccttgcactcgagggccccctttatggccctgatggggggcccaaaaccctggggcattacacggggcacgttgtttatccaaaaccagagccccctttt

SEQ ID NO: 17472 - DNA, 263 bp, Zea mays
  Clone ID: MRT4577_115937C.1
gtactttcttgctccgctacccacgcgtacgcgctatcgtggctacaactggatgatcgccgtcgactcctacgacagcactcactaccatgtgttctccgtcgacagcaccagctacagacgcaagtgctttagttattatagcgcgagaaccataatgtcagctatttcctctgccacataaagataacagtcggatatctcatggctaaacctgtgataatacgccgcagcaatgcacatagatcacatgagggcatgcg

SEQ ID NO: 17473 - DNA, 324 bp, Zea mays
  Clone ID: MRT4577_115938C.1
tcgagcacgcctggcgttgttgtttttcgcaacatgaaacctaccctagaaagcttcataacggcggggcgttcatcttacacacgatagggtggaagcaccatcgacgcctgaccccgtcatgcagtaaatctaaggccaacatacggcttccaattcattgttctacagcaacatccactgtaaaaaactacaataagctggacggctcacgcacagggacattcaagtgcaagaccgttaacctcccttagacgatggacttcacgttcacaacaacggactctttgatcaaactggagcaagactcgaccgtatatatga

SEQ ID NO: 17474 - DNA, 405 bp, Zea mays
  unsure (1)..(405): unsure at all n locations
  Clone ID: MRT4577_115939C.1
gcgactactaggcacccaccaagcnggacccagagcggcgccttttaacccctaataaacaccccaacaaaaangcaacgagggggacaacagaaaggggaaaaggggaccaggccaaagggacgcaacaaaaagcgcggcccgggaacaacaaacaggcacaaaaccccccaggaaaaaaaaaaaagcaaggcgacaaaacaaggggggaccaaagccaccagcccaaacaccaccgcaagaagcctaaccgacaggctaacacaaaacccagggaaaaggggagcaagaaacccaacaaccatgcaagggacggcacagcccgcaaccccgaaaccccccggaagcaaaaagggacacgaggcaagcctggccaacaaggcatggcgggtacccgaagaaggg

SEQ ID NO: 17475 - DNA, 502 bp, Zea mays
  Clone ID: MRT4577_11593C.1
ggaaaaaaaaaagggcgggggaaaataaacggggggttttttaaactttgggggccaaacccgggtttttaaacccccaaaaaaaaaccaacccggaaaaaaacaactttttttgggctcaaaaagcccaacccgggtttactttttcccaacaggaccagaaagggggcccgggggcccaaaaacaaaaaagggggcagggggccccttccgggggtccttttggccccccccccggcccccccggaggggggcccttaacccaacccgggggggggccccttggaaaaggccccccctttggccggtttcttgggggggggggggccgccccccgggggcttaaccccaaacagggtttggcccaccaccccctggccaacggataaaacggggaggggttttttcccccccagggcctggccaacccgggggggaaaaagcccccggaaccctttgccccggccctttttttcggggggaattttaaccgtgaaggccc

SEQ ID NO: 17476 - DNA, 130 bp, Zea mays
  Clone ID: MRT4577_115940C.1
tcgaagcatagcgacatccatctagctcggccagataaggtatcatagaactctctctggaacactgggtgacatctactaacacaagctgcacaattcattccaacaaatatgatatttcttcaaaaat

SEQ ID NO: 17477 - DNA, 349 bp, Zea mays
  Clone ID: MRT4577_115941C.1
aggaagaaacacattggaggggctcatccggttcatctacaaggccatcaaggagcggcgggcccggagctacgggtactactactcgcggtgcaactccaccggctcgtcgcgcggccggctcggggcccgcgtggaggacagctcgtgggacctgcagcagaagcagtgggagtccgccgtcggtggcaaggcgccggcggtggcggcggcggagcgggagattgcgcaggcgcaccgtcgccaccggtccctcgacgagctggcgtgtgggggtgggcgcctagccccagtgcatcctgctcgactgctacgagtccctcatgtgcccgtcggtgacactgggcct

SEQ ID NO: 17478 - DNA, 795 bp, Zea mays
  Clone ID: MRT4577_115942C.1
tggtaagttcatgctatttcgacattttcacgggctgaaactttaaggtagggttgggttcctgagtcggttgggatggagcagctccgtcctagagattttagggaggctgatcgttcaacatttaaacacttgttagagtcactctatcctacatggaaccaattcaaacaataacaattgagagcggagcagctccgtcccaccatgcttcagtaccaaacactatctaagtaaatcctgatgtaccacatcatcattgctcctactgagttgagaggagtaccagaggagtttgttgtgcaattgatccctcagcatgctaagaagcaatgtgctttcttaggagtttgagaaagcagttcaattttattccagaaaagaaaaaagagagaggatgcagcagttgagaggttacctgagtattgattacttacgttctgtttaaccgcacagtagcattagcctacagtattatcgactaggcaacgtgtgctgttatctttcacgacggcttttacatcgcaatgttctaccacggtggtgggatctttttcaccacattctgtaaagcagaagaagacgtaaatcgactggtcacccgttcttgtggtctgtatattggtctcccccaatcttgagaacacgttcttttgtttttggagatggattcatttcgtatctgtatcactatcaccaaatgaaacaagaactcatgtattcttgaactggattcagttacatgagagtcaaaccatgtcctttcacaaagaaaaaaaaaaaaaatttgcggcc

SEQ ID NO: 17479 - DNA, 383 bp, Zea mays
  Clone ID: MRT4577_115943C.1
ccccaaaaacagatttcatttgggggccccccccaaatgggtccacctggggctggggggctggccaggccaataaaccaggcccctaaaaccccgggccccaccccccccaaaaaggtccaaaaaacccgggcccatgggggaaaaacccttggtttcccccagggcggttttaaaaccaccaaaggaaccccttcccccccttttttcacccggggcccagaccacccccccataacccaatcgggtaagggccaagccgcccaaaaaagcatgcccggcaaagccccgggggaaacccgccccccgggcccccggggtaaattcaaaggtaaaaaagaatggacccttttacggcaaccccccgggggcggggggggggg

SEQ ID NO: 17480 - DNA, 341 bp, Zea mays
  Clone ID: MRT4577_115944C.1
tgttattggtcatcccactcgtgcatgtgcctggctctgtcagctgccagcgccttttgtatgtagatgccgtgcccctgcgcggagctgcaaggcttgatcggggctggcgccggcctgcgacaatgatggcccccaggggtctgtgcccctacctggacgtctctgagtagtcgaattcaaccctcgtcgcggtggtgccctcctactcctggtgttggcagccgagacccttggctgcacagcgatctggtgacagtgctgcctaaaacctgatgtcgatcatggtcgtgctggccgtagcgccacacttaaacttgattattcaatttagatggtgc

SEQ ID NO: 17481 - DNA, 346 bp, Zea mays
  unsure (1)..(346): unsure at all n locations
  Clone ID: MRT4577_115945C.1
gccgggcnaaattcagtcagtcgctcgcaaaaaaaaggtgccaactttagccgaaaagaaagaaaaaaaaacgagcgcggatgcagaaaccagcagcgccaggaagcaggcacgccgacgtacgtgcagtggcgtagtcctccggtggacgacaacgcgtncccttctcgcggcgagcgacggcggcggcgcgacggcggtcaggaacccggcggagaggagccgcacggntggccgccgccgggagacggngccgngggcgaaggtntccgncgcagggtggcacggggtagacgaggggagcgcgcggcggnggaaggggtntggaaggcagggncggaggacc

SEQ ID NO: 17482 - DNA, 418 bp, Zea mays
  Clone ID: MRT4577_115946C.1
atttggcggggagcggcttctttgatgcggtctccaaataggtcatctgccgtgctggtatagtaaaggttaaatcttccgcattctcaagatgtggatcacccttggttgtccttgccagctgtcatgcttttcttatgacataagccaaaagtactggttaaggattgctgatgattgttttccagcatcaaattttgctagcacgtttagtttcccataaggtggggagctagggaagttgcagattgacataagcaagttcatggcgagaaaaccaggttagagtataccttcgattactttagtattaaaaggctcttcacaagtgtcgccaattttattgttgcaacagagcagatcaccttggagcattaagcgtgtttctaattaaagatttaaaccaaattgaagcagg

SEQ ID NO: 17483 - DNA, 350 bp, Zea mays
  Clone ID: MRT4577_115947C.1
cacagaatagggcagcatgggaaatttttggttctcaaaaaacacccacaagccagtaccatgtccatacaaaagtggaacaattccccatacgcctaagtaaggatgggacgactgatgcaccacaacctgcgcgccataaaggacttataaactgtaacaaaagaggccttgaaaacatctcaaagcactgatcattcttaggcacaggtagaacattgaacccttgtcgcgggcaaaaagcttaaacctccttttggccaatctctcactgcgggggtccctttgttctttaaacctgtgggcaagaagcttctggttctcacaagcctaatacttattcttagcga

SEQ ID NO: 17484 - DNA, 472 bp, Zea mays
  unsure (1)..(472): unsure at all n locations
  Clone ID: MRT4577_115948C.1
tcggcatgcacacggccttctatgctttctccacactacttacaaagacctgttttctacaaggtcttgaaaaaacctatacagaagctgagctcactatgggtgacaacagctgcattgatcgatgtgtttcaaagtattgacatgtgactaatttatgctgtcagatgcttgttaaccggcctcagatgtgaaccgagaatcactactctcattttgaagcacaatcctattgctctgactattctttttgcctgacattagaatcccgccacctgctattaaggacaccaatacagcaccagacttgttactgcccgtgtcgctctagatacaaatcactaagacttgacctttccagagatgtgcattatctttgaatacatgacaggnaacatgcctggtataaactgatagaactcgagagggatcctgtttcaccgaagtgcacccatggtgcaaaactggtggc

SEQ ID NO: 17485 - DNA, 535 bp, Zea mays
  Clone ID: MRT4577_115949C.1
ggccggccgggccgggttccactggagagacgtcagctcgtgtgtccaggttgcgtgcggagtctgagagagacaggaaagctatgtagctagcatggactagtgccaggaagaatgtcacatgcggtgtgtggacgctgctgcttctccagctgatgtaagatccgaccacaggccgcctcctgcagaaggaggatgcctcccccgtgtaagggctgtgacatcatggtccagtgactccggacatccacaaggagccatcccctgcgcagaatcctgtgtcttgataccatgcgctacgtaagtctttggatgtcgatgataacaccatttccgcgtgccctattgaaaagaacttctgcttacgtaactagcataggacatatctctgatctctgtgtcgtccttggcgagctataaaccaggtcactattttgtgttatgataaacataaagagggagcaggtcaactgattgtgcacggagatatgataataatatgataatcaagcgtgatagctttgcatgtgtgtac

SEQ ID NO: 17486 - DNA, 419 bp, Zea mays
  unsure (1)..(419): unsure at all n locations
  Clone ID: MRT4577_11594C.1
cgccagtgtgctggtattcgtccttaagcagtggtaacaacgcagagtactttttttttttttttttttttttttttttggcattttttttctttttttgtttattttatttccaacaagtatttttacactgtcctggttggttgaatacaggttaatttctttggcccatatatcaaaaagattggtgaacgtgtttggtggggtgacattatacaccataatgatcccttgtgcccttttgtagtaagagttggttaaggtcctaaaccttttttgttcagttgtgtccaagatggaaagttggagttttttgggtatnaatgctaaccatttttaatttgaagttaatactaatggtaggggagagggtattgatgtatccgggtgttatgcagagggaggaggatggttttgct

SEQ ID NO: 17487 - DNA, 301 bp, Zea mays
  Clone ID: MRT4577_115950C.1
ccacgcgtccggaagagacgccaaagtttgaagagacggcaaaggaagcggagtgggagccagtattcttcggcggctcaagaggagaaggaggaagcggtagcacccgctgccgagacagaagcagaaccagcagccgctgagcccgaggctgctgctgctgctgaggagcccgcggcggctgagccggctcttgaggagcccgagaaggccgaaccggccgctgaggtggcctataaggtcaacgagtgaggccgtgcgccgtacgcacactgcagttgttgacagcgggtcgggagat

SEQ ID NO: 17488 - DNA, 342 bp, Zea mays
  Clone ID: MRT4577_115951C.1
aattcggcacgaggtgcttataggcttatgataattacaaattaaccatatcaactttgtgctataatagttcaaaattgttagtcaaagattgtgaggtttgaatcttgatatgcatgtgcgccttataaaagagaatggagtataagtatataataataactttgttcgtagaagaatacgaaataagagatccgataaccaaaagtcatacatgtatgcacaatatcacatagctttgccctaccatctaaaactgtatattaaaattgtcagatgggcgggtactgcatatagacgagattacattgcaaattgaaatgaaggcctactatacatacc

SEQ ID NO: 17489 - DNA, 473 bp, Zea mays
  Clone ID: MRT4577_115952C.1
gcccgacgggcactctttcttttttttttctgtttttcgggagacaaagctccttgttgtgggcaggcaagtcgatacggctgtactgatgccacagcgcctagagggctgttgtgcttgaaccttgggcaccgcccctgacggcatgtaggttttggacgtctggcttcgcaatagtaggtggcttgcctggccgcaattgttgcagttgtaaaatggggccaccgttaggcatatcgtgcaggtagaacggcagcaactgttgttgggtcaggaaggcagcagggctcacatcagttagctggctgaatggtagcagttgttgctgctgtgaataagctccatagttaaatgctgctagttggttgaatggaagaaattgctgggggtggccatcagctagctggctgaagggaagtgggcggtggagagaagcgggggcgtttaacgcagccagtcggggtgaatggaag

SEQ ID NO: 17490 - DNA, 687 bp, Zea mays
  Clone ID: MRT4577_115953C.1
atgacactcgccacatgtgccttccagcaggttgctggcaatgaagtgttgctttctcgctcctcgacgaccaaggagcccgaaaaagctgctagaaaaaggtatttatatcttatgggaagaaatccagtgatggctgctgctgcatctaataaaacttcatccaaacctggattgaattatcctggcctggaagaacaggcccttcagtttatcttggactgctgtgaatctaatatagaaaaatatacaaagtacttagagtggttgaacaatttacccttatgtattagagtttctattacaacattcttaccggagtcagatgttaaagagaagggggtgaaccaagcacaaaaacatcagctcatgctcatgtggtattttaagccctgcctctacatggatgccggcctcgcttccgcggtcaccgcgctccggacctgcagcgatgtcgcgcacctcgctcacgtgctcgagcagtttcgcctcgcctggtgcggcaagctcgtccgggacgcccgcaccgtcgctccgtcaaggacctctgcttcgacctcttcatcattaggggtggaaacagagctttcaatgcatgctggaggtgcacgatgtgatcgatattatccatgcttgataaatgatgacaatggtgatggccatgatatatggtcaatattgtattga

SEQ ID NO: 17491 - DNA, 463 bp, Zea mays
  unsure (1)..(463): unsure at all n locations
  Clone ID: MRT4577_115954C.1
cctcgaggccggccggggaaagttccaatccaaacagtgcctccatcatctagcaacccggcatctgctgctgctgctgctgcagctgccgccgccaccacagccgcagctacagctactgctgctgccgccaaggctaaaagtgctccagtgggatcttagcaggacaagataagctggagacgtgtagcaaacataactttgtactgccagattgagatgtgcttaggtatttttttttcaggttttctcagttggaggaactcaactcatgcacctcggagactagttgacattaaagtatatacattttcttttctcattgtttgtccccaactcaatctggtactctcactcgatctttttctgactataaattataacaaattaccttgttcaattcnaaaaaaaaaaaaaaaaaaaaaaaaaaaaaaaaaagaaaaaaaaaaaaaaaaaagcggcc

SEQ ID NO: 17492 - DNA, 1878 bp, Zea mays
  Clone ID: MRT4577_115955C.1
cccacgcgccgccactctctcctcttccctctctctgcacgcgcccaactcgctccgggctccggtcatccaccgtgcgccgttggctactcgcctgctcccatgctccctccggatctgccctctcggtgatttggcacggtggctctgcgcctccacacctgatcgtcggcctcctcacctccacaagcccacaccgtcgccatcgccccgctcgcctcctctgccaatggaccgaccaacctcggctcctcgctctgcccctccctcccaactcctacgatcaaagtgcacagcttcgccggccccaatgtggctctgtcgaccctccgtcggcacccacgcacaccacctcgactgcgcgtagcctctgcggcaccgccgccagggccgcctcttccgcgatggtgcgtcgcccttctccgcctccgcagcggtcgcctcactggaggttgcgctgcgatgggatctgggaaacgcagacagcctcaaccacccacgtggattgttgcctcggcggctgagatgcagcgccagggggccagaggaaacgacgtgatgaacctcccgtcacaactatcttttgcccttttgagcttactgcattactcccgcacttgtttttgtgaatttttcttaaacactatgcaccaataattgtatctccacttttgctacatggcctgataaatacgaaaacccattttctatatttagttcacctttatcttttcttctaatgtttatttttctctagatcaaacagctaaatgtgttcaccgttgcaggaaaagagtagttgtagttttctggtgtacagccaataggattggtccaccttggaaattatctcgacaaacatctgtaggaattacaaaatagttttctgttggaaattgagtttgctttaagttctcaactaaaataagtgaagagaaactaaacttgtcttcatcttctgaagttgagtaaatgaaagagtgatacatgtttaatcaacagagatccaatctgttgaatgtatgtcttcctttatgtttgagcaactactaatgttttttatatcaaacatgacatctattatctgtgagattcagtgacctattatcaccaaatcttctcttgtatgtttcaactgtttgaacttatttttgatatagctttctaatgccatttggtgtgatgtgacagtttagacagtctactttatatatgaaaaaggagagctttaggtgttcacgagaaatataatttgccatcaggaaaaccaaagttaacaggaagttcaatgttcaggctggggattaaaatgaggaacatgaagatattgcttcgtagcctagaaaggaacttgggggatttatagcaatattagtgtgacattttccacaagactgagaggaatgtggtaaaacagtgtagagaggaagatgccaactgtgacaacacacagacagttgagcaacaacagccctctgacgacagacagacagttgagcatgctcctcttcagaaaactgatctaggcaaagagacacatgtttcagaggctaaaacgctcacagcagatgctgatggaaatttgagctcaagccagcaaactggggagtacaatgaattgttgagacaatactattaaattgttgcttaattttaaattgttcattgtaaaatagaacttattgtggctgatcatttctggagcttttgtgaatgattctagctagctatctgtaaatgatatagttgtgaatgatattataattgtgatgtttttgtgaatatataattgtggtgcttttgtatttatgtgatggatctatgactgtggtatactgattaaaaaaaaaaaaaaaaaaaaaaaaactcgagaagggg

SEQ ID NO: 17493 - DNA, 408 bp, Zea mays
  Clone ID: MRT4577_115956C.1
ggccgcttttttttttttttttttctttttttttttttttttttttttcttttttttttttttttattttttttttttttttttttgtttgttttttttattttttacactctttttttttttttttggcgcacccgggggctattgcggctacagtgaaccaggccaagggcaggggacaaaaacctcttatcccacaacttacagggggagaggggcgaacacacaaaaggggcgcaaagaaattcctcccgtcgacagacttacgccctctctccacggaaccttcttggggggagaagggcctcgcccaaaaagggcaccacgcttgtttcgccctgggcacagatttgggctctttgaagagaccatccttttagacctttgttgcctcctgcaaagaaagca

SEQ ID NO: 17494 - DNA, 152 bp, Zea mays
  Clone ID: MRT4577_115957C.1
ctgaattcggctcgaggtccgccattacggtagttttgatggtactcctcactactagcccacggggatatggactgcgcttgggcagataattacttaaacgagaaggatgaggttaacactttagatctattttattctaacttatcttt

SEQ ID NO: 17495 - DNA, 173 bp, Zea mays
  unsure (1)..(173): unsure at all n locations
  Clone ID: MRT4577_115958C.1
gtactcggtctcggaattctccgggttcgtacccacgtcgtctcgtcagatgaagtcttaattgaggggttatctcccaagnggtcgtacctgtcttcgtaaaggaaagtactggtggagttccactttaagtcgtaagatgggatgaaaaacatagtctctatgannattag

SEQ ID NO: 17496 - DNA, 1146 bp, Zea mays
  Clone ID: MRT4577_115959C.1
ctaagcccaagccgccgcaaccacgggtgcagctcgttgccgcgaggggcgatgtcttcgcggtcccgtcctccgccccgccgggccccccggcccccatagccttccgcaagcagtcccggccccgcccgataactgacgaggaccatccgatctctgcccttcctgcacagcgtccccacaaggacaaaaaggacaagatcgccaaggccatgaagcgccgcctggcggagcgcgccgcggatgccgacggtgagaggtgtagccggaccgatgtcaccgtcatagacaccagcatcgatggctggaaggccgccaaggtgctcatccgccggggagacgtctggaaggttcgtaacaagaagccttccgcggtgtctgaactggaagatgccattgccaagggcaagaggagggctggccttgtctctaagcttcagagagacaaagagaaggagaagcagaaggagaaagaagcaatcacatcaggaaacactcatgctggcagtggagatgtgacaaagactcagattatcctattcaaaccccgaaaagatcttagttctgtgctagaaccagaagggccaaagtgcatgaatttttcatttgcagacaacatagaggcaaggaaaacgagtcagacagccatatagctgacttgagaaggaattatggacaaggcacattgagacaaggatgccattacattgcaattaacatattcagtttgattattgtcctactgatgttttggtgtcttaaatggaccctgttagaagttcaaaaaaattccaactgcgaataactggcccttcggggccaggaagatatgtttgtggatgaacactcgcgaggccacatgactgttacttttgtttcttccccttttttttgtagaaaaaggtcaaggctatctaaatgttgtccggcaattgttggagttgatggaggttctgattcgtttggtcaatctggccagtcgatcgtgtactgcaaacccatttgggtactgtaaatgttatgttgataatgctacctcagttgctgtacaagttgagttggcggtatttagccaagcgtttccaggaaagcttcaataatgataaatattgttaccgcggtttcaaaaaaaaaagggcggcctgc

SEQ ID NO: 17497 - DNA, 1592 bp, Zea mays
  Clone ID: MRT4577_11595C.1
ctggccgggcaatggtggtagagttagcagctgggcatgcattaacttctcacgaaatgtgcaagatggtgcggctaggagtttctgtcatgatctcgctttgatgtgccaagtatcaggaatggattttgcacttgaacctgtgctgcctcctgtctatgcgaggcctgaacatgttgaaagagcactaaagagactttatcaagatgccatgagcatactcaggcctcagggccgagagcttgacttgctgatggtaatactgcctgacaataatggctctctttacggggatctcaaaaggatatgtgagactgatcttggattggtctcccaatgctgtctgactaaacatgttttcaaggcgaacaagcagcagtatcttgcaaatgttgccctgaaaataaatgttaaggttgggggaaggaatactgtacttgttgatgctttggcaaggagaatcccccttgtcagtgacgtagctactattatctttggtgctgatgtgacccatccccatcctggggaagattctagtccttccattgcagctgtggttgcttctcaagactggcctgaggttacgaagtatgcaggattagtgagtgctcaaacccatcgccaagaattgatacaggatcttttcaacgtacggcaagatccccaaaggggggctgtctctggtggcatgattagggaacttctcatttctttctggagggcgactggacaaaaacccaagaggatcatattctacagggatggtgtcagtgagggacagttctaccaagttctgttgtacgaacttgatgccattagaaaggcctgtgcatcattggagtctgattaccagcctccagttacctttgtcgtggtccagaagcgtcatcacaccaggttgtttgttaataatcacaatgatcagcgtgctgccgatagaagtggcaacatactgccgggcactgtggtggactcgaagatttgccatccaaccgagtttgatttctacctgtgcagccatgctggcattcagggaacaagccgtcctgcccattatcatgttctgtgggatgagaacaaatttacggctgatgggttgcaaactctcaccaacaacttgtgttacacgtatgccaggtgcacacgctcagtatcaatcgttcctcctgcatactatgctcatctggcagccttccgagctcggttttacatggagccagatacaagtgacagcggatctgtggcgagcggtgctacgacaagccgtggccctccaccaggggcgcgcaacaccagggctggtgctgcaaatgttgctgtgaggccattacctgccctcaaggaaaacgtgaagcgcgtcatgttctactgctaagattgacgctgcgctgatgctgtgagcaagcaattatcgttatggtggtgatgctaggacaccgttatgcaccggtaactttaatacattttgtactgtaactacttgtatggcattggaaactgtttgcgatatactcctattaagatgggcttgtcgtggattagattgcaaaaaaaaaaaaaaaaaaaaaaaaaaaaaaaactcgagaaggggc

SEQ ID NO: 17498 - DNA, 265 bp, Zea mays
  Clone ID: MRT4577_115960C.1
ggcgttgctgtcggtgagaacgcgggtggcgacgacggtgtctgtggccacgtcggggtccagcacggaggccaaggatgggaagaagaccgtgcggcagggcgtggtgttgatcacgggcgcgtcgtcggcgttgggcctggcggctgccattgcgctggctgcgaccgtgaagtggtacgtggagatggcctgccgcgactttctcaaggcagccaatgtgtgcatgggcgcccgcatgtctgactgcagctacaccatcatg

SEQ ID NO: 17499 - DNA, 399 bp, Zea mays
  Clone ID: MRT4577_115961C.1
cttcgggccactcacgctaccgacgcgaccgaccaggtttgactgtctggaccgatgctctccagtagttagctagctagtaacagaccagggaggagaaggcgctgtacaccatctatggagaatgccagaactagccagtcaggctctacggccagaacaagtggagcctgccaacatccaccatgagagtggactgcaccgtcattacggttagacggacgctcaataaactgcgctattactgcctgtgcaccggctgcagctagaccatgcacactgccagcgctacgcgaccatatctgcctgtaaagcatacactgtgttagcgctaggaagcacatgctcgcctgaatcttctctatacagaactaagggctaaccaataccctggaatac

SEQ ID NO: 17500 - DNA, 448 bp, Zea mays
  Clone ID: MRT4577_115962C.1
atgcacccccctatctattgtttacgtacgtgctgggccattaacggttcatggatcatgatggtgttcggcttttggccgcagttctgaggtacggtatcttggtgatcgacctcgaccctgacaccaagcattttcttaagcttgcctgaggttagcgataagctaggtagcagcactgatggatgcatgcattttgtacgtttcaatatggacagcagcacttccatgggtcaccacgtttatcgcagtagccgccattcttagcagggaagttgtactcttggcaaactttgccgcagtgaaatggcctgcagtattcacgatcctatggaaagcagaatggtggccgtaacctgcggacgacgccgtctgccaaaagaaacgtttgctcacccgttatatatatatagttgattagtacatacatatatatatatatatatat

SEQ ID NO: 17501 - DNA, 464 bp, Zea mays
  Clone ID: MRT4577_115963C.1
ggaagggccccaaaaattcggggggggaaaaggggaaaccaaaaaacgggggtttaacccccgccccccaatgggtaggggtaaaacaggctaacagacttacaaaaaacagggatccctatgggcaaaacagggaaaaaccaaaggaaaaagggttaaaccccaaaacaaagggaaatccccaacattagccccaaagcaattagcccaaacggaatgggaaaaaagggaaacaattatttaacattaaggcggaaggccattaaccgggacgggatattcccaaaatataaaatagaaaataaaaggaaaaaaaaaagcggggaccttttcaaaaaaggaaaatcagggggacgggggccccaaatataatatagaatatagaatatagaaccgcggggaaaattggggaacgggaaccaaaattttgggccgcttcaaaccagggggggaaaagaaacccc

SEQ ID NO: 17502 - DNA, 3185 bp, Zea mays
  Clone ID: MRT4577_115964C.1
attgggacctcgagccggcgggactttaccttcgcacccattcccgtgagcgccgccggcccgcccgagcccaaaaccagaccactggcgcgctgctattttccccacacggaccctcgccgccgcggcgatccctctcctccacttcctcatcacaacattcaagaacagaccggggccttgcgcaaaagaacaaaaaaaatctcagaacacacacacacacctctatcgccccgacctcgacgcgacccctctcgcttggatccggacggcccggtccctccgccctcccatgcgcacggcgccgccgccgccgccgcacatgacgctcgcctccctcgcccgcgccctcggccggtccgcgcgctcctcccgcccgcgccagggtttccagctcgggggcctccggcagccgcccgcgccaccgctaccgccgcccgtccacggcggtgagggtggggcggcaggatttgttcgcagctacctgactgcggcctcgtcggcagctcttgggaagccatccgcgggcaagaccgtggattggagatatgtcctcgccagcccacatttccgacgcctcttctcggacgggtccaagaagaactacgagaactattaccccaagggtaagaaggaggtgcctaaaggagatggtacaaacaagtctgaatctaagcaggaatccaatacagatgaaggatggaattttcaggataatgctatgaaacacatgcagaatttccttgcgcctttattgattcttggcctgatgctatcatccatgtcatctagctctgcagaccagaaggagataagcttccaagagttcaagaacaagttactagaacctggtttagttgatcgcattgttgtttcaaataaatcagtagcgaaggtctacatcaggagttcacctcatccaaagagccaaggccaagatagtgatatccatattactaccactgatgctccaggcaagcctgctcccagcagatgcaagtattacttcaatattggtagtgttgatttgtttgaagagaagttagaggaagcccaggaagctttgggaatagatccacatgattttgtcccagtaacttatgttgctgaagtaaattggttccaagaagttatgaggtttgccccaacagcattgattgttggtctattatatttcacgggaaaaaggatgcagagtggtttcaatattggaggtggtgctggcaaaggaagaggaggtattttcaacattggaaaagctacagtgatgaagatggacaagaactccaaaaataaggtgttttttaaggatgtagccggttgtgacgaagcaaaacaagaaataatggagtttgtgcatttccttaaaaaccctaagaagtatgaagatttgggagctaaaatacccaaaggtgctctacttgtaggccctcctgggacagggaagactttgctcgccaaagctacagcaggagagtctggtgtgccatttttgtctatttctggttcagatttcatggaaatgtttgttggtgttggaccgtccagggtacggaacttgttccaagaagctaggcagtgtgctcctagtattgtattcattgacgaaatcgatgctattggtcgtgcaagaggacgtggaggtttttcaggttcaaatgatgaacgtgagagtactttgaaccagctgcttgtagagatggatggatttggaacaacttctggtgttgttgttcttgctgggacaaatagacctgacatcctggataaggcattattaaggccaggaagatttgatcgccagatagcaattgacaaaccagatataaagggccgtgatcaaatattccgcatatatcttaaaaagcttaagttggacaacaaaccatcattttattcgcaaaggctagctgccttgacacctgggttcgcaggagctgacattgccaatgtttgtaatgaagctgctttaattgctgcgagaagtgaggaaactcagattaccatgcagcattttgagtccgcaattgataggattatcggtggtttggagaagaaaaatagggtcattagcaaactggagcgccgtactgttgcttaccatgaatctggacatgcagttgctggatggttcttggaacatgctgagcctcttctaaaagttacaattgttcctcgtggaacagctgctttaggctttgcacaatacgtcccaaatgaaaatcttttgatgacaaaagagcagctttttgatatgacatgcatgacattaggtggccgtgctgcagaggaggttttgattggcaaaatctcaactggtgctcagaatgacctggagaaagttaccaaaatgacatatgcacaggtcgccgtgtatggttttagtgaaaaggttgggcttctgtccttcccccagaaagatggtggtttcgaaatgagcaagccttacagtaatcagacagcatccatcatcgacgatgaggtccgggaatgggttggcaaggcctacaagaaaacagttgaattgataacagagcacaaggagcaagttgcacagatcgcagaattgctgctcgagaaggaagtcctacaccaggacgatctaaccagggtactaggagaacgtccattcaaggcactggagccaaccaactacgacctctttaagaaaggtttcgaggatggtggtgacaacagccaagcaccagcagagaacgccgagctgcctgatgattcatctcccccagttggtgacgttgtacccacgtagtgtttctctcctcaacgtcagagctgtacattgagcgctcattctcgatagattcttgtttgttggttgcatcataaaaaagatctgtataaattcgcgcccaagctgattatgccactgtggaaatgcatttggatttccgtagtgtcagtccggtcgatagggtgccttgggttcttcatggcacgagcaaatgttctgattcttgtattcgaatgttttgaaatattctgtctgacgggactgcggagttggcgcgagaagtgtgcttgttcagttctatctgaaggcttagctgtctgtagctgtagctggtaacaacagtggctaaaatggtacctctgaaatctttgtgacagtaacaagccattttcctttgaattttaaaaaaaaacaatacgaaaaaaatagaatg

SEQ ID NO: 17503 - DNA, 573 bp, Zea mays
  Clone ID: MRT4577_115965C.1
gccggccgggggccgggatcccgcactcaaagttgtgctgaagagggtgcctcgacgtcgtggcatgtaaccaaagttgatccggcggaagacgtggagagacgacccctcacaaaccacatggaggagatcgagccggcgcaaggagtctgagcgagctgcaccgccacagagacagaatactcccaagacatcaactccttgcgttacatgtgcgctccaaagactggaccgattcgctaaaaccagctgcgcccccaacatctcaccagaatagccgaggtgtgccatgaataaagaggtgcagtctaccagcgccgacgatgaacgaacctgatccgtgaagcatgcactgtcctgacgaaggtcgtctaaatccatagaccctcacatcacccggaaagatggccacatgacccggaagaacagagtgtgcctggggctgcattgatttgttctctagcagttatgtggtagaagcctggctgtcactgacttatatctggcgctgtgtgcgtggctgtaaattagctgctagttgtgtatgtagtgagcgagtcccgcctgtgggag

SEQ ID NO: 17504 - DNA, 477 bp, Zea mays
  Clone ID: MRT4577_115966C.1
aaaataagagatttgatagggaaagcttctgaagacatagacaaagacatagggggaagtttaaaataagatgcgagatttgaagggcaatagaaggggggggggccttaaaaaaagcaagagtcacccagtccaaaaaaaaaaagagacccaccacgggttggggataaatgttccagcccacgtaagggctatgaataaatacaaaaacatgcaaatatgtccaaacccttggtaaaaaactggcccaaccaaaaaaaactgggggggtaaatacttatttttcgtttttaaataaacgggccaaaaaaaactgggggggcggggcgttttaagagctttgcaaaaaaactggggggtggggggcctccctccaaacaaacccttggtaggaaacagcccccccccccccccaacaaaggagggattttagaaaacgtttgttatccacccctcccggaagaaaaaaaaaaccaa

SEQ ID NO: 17505 - DNA, 796 bp, Zea mays
  unsure (1)..(796): unsure at all n locations
  Clone ID: MRT4577_115967C.1
tagtgcatccactctaacatggtatcaaagtcagatgtctcgagttcgaatcctggcagaggctttatttatgccttcacccatttatttctacgtatgctcatttctctctggctacacgtgagtgggtgttgaagtgtataagtagattaactaccttctcccctcagtttaagcttttgggttggactggttagtgcgtccactctaacaaacccaagtccatggtttgtcgcgtaccgtctggaaatatatctgcaacaaaaggaagtgttgttgagaatcatttgtgagacatttagttatgcttcaggtatagtgcttcaaaaacacatatatagttaaaacacagatagtttatatgtcaaggcagaaaactggcccttcctaagttcttatggaaatcaacgcaaaattagattatgaaatgggaacttctgcgttcttgaaataaagtgttagttgagtaatcacttttgtctgtatgtttgcaaaattatgtttcatgtttagcactgtcacagcaatgatcagcttacaaattgtcacgttctctcaatccattcatgttagcattttctttgcatagaaacaaaataggaaatcatatggattggatttgtgantttaagttcgacttatactaacttgcaagcaagaaaaacgcaagagtgtacacttcttgatacgttgatgttttgaagttcatttttattgtgtaacgcaataactgaaatcttnttagatgctctctgtttcatggnctcgttttcctgaaaactactaacattatttc

SEQ ID NO: 17506 - DNA, 1062 bp, Zea mays
  Clone ID: MRT4577_115968C.1
cattgggtacctcgaggccggccggaatttctctcgccctgcgcccgccatgcctctcatcctaatctcaggtttcccttctgcgggcaagaccaccagagcccgacaactcgagcaattcttcgagtccaagattgccagcgctcctcctgatgcccgcacgtcccgcctcaaggtgcatcttatcaatgaccagactctcggtgtgccgcgctccgtctaccgtacggccagagccgagaaggatgcgcgtgcggaagaatattctgccgtcaagagagtcttgtcacgggatgatattgttatcgcagatggcctgaactacatcaagggctttcgctaccagttgtactgcgaggccaaagccctgcagacccccagctgcgtgctgcacgtaggcacgccgcccgaccgatgtcgcgagaacaacaagaaactcttggcggacgaggggactgacggcggatacgaagaggacgtctttgagaacctcatcttccgatacgaagagcccaatggcatgacgcgctgggacagtccattgttcattgtggttgaggaagacgagacgccgccatgcgaccagatatgggaagccatgattggcagtgacggcaagttgaagactgtcaagcccaacctggcgacagtgctgaaaccagcgaccgagcaaaattacctctacgaacttgacaagacgacgtcggacattctcacgcagataatggtctaccaaaaagatcacgctggtgaaggaggcggacaaatagctgtagcagatgtcgagaagcccattgaactgcccgcgacgccaatgactctcccacaactccagcgcatacgacgccagttcatcaccctaaaccgacaacacagcttttccaaggcgcggataaaggaggtctttgtcgactacttgaacgccgagtttctgcgttagaatgattgtagtcatgtgcagggacagcgtcgtttccagggctactatagtcaaataaactatatagtcgcatcccgatgtcggaattatatccccaatagacaaagaattgcgtgatcccc

SEQ ID NO: 17507 - DNA, 810 bp, Zea mays
  Clone ID: MRT4577_11596C.1
gaaggtttggaaacgtggcgtggtttctatcaaagcataaggcccacacagatgggtctttctctgaatattggttagataccatcgctctcatttattgggtcatctaccttctatttttcaaacttgatacatgaccataatggaggagcacactacattctacatcatgatgcctatggatgtagtttgtggcatcactatttggtcttatctgaaaattgagtttgtgtaatttcttttttttcgcagatatgtcctctactgcatttattgagcccctccctgcgattgattgggttgcaaactctcaccaacaacttgtgttacacgtatgccaggtgcacacgctcagtatcaatcgttcctcctgcatactatgctcatctggcggccttccgagctcggtattacatggagccagatacaagtgacagcggatctgtggcgagcggtgctacgacaagccgtggccctccaccgggggcacgcaacaccagggctggtgctgcgaatgttgctgtgaggccattacctgccctcaaggaaaacgtgaagcgcgtcatgttctactgctaagattgacgctgcgctgatgttgtgagcaagcaattaacgttatggtggtgctgctgacacaccgttatgcaccggtaactttaataccttttgtactgtaactacttgtatggtattggaaactgtttgcgatatactcctattaagatgggcttgtcgtggattagattgcactattggaagccatcaatccagtttttttttgaaaagtatgtaggtacgtccggtttt

SEQ ID NO: 17508 - DNA, 346 bp, Zea mays
  Clone ID: MRT4577_115971C.1
tgcacccgtgcgtccactcgtatcctctagcagccagattagctccctcgttacagtgcagcacgccgcctgttatgcggaggaagaggcagccaaaacaaggatgcagatcggctgccgcatcaagaagcagcagcagctaggcgatctgctcctgacgaaggtcaaggtctatatcgtcaacccgcacctgctgctcctggttagcggcgccatcgcctgcgccctgtgcagaacatttatggcgcctcttgagactaaccgcactcacttgattgtccgcttcatcggcgtcaactccatggccccagtgttccaattgatcatgcacaaccaacggtggacc

SEQ ID NO: 17509 - DNA, 330 bp, Zea mays
  Clone ID: MRT4577_115972C.1
tctcgatggcccgtagatagggatgagtatcctaataacggacgcgtgcgtagagcgagccttgccgaacgcgtggggatgcttgccgacgatctacgtctatatcgcaccacgaccctacctatgtcgcttgcacagactccgaccgtcatcattaaatatacctccatcacccaacactgcatgaagaagctccccgccgtgctatcacgagacgagctacaactgtgacgagtgacatcttcaagtacttctcaaagggacaaaatcacgaagtgcgaaaatgttgtttaagcaactggagaaaaaatcacgatagttgtcctggac

SEQ ID NO: 17510 - DNA, 342 bp, Zea mays
  unsure (1)..(342): unsure at all n locations
  Clone ID: MRT4577_115973C.1
gccgcgggggcgaacgggccaagaacgcgcgcgngggggagggcnngccggagcggggccagcggggcgagcngncccgggaagccaagcgcaggancnngaaaaaaaaaacaggggggggggggaggnnaganngcagaacagggnaaagccgagccggccaggccggcaaacgcgaaaccaacggacagcgagggcgaggagcngcaaccnncacgaccggaccggggaacaccaaancggcccccagggaccgcagcaggancggcngggcgagcgagnacncggcgggcaggaccgcgacgaaccgggagccncgggccagagcgangnccgccaggg

SEQ ID NO: 17511 - DNA, 407 bp, Zea mays
  Clone ID: MRT4577_115974C.1
gtgtgtgttagctcagcacattgcaaagggaaacgaggatggtctgatcataagctccgttgcctctagagcaaatctgtgggctatggtgatggctgctggcaccggatatactcttcacgcgcctgaactgactgcatatttattcgacaaggaatggatcctggaacatggggagaagaacttctatattacgtgcctagcaggtgcagacaatggcagtgtcactgctggtcacgaccagaggtgaaacaatggtgcctaggatttgacaaactacttcctgtgtaaaatggtgtaacaatatttgagagtttacctattgacaaatcgagagtacaaagttgtactttcggcactcaccatgacatggtagcgagatataccatgctcgactaacgttgcat

SEQ ID NO: 17512 - DNA, 393 bp, Zea mays
  Clone ID: MRT4577_115975C.1
ccctcctatcatatttttccaccctcatcccattcatggcttttcgtgtacaaccctgttggggcggggcatcgttggtgcttgggcgagttcactcttcgtctcgggcaacgccggcgccgtggcccgtcggatccttgagaagctgccgcccgacgccgagttcaggctgcgcttgcggcaggaccggtacattttccacgtcctccgatcctacgccgtcggcatcacctgcctctggatggccaacgacaccttccgaagaaggatcccctttttctacctggaggacatcccaatggggttcatgatataactacggtcagagtctcccactctgcgctggcttactccatgaacgatgaattctccagtatgctccatctatcaatg

SEQ ID NO: 17513 - DNA, 390 bp, Zea mays
  Clone ID: MRT4577_115976C.1
gagccttgaagtaccaaagtaggacgtttttctagtacagtaccaaaagaggaaactataactctacatgaagagtcagagcccaaatttagtggtcatcctgtccagattccaacctgagaagtgatgttatcaaacatatacagagtcaatgtgcaactgagaagtttctagttagatgaagttaaacaactgtgtcatcagtttcgtactcccatcactttgtttggttgcaccatagatcatcagctatgaactgcatccatgtgttgtctttaccgtgctcatttgaaccagatgactgtccagcatccctgatacttgtaaactgttcttggttttctttagattgtgatgagctgcactcgccttgcttttgcttctgaagct

SEQ ID NO: 17514 - DNA, 211 bp, Zea mays
  Clone ID: MRT4577_115977C.1
ccggccgggattattcccaggccacaccgctctaactactcttcaagagacgacgaccaacaggcacgtcgatcgtcttccggcgaaggcgacggaaggatgtccggcggcgagagtggtccggcagcgtcggctccggacgttccactgctgcaggcgccggactgtcgtacaacttagtcctcttctttcaccattaacaggtggatcg

SEQ ID NO: 17515 - DNA, 970 bp, Zea mays
  Clone ID: MRT4577_115978C.1
cctcggattttttttttttttttttttttttttttttttttttttttttttttttttttttaaaggcaactaatttcataaataggggtaatatatcaaataatgttgacatcccaacggcccattattccaccaaacatgaaaaacaaatttacaagtaaagggtttttacatatgctagcaaaaaaaaactaaaaaaataaatcctgcaaatgtcaggggaggtttaacaatttgcccccctacaggccatgacataagtaaaaataattcatttcaaatttttgcgttgggtttttaaactttcattttttttatggaatctaaaaaaaatgatgactgttctttgcttgatgatgattttgcaaaagggttaactggcctctgaggctctgctcgattgcaatatttagtgctctctttttttgcaccagtatgatcaatgcctccttcctgattctgattttcactgtttttaggtaccttggcaaatggaacagaggcagatgaatctttttgagttctatccttaatttcaatccctcgttctcctgctggcttctttggttcagttgaattgcattgttgattgacaatattgagtttgggtaatgaagattcaagcgaacggttcccatcttgcataaacatagaaggtagagttgcctgagtggtcagcactggtgtgttcgtcatgattgtagcattagagcaaaatcctcctgctccagctattattttatcatttaacaccctctcctcaattatggagctgaacttctcttgcagcatgggaagtttcaggcgtgtcactagtgatagagctcccttcattgacttctctagtttcaataatcttgcaagctcagaagctcgaacgagcttatcaccactgcagcaactagagataagcctcaaaatgcaccggtcaagtcctgcctccatgttgaacgattcatcatcatatgaa

SEQ ID NO: 17516 - DNA, 662 bp, Zea mays
  Clone ID: MRT4577_115979C.1
ctcgagttttttttttttttttttttttttttttttttttttttttttttttttttttttttttttttttttttttttttttttttttttaacggaaaaaaaacaaagccctttttttcctggatttataaaatttggcccccggccccgttagaaaaacccagtttttacaggggggggattataaggaaccatccctggaaacagggaaaattttccccttcggggaaagggccccccaaaaggactcgcccagggcccccccgggggaaaaccccggacccccccaaaaaaaagggcccaggaaagggcccaaaatgacccccgggggcgaaaacccaaagttcccccgggggaaaaccccccggccgggcccaaagggaaaaaaccgggggcccttcccctttagggggacccccaggggccccggttcttgaaaaaaccgctcgggaaaaaaccccccgggtttcccccaggggggggggccccccccgaccccccagggtttaaaaagacccccccccccgggtggaaaaaaaaacccgccattctcggagtcggggggggaaaatggcgggaagagaaacccccccggggggtccacccccaacgcctccttgaggggccccttggaggaaggcctgctcccggggccccccccc

SEQ ID NO: 17517 - DNA, 514 bp, Zea mays
  Clone ID: MRT4577_11597C.1
gggaccctcgaagccggccgggagctttttcttttcattcccgctttctccttccttctcctcctcccagctcccctcgtccaagcaccgtccatgtcgtaggagacgcagtgagctccaccgattctccggagcctccggggtcgacttctaggacaccgtggtcacgatcaccctccgactcccggaatgcgcgccgtcagctgtagtggctgcagcatgcctgtccctctgatgctcctacgcctgcggattacacgattgcgaccggagatgaggctcctcagacctccatcacggacactgctgctgggaagcagggccctccggctgtgtatggtgaccctgagctcagtgtgatgcgatgagcgacgacggggacctaccgcaagaacgtgctcgctgacgacgtgatctccggcaaggacgacgaggtcgacaaggtggccggcgacgactagacctatgtgaaggagatggaccacctggggcacgacggctacaagaagctggt

SEQ ID NO: 17518 - DNA, 307 bp, Zea mays
  Clone ID: MRT4577_115980C.1
ggcggacgcctggggtcggggagcatttcaacggttgaggggtttcccattcctcgtctgatctacctataccctagacgagccagccacagaggatccaggggttcagcaggtggagactgctgagcaggtgctcgttgaaggtcaagaacatgtaccataggatgaggcgcatggaggaatgctgcgatgtgttcgagagaggtctaggccgtcgtcttccaatcaactttgggttgttggatcgctgattcgttacgatgtaattatttatttaattttgttcagaactcccattatatagttt

SEQ ID NO: 17519 - DNA, 421 bp, Zea mays
  Clone ID: MRT4577_115981C.1
ccgtccgaatggcttcgacccgttgggcctggcggaggacttttacattttgagctggtgaacgcacgcggggccatggggggcgtggtcggcatgctcatcccggacctgctgaccaaagccggacggaccaacccaccgcagtgggaccaccccgccaaatcggaacaattcccgtcagcgtgcacactgttcgtggtcgagcacattctgttccactacgtggagacccggccactgcaggacaatacgaaccccggaagacataaccaacaccccatcttgaagagctacaccctgccgccacaccaacgccgttaccccggcagagtgttgaacccggtgaactgcgcgcacacgctcgaggtcaaggacaacgatctaggccacggaaagctagctatgctaccgtacctgggct

SEQ ID NO: 17520 - DNA, 834 bp, Zea mays
  Clone ID: MRT4577_115982C.1
agaaaaattgaaattcttaggaaaacggttttcccaaactagccacaaaagaatattctgtcatggtcatggtcagtaagacttttttcctctaccaatttctccagcatgggtcatccgcatatctaaaactcgtaaaaaaaaaaaaatctgacgaaaaaaaaaaaaaaaaaaaaaaaaaaaaaaaaaaaaaaaaaaaaatttcggtatggaggtttctctccttgtcccttcgttccacgttcacatgggcaacgaaaaggaggagccgaatgtgtgggggactggaggaggtttcgctgctgccgtccacggcctggctcgccgcgaatcggagctcggacctccaatgggagagcatccacgatgcgaatcggagctcagcggcggccggacgcccctcggcggaaatggcgccctctccgacgcgcgaggcgagaccgtcgggccgtcggcgcggctgctctgcgcgaggccaccgggcgaggatgcagctgctccgccgccgccgcggggcgcggctccttcttcgctggccatcctgattctgtctccccacttcctgccctggcgcggacgaacgggtgcacatgtggccctgtaaatggggattctatttgcccccggacgctcgtccggacgcatcatgccacaaacgcaagcacagcccacactttttactgcccgaaaggcagtgaatgcttactgtctcagcacatggcccgggcaggttttcccatgtacttctacctgcacgactgccactctgccaggatgtagcgagcggctcctatcgatggaaattatttccccaaaaaaggtggtagattttcc

SEQ ID NO: 17521 - DNA, 771 bp, Zea mays
  Clone ID: MRT4577_115983C.1
tatctgcctcttttggcatcgacaatttacttcagtagccccaaacaaagctctggattgtcctattcccatgacaaggctatgctcttctcctgcagtgaaaccaaaaaaggaggtgtgctactgttcttctgtattgatgtcaatgcaacagcaggtacaagtagtcttcttgggagctacccagtagttgagtgagaaattaataagctattctaaattaaatgtaaatatgtatttctgaccatagtatgaagttgaaaggtgtttctgttcctttcctgtgtataagataaacattttttctaacccttcttccttaggtcgctgaaattgaaattgatgtctacaaagtgcttcccatttcattattagattactgatataactatgcctagagagtggagataagtggaggtggcaccaccaattccttgatgtaccaggaatgtttggattgttgtattctgacattgtttggttcaacatattcaagttggagcgtcaggtctccaacaattaaactaaatggaggagtggagcttcatgttgggatgatgcatgcacctttcaagtttcggaatgttgtgctcaactgcaacttgtggccgttgaacccattctacttacttttagatttaagttataggatatttaaaaatgtttgatcttcaatacttgttttggatgttttatgctacaattatatatggataagttatgtacactcatgttgtttaatgaaattgtatacacgtgtttgatttgaat

SEQ ID NO: 17522 - DNA, 210 bp, Zea mays
  Clone ID: MRT4577_115984C.1
cacagctaccatcggttatttgctcttatattattcactcctttgctttaacatccgcacttttacttatctgtatgtttctgggttatgcttattctctgctgcatgttagtcttgttagtattatctttaaatgatctttcttcgttttccccgtttcctctcctttgctgggttctgttactttcggcaagcaattcattgcatact

SEQ ID NO: 17523 - DNA, 649 bp, Zea mays
  Clone ID: MRT4577_115985C.1
ctttgcgtccgcggtcgcgtgggcggacgcgtgggcgtttctgcacattcttttttttttgggtgctgaatagtactgtacagtttatgatttgcttggactcatgatcgagagtgttaaaaaaaaaaaaaaaaaaaaaaaaaaaaaaaccaaataattaaaaaaaaaatttaaaaaacacatgggaagaagtaacgactacagaactaactacacactgcaaccaagaaacgatgctaaaaaggcctagtattgatggcgtcatgctttatgggaaccatgttccgcgccttttgagcacgccccttatgatctttttccagtcaccgtgaatcctgcaactgctgactatttcaaggaggttagctttgtaaaacccttggatcgtccacctatgttcctacatttggcctgttccttttctggcctgctctggtaaagtgaactgttgacggacatgtcctttcccaacctgaagcattgctagcgggcgatggggtacaacccctctgacgaattataagcggccatgtttggggtgtttatctcccttgggcgtttgcctggacttgggtctaacgcatatgtccttgcgctcgtctcttactttgggatcccttatggtgattaacacaacaaaaaataaagg

SEQ ID NO: 17524 - DNA, 221 bp, Zea mays
  Clone ID: MRT4577_115986C.1
gcgtgtgcaaatgcctaatatttatcaacatagtggctactactaggcacagtcttcactcagctggcaagtctttgctaagttgcatgctatctcagtttgaagcggggaagagatcactaactgcttcaattgaatccgaggatcttataactttaagttatgaacatcatgcacccactctacgcgatatcgcaagggttcccttggaattatcattt

SEQ ID NO: 17525 - DNA, 204 bp, Zea mays
  Clone ID: MRT4577_115987C.1
cactagttaagtgcaagagctcagtcgtatccttggagtaattggtattgagatatgtagaaagtagtgtgtataaaggttttggtgttattgtcatgagcctattcatgttgtcatccattgtttagtagctcctactatatgtattatgaaatactcataggtgttctagtgtgcttgagagtaacagataccgtagtcttg

SEQ ID NO: 17526 - DNA, 458 bp, Zea mays
  Clone ID: MRT4577_115988C.1
ccacgcgtacgcgcataatgcgcagtgcctaaatcagctgtcaacatcgggatcccgtaacagattatcgatggtgttttctgaatctggagacggattcgtggtgaatgaacggatcttgccctgagcttgctcgcacgatgaaatgcagaggtttttttcttactgcagaattcaaaatgcgattcaagggattcatatcatctacaacacataaggcagaccaagagacgatacttttaattaacttgaataagaaaatcaagtccaattgttcctgaataatgacagagaaactatgagaactcacatatgatgtaaatattcaagcccaacaacttctaaatgaattggctgttgaacaatactggcccaaatagtcctgacacggccaatgatggctttgtacgacttaaaggacttccctttgaatgtaaaaaggaaaaaattgctcaaat

SEQ ID NO: 17527 - DNA, 353 bp, Zea mays
  Clone ID: MRT4577_115989C.1
ccgacgcgtggggtggcagcccgacctttgatgttatgtgtcattgggaccacggtatgggttttcacttcagtggctattcctggacacttcgaacccgtaacaactggtggactcttggaaaaccaagaccaaggcctacttattggtggtccggctgaagccttccaggaaaaattttggggtcgttgtttacggctccgggcctaggcttaatcctccagggtacattgcccctccaaccaaggatccctgaaagattatgttcaacattaaaaaaaagtttgttgatgattacctggccttggtaatgcgaaactaaaattcggggaagggcaatccaaaagggttgc

SEQ ID NO: 17528 - DNA, 2953 bp, Zea mays
  Clone ID: MRT4577_11598C.1
tgggtaccgcggccctctctcgagtttttttttttttttttttttttttttacataattttcagatgagaactggattgatggcttccaatagtgcaatctaatccacgacaagcccatcttaataggagtatatcgcaaacagtttccaatgccatacaagtagttacagtacaaaaggtattaaagttaccggtgcataacggtgtcctagcatcaccaccataacgataattgcttgctcacagcatcagcgcagcgtcaatcttagcagtagaacatgacgcgcttcacgttttccttgagagcaggtaatggcctcacagcaacattcgcagcaccagccctggtgttgcgcgcccctggtggagggccacggcttgtcgtagcaccgctcgccacagatccgctgtcacttgtatctggctccatgtaaaaccgagctcggaaggctgccagatgagcatagtatgcaggaggaacgattgatactgagcgtgtgcacctggcatacgtgtaacacaagttgttggtgagagtttgcaacccatcagccgtaaatttgttctcatcccacagaacatgataatgggcaggacggcttgttccctgaatgccagcatggctgcacaggtagaaatcaaactcggttggatggcaaatcttcgagtccaccacagtgcccggcagtatgttgccacttctatcggcagcacgctgatcattgtgattattaacaaacaacctggtgtgatgacgcttctggaccacgacaaaggtaactggaggctggtaatcagactccaatgatgcacaggcctacatccatagcttggcaaggctttctaatggcatcaagttcgtacaacagaacttggtagaactgtccctcactgacaccatccctgtagaatatgatcctcttgggtttttgtccagtcgccctccagaaagaaatgagaagttccctgatcatgccaccagagacagcccccccccgggatcttgtcaagggttgaaaagatcctgtatcaattcttgacgatgggcttgagcactcaccaatcctgcatactttgtaacctcaggccagtcttgagaagcaaccacctaggagaaaaacagtgagaaaaaaatagtaaagcttcaactgaaaggtagcatttctttgtcaggataggtcttcacttacagctgcaatggaaggactagaatcttccccaggatggggatgggtcacatcagcaccaaagataatagtcgctatgtcactgacaagggggattctccttgccaaagcatcaacaagcacagtattccttcccccaaccttcacatttattttcagggcaacatttgcaagatactgctgcttgttcaccttgaaaacatgtttagtcagacagcattgggagaccaatccaagattagtctcacagatccttttgacatccccgtaaagagaaccattattgtcaggcagtataacaatcagcaagtcgagttctcggccctgaggcccgagtatgttcatcgcatcttgatagcgtccctttagtgctctttcaacaagttcaggccttgcatagcaaggtgacagcacaggttcaagtacaaaatccattcctgatactcggcacatcaaagccaattcatgacagaaactcccggcagcaccatcttgcacattccgtgagaagttaatgcatgcccagctgctaactctaccaccattgaccattttcttattcatcatgttccactggccaacttttggcaatacatccctttctctgccactatcatggtatttcagccttgggggaggcagaacacgagcttcaaccgatgcaagacgctcatcaatcgttataccaaattcctgggcataaggatccttggagtaggcattgtgatatacagtctgatcaaataggtgagacaaacaagagatttagaatcatcagtttattggtttatttttgtgaaggcaaaatctaattaatcaaacaagagaaacaaaatattccatatatttagtcattatatatgcatcaataataacaaatatgtaattttgcagaagaagggcaggcctggtgcagtggtgagagacgtctcactaagtcaccaggtcacgggttagaagcagactccaagaaatatgatcacaatcacctccaagatgtccttctcacgcgcttggggacgttggcaagtcaccttcagtagagcagtgatctgtttatcattaagtcgttttgagtagcgctgcccctcaactatcttacagacctccataggcagataatttggtctttgctgattgcccacttgcaaacaaggtaaagtggtgtgctgaatactgaaaccataagtctccaggaagtattgcaccacagtcttaacagtaccacgatcatcaatagggaatgataactcccttgttgcttgtggagtaaggccagatatccgatatttcctacgcatgtttccacggtgtgtgacctccactttcacacctcgtagggcttttttaatcttcacgcgatcagaatcagacaatggtctaactgagatatctctattaagaagctgagaaacaaaatcaattacagggagggcctcaaaaaatgcagtagaggacatatcaatattcagagaaagacccatctgtgtgggccttatgctttggtagaaaccacgccaagtttccaaaccttcaccaagttgctgaggtctccctaacttgggagaataaaatgatctaccaacaggacaatacttggcagtaggcatttcacgtagcacgatgtcaagtacttgaagagcctcttgaggggcatctggctgcctcccagcaagaaacatagccagatggtggagatcagcgcgagcagcaaatttgatggtcacccgaaataccctctggtagagtgttgtattggcctggg

SEQ ID NO: 17529 - DNA, 1279 bp, Zea mays
  Clone ID: MRT4577_115990C.1
gcgttctgcggctgacttgcgaacccaccggaccaaccaggacttggagcgtgcggcgtcggagttcgccggcggtgaggagcagaagaggaagggaaccaaagatgggctgctccatctcggggctcaacgcgctctacgatgcggccacgggcggcggcgacgtctggatcaacgagcgccgcttccgcgtccttcgccagatcggcgagggcgggttcgccttcgtctacctcgtcagagagcaccagcccgcctccgatgccgcgttcgctaggcgtgaccccgcccacgtctcagaggatggaacgtatgccatgaagaaggtgctgatacagagcaaggagcagttggatctgagtcaacagggagattggagccatgaagcatacctacttttccctgttcatctggatggtactttgtttgacaacgctaacatcatgctgtccagaagggaattctattccacagctgatgttctgcaaatattccagcagatgtgtgaagggctgaaacacatgcacagctttgatcctccatacgctcataatgatgttaagcctggtaatgttcttataacctggcgtaaaggacaagcacctgttgcaactttaatggattttggaagtgcaaggcctgcaagaaaggaaatccgttctcgttctgaggcactacagttgcaggaatgggccgctgagcattgctctgctccttaccgggcccctgaattatgggactgcccaagccatgccgatattgatgagaggacagacatctggtctctaggatgcactctttttgctatcatgtacaatgtttcaccatttgagtatgctcttggtgaatctggaggaagtctgcaacttgccattgtaaacgggcagttgaaatggccagcaggacccaaacctccttatcctgatgagcttcgccattttgttatctggatgcttcaacctgaagctgtaatgcgccctcacatttctgatgtggttcttcatgttgacaagctcattgcaaaatacttgccctagatcaccctggagttcctctcatttctttgttatacagtacagagccaatatgatgtaaaattggcccatgcttgacgtcattcagtccttggataggctcaatattgattcttttgtagaactttcaggatattacatcagtctaatgtctgtggatctttgatactcatggagtcacggtgtcatgtaaaaatgtcaaactgaacatcaaagcagctatatgatatccttgcacttgggct

SEQ ID NO: 17530 - DNA, 1502 bp, Zea mays
  Clone ID: MRT4577_115991C.1
gcacgagggagtcattgtctttgtccgcgtggacgcggctgacttgcgaacccaccggaccaaccaggacttggagcgtgcggcgtcggagttcgccggcggtgaggagcagaagaggaagggaaccaaaagatgggctgctccatctcggggctcaacgcgctctacgacgcggccacgggcggcggcgacgtctggatcaacgagcgccgcttccgcgtccttcgccagatcggcgagggcgggttcgccttcgtctacctcgtcagagagcaccagcccgcctccgatgcggcgttcgctaggcgtgaccccgcccacgtctcagaggatggaacgtatgccatgaagaaggtgctgatacagagcaaggagcagttggatctggtgagggaggagatccgtgtgtcgtccttattcaatcaccccaaccttctgccgcttcttgatcatgccataatagccgtgaagagtcaacagggagattggagccatgaagcatacctacttttccctgttcatctggatggtactttgtttgacaacgctaacatcatgctgtccagaagggaattctattccacagctgatgttctgcaaatattccagcagatgtgtgaagggctgaaacacatgcacagctttgatcctccatacgctcataatgatgttaagcctggtaatgttcttataacctggcgtaaaggacaagcacctgttgcaactttaatggattttggaagtgcaaggcctgcaagaaaggaaatccgttctcgttctgaggcactacagttgcaggaatgggccgctgagcattgctctgctccttaccgggcccctgaattatgggactgcccaagccatgccgatattgatgagaggacagacatctggtctctaggatgcactctttttgctatcatgtacaatgtttcaccatttgagtatgctcttggtgaatctggaggaagtctgcaacttgccattgtaaacgggcagttgaaatggccagcaggacccaaacctccttatcctgatgagcttcgccattttgttatctggatgcttcaacctgaagctgtaatgcgccctcacatttctgatgtggttcttcatgttgacaagctcattgcaaaatacttgccctagatcaccctggagttcctctcatttctttgttatacagtacagagccaatatgatgtaaaattggcccatgcttgacgtcattcagtccttggataggctcaatattgattcttttgtagaactttcaggatattacatcagtctaatgtctgtggatctttgatactcatggagtcacggtgtcatgtaaaaatgtcaaactgaacatcaaagcagctatatgatatccttgcacttgggctaaaaaaaaaaaaaaaaaaaatcttgaggggtcatggcggtaccctgtcatgtaaaaatgtcaaactgaacatcaaaacacctatatgatatccttgcactttgggtaaaaa

SEQ ID NO: 17531 - DNA, 158 bp, Zea mays
  unsure (1)..(158): unsure at all n locations
  Clone ID: MRT4577_115992C.1
ttcttttctttctcttctacttcctcacttcctgtagggttctttataaataagaagaagagtncatcttccttcatctttccttacataaatagttattcaacctcccttgcttacaaccattatattatccttattaccatgttccaacttttaca

SEQ ID NO: 17532 - DNA, 351 bp, Zea mays
  Clone ID: MRT4577_115993C.1
ggatggataaagcctttcactaaagcttatttgaggctcgttggccggacgcttttatttcgaacggccccagaaaacaaccagccgggttggtgcttgattcttaatgcaattcccaccgccatgtttgacggactccctaccggccacacaggaaacctccaaccgaacctacactgccgatttgaaatggttttcttacattgtcgaacatcggaccaccatttgctaatggcaacagcttaaccagcgctaaaggtatggggatcaggttaacaagaatcccggcattctctggttaggtgactttagggaaaggtacacgtgggccccatgctcctcactttagtt

SEQ ID NO: 17533 - DNA, 242 bp, Zea mays
  Clone ID: MRT4577_115994C.1
ggacatgcgacatattgctactgattaaccaacacacctacatctagagcacacgttgacgacttagcattacacatgattccaagcgcaaaacgaatatacgctggctgccttaggatcgagccatctcggttcctatggtttttatgcaagcctgctatgctgcgcgaatcatgccttaccaaactgatgtgagtatctgcattgatcttgaacaggacccctatggagaaaacccttgc

SEQ ID NO: 17534 - DNA, 177 bp, Zea mays
  Clone ID: MRT4577_115995C.1
atggcaggcgagaaggtggcctctaaactcgccttggtgatggcctctaatgttcctgggatgatagaggaggctttggttaacgagagcagacttttgactaaggcggcggggccaagtgccgtagacgttctggcgatccggctgaggggtcggaagatgatagtgaagatctag

SEQ ID NO: 17535 - DNA, 595 bp, Zea mays
  Clone ID: MRT4577_115996C.1
tacttctctcgccccatctctcttctcatccccatctgcccacacgcactgcacttcaacagccgcagcagccagcttgatccggcgcgctgtgagccggctgcctggcgagcgccgttctaccggagcttcgccgccgcccgccacgttgccgcccggcctcaccactaccctcatctcgcccctcccttatcattcctccagcactgctataattctttcagagacatccgccatcatcaacaccaccggcgaggccagatagaccaccagcatataagcccagcgccacccacagttggtccacactgtccgagcagcagtcgagggggagagaacagatccaggcgccaccatgccctccgcgtcctcctcctcggcctgcgccgcggccgctgccgtcggcgatgccgccgtgtcctacgaccacaaggccgtggtcatcaacgggcagcgccgaacgacgcctcggccttcgcctctgcacatctcgaggtccaccctggcacatctctgctgcatcacgctagcaggccgctgcctcgcccggcatcctctgccttggctcgtctttccccaccccttcccttactct

SEQ ID NO: 17536 - DNA, 394 bp, Zea mays
  Clone ID: MRT4577_115997C.1
ccacgcgtctgttttgcgattacagatgtacataacaccgccccgtgataagtagtcactctaattcttgccggcgaatctatggaaggaagcaagatatctgccagtgctactgttacaggtggaactgaagggtccagcagggttcaatggtacaaggcatcttcctctgaatttaagaatgaacatgagcttgaagcccttactccgtcacgagtttctaagacattccgcattcctcttggtgctgttggatattatatcgttgcaaagtttacacctgtggcacctgatggtgaagtttgtgaaccagcctatgctacattagatggccttgtggaaacactaccacccagcctgaacttcttaacagtcactggtgaattttttgtgg

SEQ ID NO: 17537 - DNA, 1339 bp, Zea mays
  Clone ID: MRT4577_115999C.1
cgttgctgtcggatttttcagccgccacgcgacgcgaccaagtggacgaaccgcaacaggcaagtcttcgcttcgctcctctctgcggctccctccggcgagcggcgatggccttctcacccccgctgatcgactgggaggcggagagctaccctgcctacccagatttcgcggccattccccttttcgtcgtcttcttcctcgtcgtccgtttcttcctcgaccgcttcgtattcgagtggttagccaggaagctgattttcaaggaggaggatgagaagaagcttggccctactacatatgcaggcaagagaaagatcaggaaatttaaagaatcagcttggaaatgcatgtattttctttctggggagctattggcattgtctgtgacgtacaacgagccatggttcacaaccacaagaaatttctgggttggaccaggcgatcagatctggccagatcaaaaaattaaattgaaactcaagacagtctatatgtatgttgctggcttttacacatactcgatatttgcccttttgttttgggaaataaggcgctcagacttcggtatttcaatgactcatcatgtagcaaccgtctgtctgatagcactgtcttacatattcagatttgctcgggtgggttcagttgtccttgccattcatgatgctactgatgtgttcctggagcttggaaaaatttccaagtatagtggccatgagttgtttgcagatgtttcatttcttgttttcgtcagttcttgggtactcctccgccttatatattatccgttctggattctctggagcacgagctatgaagttgttctgactctagacaaggaaaagcataaagttgacgggccaatatactactatgtattcaacagtcttctcttctctctacttgttctacacatatattggtgggttttaatgtatcggatgcttgtgaagcaaatacagtctagagggcacgttggcgatgatatacgatctgattctgaaggtgaagaggaacatgaggattgattgagctgtgtagagttggaagataataagtaacatggggatggattgagctgtataagttccaaaggcgaaaaggaatacgtggatggattgagctgtgtaaattctgaaggtgtatcaaatcattctgctgtttttcttctgtccttgttcttgataagtaacaataaattagtgcccttctctaggtgagcatcatcgatagatgtcacttgggcattatcattatctattgatgtaaaatcaggtcacattgcatagcacacacacaacagttaatggaaaatgttagcagtgcactttttata

SEQ ID NO: 17538 - DNA, 212 bp, Zea mays
  Clone ID: MRT4577_11599C.1
cccacgcctgggccgactaccgcgaggtttgtaatataatgctacaaatcccatcattgtgacctgtgaaattctcccgtactactttcctagccaaacactctcgctccataagacgacggatacaatgataaacactatccatgaccttcggacctatcatcacgtcatcgctggccagttgcctcccaacactgacctgcaccgattcc

SEQ ID NO: 17539 - DNA, 2175 bp, Zea mays
  Clone ID: MRT4577_1159C.1
attggcattgggtacctcgaggccggccgggacacgcctcttctccccccccaaaaaatccagcagcagcagcaagccccacgcaacattagcagcaggagaccaccccaatcccccacggacattcgtcgcgaacccttatctgcacgccgcgccatggccgccgccgccgccgccgcggtcgcccacctctccatccacggccgcctccgccgctcaccggagcatcggccgtccatcaccaccaccaccacctcctcctcttcctcgtccgctcaccgcccgtccctgctgcggtgccgcgcgttcaagcaggaggccggcgacggcgacccggctgaggccgacgcgcggaagcgcaggaagggcccgctgtacaagctcaaggcggcgatccagggcctcgcgggatcccgctccgccgccgccgaggtgtacgggggagagtaccagtaccagcgcgccgtcgagaaggcggaggagatattcttctcggttactactcagctaggcagatatgttatcactatgatgagcagcggtgttgtacttggggttggattccagctgtcaggtggagacagccaaatgaacgaactaatttggtatagctggcttggtggggtgattatcggcacaatgataggtgcaaacagtgtcctagaggaacactgcaaagctggacctcgcaatgtcgtcataactggaagcacaagagggttaggaaaagcgcttgctcgtgagtttcttctttctggagaccgtgttgtaattacttcacgaagtcctgaatcagtccttcagactataaaagaacttgaagagaacatacaggaagggttatctgttgccaaaaagaagcagaggaatattctatcgcatgccaaggttgttggtacagcttgtgatgtctgtaaacctgaagatgtgaaggagttagtgaattttgctattaatgagcttggttcagttgatatttggataaataacgctggcacaaataaaggttttaggccattggtaaccttttcagatgatgacatcactcagatcgtctcaacaaacctagttggttctctactgtgcaccagagaagccatgaatgtcatgcaataccaagagaagggaggccatatattcaacatggatggagcaggttctggaggatcaagcacaccactaacagctgtctatggttcaactaaatgtggactaaagcagttccaaggatcacttctgaacgaaagcagaagatcaaaagttggagtgcatactgcttcacctggtatggtcctcacagaccttctgttaagtggttcatcgctcagaaataaacagatgttcaatttaatatgtgaacttccagaaacagtagccagaactttggttccaaggatgagagttgtaaaaggaagtggaaaggcaatcaattacttaacaccaccaaggatcttgcttgctctggttactgcatgggttcggcggggtagatggtttgacgacgagggaagagcggtgtatgcagctgaagctgatagaattcgcaactgggctgaaagtcgagcacgcttctcgttcaccgacgccatggagatgtacacggaaaacacatgggtttccgtattctcgctctcggtggtctgtgcgttcataatcctctctagctctggtggacctcttccaggcacatgattcccagagctgccaaactactagtagacggccatgcatatgctcattttttaccccaccaaaggcattctactaccagaaaccatttgatacagcacttaatgaatggggaagaagagaaccccccacagatgtagatatattggtgcaagggagattagcagctgcctcctcgcaccatttaaagtttggctagctaacctatgtgctcatagaagggtaaatagaatttattgcgtgggcattccactgccgtacgtaagctggactatgatccgtgacttttttaaggacatgtatgcaaagttaggtgagcaggatcagagtcgacattgcctcgtgtacatgcatgtagttgtcattataatcactgtaacttctggtatcgcttgtacccttcaaaattcgaagacattatattgtgaagcgaagtggcacacaccatgtgcatatggtttatctaaaaaaaaaaaaaaagcggcc

SEQ ID NO: 17540 - DNA, 444 bp, Zea mays
  Clone ID: MRT4577_115C.1
aattcggcacgaggggcaagtcgttgtctatgccaacggctacgaggcacacgcggaggcggtggccgtggataccagttcaccgcgtgtagaggcgggtggcagactgaggacgatgggggtggcaaagaggatgaacacgctgcagctgtatccttgggggtcgaggagaggatgtctctcctcacatcccaaatctccagcaagctcgactccatccacaatacgggtgctgccgtggctgccaagaggaggcttttggctggacggccgaggaaggtggcgcaggaggcgagctccgtggcatcctgccataaggatttagaaaggtatctgaaggaggcctgcgacgccgaagactttgataggtcaaagaggatcagcgactgcctagccacgctcgataaggagaaggatcggctgttgactgcgctgcgtgatgct

SEQ ID NO: 17541 - DNA, 189 bp, Zea mays
  Clone ID: MRT4577_116000C.1
acacccgctggtgcttcacgtcggagccgccatcagcggctgctgcggccaacggctagcagaccaccaacaccggctgctcccatgcccgcacgccggccgagaccgcaggcttgtgggcgctggagcccacgccccgctgacgcagcttcttcttgaggcagcggagccagaagaaccagatctccc

SEQ ID NO: 17542 - DNA, 306 bp, Zea mays
  Clone ID: MRT4577_116001C.1
aagcagcaacgcactcacaaaggaaaaaaacatcatgctcctgcccacaacatgatcgatactaatctcaatacaccagcatcgcaaactagacaggggtcgaagctctcgcgggtccttccattgcttgagcctgcgcgttatgtcagtgcgcttggaaattctcacatcgttttacatttaatgcgcatctttttagagctccctgtcggtaaaacgcgtggcgttagctacttcaacccctttgcggtatacccccctttcggcaacttctgttggcgctgtcaggccccccctttttgccca

SEQ ID NO: 17543 - DNA, 354 bp, Zea mays
  Clone ID: MRT4577_116002C.1
ctcactggatatcctacgctatcctttacagctccttttccagtaagcgactgcggctagccttattacagtattgttacagctcacaaatctaatcagacgaatcaaataatcgtgctaagcaaccaatgagcaagcaccacgaactagccatgcaagttcgtttccaccggcagcagtagcgtattgggaagaaggccggtgctgcctgcatctgcgaggggtatcacggggagcttttcgcagtcgcagacctcgaccacattgccgtcggggtcgcggaagaagagctgctccaccaccgtttcgccgtttggcacccacgccgccacgaacttcagctccatgtcaccc

SEQ ID NO: 17544 - DNA, 170 bp, Zea mays
  Clone ID: MRT4577_116003C.1
gttccaggacgcaatggcgtcttgtataccgatggcagcgaggctagaaccatatgaagtagaaatgcagtttcttattgcctacggtttactgttgcagatcaatctatgagctgtactgtggcacttgtgtgactcagttgtttaaactacagatgcaaacgatggat

SEQ ID NO: 17545 - DNA, 319 bp, Zea mays
  Clone ID: MRT4577_116004C.1
caatgaggcaagatccctactaggtcgatagctcccgctttaactagtcggcagacataaatttcattggtaacgccaactctaccaaacgatacaagtactgtaggcatagtctgatcgtagaccgcgaggagcgcgccatgcacagagcaccatgcaactgcgtgacgcacatcctgctggccgaccgtatccagctggggcggtcgatgaacgagtattctgattctacaacaatccattataacaagcgccccgccctggcagacactgcgaacgctgtcatgagcccgaactgctgggacctgatgggacacgt

SEQ ID NO: 17546 - DNA, 714 bp, Zea mays
  Clone ID: MRT4577_116005C.1
gcacagctcactatagggtaagctcggtaccacgcatgctgcagacgcgttacgtatcggatccagaattcgtgtttatttagcagcaatttagtagacagtaaggaatacaacggtttagttgataaagtaaatgactttcatagtgaggcatttgatgtgacgaaggttcctttaagtattattcatttttatgaaaatacagtagagtatgaattgcaatcgaatattaaatgggctcgttggttccgtccgttcgcactttgctatgagaaaatgagtaagcgtgtagaacaaatacatttaggaatgggcggcaattgggaaacgatgcatggctctatcattagtgtcatagatgagaaagatggaagagagaatgtaagggcttggctaagaaaaaatgaagcaggtaaatctatttttgtagctctttattcaaagcatacaaataagagtgagacatatatgaatatcgccttacctttaccttattcgaatatgactggtattttgaaactatataatgatagtcatgatttaattattactagtaagttaagagaaaatggtcagggagatgaggggatttatttacatactcgggtctagacaatccgtttaccgttagcagagacttttatataaaagagcgcacggatcacatactagaagctatcatagatgtggatatttggagtaagttttagaaat

SEQ ID NO: 17547 - DNA, 1483 bp, Zea mays
  Clone ID: MRT4577_116006C.1
atggcgagtttagcatcggtcagttatcaaacagttaaagcgttttctgaaatcttgtttgaataaaaaaaaaaaaaagggcggccgcccttttttttttttttttttttttttttttttttttttttttttttttttttggaaggataaacaattttttttttatccctgtccaaacaataatttttgtttcatgaaaggaataaaacaaaccgctccaagttcaaattattaaccctcaccccccgctggggcactggccaccaaatgcaaaacctgttccacgtcctggagtgcaaaaacggccccaaatctcacaaaaacccaaactgcacgacgccgcggccggctaggcgccgtcgaggccggccggggtccgtgatccgctcacctagaacctactagaaggcgaaccaacccgcacattcacttctcttcccatccgtacgaactcgcagatcagagagaccgaggcgcccgcggttctgctttccttccttgccccgttcacgagagaattttctggagtcttcgactcgagcagggttccgatggcgctgcaatggatgatcctggcgtgcgtggtggcggtggaagctgcggtggctgcgctggtcacgctcccggtgccccgcgctgtgcggggccagatcgtcgcgctcacgtccttgttcctgcagcccctgtccagtgtgatacccttcgccgccttccagatcctcgatctctactggaagaaggagcacagactgatgtgcacctcggagatttgcaccgccgaagagcgcattcgcttcgagaaatctatgtttaaagctcagagaaatgtcattctttgtgtttcagcatgtctcctttattggtgcatttatcgtattgtaaaattgaacaaggatattaaggctttggaagagaccgagaagcgcctcaaggaagagtagatctattgtgttttaaggtggctgttgtctgctcctggtcttcagaagatattgttaaaatatcatggttcataggatatctagtgtatagtcttcttgcagcaaagaagataatgttttgctgtttcagcaaacatctgaagtatgagtcttattattaagaggtcttttctttaacttatggcgagtttagcatcggtcagttatcaaacagttaaagcgttttctgaaatcttgtttgaatatccgcagtcctttttttggtttggcatgccgaattattctgaaatgtttagtaccccgttgttcgtatttatgggtcctcttggcttattcatattagggatggcaatggatccgatacgaaatggatattgcaaatatgtctgcaactatatccgcggttgcaactaatatccgcccgtgatcatacccgcgggtagaaatttatatccatgtccgtgtccatcagattttggatatccattggatatgaaatacacaatcatttattcaagaaaaaaaaaaaaaaaaaagcggcc

SEQ ID NO: 17548 - DNA, 219 bp, Zea mays
  Clone ID: MRT4577_116007C.1
gaaagatgcaatgtgagagagctgtgcacgttgtgccgccgaccctcttccatttctcatcaactaacaggagcatagatccttatggagtttgttcattactagctagagttgtaaggatgctagtaaagagcagcaggcaggaatggatccttatttgccacgctgctggtgctttcggcacactgccgcccaggcccagccgcacccacgcgtccg

SEQ ID NO: 17549 - DNA, 238 bp, Zea mays
  Clone ID: MRT4577_116008C.1
ctatgacgtcacctgcgcgcgctccgtaagctcggatcctgtatagcgggcgccctccacgcgttcgaagaaaacggaggtggaactagctcacatgagggcaaccgcaaaaagatggggactgggaaagcccctgccccagaaagccgtgctgctattgatgcgaatgccctctagcacatgacattctggagactggattattgctgacatcactccaacacgctcggcaaggagg

SEQ ID NO: 17550 - DNA, 255 bp, Zea mays
  Clone ID: MRT4577_116009C.1
agcagtggaacaacgcagagtacgcgggaagcagtggtaaaacgcagagtacgcgggcaagtcggaatctgcctagtctcttgtcatcaacgcttcaaacatcattcacaaactgaataagttagtgttgaaatgctgcaaagatcattaattctgaaacttgagtctttgctgtcgtgtgagacgtacgtctattagtataaaatcacttctatttaaaaaaaaaaaaaaaaaaaaataaaataaatcaccaat

SEQ ID NO: 17551 - DNA, 356 bp, Zea mays
  Clone ID: MRT4577_11600C.1
ctttcctttttttttttgtttttattgtaattttccacacaaacaacacacgaaattggtgcggtgtttgactactagctgaaccaacaatccaaaatccttttacaacaattgccagtcaccatttacaatgtacttaaaccattacaagaacgttgaaatgcatatctaaacaaaataacgcacaattataatacaataggtcttaacgcatgccgttaatgtacaaacaaactgaccaaaccttctaatgaaaaaacactatctttgaagcttatccaaattataccaaccatatcttccaccgaacaataacaagaggccacctccatggacccttccctcaaaacaacatt

SEQ ID NO: 17552 - DNA, 296 bp, Zea mays
  unsure (1)..(296): unsure at all n locations
  Clone ID: MRT4577_116010C.1
caccgatacacttttatcccaacaatgcaccggcgccgcagaccgatcaatatacacgacgccgacgcgnctcttccttgccgcgctcctcctcctcgtccccgccccgctcctcctcctcctcccggcccggaacatgccgcagccggagcacatgttttttttctaccnncagcnttctttggggggggggttcctcatttttttttcctgcgccgngtcnnataccgcgcgcgagtacccggacgggggggggctctccccccnccacctgggctnggccttgttgcctttcg

SEQ ID NO: 17553 - DNA, 566 bp, Zea mays
  Clone ID: MRT4577_116011C.1
cattgggtacctcgaggccggccgggagctattcatatcccagcatcctactgcgtcaccatgacacacacaaatattactggttaccgcaccccttcgatggtaatagcatccacttcgctgctcctctcccttgcattcatcatgttcgactggaaggaccaccacttcttccgatcgccacaggaatgtcccggagccaccagtacgctccagcatcgacactccgcagacgacgtcgagattcacgccaccggccgaggccttcctccagaagacacgacaacgaaggatggaatcacaaggacaacgattaacttcgtcaggccgaagccattgctgctgctgccttggcactctacgacgaacaccactccactacatactcctcaacatccacacatgacacggatccctcagaagctaactgccgcgaccacccgtcccttttcgcgccgctactcaattgcaccatccaccacgaataatacgaacgaccactcacgaacacctgaagatgtcgatgcggatacaagtaactatccaccaccttcttcggtctgacc

SEQ ID NO: 17554 - DNA, 390 bp, Zea mays
  Clone ID: MRT4577_116012C.1
attacgtgtcacctttcactgttgttctcttctattaaggttggagcaaaacatcctgcaatttcggaacatattattcttccttgtttgaggataatttctcaggcttgcacgcctccgaaatctgattgtggggacaaagagtcaggtttgggagtatctagcttgacgttgcactctaagaatgatgatacaactggtaacacagcatctaataaccccaatactaagattcagtcagatatatctggaaaaatttatgatggaagtcgaagagaccaggatattccacttttgagctattctgaatgggagggcggtgcgtcatatttagatttcgtccggaggcagtacaaagtatcccaggcagtgaaaggatctgctcagaag

SEQ ID NO: 17555 - DNA, 446 bp, Zea mays
  unsure (1)..(446): unsure at all n locations
  Clone ID: MRT4577_116013C.1
tgcgcaccatatactaatataccgagtgcatgtaataactcagctgaggcgtggttaatgcttggcggcttgtggaatgagtgtgatagtgccaatgctaaactcaatacagacttgggctattgacagttagagtttttcccgccccctgcgtaatctaactaagatccccagccggggtttctgtcgcccttcaccaggtagcaaatgtactgctccatgaaggttcctacacccctcaacggcttgagggaggtggtggagtccaccacctgccacgttgcttaatatttgaccttgccgaacccttactcgtgaaagtggctccatccccatctccttactgaggtggatgacgccggcctcgctagtttaccacctggacgccacactccaccatgaacgcgcttaacggcaggactaaagaaccccctttngnntttccc

SEQ ID NO: 17556 - DNA, 589 bp, Zea mays
  Clone ID: MRT4577_116014C.1
ctactgcgtcccatcgaacatcgaactaaaccctaactgggaacggcaccgccaaagtcaggttccaagcccaaactcgtacccccaaaatggcgccgccgtcgcaggcggccaccggcaagcgggagaagcagcacaaacccgccaagagcctcgccgtgaaatcaaccaatcccgtctccaagaagacgcacaagcagaagaagccgcgcccacctgctgagcaggaccaaaccaacgatgccgccgccgccgcaggtgaacccgcgggcggtggcgtcctcttgtcggccgcgcttccgccggcgcggcagctcgagttcctcctccgcagcttcgagcgcgccgccaagatgcgcctctccccactcgagctcggcgcctactccgaggggtgcatggtgcagctcgcggagggggcgagccaggacgttgagagcttcggtgaccatgtgaagggggccttcggagcgacgtggaagggggagctctgtgaggggaagctcgttgaggggtcgatcgatgcgggcagcccggcgctcctggttatcagcttgggcgcactgagatcactggagcttctgagggg

SEQ ID NO: 17557 - DNA, 448 bp, Zea mays
  unsure (1)..(448): unsure at all n locations
  Clone ID: MRT4577_116015C.1
ggttgtntgggtgttttttttttttttttttattttttttttttttttttttttttttttttttttttttttttcccttttttttacccccaaattccccacccgtccctaccggccccccacctttacctataccaactcacccaaaaacctgggggggggggggggggataaaccacctacaaaaaattctcatcccttaacaattccccacacccacaaccccaaaacacaaaaccaaaaaccaaaaacaccaaaaccgggagcaaaaaaaaaaaaacctagcagaccaaaaagcccgcttaccaaccaaaaaacctaaaggcccaaaacccttaaaaaaacggccaaaaaccaaggagacaacgcctgtaaaaaggcccccagcgtgacgggcaacagcaccatttaaactgccaccaggggaatgcccaaaaccccctggccc

SEQ ID NO: 17558 - DNA, 142 bp, Zea mays
  Clone ID: MRT4577_116016C.1
tttatctcaacctcccaaaaagggtagcggattgttcttttccctccgactgggtcggctcacaaaaaggcggcattacaattccaccccttctgttccgccaagttcggagcgcaacgcaaggcgggcgtttgagcaagaa

SEQ ID NO: 17559 - DNA, 178 bp, Zea mays
  Clone ID: MRT4577_116017C.1
aattggttggtcgacccacgccttcgctcaaatgcctgcgggctcacacttcttataagactactttacctttttatactccttatcgaggatggtttgttgagggtagcatatatcttaaacttacacttttgtaatcactccgatgataataacgctcaatttttgttactggaaa

SEQ ID NO: 17560 - DNA, 290 bp, Zea mays
  Clone ID: MRT4577_116018C.1
tgcgttgattcctcgggtcgaaccaacgcgcggtgcggggtccttgtcgcggtcatggcgcagctgccgtccgagatccctaccgtggcgccggcgtggccggagtttggtggcgggcaccagtatcattgcactctttccgtgggcacgttcctcgctcgtcgtgcccatgcattcgtcgtgggtggacgagttcctcgacttctccgtcgccaagcgcggtgcgcaccgttgcttctttagcgacttcgtggcctttctcgagcctcttcgaccacaacagctttaac

SEQ ID NO: 17561 - DNA, 423 bp, Zea mays
  unsure (1)..(423): unsure at all n locations
  Clone ID: MRT4577_116019C.1
ctgagcagccagccgtggaggaagagatgtacccataccgcattgagcaacgtgaataacgggtggcttaacctgggcgggcctctggccctgctccccaatcatcgggcggggctggggcttgcaagggggtagctcctcctcctccaccaccacgtgctcgtcgatcctgcaaacgccgttcctcgccgtggccttcgcggcgctgctggtctcgttcgccggtttcgtggccgcctgcttcacgtggcctgggcgctgcggctgtacctcgccgncgtcgcgctgctcgtcgccttcctcctcggcctcaccgcgttcggctttcgcgtcaccgcgggcggcggcggcgcgcaggtgtacggncggccgtacccggagtaccgcgtcacggacttactcgcgtggctccagaagcgcatg

SEQ ID NO: 17562 - DNA, 271 bp, Zea mays
  Clone ID: MRT4577_11601C.1
ctcggtccaaaattcgtagcacctatagccagtctctataaattgagtgccctccctgttccaccctcttgttacacgctcagtgcaccactcctcacctcgatccatccaccgtagcccaagaatttggaatttcccccaaatcggtcgatgtcgccgccgtgaggcatcgcgctgcggccaaccattctcaggtgatgaaactgctgagttctgttgtttctactccaaggttgttccaaagcaggaggaagaaaactaagaactacct

SEQ ID NO: 17563 - DNA, 496 bp, Zea mays
  unsure (1)..(496): unsure at all n locations
  Clone ID: MRT4577_116020C.1
gcgcgccggtgcgnngagtttatgcgcaanggcaacctgcggggaggggcgggcctcctgctcctcgccgccgccggcggcctcctcctgctccccggctcgctggcgtggcagagcagcaactgtgcaccgggcgcgcccggcagtggctcgccgacgtggccttcacccggctccggctccggcgttcggccaggtaagtaacggccaatcacttttttttcaagccgcccaagngcccgccgagcaccccnccgnacgngccnccgacgccccccccgccaccgccgnacgngccaccanaaggcccgccgacgccncggccancaccaccaccgaacgngccaccanacgnccccgacccgccgacgccgcggccctcaccgcccnacgngccaccagacgggcccggccccccgacgccgcggccgncaccgccgnacgnccccccgacgccacggacgccgacnccgcccgacggcccaccgacaccgcc

SEQ ID NO: 17564 - DNA, 192 bp, Zea mays
  Clone ID: MRT4577_116021C.1
cgtccaacttaatgctgcccatccctttcgcgtgggtatgcaaaggccgaccgatgcttcaacagtgcagctgaggcaatggacgccctgagcggccattaccgcgtgtggggtacccacggccgtcactgcaggctacgccgtctttgttttcttcttttgcagtcgcgcttccctagcttaatcgggttc

SEQ ID NO: 17565 - DNA, 235 bp, Zea mays
  Clone ID: MRT4577_116022C.1
gaaaatactggtgcaagaacgccagatagcagatattgtatatcaatccatgattgtctgtctcaatccactcttttgttgctgatggcgttgtttcgtgccgtagttgacaccatttaaagtctattcagccagctgttaatctaggttctatcattcaaaaaaaaaaaaaaaaaaaaaaaaaaaaaaaaaaaaaaaaaaaaaaaaaaataatggggggccgttttataatttt

SEQ ID NO: 17566 - DNA, 1175 bp, Zea mays
  Clone ID: MRT4577_116023C.1
ttggtggagaattttgtaagataaacatctcgggctgaattgggcgagacggctcaaaattatttcatactggaattgccttggagaaatcagcagggctcgtttttaactctttcctcttgacgcggattagatatatgaccttgtatatatcttatgacgatggattgccttgttgggtcaggaagaagaggatgcggaggaagagcactggccctgactccattgccgagacgatcaagtggtggaaagagcagaaccagaagctccaggacgagagcggctccaggaaggcgccggccaagggttccaagaaagggtgcatgatgggcaaaggagggcctgagaacgtcaactgcgtgtaccgcggcgtgaggcagcggacatggggcaagtgggtggcggagatccgcgagcccaaccgtggccggcggctatggctgggctccttccctaccgccgtggaggccgcccatgcatacgacgaggcggcgaaggcgatgtacggccccaaggcacgcgtcaacttctcggagagctctgctgatgccaactccggctgcacgtcggcgctttcgctgctggcgtctagtgtgccggctgccgcgttgcaacggtctgatgagaaagtggagaccgaggtggaatccgtggagactgaggaggtggtacatgaggtgaagacggaagcgaagaatggtgacttgggaagcgtcaaggtcacctgcgtcattcagtccgcggaggagactgtgctacacaaggaaggggacgtaagttatgattacttcaacgtggaagacgtcgttgagatgataattgtagaattgaacgctgataaaaaatttgaggcacatgaagaataccttgatggagatgatgggtttagcctttttgcatattagaaagcacggtcatggggggggggggggagtagtaggaatagcttcattctagatgatgctgatgagacatagctttatactatgagccaaccggtacaacaagttgtcctgtgtgttgagttcctgtactatagtagggatgagttcgtgtttaatgagctctcttggctgttaatattgcacatttgttcgggtggggtgaaccctaaattagctcaaggaaaaaggaatggttacactgtacaccgaataaatttttaggattgcatt

SEQ ID NO: 17567 - DNA, 1134 bp, Zea mays
  unsure (1)..(1134): unsure at all n locations
  Clone ID: MRT4577_116024C.1
ccgctcgcgaatctagnnaactagcccagnaaggagnaaacaactaggataccaccgccaccggcccccggcaggcggcaggcgggcgggagagacgaaatctagggaggactgactggacggaggaggaggaggagcggggagatctctcgctcttccgcccatggaggagctgggagacgccggccagggaccgcaaggcgacgcctccggggcccttgtcaggaagaagaggatgcggaggaagagcactggccccgactccattgccgagacgatcaggtggtggaaagagcagaaccagaggctccaggacgagagcggctccaggaaggcgccggccaagggttccaagaaagggtgcatgatgggcaaaggagggcctgagaacgtcaactgcgtgtaccgcggcgtgaggcagcggacatggggcaagtgggtggcggagatccgcgagcccaaccgtggccggcggctatggctgggctccttccctaccgccgtggaggccgcccatgcatacgacgaggcggcgaaggcgatgcacggccccctgccacgcgtcaacttctctgctggctctgctgatgccggctgccgcgttgcaacggttttattagaaagtggagaccgaggtggaatccgtggagactgaggaggtggtacattaggtgaagacggaagcgaagaatggtgccttgggaagcgtcaaggtcacctgggtcattcagtccgcggaggagactgtgctacccaaggaaggggacgtgagttatgattacttcaacgttgaaaaccccgtcgagatgataattgtagaactgaatgctgataaaaaatttgaggcccccgaagaatcccttgatggagatgatgggtttagcctttttgcatattaaaaagcccggtcatggggggggggggggagtagtaggaatagcttcattctacatcatgctgatgagacatagctttatactatgagccacccggtccaccaagttgtcctgtgtgttgagttcctgtactatagtagggatgagttcgtgtttaaaaaaaaaaaaaaaaaaaaaaaaaaaaaaaaaaaaaaaaaaaaaaaaacggacgctgggcggacgctgggcggacgcgggg

SEQ ID NO: 17568 - DNA, 284 bp, Zea mays
  Clone ID: MRT4577_116025C.1
ggaggcaaagggaaaacggggtatttaatttttgtttaaaaccatagcaaaaacatccccccaaaaacattgcccaaaggaaaacacaccctccaaacttaaaacaaattttgtaacggggtttcccaccaaggggggggtaacctaacactaacaccagggaacagggggtaacccccaaattttttaaaaaaaacggggttatttcgggcttttaaaccatggggttttaaaaacacttatttcccctggaaaactgggggcggataaacttgggggcccaa

SEQ ID NO: 17569 - DNA, 298 bp, Zea mays
  Clone ID: MRT4577_116026C.1
ttttggacgcgcttcgccggttatcccttcaagcgagcacatttccttggaggtggcggggcagacgaggaacggcccggtcatgcgcgtgttcctggctctcatgttgctccccgtgttcgttgtggagcgcgccagaaaccgctaacgcgcgctgcagaccgtgctatccgaggtgttcggaaggcgggccgaccggctgctctttttagagaaggtcatatgcgcctcgaccgagcagtgcttgacggatagcaacatgctcatggcaccctggaggaagcacaaataacatgca

SEQ ID NO: 17570 - DNA, 332 bp, Zea mays
  Clone ID: MRT4577_116027C.1
gctaatatggcccccagcttcacaccccacgcgggggggattattaacccaaggcgggttgtcatcagcaacaccctcgacccggactgacacagctacccacacgtgaacggaccgctcgaggatctccacgatcatacagacacacaagcacggagcgtatcagggagcctaacaacgtgaacaacagcaccacagatctggttaagataatcccaaacaagcccaggacggaggaaacattcaccgcataccaaccccaagggaggacaggcggccgataactgatgacagccaccaggtagagaccctaccatagaacccggagagaa

SEQ ID NO: 17571 - DNA, 289 bp, Zea mays
  unsure (1)..(289): unsure at all n locations
  Clone ID: MRT4577_116028C.1
gcacttcgcgagcagttcccagccacgccagcttggggacaagctggttctgaaggacggtggaatgtcaacatccctcatccgagtgagcacaaggacgacgagagaagaaaggagccgatgtgagcagctaaggcgagaagccgaggagcgtcaaaggagcccaaatacgaaatagactggactgctaattgggccgtgtatcccatactgtaagaatggcataccagaaaccatatatagggattggtggccgagggaaggggctatcgagaaaataacnacatga

SEQ ID NO: 17572 - DNA, 360 bp, Zea mays
  Clone ID: MRT4577_116029C.1
gaactttgggctgatttatgtgcttgtttatgtgcttgtggagtatagccctgttgcctacgacttcctcgtagggacatcacggggccttattgatcttataggagaattctattcatgaaggtatcgagacggtgatgcatgtctaaggctactacaggaaggtcagaagtccactgagtagtgaatacggagacggcgtcgatgacgtcgagaagtttacaaggtggtgttagaaagttgatctcgagtcgatgataggcaaggaggataacggtggccgttctccgttaagggtcgggtaagggtcggtttccgagttaaaactcgggagctgattagatgggaatggtagttagt

SEQ ID NO: 17573 - DNA, 439 bp, Zea mays
  Clone ID: MRT4577_11602C.1
gccccccaagaaaggcgggttttaaaaaaggtacttcccgggcccccccctttgggggggtttgggcttttaggggggcaaaagcccaagccaaaaggcaaaccaaaccccccctaactcccctcgggggcaaatgccactgcgaggggggggtggggatcatggggatggggggggggccaggagcccttttagtagccccagctgtccggccacaagcccccctccgagggtgggaccaaacccgggcccgggggccccccccccccccctgggtctgggtctggggctggggcccccctagtttcaatttgatggcatgggctgcccctgcccagggacccccccgggacggggcactggagcagcgccccgggacccccacaaaaaagcgcggggcctttccctcgcctgggtggtggtgccccctcaaccgggg

SEQ ID NO: 17574 - DNA, 113 bp, Zea mays
  Clone ID: MRT4577_116030C.1
acgacaccgaccaatgtttttcaatgagccatagcctgggttgtgcgtggagccttggcgtggaggccgcgtgtccaacccatgcagctgtcgaccgaaacacgaataacaat

SEQ ID NO: 17575 - DNA, 637 bp, Zea mays
  unsure (1)..(637): unsure at all n locations
  Clone ID: MRT4577_116031C.1
caggacagcagcgaagccgccaccatctgctcctcccaggaggacaagcctgctngaaacaacanaatccgccgagaagaagccggctgttgcagtttcagcctcgttggtgaagcaactccgagacgaaaccggcgctggcatgatggactgcaagaaagctctggccgagtctgacggcgaccttcagaaggctcaggagttcctgaggaagaagggcctctcatccgcagacaagaaatcctctcggctagccgccgaaggactggtcggctcctacatccacgacagccgcatcgggtgcatgatcgaggtggtagcgtgtccgcaggtcgactacgtctcggtggacgacatcccggagagcgtcgtcggcaaggagaaggagatcgagatgcagagggaggacctgcagtcgaagcccgagagcatcagggagaagatcgtggaagggcggatcgcgaagaggctcggcgtgatggccctcctggagcagccctacatcaaggacgacagcaagacggtgaaggatctcgtgaaggagacgggcgcctcactcggggagaacattaaggtgcggaggtttgtccggtacaccctgggcgaggactgatcggtgtgaggtcgggcagcgatc

SEQ ID NO: 17576 - DNA, 649 bp, Zea mays
  Clone ID: MRT4577_116032C.1
ggccaagaccatacgtccatgctacaattcgatcatgttttgaaacgaagcacagataaaagatacaaaattcaatttgccttaatgttgtatatatatatatgctttgatggatatactaaccaacccctcttactcttctgaaccacgaacagcagtaacaggtgatacggaattacagatggaaccgagtcacagaccttctcatgccaaaaacgtgcccgacttctcatgccagggctgcgctgcgctgcgacggagggatcgctgcccgacctcacaccgatcagtcctcgcccagggtgtaccggacaaacctccgcaccttaatgttctccccgagtgaggcgaccgtctccttcacgagatccttcaccgtcttgctgtcgtccttgatgtagggctgctccaggagggccatcacgccgagcctcttcgcgatccgcccttccacgatcttctccctgatgctctcgggcttcgactgcaggtcctccctctgcatctcgatctccttctccttgccgacgacgctctccgggatgtcgtccaccgagacgtagtcgacctgcggacacgctaccacctgcatcgcgaggtcgttcaccagctccctgaacttgtcgttgcgggccacgaagtcggtctc

SEQ ID NO: 17577 - DNA, 3520 bp, Zea mays
  Clone ID: MRT4577_116033C.1
ttacactagaataaagcggttccattctactatattctgaaaccaaacattaccttacattggccaagaccatacatacgtctatgctacaattcgatcatgttttgaaacgaagcacacataaaagatacaaaattcaatttgccttgatgttgtgtatatatatatatgctttgatggacatactaaccaacccctcttactcttcatgaaccacgaacagcagtaacaggtgatacggaattacagatggaaccgagtcacagactaaataaaacaacagctacgcgccccgcctccttgaaccaaaaacgtgcccgacttctcatgccagggctgcgttgcgctgcgacggatcggatcgccgcccggcctcacagccgatcagtcctcgcccagggtgtaccggacaaacctccgcaccttaatgttctccccgagtgaggcgaccgtctccttcacgagatccttcaccgtcttgctgtcgtccttgatgtagggctgctccaggagggccatcacgccgagcctcttcgcgatccgcccttccacgatcttctccctgatgctctcgggcttcgactgcaggtcctccctctgcatctcgatctccttctccttgccgacgacgctctccgggatgtcgtccaccgagacgtagtcgacctgcggacacgctaccacctgcatcgcgaggtcgttcaccagctccctgaacttgtcgttgcgggccacgaagtcggtctcggagttgacctcgatcatgcacccgatgcggctgtcgtggatgtaggagccgaccagtccttcggcggctagccgagaggatttcttgtctgcggatgagaggcccttcttcctcaggaactcctgagccttctgaaggtcgccgtcagactcggccagagctttcttgcagtccatcatgccagcgccggtttcgtctcggagttgcttcaccaacgaggctgaaactgcaacagccggcttcttctcggcggattctgttgtttcagcaggcttgtcatccttgggaggagcagatggtggcggcttcgctgctgtctgggctgcaacttcagcagcaaaatcctggcttttcttctccagcccttcacctaggttgtaccgggcaaatctcctgaccttcatattctctccagttgtagctatagtttgcttcagccactcacttattgtgaccttgtcgttcttgatgaatggctgttcgaacaacgcgaattctccaagcctcttctttacacgcccttcgacaatcttagcccggatctgctcaggcttcgacaaaaggtcctccctctgcatctccagctcggtctccttcttcacaacctcctcagggacgtcgtcaatagagatgtactgcacttgagggcaagcagcaatttgcatggcaagatcgtcaactaactctttgaaaatgtcacctcgagacacaaagtcagtctcacaattcacttcaataaggaccccgattctgctgtcatgtatgtaagagccaactcttccctcagctgttgctctgccagccctcttgtcagcagcagccaaccctttcttccgtaggaattcttgagctttatcaatgtcaccccctgtttcagcaagagcctttttgcagtccatcatgcctgctccagttgcctcacgcaattgcttgacaagggtaggagaaatagtggctgtcgtggtgcttgcttgtgcaactccagcagcagcagcaacctcggcaccagttttctcagtcaaggctggtacagcctcagtgtcagcagctggttctttccccgcctcgctgcttgcagttacaagaacctcttctaccgctgaagattcttcaggttcagtaggtttatctgcagtttctgaaactgaagacacaatagagctatctggggtcccgttggaggacagttcaacactaattgtaggtgaactttcagatcctacagtttggtcctcagcagcatttgccacagaagtagaatcctgaattcccacctgagaggaggcatcagatacaggaggagaaacatcagttgctacttctgacacagagctcaattcttcactacttccctcatcttctggagcagcttcctcctgatagctttcagcttctggagcagaaactgaagtatcagccggcactttggtcctttccctctgatccaagaatgcagagatctctttgttcctacggaaagccaactcgaacgcattagtccctctggaccagtcccgcttaagctccatatttagcgtcttcagatcgtcttcatcatcttccacccctttcatcgtcaaagtggcctgaccctgtgccacattcagtactttaacccttatctgtttaccaatttccattgcagattgtccgataagggtaaataacgccaatgcttcctcttctctgggaaggaatccttcactcccatcaggcaacgtcacaaatgtccctgctctcgttgtacttttcacagtgccattcagagattgccctggtacatattttgactcaagtgtctccttgagttcctgcctttcccttgtttgccttggcgagcttttaggagttgcggtggcactccgcccaccgtttgcagccttcggcgtttctttttgaggcttgacatagtcatcgccttccctcatcgtcagagagatacgctttgtttccttatttgcttcaagcaatctcactgacacctcttgtccaacagtgaagagggaagatatatctttcacgaacccatcacttactctggagatatggacaaggccttctgtgaatgccccaatgtcaacgaaaactccgaatggcttgatagacatcaccttcccagtaaaagatgcgccaggcactagatcctcctcattcagaggaggcatctcgctcttccgtatgttgcgtcccaatttgcgagcagaagaggcttgtcccgtgctagcctcggcctgctcgctcgcatcaatggcgtcaggtgcagcctcagagttcccatcggaggcttcctccgagggagacggattcagatcctccacagtgacatcagtccccacggtcgccgcggacaaggttcttggcctctggggagaggaccagcttcttctcttgtagagactgatcaggtggaacgctgtttgcggctgcagcagtctccgaggcgatggcgatgctactctcgaatacctcgccgagccctggaaccttcttatctggatttctcgggtggtcctgtagcttccaatgtgaaacaggctgacattgccaacggagcaatgactcagtggagtcattctgaatcaagggagtgaggtgtccagaatctcagtccctacagaaccctattcgtcgtcgttgccggcgaagcgcagagggaggaatgcctcgcccgaccccgaccccgaccccagtcagtcgccactagcccgctacggctctgggaagggagaggattggcttatcgctagagccgctgcgtgccattataaaaga

SEQ ID NO: 17578 - DNA, 388 bp, Zea mays
  Clone ID: MRT4577_116034C.1
attaggggaatatataaatatagatttagatgaatatataaaaatatatttagatgaatatataagcatccaaggcctcaagattcttttgtacaggaggattcagctccatggactgctcccctgcagccagatttcctttggctgaaaatctgcaggaatcttggtggcaagcgcgtacactgcaagatgcagttcgcccattgatccagaaattacaacacacacaacagtgacatgtttcttgtggagcagtaggcaatgattgtgccccgcaaatcccggcacccatgcatcaatttcctaacactaataatacactgtgactgtgagggacaaaacccaactgctgcctgtttgtctgaaagttactacagcacaacttggg

SEQ ID NO: 17579 - DNA, 599 bp, Zea mays
  Clone ID: MRT4577_116035C.1
gatagatagatagtatcatacataaagctggtttacaacggaagcatcatttggccaactataacggacaaaacaccataaggacaaagacatccaatccgtgcaaccaaagataaaaacaggagtgacccgattttagtagatctatccagcgtcttcatgcttaggactcaggagatataacacttgctgaacatccaaagagtacccccacatgctaacaacttcagtgcttcataacgatttgaaggagggaacatacggggtaacataaggacagccgtgccctaaggagcacagaacttgcacttgcctgctatccatgtcgtatgatatcagtttctggtataagcgatgaacaaaaaaaatcaaattccgatccgtatgaatgccaacaatagaatagtaagaattgtatttaagttttgtagcttcgaccagctggcaaaggctcaggctatgcttcagaacccactcttctgtatcgtagtcctcaagaacccagatcgacagaccagggtcgctgaaacgattacattcaaccaatcgagtgatacaatgaaggcgtccctgtgattgaccaataaaaccaactgtaa

SEQ ID NO: 17580 - DNA, 314 bp, Zea mays
  Clone ID: MRT4577_116036C.1
gtggggggggttttttttttacttttttttttttctttttatttttttaccgtactctgcagcgtaccagccgcccgtatagaccggggaattagagcccggcgccagcaggggcacaagtttttcctatggggaagtcgaaatacggccaggggggggggggggaaaagacccgtacgcataagaaatagaagcccggggcagactaacgagcaagataactgccatgaacagaaaggggaaaaccgggggggcccaaggggggaaacaactcaaaccaattgcattaagcaaacggccaactttcgaggaga

SEQ ID NO: 17581 - DNA, 356 bp, Zea mays
  Clone ID: MRT4577_116037C.1
aaagcttcagctggacccaacagtggaggaagttaagaagctttgcaatacttgccgcaaatatgccagatcagagagagttcttttccattataatggccatggcgtaccaaagcctacatctaatggtgagatttgggtgcttaacaagagttacacacagtatattccacttccaattactgatcttgattcatggctgaagacaccttcaatttacgtttttgattgctcagcgtctggaattattgtgaaagcttttctagagcgcctagattggagttctagctcctctgcatcttcacggaaggactgcattcttcttgctgcctgtgaagcacatcaaactcttcctc

SEQ ID NO: 17582 - DNA, 379 bp, Zea mays
  Clone ID: MRT4577_116038C.1
gggttgtggtatgttttttttttttttttttttttttttttataaaaacccataccttaataatatggggtggttggttggcttctaacttatttaataattgaccggatgaaaatgggccctgtttaagcctaaattaccgagaaatctttggggcactagggggcgacaggaagcaagccgttttgtttaaaaaatggtttaagcgaaggctcccgtccttgggatgaaaccaacacctcaaggggggacttttctccttcaagcgcaagaacagggggtttgaattggctgcccggttcctcgaatggctttttattattcaaaccaacgtttttaaaaacttggaaaggattaacttgcagggcttttaccccct

SEQ ID NO: 17583 - DNA, 699 bp, Zea mays
  Clone ID: MRT4577_116039C.1
cacagacacacgatgcatggaaccatggagcgagatgcaaaccgcaggatcaagtatggacattcataccaggagagggcacatagaacttgcccaggttgtaagctgtgtggtcaaaattacaattaccccaatggtgaggaattttctgcaatcagcggttgtcaggaggcatactaccagacagaccatgatctgattccttcaacttctcaagtagcatctcattgcgagggttcttgctgcaagggccagcagttgaaaccgaaaagttattctgtgatgcgtgattatgactatatcaatcaagagtcaacacctagttcaagtgaccatgccagaacaagatctaatcttccagcgccgcctcatcattggcatgttaaacattctaatgagcatcggaggcatgttactgatgcacattctgcttttgaggtcagggaaagccgaagctggtatctatcttccaaagatgctccaagtactcactccaggaagcaccataggccagcaagataagctgtaactgcaagatagagaaaatctagtagcagctcgcttctgatactgatggatagcatttgttaccggggccctgcttacgtggctgacaccctgttgcggggaggaatctgttccaaggacagcagtataccgtcccaatttataaccaaatactttgccttttctcggttc

SEQ ID NO: 17584 - DNA, 121 bp, Zea mays
  Clone ID: MRT4577_11603C.1
cgggcgcgtgggtcgacagtacttttggctgccctagaatcagcaagcactgactttaggcgctgacgctaggatacattctgcaagcaaatgcatcgcgtggacacaacgatgtcatccg

SEQ ID NO: 17585 - DNA, 970 bp, Zea mays
  Clone ID: MRT4577_116040C.1
cttttgttttggcctccctgtatgcgtctgcgtgcgtgcctactgcctagaggcctgatgcagaagctctgcgccgtcgaccccagccttatgacgaacaagcagaagctggcgttttggatcaacgtctacaacttctgcgtgatgcatgcgtttctccagcacggtttgcctccgtctccggagaagcttcttgcgctgctgaatcaggcttcggtgaacgtcggcggaacagtgctgaacgttgtgtcgatcgagcacctcatcctgaggcactctcctgacgccaagcaaggcattatgggcgacgacggacagacggatctgctgcactcgtacgggctagggtatcccgagcccaacgtcgtcttcgcgctgtgcagaggcagccgctcctcgccagcactgcgcgtgtacacggcggaggacgtgtcgaacgagctggagcgggccaaggtggagtacctggagtcttcggtgcgcgtcgccggcaggaagcagcgcgccgtcgtggtgcccaagctgctgcactggcacatgcgcgacttcgccgacgacgccgcgtcgctgctggagtgggtgcacagccagctgcccagggcgtcggggccgctccgccgggccatcagggaggtcctgggcgccaacatgggcagcggcagcagggcgcccacgccggcgccggcggccaagatgctggaggtcgagccgtacgacgccgacttctgctacctgctgcccgtctggtgagcgtcagcgaccgtccgtgtccatgtaagcaaggcattgctagctgcgcgccgcgcgggtcaagttctgctgtgaccattgctgcagtgcgaggtggtgacgatgtcgtgcatgtgaagcgtgaactacttccgccgtatgatagttttactacgtacatttttttgtgcgttgtgttgacgtgcagaagtatcaatcaataaggccttgttcctattcc

SEQ ID NO: 17586 - DNA, 495 bp, Zea mays
  Clone ID: MRT4577_116041C.1
atggtgaccggggaaaagcctggatcttcgggaaagaagaacgaagaaagaactccatcgaatgaggccgacgacaagcacaaggagcacaaggaggtatccgtaggctccatcaagtcacataggaagggcaaaccaccatattttgatggtgaagattattgtatgaggagtgataaaatgaggcaccatctaacctcactccacgaaagtatatgggatattgttgagtttggagcgcaggcaccacaagtgggcaacgaggattacgactctgatgaggccacccaaataaggaactttaattcccaagccacctctatactcctcgcttccttgtgtcgagaggagtacaacaaggtgcaagggttgacgagtgtcaaagaaacttgggacatccttaaaacggcacatgaaggggacgaggtgaccaaaatcaccaagcgcgaaacgatcaaaggagacttgggtgatatcccaagtgctttaccgtaa

SEQ ID NO: 17587 - DNA, 422 bp, Zea mays
  Clone ID: MRT4577_116042C.1
cccacgcgtccgcccacgcgtccgacggtttgtttagtagtacaaccaattacgattcgccgcaagcatcgcaaccatctcgacggtacaatctattgttccgctatctttctagcgacatatggtagaatgccaccatgatcgtagtaagcaagctccacctcagtgtcgaagagatgccttggacccacaggcatctggagcttatatatttagaccagatggtaatacaccaactattgcctcatcatcggtgactcttaaagttatccgtggacctctatttgatgaagtccatcaacaattcagctcgtggatttatcagattacacgactctacaagaacaaggagcatgctgaagttgaatacacgattgggccaatccctgttgacgatgacgtatgaaaggaggttatcacac

SEQ ID NO: 17588 - DNA, 821 bp, Zea mays
  Clone ID: MRT4577_116043C.1
cggccgctcgaggcggcaggccgggaatccaccaaacccctcacccgcacccgcagcgcccctgccctcccgaggccgcagccttatcctctccgccccgcctcgctcctccgccgctccgccaaggaaaacatggcttcaccatttggtgccacttctactgttgggctcatggcagctccaactggccttgtatctgacaagaagccattttcgttatcatctatctcccttgccgacaggccacgacatgtgcgccttcagaggaaatgcaacttcagagttaaagcagctaaggagctctacttcaacaaggatggctcagccaccaagaagctccaggttggagtaaacaagcttgcagatcttgttggagttaccttgggaccaaagggaaggaatgttgtgttggagagcaagtacgggtcccctaagattgtcaatgatggtgttacagttgcaagagaggttgagctggaggaccctgttgaaaacattggagctaagttggttaggcaagctgcagcaaagaccaacgatttagctggagatgggacaactacttctgtcgtccttgctcaggggctcattgctgagggtgttaaggttattgcagctggtgctaaccctgttcaaattactcgtggtattgagaaaacagcgaaagcactagtccttgaacttaagaagatgtcgaaggaggttgaggacagtgagcttgcagatgttgctgcagtcagtgctggcaacaactacgaaatcggtaacatgatagcagaggctatgagcaaggtcggacgggaagggagtggttacccttg

SEQ ID NO: 17589 - DNA, 680 bp, Zea mays
  unsure (1)..(680): unsure at all n locations
  Clone ID: MRT4577_116044C.1
cggacccaagcattgtatgaagagaactgcagctcagacgtcgcctcccttccaccccttgctgctcatccctctcatctcctcagctcaccttgtcggcagccaggcttgttagcgagctcggccctgcccagctccctctacctgaccgcccatctccctgccgaggccccgcccgtccgcgctccacctcgccccaagctgtagccgactgcccacctcccatggtgtgtcgacatggagctcgggccgcgtcccttgtcgcctgtttccctgctgtcgcggccctgtcatttgccagcgcccctctctgagcctccatggcgttgccgtggagctttcctgcgcgcccatctcctgttgctccagctcccgcgcgccctccgctctgttgccgcacgcgcgagctcgccggcgttgctcgccctccagctcggccgaccgcgctgctccctgcgtgcccggcctcaagttcctgtgcgtgcgctccactactcccatggcgcgttcctcgctgccacggttgtccggtgtttggccgtgtcgtccacgctctgcccagtcgcccagctcggcctcggctctgtccctgctgctgcgcgcgtgctcatcggtgttcccagctcacccagccggagttttcctgtgcgcgccgttntccccagctcggattccgccag

SEQ ID NO: 17590 - DNA, 431 bp, Zea mays
  unsure (1)..(431): unsure at all n locations
  Clone ID: MRT4577_116045C.1
aattcggcacgaggctcgcccacgcccacctcccctcatgtggctgccctgggtgaagacgcgcccttcgtccgccacctccacctctcccacatccaccgcgctcgtagccgccgccgccgccgcctccccgcgcctgtccttctcctcgccctccctcaaggacctccaggcgctgctgctgtctgacgcagccacgccctccccgcagcccgccgcgccctgctccccctcgtcccgcgtccgcgtcttccaccgggtccgcgtcgccgcctcggccctccgcgcgctccgcaccctccaggcgccggcgcccgccggcgccgccacctccgaggccgaacgccgcgtcgtgctctacttcacctcgctccacgtggttcgcgggacgtacgaggactgccnggccgtgcgcgccatgctgcgcgggc

SEQ ID NO: 17591 - DNA, 350 bp, Zea mays
  Clone ID: MRT4577_116046C.1
ggggcgtggagctctggcggtgctgctccgcccaggcatcatccgacgtgctagcgcttcacgctatcggctcatgtgccacggtgccgcagcccgcgtggctcgtccccaaggcctgcgacaacgtcgctaggaaagagaagcatgagatggtcatgtcttgctcttgccccttcctgctgtacctcatgtcctcgtctcgtcacagggtaaggccgtgtaggtgcgctcgataagcaaacccctgaaacctcttggattcattccgtgagcttgcatcctggcgcacccattgaacattggatctctgatctgaaaaaaaaaaaaaaaaaaaaaaaaaaaaaaaaaaa

SEQ ID NO: 17592 - DNA, 136 bp, Zea mays
  Clone ID: MRT4577_116047C.1
gcaagctgcaagacacgacctagtagcgtgcggcccagaataatgttatctcatgttactaagtgaataatgttactttacgttcatatttctgtgcatggagtactgatatatttgcagtcaggttgcatggtat

SEQ ID NO: 17593 - DNA, 734 bp, Zea mays
  Clone ID: MRT4577_116048C.1
gaatgggagtcgtcgggcacctcacttccacttgatccaccaccgtacgcaccctcgcctcggccggagcatcagggacgacgaagtgcggtcctcgtagccggcccgggatcgatcgagtagcatagtacgtgtgcatggcgaaggctagcgccacggccggcgtggtcgtcacgctcctgtgcgtcgtcctcctcctcctcctgtcgtccgccgtgacgacgaccgaggccggcaggcatctggggacgcgggggaggagggacgacggcgcggccgtgacggcgggggcggggcggccgctcggtaacaaggtaatacgggaggaggagatggaggcgtcgacgacggacggcaccaccggcgccgccggtgtcggcgagtccaagaggcggagccctggcggcccggatcctcagcaccactgaatcgaaacaagacactgtcggtgctgtcagccgaccgcgtgcgtgcgcgatagacctgaatgtacggttggattcgaagagctctagcgtatgtgctcgtatacaataagaagaagatgatgttgtttttacttttacggttgcagctatattgtagaaccgcttgctacatagcacggccaataaagactcaaaagcttaatttttccagattctattcatctgaaacatgacgtcaggttatgcaatgggtctttcggagagctttagaaaaaaaaacaatgtgagaaactttatgagtaaaaa

SEQ ID NO: 17594 - DNA, 159 bp, Zea mays
  Clone ID: MRT4577_116049C.1
cgttgctatctctgccccaagcaaagtctcatccatgtttgatgttaccctcaatcaggacgggtacacctttgatgttcacatcctttccaatgctagctgcaccacaaactgtcttgctccccttgctaaggtcattcatgacaacttcaccattgt

SEQ ID NO: 17595 - DNA, 738 bp, Zea mays
  unsure (1)..(738): unsure at all n locations
  Clone ID: MRT4577_11604C.1
cattggtacctcgagccggccatagatattccatgtcatctctctattgcacggtatttgctctacgttcccctctctgattctttttgatacccttggtaccatggtgttgcattctaacaacaacgagtaatccaatttccccttaaaaactatactcaggtatctgatatctgttagaaggtccatatgttgtggatatccgtagtttttgtttggctatttggatatcaaatattattgcttatatgatgcaatacaacttaggatatgtctggatcactacctgacgtgccatgtcttctttcctcgaacacgcaggagaactgcatgtcatttcattaataaattgaaaacagtttgattacgtgccgattccatgcctctagttgcgcccttgaacctatagagacgcagccatgccttttcggcaaacaatgttctaagatatggccaacaatttcttcaccacaccttagttaatgttttggcaagaaaatgggtctctgacaggtgataaccatacacccagctaagaaagtaggcggtgcggtgcctaacatctggtgtcacaatgttaaaagcaaaatcacttaacttgatacagntctttgcattctgtattttttattctgatgaacttgcacttgcttgaaatatgtgggcacttgcttgaaatatcttgcttgcttgaacctgataacagctggagtccagtctaacagccacacttcgatc

SEQ ID NO: 17596 - DNA, 407 bp, Zea mays
  unsure (1)..(407): unsure at all n locations
  Clone ID: MRT4577_116050C.1
tatatttttttttgaattttctaatttgggtttttattttatttatttatttttttttattttcctnaatttttggttttaaaagattttatggaaaaatactggtttttgacataggaggaaaaaaaaaagttggaactaccaaaacgggggatttaaatccttaagggtttgccaaaaaaaaaaaacaggttaacagactgacaaggcgggaacaaaggaagaaattaaataactcgcaacgttttcagggcaaagggttaatttaaagggtcaaaacttaaaattggtaaaggccactggcattttcccggaccaaatttctagggaactttagcataaaaactttgttttggaagaacatagggggacccaacataacatttaaaattaaagaaatagggggg

SEQ ID NO: 17597 - DNA, 430 bp, Zea mays
  Clone ID: MRT4577_116051C.1
caatcggggacaggcctttttttttttcaaaaccaaaaaaaacccccataacacaaacaaaaaagggccgggttttagcaggggccacaaatagataaaaaatttgggggggaagccccccccccacaaaacaggcccaaacctttagttaaattccccagcccctaaaataaaaggggtacaacaaaaggggggaaacggggggggggcccaccccaaaacaggaaactttgtaaaagggggggatcaaaaactgggctttaaggaaaatttcaggcttacccgagcggaaaaaataactttaaaaccctacccatccgggtaagggtaaccaggggggcaccaccaaaaccacctttgcctgaggaaataaacggggggcaaccccttgcatccggaaacctggaaacccccccataccccccgggga

SEQ ID NO: 17598 - DNA, 361 bp, Zea mays
  Clone ID: MRT4577_116052C.1
cggggcggacccaggcgtccgggccgtttttccatttaagtaccatggccttgtaccattttttaaaggaaaccaggtctttggaaattttcgttggaatttggccgtggttaactcgtggtttcatgccatccttaaggctccgttgggccatcgttttgggggggtttgaaatggaatggggtggattcccgaatcagccgggttattgaaataggaggtattttcaaaaaaaaaaaaaaaaaaaaaaaaaaaaaaaaaaaaaaaaaaaaaaaaaaaaaaaaaaaaaaaaaaagggggggccgttttaggggatccaggtttccttccccgggcttgcaacgtattagtttttttttgg

SEQ ID NO: 17599 - DNA, 1064 bp, Zea mays
  Clone ID: MRT4577_116053C.1
cattgggtacctcgaggccggccgggatttaacgccgggcccgttcccatccttgagaaccgagcggacgccgagctgcaagtaactgcaccgactttcaaccggaagagccgagccgaaccaaagtcgcctcgtcgtctccaacctcccctccctcgcctcttgactaggccagggttccatcccacccccgccgccatccgatccgatggagggcggcgactcgtccggcgccggcgccggctccggtggcgccgtggcggcggcggccaagtggcggagcgacgcgtcgcggtcgttccagtactacctggaccgctccacgcctcacgccacggggcggtggctcggcacgctcgccgccgcggcaatctacgcgctgcgggtctacatggcgcagggcttctacatcgtcacctacgggcttgggatctacctcctcaacctcctcatcggtttcctctcccccatggtcgaccccgagctcgacccctccgccgccgccgaggggccggcgctgcccacccgggggtctgacgagttcaagcccttcatcaggcgtctccccgagttcaagttctggtatgcaatcacaaaagcttttgttgtagcttttgtgatgactttcttctctgtgtttgacgttcctgtcttctggcctatactcctctgctactgggttgttctctttgtccttacaatgaagcgccagattgtgcatatgatcaaatacaaatatgtgcctttcagtatcgggaaacagaaatacggtgtgaagaagagtgtcgcaagcaccagttcctcgaaagactgattatgagtctacctcagtaggaacttggcaggggaacaagatacggtggatgatgatgtgctaaatacctaagtgtaatactccattcatatgtagatgtagacggatattcgctcctgtttctgactctgggctcactgtttaattcgatattgtgcttagattgctccctcctatgcttgtatagcgaattccgcatctcagataaattatttcgtttatttacgaaaaaaaaaaaaaaaaagcggcc

SEQ ID NO: 17600 - DNA, 1030 bp, Zea mays
  Clone ID: MRT4577_116054C.1
ctcttgactaggccagggttccatcccacccccgccgccatccgatccgatggagggcggcgactcgtccggcgccggcgccggctccggtggcgccgtggcggcggcggccaagtggcggagcgacgcgtcgcggtcgttccagtactacctggaccgctccacgcctcacgccacggggcggtggctcggcacgctcgccgccgcggcaatctacgcgctgcgggtctacatggcgcagggcttctacatcgtcacctacgggcttgggatctacctcctcaacctcctcatcggtttcctctcccccatggtcgaccccgagctcgacccctccgccgccgccgaggggccggcgctgcccacccgggggtctgacgagttcaagcccttcatcaggcgtctccccgagttcaagttctggtatgcaatcacaaaagcttttgttgtagcttttgtgatgactttcttctctgtgtttgacgttcctgtcttctggcctatactcccggctgctactgggttgttctctttgtccttacaatgaagcgccagattgtacatatgatcaaatacaaatatgtgcctttcagtatcgggaagcagaaatatggtgggaagaagagtgccgtgagcccgagttcctcaaaagactgattccgaacctgccccagtagaaacttgccaggggaacaagatacgttggatgatgatatttgatgtgctcaataccaagtgtaatacttcattcatatctaggaggtagacggattttcgctcctgtttctgactctgggctcactgtttaattccatgttgtgcttaaaaaaaaaaaaaaaaaaaaaaaaaaaaaaaaaaaaaaaaaaaaaaaaaaaaaaaaaaaaaaaaaaaaaaaaaaaaaaaaaaaaaaaaaaaaaaaaaaaaaaaaaaaaaaaaaaaaaaaaaaaaaggggggggcctttttaagggaccaaattttactaccgggggtttgaaaggttatattttttttttggggcccccaaaataa

SEQ ID NO: 17601 - DNA, 568 bp, Zea mays
  Clone ID: MRT4577_116055C.1
cgccctttcgagcggccgcccgggcaggtacaagcttttttttttttttttttttttttttgcttttttttttttttttttttttttttttttttttatttttttttttttttttttttttttttttttatttttttttttttttatttttttcaaaatttaaaccaaaaatggcgtaatcacccccatacccgctccccctaaaaaacaaaaaaccacaaaaaattgcgcataaattttgagacccaaaatttcaaccaaaatcctcgcattcacaaaaaaaggaaaaaacttaaaaaaaaagcgagggccccaaaaaacaaaaaacaaaaaaaaaacctaaaaaacaaactaaaataaaaaaacccaaaaaaaccggcaaaaataaaaaaaaaaaaaggccacaaaaacccgtaaaaaaaaaatgaaacctttcgctaaaactttcaaaaaaaaccaacaaaaacaccttaaaaaaaggcgggaatactgggatccctttaaaccgccaaaaccgcggtaaacaaattttggccaaaggcccggaaaaagcccgtaaccgcaaaaa

SEQ ID NO: 17602 - DNA, 470 bp, Zea mays
  unsure (1)..(470): unsure at all n locations
  Clone ID: MRT4577_116056C.1
ggggagctaagcacaatatcgaattaaacagggggcccgggtcagaaacaggagcgaatatgccgggtacatctagatatgaatggagtattacacttaggtatttagcccttcatcaggcgtctccccgagttcaagttctggtatgcaatcacaaaagcttttgttgtagcttttgggaggacgttggtgtctgtgtttgacgttcctgtcttctggcctatactcctctgctactgggttgttctctttgtccttacaatgaagcgccagattgtgcatatgatcaaatacaaatatgtgcctttcagtatcgggaaacagaaatacggtgtgaagaagagtgtcgcaagcaccagttcctcgaaagactgattatgagtctacctcagnnggaacttttttggggaacaagattccggggttgatgatgtgctaaattccctagtgtgattcttcccttcttctct

SEQ ID NO: 17603 - DNA, 1273 bp, Zea mays
  Clone ID: MRT4577_116057C.1
atgcgtaccctctcgaggccggccggggctctagtttgcacatgtacgttcccatccaaaaaccctcggcaacggtgatgcgacgcccgtcccgttccaagtcctgacaaccgagcgtacgctgagctgcaagtaaacggcgctggctaccggaagagccgagccggaccaagtctcctcgtccctcacctcgtcgccgatggagggcggcgactcgtccggcgccggcgccggcggcgccgtggccgcggcggccaagtggcggagcgacgcgtcgcgggcgttccagtactacctggaccgctcgacgcctcacgccacggggcggtggctcggcacgctcgccgccgcggccatctacgcgctgcgggtttacatggtgcagggcttctacatcgtcacctacgggctcgggatctaccttctcaacctcctcatcggtttcctctcccccatggtcgaccccgagctcgacccctccgccgcctccgaggggccggcgctgcccacccgggggtccgacgagttcaagccattcatcaggcgcctccccgagttcaagttctggtatgcaatcacaaaagcttttgttgtagcttttgtgatgactttcttctctgtgtttgacgttcctgtcttctggcctatactcctctgctactgggttgttctctttgtccttacaatgaagcgccagattgtgcatatgatcaaatacaaatatgtgcctttcagtatcgggaagcagaaatacggtgggaagaagagtgtcgcaagcaccagttcctcgaaagactgattatgaacctaccccagtaggaacttggcaggggaacaagatacgttggatgatgatgtgctaaatacctaagtgtaatacttcattcatatctagatgtagacggatattcgctcctgtttctgactctgggctcactgtttaattcgatattgtgcttagattgctccctcctatgcttgtatagcgagtttcgcgtctcagataaattatttcgttttagttactacatatctgggccctaaaacaataagctctatgctctcagcaagtttggttgggtgttgagctgggtgaggtaggcggttggttatttttgtatcgaactggaacaggatgctaaactttaaacgcagaatattttgacccaaaaacactgtagcatatcatagatagtacgtatcaaacatcgaaattcaaacgcagaatattgctgtctgcatttgacccaaaaaaaaaaaaaaaaaaccgatt

SEQ ID NO: 17604 - DNA, 403 bp, Zea mays
  unsure (1)..(403): unsure at all n locations
  Clone ID: MRT4577_116058C.1
tggtatccttcgaacactaacaccgaaccatgttaaggggggagatatacacattatgacgcggtaaatcgttctacctgtaatagagcagaacatacttccaattctcataccagtatgctctgactgtcttgaatagtgcgcatcctaaggggatagaattgttcaacctttctggcaaggacagtgcacgatcgtcaacgctgccaccgtggggttgtctgaccttacacaccaaccgtggtcgatatccaatggtgatgtgtcaagctgttgatgtgactgagcttcttagagaatgcaataaatgttnctctccggctcaaccatatagatttcactaagattatgcaaaaagatgtatcagtatttagacctcgaaatatgtatccactaccggaat

SEQ ID NO: 17605 - DNA, 354 bp, Zea mays
  Clone ID: MRT4577_116059C.1
acttatggacctgcaatacacaaaacagaggtgggctaaattggatgcgcactaggatatcgaagaacaccacactacatcgcgtccaaaacctacattaaagattggtatcgacctgctatgacctatataaaggaaacaatacgaaattaacataaacacacctgcattacattgatacaagtgacatgcagtcggaacatactggtgagacaactgtataattcattggctgtccagacgtgatccgtgagctttcccccgagaagggtgcttgccatatgctataaaaggtgcaccacatatcgagcacatgtcaaataccattgtcttatgaaccaaagaaattggagg

SEQ ID NO: 17606 - DNA, 626 bp, Zea mays
  Clone ID: MRT4577_11605C.1
ggggacggggaaatttcctctcagaaccccgtacggctaggacaggacgttactgccattgagatattaattacagtttgcaccacgggagggcactagcattgcttcgcaacgcaatgcgaggactcgagcagtcgaagcgacgacggctctagtcggggtcgggccgtggacgagacacgagagccgagaggtcatacctaacaatgcagactgactgttttaataaaagagaggatcagcgactacacattggatgaatgctactcgatcctagcgtgctctcggaggataaacgggagaaggtcacgtgtccagtttcccttactcttgaattctttgggaggtatgagatgaacgattaggtataggattacgtagacctcgtccctactaggttgacggttgttaatagtgttcctggcgaagtgccaacagagaaacgataatcgttcgtaaggatagctttgcacttcctgaaccagagcaccaagtctgctccccaaagtctggaaggtcacgccagcataaaactattgggaactactgttaacgctcgtggcacgttccaaaggagggaacagggggcggtcgaagatgtaatccggatcgagagggggggtttg

SEQ ID NO: 17607 - DNA, 848 bp, Zea mays
  Clone ID: MRT4577_116060C.1
gggtacctcgaggccggccgggatctcatccatcacaacacaaaagacactcttcattcctagatacccacttgattctcgcgcagaggatctggtatctagtcttttcttccacaacaaccactcttttccagcggcggcatccagaggatccccccgcttcaaccccgccacgagcaacttttcgactacggtccagcaccagtagtcgctcttccccagtcgcaatcatggctgacaaaggtcttgaggatgtgcccgagggccagatcgagtccaactacgatgaagtcaccgactccttcgacaacatgaacctgaagcctgagctcctccgtggagtctacgcctatggtttcgagcgtccctctgctatccagcagcgcgccatcatgcccgtcatcaagggaaacgatgtcatcgcccaggctcagtccggtaccggtaagacggctaccttctccatctccaccctccagaagatcgactccagcgtcaaggcctgccaggctcttatcctcgcccccacccgtgagctcgctcagcagatccagaaggttgttgttgccattggtgacttcatggaaatccagtgccacgcctgcattggtggtaccagtgtccgcgacgacatgaaggccctccaggatggccctcaggtcgttgtcggtactcccggccgtgtccacgacatgatccagcgtcgcgttctcaagaccgaccacatgaagatgtttgtcctcgacgaggccgacgagaggttgtctcgcggttcaccgagcagatctacgacatcttccagcttctgcccagtccaccaggttggtcttctgtccgcacatgcccca

SEQ ID NO: 17608 - DNA, 366 bp, Zea mays
  Clone ID: MRT4577_116061C.1
ttagcttaaactgcgtgtagagaacaccgcgcgggtaaaggttgtctgggctttgtcaacgccctcaacgtttgcgcaagccgcaaaactgaagcggttgactggtgctaaagagaaggacctggcaaaaagtaagcgttgaattcctcaaacattgcgtgggttcttgctgttcttgtttgggccgattcgggttgctgcactctttcttttgtccattttatagtgcaagatgtggacattaaagggaaacagtctttatatgaaaaataccgaaaagttctcctggccgcaaaggtgcttcgtgattcgtgtagtttatgctctcaaccgttcgctctacgtacagtttgaggagtctcatca

SEQ ID NO: 17609 - DNA, 850 bp, Zea mays
  unsure (1)..(850): unsure at all n locations
  Clone ID: MRT4577_116062C.1
accaggatgcatgctgttcaagtgatgaacttgctcaaaaccttaattctcaaaacacttcgggaacgcgaggatgatgatgcaggggcctattcttcattctcatcttcgttatcttcatcnnnntgacttgacgaggatgatgggcatgaccaacaggatgatgaacatgatagtggcagtgagnnnnnctataatggcagtgctaacggaagaccaagagatattgacaaggccactgcactaagagtagacagtgagcagctaattggtgtgtccaggaggcacacatcaaccgatttccatctgccttacattagatacagtaacgacagtgaagacgtatcactggatgatattgaggaatgcttcttaagaaggctagaatggaaatcagtgagggaaagtgttgatgaaggcgacagtagaaactctcctccctcagagaaagaggcagaggcagagtggcttagctcctctgagaacgtaacggaagctagcaacgcaattggtgaagaaagaggcagaacaagcaatgccactgatgtaagtgtcaatgagctgaggcaaacggaaatcagaattgaaatgacgagtgctgcaaaaggggagtttattctttgctcgtagtttggttatcgtccttgtaagggtatgtagctctaagcctatcgttcttggcagtccgtcagtccttgtaaaattctttgcacgccagtttgtactttggctgcgaagttgattaattgtgttgtttaattgaagcagaaacaaccagtttctagctagttggacctcggtaatcagctgaactcttgcaaccggaagcatgtgaaactatatttgctcg

SEQ ID NO: 17610 - DNA, 486 bp, Zea mays
  Clone ID: MRT4577_116063C.1
gctcgagcaacctgaaggccaaatcgccgggttaaacttcgaatacttcccatctcacgaatcacaaaagaactttacgtgtctcttgattccacaaacttttcgcatttagctggtctagcccccattccaattcgtggcggccatgccaccggcgctcatgggggctgggaagggcatggaggctactgacgccttaaacccctgacgtgccgagcttgcgctggaaaagacccatgcaggacgtcaactccgatgactctggcggcaatcagatcctgtcactctaatagcgccttatagactgcccttctgctcatgtgctcattaaatattgcttaaccgtcagtccgagcctctacccagggatcttcaaactgaatattgtaaagggcctcatccaacttggctatttgctcaaaaagcggcgcaaaatgctcatacttagcatgctgctctaaatatgaaaaatggccaacatgaaca

SEQ ID NO: 17611 - DNA, 303 bp, Zea mays
  Clone ID: MRT4577_116064C.1
gctgaaaaaattttgtgtgtagttgtgggatgatctgttgaagactatttgatatatattgtgggtttttgagagagtgatagggaggtaagcagagtaagtgacagggcgattcttagatgctttaggagaagattttttatttttgtgcgagggaacggaatggtttggtgtggagagttgtataaactatatgtgccgtccaaatgctaaagcgtttaggagagtattaggacaaggattgacttgctgtgataattgaaggttaggcccgtggttaaagatgtaagagattaaaatggt

SEQ ID NO: 17612 - DNA, 351 bp, Zea mays
  Clone ID: MRT4577_116065C.1
gacaagcgtacgatcggtcctacagcgcatgctgtagcatcagtcgcaaagcgggcagcgcgcggggctgatcgacagcgcacagcgcccacgaactgacagccatgagcaggctgcagcagtccactccatgcgcctacgctactgccggcagcgtccgccagtggagaaactacgagctggacgatagccagtggctagctagctagatcagccatgtatcgatgatgattgagtaataatgtgtcacgcatcaccatgcgtggaagtgccagtgcgagcaatgacctgaatgaacaacttatatggaaagaaaaaagtcttggtgcaaatcgagcacaaacgggcagc

SEQ ID NO: 17613 - DNA, 649 bp, Zea mays
  unsure (1)..(649): unsure at all n locations
  Clone ID: MRT4577_116066C.1
gtctccggtcttcttcttatctcatccccgactccgacgagccccggcgaccgaccggcgagggatggcggcgacggcgacgaagctgagcagcggccacgagatgccggccgtggggctcggcgtctggcggatggactccgccgccgtccgcggcctcatccactccgccctccgcgccggctaccgccacttcgactgcgccgctgactacaaaaacgaggctgaggttggcgatgcgctcgcggaggcattcaaaactgggcttgtcaagagggaggatcttttcatcactaccaagntgtggaactcagatcacggccatgtggtcgaagcctgcaaggatagcctgaagaagctgcgattggattatctagatctctaccttattcacttccctgtagctactaagcatactggagtcggcacaactgacagagctcttggtgatgatggcgtgcttgacatcgataccactatcacattagcaaacaacgtagccatgcaatgtcaagatcttgttttccctggcaacttgctcacaacatcgtaattagcaactactacatctttcctcacattagactgcttgacctagcctaatacaaaaaccgacgagaaccaactacatatacaaccttacttcccc

SEQ ID NO: 17614 - DNA, 420 bp, Zea mays
  Clone ID: MRT4577_116067C.1
atggctaaggtgaaggtcgtgtgggctcgtgttgatgtacttggagcggtaaaggacgaatgttgtgtcttggctgatggatcggagcagacgggtgaccaactgtggtggctgacacctggaacacacactcgtgtgaggtggcagagtgggtcgtgttgccggcgcagtcgaggacttacaggacacatctccaggacatggtggacgcgtacacagtacgatactcacggcggtttggtggttgagcctcaaaatcatccagcgctacgaatggtgggttttgctgagtttgggcctcaaaactcggtggcggctgtttcaaagggaatcgatggcgacacgtggcatcacaacgaagggtgtgtcaaggcgaagcaacttcgtgtggagcgtgtgggtgttagatcaaaaacctag

SEQ ID NO: 17615 - DNA, 489 bp, Zea mays
  Clone ID: MRT4577_116068C.1
acggtcgggaactcaacacatcccatctgcagacagtcgccggcatacgatcgatcgtcggagaactagcccctaccaatgcctgtattcggcgaggaggacaagaagcccgcggagggcaccgcccacatcaaccttcaggtcaagggacaggatggcaatgaagtgttctttcgcatcatgaggtccacccagctgaataagctgaatgaacgcttattgcgaccgccaatctgtggacatgaatgccattgcgttcatgattgatggccgcaggcttcacggcgagcagacccccgatgagctgcaagtgcaggacagggacgagatcgactccatgcttcaccagaccggatgcagcgcacctagcatcacctacacgactcgatttgctctccgacctgcgtactacgcaagaaaaggcgtataagttttttaaagaacttgtgatgcgctgcctccttgtgccatttgctgagggacatccct

SEQ ID NO: 17616 - DNA, 626 bp, Zea mays
  unsure (1)..(626): unsure at all n locations
  Clone ID: MRT4577_116069C.1
accaggccgttctttgtgtcgaatcgaggcacggtgaggtcaggtgcgaacagatccaatgtcctgggtctaccgggtggcgggcacgcgaatgcacggacataccaaggcgtgaagaacctctacatcagctccctgaaggggatcaagagagcccctcgaccgcctcccgtccgcgtgtggctccgacatgaccgtgagcaacgtaagagaactgaagctggtcctcaggaagatcgcgttccccggcgtcatcggccggcaccgcaaggccttccggactgaggacggggtctacatgtacttcgaagataatgctggaagggattgtgaatgccaaggctgagatggaaggttctggaatcactgcacctatcgcataggagtgtgctgacctttatcctgagatcggcagtgcagcatatgccatcgattgagaggttggtggaatggggttgacacttggagtatgatcatctcagttgtgtgatgagaatgatgtgagggtgttattgttcttgatgcctccttttgtggttgtactctcnattctggacgtgacttcaatgtctgggtgtcgtcgattgttgctgtttggaatgtttttattggnatatgttgttgcc

SEQ ID NO: 17617 - DNA, 142 bp, Zea mays
  unsure (1)..(142): unsure at all n locations
  Clone ID: MRT4577_11606C.1
ggtccacttgcatctttcattgaatcgaccaaatatggcagtgactgtgtgcgggcgggctcaagaattgaaggccaatccntcatcgtatcaatgattgttgcgtgcctatctagctatcactaaaggcaaagatgcatta

SEQ ID NO: 17618 - DNA, 312 bp, Zea mays
  Clone ID: MRT4577_116070C.1
agttgattgtttgctttattatttgggggggggacagcctgaaaaaatttcttagaggtttttaatgtttgaagaacaataccggaccattcaaattggccatacctaaaggcttatttgaaagccaggctaccgaaggggcttcaggaagctaaaagcttcttaatattcaatctggagtcccacgaagattttagcccctgtaactctttcgggtgggagctctccaagcacgtgctaaggggaatgatatgccaccaaaccggggggccgggcaaacccacccagatcttggacgtccgcaccacgcaa

SEQ ID NO: 17619 - DNA, 1337 bp, Zea mays
  Clone ID: MRT4577_116071C.1
aaacaaatcactgcgcattatgattattatatatgcaaagaagtgaacaaacaactgctcgatcttacaaatacagcgctagctttgttcgttcatatatgcgctttggggcctttctccactctgaaagcccggccgggattattgctacgtacaacaatataataattagctaaataatacgagcggaacaacgggagaatacacattaattaaggtaacagctccttcccgaacagcccagcaatcgctcggccagggtcttcctgcgtcagcagggactctcctaccaaaaccgcgaaaacaccagctttttgcacatatgccacgtcatcgggagtgaacagcccagactcgctcacgacctgtattcgcttctcgttaatgatgtcgccacgcttctctaacagcatgtttgtgtttgcagtgtcgacttcgaatgtcccaagactgcggttgttgatgccgatgagctccacaccgtctatcttgaggacgcgatccaactccctctcatcatgaacctcgacgagagctgtcatcccaaggctcttgcagacgcggaggaagtaggtgatgtcgatgtccggcagcacggccgcgatcaggaggaccgcgtccgcgcctttcgagcgcgcgtagtagatctgccaggcgtcgatgacgaactccttgcagagcagagggcagtttacaccggagctgcgcacggcctctaggttctcaaagctcccctggaagtgcttctcgtcggtcaggatgctcaggcacgccgcgccgttcttctcgtaggtgcgagcaatctccaccgggtcgaagtggtccctgaggaggcccttgctgggcgacgccttcttgacctcggcgacgagcgcggggacggcgttgcggcggcacgcggcgcgcagcgcgccgacgaagtccctgggcggcggcgcgagcgcggcggacgccttcacctcgcacagcggcgtcctggccttgcgctgggccacctccacctccttgtcccagatgatctgctccaggatgttgcgcgggacggcgccggacgcggtgcgctcgaacgggtacctggtccggcagcgccaccggatctgtatgccatgtgccgtggcgatggcgttcatggacttgccgctctcccgctggatcacctccgccgaccggaacagcgcgtcgtccagcagcctgctgtacacgaccgccgagtccttggtggcgctgctgcacctgcagcggaagcctcgcccggtggtgcggaggccgggcctagtaaaggacggtgagaggggcaacatggacatggacgactccatctatcgcacgtgcgagcg

SEQ ID NO: 17620 - DNA, 752 bp, Zea mays
  Clone ID: MRT4577_116072C.1
cagggtcaaacggctggagcacacggtccacacgaaactcagtagggcgcttcttaagatggcgcccttcattgagttgtgcaacaaacccaaggttgccaggaatgaccttggtctcacaggcagtgacatcgtagcggaataagcctcgagtcatcctgtcctcccactcactaaggaggatatcaacaagtaacttggttgaagcagcatcctcctgcgagccctttgccggactcaacttggacgcgtagaggggaagcttggaagcaggcaggcagcagtcgccgaggcagttcctcccgcagcccgcgcgcggcttgtcggcgtcctcctggtagttggagacgacggtgggcaccctcctgatggtcattttttttttttttttttttttttttaaacaaatcactgcgcattatgattattatatatgcaaagaagtgaacaaacaactgctcgatcttacaaatacagcgctagctttgttcgttcatatatgcgcttaatttggagcctttctttactctgaaggcccggccgggattattgctacgtacaacaaagctaaataatacgagcggaacaacgggagaatatacacattaaggtaacagctccttcccgaacagcccagcaatcgctcggccagggtcttcctgcgtcagcagggactctcctaccaaaaccgcgaaaacaccagctttttgcacatatgccacgtcatcgggagtgaacagccccccggccgg

SEQ ID NO: 17621 - DNA, 1338 bp, Zea mays
  Clone ID: MRT4577_116073C.1
cattgggtacctcgaggccggccgggagggaggtgatgtgtgtgtgtgtgtgtgtgtgtgtccttggattggatcgtgctcggatctgctttgatcgccgccggtttggttgcttgcgcagatgagttccgagagcgactccttggcctcacggcggtccaagaaacccaagtattccaagtttacccagcaggagcttccagcatgcaagccaatgttaactcctggaatcgtcatcggtgctttctcgctcatcggtgtcttcttcgtcccgatcggcctcgcttcgctatccgcgtctcataacatcgttgaggtgatagatcgatatgacgccgagtgtgtgtccgccaacgacaaggtcggcttcatccaggacaccaagaccgacaaggcgtgcacaagaaagatcaccgtgccaaagccgatgaaagggccgatacacatatactaccagctcgagaatttctatcagaaccatcgacggtacgtgaagagccgtaacgacatgcagctgcggaacaagggcgacgcgagcacgatcgccaactgcgagcccgaggccaccagcgaggacggcggcaagcccatcgtgccctgcggcctcatcgcctggagcctgttcaacgacacctactccttctcgctcaacagcaaggccgtccaggtgaacaagaagaacatcgcctgggacagcgacaagatcaagaagttcggcagcgatgtctaccccagcaacttccagaaaggggggctcatcggtggtgctaaactggacgagaaaataccactgagtgagcaggaggacctgatcgtgtggatgcggaccggcgcgctcccgacgttcaggaaagctgtacggcaggatcgaggcggacgccatggcgagcgacgagatcacggtggtgatccagaacaactacaacacgtacagcttcgggggcaccaaggcgctggtgctgtccaccacgtcgtggatcggcggcaggaacaacttcatcggcgtcgcctacgtcgccatcggcggcgtctgcctctttctcgccctggccttcgtcatcctctacgtcatcaagccaagggcgcttggagacccctcgtacttgtcatggaacagagagaacccagaccatcccaactgagggaaggctagctgctagacctgctctcggtctcgtacagtgtgtgcagagtgaagaagacacacagctggcaccccggtcgtcgatcggtagtggctggttgtttatttgctgttcattgttgacttgttttgtccataagttaaacggaatctgatgcgtggaatcaagcaagatgttgcattatattcataac

SEQ ID NO: 17622 - DNA, 166 bp, Zea mays
  Clone ID: MRT4577_116074C.1
ccaataccatcattgaggggccggaacgaccttgatcctggtaacctcgcaaagttcaagagacggcccatgacctcgccggggagcaaacacggaacggtggccctgtggtagagctgcgtctacaacgactcctcgcccggcaaccccgagatgaggtgtcggc

SEQ ID NO: 17623 - DNA, 288 bp, Zea mays
  Clone ID: MRT4577_116075C.1
cctcgaggccggccggggaacaaaatatcgcggatgctctgcctctcgcctctcgagtctcgtcacccgcggtcctactagatgctctactcgccagacgtgatgaggaagattaagatgcggaatcaacggcttcggaaagaaccgcagggtcgtgtgcagcgtcgacctccagaacgaggatgtctagctcgacgccgacaacgaccccttcatcaccacagactacatgaactacatggacaaggacgacaccggccacggccactggaagaacagtaatatcac

SEQ ID NO: 17624 - DNA, 226 bp, Zea mays
  Clone ID: MRT4577_116076C.1
ggtgggtacaacactcaacacaactgagatcattcaactacctacatcacatcagggcatagggcgtactatccgacacacatgcccatacattaaaaaaccaacagatatgatccatggctgcaagtatctcatgtcgacgattagtcttacattatcgctgaaaaagcactggataacattgacaacaatgatctgccaaaacccactcatacagtacacgttc

SEQ ID NO: 17625 - DNA, 334 bp, Zea mays
  Clone ID: MRT4577_116077C.1
tctccacctcaaatctctatcatgtctgcagcacatgtgtcacgctctttacgagtacaaatagcataaaatgattcttcaagtcttttaactggtctcaacagtgaaaagttttagagatgggttgttgttgggtctaactcaagatggagatagttttagcaaattctaatttttggtatcatggcaacaccaagtaatgatactagtaggatccaacaggtgattgggacggtgacactggaacttaaaaataagggtattgacatcaaaaatagtaaaatactagtgattttttttgcagccagagaagcacaagtcaaggatagttatg

SEQ ID NO: 17626 - DNA, 544 bp, Zea mays
  Clone ID: MRT4577_116078C.1
tagatgggttgaagcctgaggctcgcatgcgtgagcctcgctttcgcccaggcccgtggcgccgacaggatgggcaagtgtcgtggacttcgtactgctaggaagctccgtagtcaccgacgagaccagaagtggcatgataaacagtataagaaagctcatttgggcacagccctaaaggccaacccttttggaggtgcttctcatgcaaaaggaatcgtgctggaaaaagtaggagttgaagccaaacagccaaattctgccattaggaagtgtgtaagggtccagctgatcaagaatggcaagaaaatcacagcctttgtacccaatgacggttgcttgaactttattgaggaaaatgatgaagttctggttgctggtgttggtcgcaaaggtcatgctgttggtgatattcctggagtccgctttaaggttgtcaaagtagccaatgtttctcttttggccctatacaaaggcaagaaggtaagtccaagatcataaatattaatggtgaaaacactgtagtaataaattttcttatgcc

SEQ ID NO: 17627 - DNA, 244 bp, Zea mays
  Clone ID: MRT4577_116079C.1
cccacgcgtacgcccacgcgtgcgcccacgcgtccgcaaagagagagagatacaggacggggtccatacttttttgtcagccatgacaaacggctatctgtacctagagttcatcggaacactatacaccggcgtgatgttcttctacttgcacatcatcgcgttcgttagctaacagttcatgatcttatttgccatcgactacactcccgtagggcagcagcctcagccggtgccgaccaac

SEQ ID NO: 17628 - DNA, 649 bp, Zea mays
  Clone ID: MRT4577_11607C.1
caaggacaccgggctacttcgaatacgaatacgagctcagcctgttccgagatggacgacgagagcgaggcgagagcaatgccgcggcggcccacgccgccgtcgccacccccgtgggaggcgctccacctcgtcgcgccgttcctcgacgccgcatccctcgcggcggcgtcctgcgtgtccacctcgtggcacaccgccttcgccgcggacgacctctgggcgcggctctgcgcgcagcacttcccctccgcgctgggcctcctccccgacaccgacagcgaccggcggtgctcctcctcaccccaccgacgcctgttcaagctgttccgctccgcgtccgtccgctgccgcgcgctcccggccccgcgcctcgccctcgcggacgtctcgttcgccgtcgacgtcgtcacggccggcggcgacagcacgctgtccttcctggtagccgcggacaaggccgcccacgtcaagaactccgcggggctgttcctgttcggggtcgacctgagcggccggaacggggcgatcgggccaggggagtggcgccgtaggtggacggcggtgcggacggcggcgcgccgcggcgaagaacccgcggcggtcctgatgaaggacgcccaggtgccggcgggaagggcggaaggag

SEQ ID NO: 17629 - DNA, 1028 bp, Zea mays
  Clone ID: MRT4577_116080C.1
cccggtaatgactgaataattactgaacgacctttggtcattactgtaacgacttagagatattcagcaattaccgctggcatgccacggttccaacaaagttatatgccgtctgacgtcactgggagataatacatcggacaaaaaaagacgattttatcatagcagtcccatgaacggaacaaatttataggttcattagctgttactataaataatggcctaatctgaaacatggcaatcactagctgctcctgttgcacgcgagagcaaaccattttttttctatatttgggacttctcggtggcaccaaaaacgggtacagctctgctgctcttgatcttccaacaacagctcactcacacttgatagatttgtatatgtggcggacaaagaacaaggaggcacggaagcccaccatcccaagcatcaagaagaatgcatagcagatgcaggccatgtagccaaagaagaaagatgtctgcatgaagccagacatatccgatcgcgcatagtagtagtacaggcagtagccgtatacgaaaaatccagttgatcctccgcataggaatgacctccaccaccactcatggtcctcagcagcaagctggaagtatgtcagtgcaactgtgatgaatgcagtgacgataaggaggatgataaagacagtaaacagaatgctgtagattgtgtaaatcctgtggccccaaacactagcaaagatgtagtacagctcgatgtatatggcactgaaaggcaaaaacccggccatagccatctgtggaatagttctccggtaccacggaagtggaggaatctccctggggtattttgtggtacggcaaggagcttggaattcacttttgctgtttttgccagcaatacctcccaaaacaagcaaaggaaatgtgaccaaggtccagatgagcacaatgacacagatagtccaaagggcagtgctgctgtggcactataagcaacccggccggcctcgaggtacccaacccggccggcctcgaggtaccca

SEQ ID NO: 17630 - DNA, 3097 bp, Zea mays
  Clone ID: MRT4577_116081C.1
tctgttccttcgtcctatgtatcatctcctagtgacgtcagacagcactataactttgttggaaccgtgacatgcctgaatatctgtggaaaaagaaacccgtgttatgttgttaaaaaaaaaaaaaaaaaaaaaaaaaaaaaaaaaaaaaaaaaaaaacaaaaaaggttgtaatctgcactatctgatgttgatacatacattgtcttcaaagttttctgattgctttctctatgtaccctgtacctgtcatatccgtttgccatttgtctagtgcagtagtgttctattttctttgactatgccatctgtatattggtactagttgtgcttcagtctgaactgtagtgtttagtcattgagaagcaaaatgaagaggttttgtaatctgaaactatctgatgttgatacatacattcatggtcatggtcttcaaagttctctgattactttctctatgtatgctatacctgttatatccgttcgcagtttgtctagtgcagtagtgttctaattactttgactacatctgtatattggtactagttgtggatgagactgaactgtagggtttagtcactggcaagcaacatgaaaaggacttggaatctgtacatatctgatgtgtacatgcattcataaagctaagcgcctcgaggccgttcggtgcgtacactccgtcgccccttcaacaccgaacctgagaacgccattcgaggagttcaggtctccaagccaaacccgacccagaccttcagatctcccttcccttccgttcctgttcctctctattaagcagcaagcaaagcgccactctcaatccacctctcaggcctcgctcagatctctccgcccgggtccatcttcccaccccaaaccttcgtcccgcctctctcgtcaacgccgcccgacgagagggatggcggccttgcgggctccggccgcaacgctcctcgtcctcctcgccctagcggcggccggcggcgtggcggccgacggctccgatcaccggtacaagattcgcgagcccgtcccgctctacgccaacaaggtcggcccatttcacaatcccagtgaaacatatcgatatttcgacctgcctttctgctctcctgacaaagtgaaggagaagagcgaggcccttggagaggttctcaatggggatcggttagttgatgcgccttacaagcttgatttccgtgacgaagttgagtccaaggcagtttgctcaaagaagcttactacagaggatgtagtgaagttccggaatgcagtggctaaggactactacttccagatgtactatgatgatctcccactgtggggcttcatcggtaaagttgagaagggcggcaaggatgatccgagcgagtggaaatactatctgtacaggcacatcatcttcgacatcctatacaacaacgaccgggtgatcgaaatcaatgtgcacactgatcagagtgcattggttgacctgacagaggataaggagacaaatgtggaattcctgtactcagtcaagtggaaggagacaccaacaccatttgagaagaggatggagaagtactccagctcctccaacatgccgcaccacctggaggttcattggttctcaattataaactcttgtgttactgtcctcctcctcacagggttccttgcaacaatcctcatgcgagtattgaagaatgattttgtcaagtatgcccatgatgaggaagcagctgatgaccaggaagagtctggatggaagtatattcatggtgatgtcttccggttcccaaagaataagtcgctattttccgctgctcttggcacaggaactcaattatttgcactcacaacctttatattccttcttgcacttgttggagtattctacccttacaaccgtggtgcactatttactgcattggttgtcatctatgcactcacttcaggaattgctggatacgttgctacctctttttattctcagctggaggggacaaactgggtgaggaacttgctattgacaggatgcctgttctgtggacctctcttactgacattttgcttcttgaacactgttgctattgcttatagtgcaacagcagcactgccctttggcactatctgtgtcattgtgctcatctggaccttggtcacatttcctttgcttgttttgggaggtattgctggcaaaaacagcaaaagtgaattccaagctccttgccgtaccacaaaataccccagggagattcctccacttccgtggtaccggagaactattccacagatggctatggccgggtttttgcctttcagtgccatatacatcgagctgtactacatctttgctagtgtttggggccacaggatttacacaatctacagcattctgtttattgtctttatcatcctccttatcgtcactgcattcatcacagttgcactgacatacttccagcttgctgctgaggaccatgagtggtggtggaggtcattcctatgcggaggatcaactggatttttcgtatacggctactgcctgtactactactatgcgcgatcggatatgtctggcttcatgcagacatctttcttctttggctacatggcctgcatctgctatgcattcttcttgatgcttgggatggtgggcttccgtgcctccttgttctttgtccgccacatatacaaatctatcaagtgtgagtgagctgttgttgggagatcaagagcagcagagctgtacccgtttttggtgcccaccgagaagtcccaaatatagaaaaggtttgctctcgcgtgcaacaggagcagctagtgattgccatgtttcagattaggccaattatttatagtaacagctaatgaacctataaatttgttccgtttttgggactgctatgataaaaagaccgtctttttttgtcctatgtatcatctcctagtgacgtcagacagcactataactttgttggaaccgtgacatgcctgaatatctgtggaaaaagaaacccgtgttatgttgttcggtaattgctgaatatctctaagtcgttacaggaaaaaaaaaaaaaaaaaaagcaaaaaaaaaaaaaaaaccgcggcc

SEQ ID NO: 17631 - DNA, 1519 bp, Zea mays
  Clone ID: MRT4577_116082C.1
aaaaaaaaaaaaaaaaaaaaaaaaaaaaaaaaaaaattaaaaaaaaaaaaaaaaaaaaaaaaatttactgcattggttgtcatctatgcactcacttcaggaattgctggatacgttgctacctctttttattctcagctggaggggacaaactgggtgaggaacttgctattgacaggatgcctgttctgtggacctctcttactgacattttgcttcttgaacactgttgctattgcttatagggcaacagcagcactgccctttggcactatctgtgtcattgggctcatctggaccttggtcacgtttcctttgcttgttttgggtggtattgctggtaaaaacagcaaaagtgagttccaagctccttgccgtaccacaaaataccccagggagattcctccacttccctggtaccggagaaccattccacagatggctatggctgggttcttgcctttcagcgccatatacatcgagctatactacatctttgctagtgtctggggccacaggatctacacaatctacagcattctgtttattgtcttcatcatcctccttattgtcactgcgttcatcactgttgcactgacatacttccagcttgctgctgaagaccatgagtggtggtggaggtcattcctttgcggaggatcaactgggttttttcgtgtacggctactgcctgtactactactatgcgcgatccgacatgtctggcttcatgcagacacctttcttctttggctacatggcctgcatctgctatgcattcttcttgatgctcgggatggtgggcttccgcgccgccctgttctttgtccgccacatatacaaatcaatcaagtgtgaatgagctgttgctggggagacgaagagcagcagagttgtacccgtttttggtgccccaccgagaggtcccagatatagaaaaggttagctctcgcatgcgacaggagcagctagagattgccatgtttcagagtaggccaattatttataggaacaggtaatgaacctataaatttgttctgtttttgtgactgctgtgataaaaagaccgtctgttccttcgtcctatgtatcatctcctagtgacgtcagacagcattataactttgttggaaccgtgacatgcctgaatatctgtggaaaaagaaacccgtgttatgttgttatatatgttctctaaagcatagaataatagaagtgtagacctctagtgtggcaggttcaaaaaaaaaaaaaaaaaaaaaaaaaaaaaaaaaaaaaaaaaaaaaaaaaaaaaaaaaaaaaaaaaaaaaaaaaaaaaaaaaaaaaaaaaaaaaaaaaaaaaaaaaaaaaaaaaaaaaaaaaaaaaaaaaaaaaaaaaaaaaaaaaagggggcgcccggtttaaaagaaaaaaatttttataccccgttgtttaaaagtatttttttttttttggggccccaaaaataaattcactggcccggtttttaaaaccggggggatgggaaaacccttgggtt

SEQ ID NO: 17632 - DNA, 461 bp, Zea mays
  Clone ID: MRT4577_116083C.1
tcctaactcatccacattatctaccggaatgctatggactgctctgaggccgtactcatgctcaaggcatctgatcgaccttggtgagagacgacttattaagaggcaataactgcctcacgcgtattcttgcaatgaacacttgagggatcagtcccttgtcatgtctgatgcggtgggattgaaccgttacgaactgtattaagacattgctgaaatggcctaactatgaggtgatcttcgccaagatgaccacactattacgcgggctcaaactcaacgctaggctataaccagtagtccaaacaggatacctgctcctgcgtcactactaaataggacgctctacacagactgtgagcatcctacagtgagtaccggctcggaccgacgctcgttattgccattagcatatccgtggactgtgtaaccctagattccgggcacaacaccacagcatg

SEQ ID NO: 17633 - DNA, 165 bp, Zea mays
  Clone ID: MRT4577_116084C.1
gtagaaaaatcagaacattgtccggatgattataatttggaaatgaagaggaaaagaaacgatgggacaaaagggacaattgttccaaataacgggtccaaagtagaaggaatgttaagtcctttgggacaagccaatcacagtggcaaggcacctgttccgaat

SEQ ID NO: 17634 - DNA, 467 bp, Zea mays
  unsure (1)..(467): unsure at all n locations
  Clone ID: MRT4577_116085C.1
gatccaaaattttccattcgtattaaaggggattgagggatgacgggggtgtaaaactcgtacaaaagccatggctgactgacgagttacaaatttacagcacaaccagtgagctgggggccacatggctccaaaattaaatttacaatcgtctgaactaaacgtaagatttttttcccctaaaaaaaaccgtaaaatctggtcatcataaaaataaacccacaacaacaagaggaaaatccggaaatggacggccgaagtaacaggatcacggcatggaccaaaagctgcggtcatccatcgtaaggatctcgttaaagccgtcccaaatgtcctggtccttgggcggggccggcccttttccctgcagcgtggtcggggcccgcgccaccgncacgtgcaagggcaacccggggttggacccacagttctcgcggaggctttgaccgggcaacgggcggcgcggt

SEQ ID NO: 17635 - DNA, 780 bp, Zea mays
  unsure (1)..(780): unsure at all n locations
  Clone ID: MRT4577_116086C.1
tccggagctnngatcttgtactcccttcccaaaagtcaaaccaagaattaccccaaaaggcagagccacacacgcgtaagacgctacaagaccccacatatcccgacccgaagccacctacgcagccccacattgcgaagaggaggagggctaagtgatacaactacatcagccatcgctgtcgcctttgtcctataattcccggatccaaagtaccttatctcttcttacttcaaaaccaaatcttcaagtcacacgttatccacgaaaaaaaaacaatcggcagaaattataacgaaaggaaacaaaggaaaggaaaaggtagtcacaatggccctctcaacacacgcaatgtcgcatatccgccgctactcaacacgcatgccacgcgaccctcactaccgccttaaagcctcgctcgcaaccagctacgtggtgactgcgtgtgcactgccgtttgtaccaccgctgctggagacgaggagagcaaaggcagatggaagttggatgacaaaagaaaatatgcattgttcgtcgcagtttctgggctgtccaaggtgaagcgtggggtgtttagttatcttcttacatctttctttattcagacttccaacatatccggcgttattggttactttcttcgctctctggtacgatgatcagagtatagtggatttatcccaacacatttgattgggcaatgttttaacgagagtggttcccgagtactatttgtatgatttgaatcgcgatcaaatacatgtttagtaaacttgctag

SEQ ID NO: 17636 - DNA, 379 bp, Zea mays
  Clone ID: MRT4577_116087C.1
aaacactaaccattaatttggtgggaatacaaccaaattgcgtttggttcataacatatcctccataattgacttctaacattaaaagtgctaaaaacacaaatagcaaaacttttaaaattcaaccaaaaacacccacccttttttttttaattggaaattatccgacagtgtcattatccaaccaccccacaaacttttcaactgtacctccctaagaaaaaggtctttttccccttccaagttgttttcctttaaggccttttcttttggtgtgtcatgcccttatcacccaattcaataatcttttttccttttttatttttcccccccaatctctttttctctcttttaactcactttttctatttctcccttt

SEQ ID NO: 17637 - DNA, 235 bp, Zea mays
  Clone ID: MRT4577_116088C.1
gtaagcctatgtcaatttgtggttgttcattgttgtgtcaatctaagaatgttgattgaaaattttgttgtttggacaatgaaatctacaatatttagaatatatgttaggcactgaatactgtaatgttgttttgagatggtggacattgataacaaggagatggagatgatcaaggacctgaagaactcaagcaggacatcaagcgctacctcttcctcgagctggttaagta

SEQ ID NO: 17638 - DNA, 1435 bp, Zea mays
  unsure (1)..(1435): unsure at all n locations
  Clone ID: MRT4577_116089C.1
tgagggcttggcccttggtcctgcccattattctgggtgtgtagtgtagagcaggtgtgtgtggagcctcgcacttttgntattcgcctccttgtgtccttgtgtgtcntcctgttttcatgcgcacacggaggctggagtactgtgcgccgcaggagtttggtggtctcgtttttttttttttttaagcgcataaaactatctcgagctttactcatattcaaattacagtctacaaacattataatgtcagcattgcaccatatggtcacaaaaacaccgttttacaccgttttgggctgtattgtattatttgtacagtgtaatttaaatataattatagataagctgctatagatagagatagtcccattatggggccatgacggcatgcaaacagttagcaagtcgggtcgcacaaggtctcatcaaccacaaccttgcactgacgtctcacaagcactaaggacgcgaaaatataaacactggatggaagcggattaagttgctagcagcttcggtgtgtcaattccaagcgggtcgtcaatgacagtggtcaaacatcaggtccacagcatcatcagtctctccagaacggcacttttctcttcgtctgcttgaagccctgtgcataaattcttcattaaatctgaatatagaccttccacccttttctctgtctccttagtgaatgaccatattctgttaatagtatagttcatcttgacccattcatcagctataacttgaaccttctcgatagctgaatgcaaaacttcgaccttttctgccgtgtcctttgctactgatgatatatcagaattcatctttcttgacccatcttttagaatttgaacctcattttccatttccttgatactgttaccaaaatatgagctgcataatgattcctgaatcttgatattttcccgctcattgatcagagactggacatcgagtgccattgctctcattacacggccattatcctcctctaaagaatcaagtttatcatccacagctttcgatttactatcccaaagagattcaagccgcgccagctgctgcttaagctgctcgacctccaaccgcagctcctcgcggaaaccgccgtcatcatccccggcactggagacagaagcgatcggagcggcgcactcccggacgtggtcacgcgggagggcgaagatgactgcgaggagcgcggctgcgacggccaaagcggcacaggaacggcggacgcgtctggagctagtaccgtgacgcccggacgccaggctgaggccgagggagacgaggcgtagcgggaggaggaaggcgacgatgatggcgaggagcgccgcgtcggcagtcattgtcgtccgtggcacggggaaagcccggccggtcccgagggtaccaattttgtgccccggccggcctcgaggtacccaat

SEQ ID NO: 17639 - DNA, 403 bp, Zea mays
  unsure (1)..(403): unsure at all n locations
  Clone ID: MRT4577_11608C.1
aaaaaaaaaaaaaaagggaaggaaaaaaggaaagaaaaaaagaataaagggagaaataaaggagatgtacctaaggacgggacgggggcttggggcgtgcttttgggggggatccgggccgctgtctgggggaggggggcttgggtgtagggggggggcgtttggcctcttgggggccggggttacggtttggtggtccccgtctgggtcgccttggggctggtacagctttggggtgctggcggttgggcgccttggcccgctctgggttgttggttccctgcggttgctggcccctgaggggggnctggttgggccttgtagcggcgctttctgcggggtgggggtggggggcgcccggggtggggccgttacgggtggcgggggcgtggggggcggtgct

SEQ ID NO: 17640 - DNA, 914 bp, Zea mays
  unsure (1)..(914): unsure at all n locations
  Clone ID: MRT4577_116091C.1
acagtctacaaacattataatgtcagcattgcaccatatggtcacaaaaacaccgttttacaccgttttgggctgtattgtattatttgtacagtgtaatttaaatataattatagataagctgctatagatagagatagtcccattatggggccatgacggcatgcaaacagttagcaagtcgggtcgcacaaggtctcatcaaccacaaccttgcactgacgtctcacaagcactaaggacgcgaaaatataaacactggatggaagcggattaagttgctagcagcttcggtgtgtcaattccaagcgggtcgtcaatgacagtggtcaaacatcaggtccacagcatcatcagtctctccagaacggcacttttctcttcgtctgtgccaagcatcttgagggcttggaccttggtgctgccattattctgggtgtgtagtgtagagcaggtgtgtgtggagcctggcacttttgctatttgcctccttgagtccttagtgtgtcccagctgttttcatgagcagacggaggcctggagtactgtgcgctgcaggagtttggtggtctcgtgttctgccttttttggcattgtactttggtctattttggactcttttcttctgttaatttaatgatgcgcagctctccttcattaaatctgaatatagaccttccacccttttctctgtctccttagtgaatgaccatattctgttaatagtatagttcatcttgacccattcatcagctataacttgaaccttctcgatagctgaatgcaaaacttcgaccttttctgccgtgtcctttgctactgatgatatatcagaattcatctttcttgaccctcttttagaatttgaacctcattttnccatttcccttgatactgttaccaaaatatgagct

SEQ ID NO: 17641 - DNA, 777 bp, Zea mays
  Clone ID: MRT4577_116092C.1
cctctagagtctcggcctctatctcgggtgcagcctcctctctcgttcgccttcttcactccaactcgcctcctcccctccctccctcccctccaatcccgcgatcagaggaatcccccaaaccctaatccctcccccctccgcgcagccggaaccatccacctgtgtccgggttcctctgcttcttagccgatcctggttccttggcttctagggttcggagatgggcgaccacatgaccgtcttccgctcactccgcgagctcttcccccaggttgatccccgcatgctgaaggctgtcgcgatagagcaccataaagatgccgattccgctgtggttgccgtccttgatgaagtcatgccatctatgataggttcggttgaagtctccagcctccatcaggaggctgcggtatccaaggacgattttttcagaagcttatctgcgaatctcgatgcacctgaaacaggaagttcatctgctggtccagtcggaatttctggtgcccatcatgaacctgcggaatttacaaaagatttattcagaaatttatctgctaatcatactgtgggtgagacgggaacttcatcatctgctggttctgatattcatgttgatgaagctaacggaaatgttgattctgcaatcacaactgacatgcaagaaaatgttgtgggtgaactagatgtgacttcatccttaccattgatgaatggacaactagattttccttcctgctctgtgcctgcacttaatgataagcagtgcgatttggc

SEQ ID NO: 17642 - DNA, 208 bp, Zea mays
  unsure (1)..(208): unsure at all n locations
  Clone ID: MRT4577_116093C.1
cttagcccctgatgatcatatngctgactcgtatcaagaatcaagatctggcaggcagctgtccttgccccttctcctgtctctgggtgggaggataggttagtcgttggattaggttggggagcgggaggtcggaggagtagttaggtaatctgtcctagtccatcaatcaacgacgtgtttcattatctctaatagggctatcgat

SEQ ID NO: 17643 - DNA, 280 bp, Zea mays
  Clone ID: MRT4577_116094C.1
gactagttctagatcgcgaggggcctgtccatggcgtccacgttcgtgctacgtagtgcccatggtgctgtgcagtgattttttaccttttctttatgttggccatgattctcttgtttagctacaaagtagggtcgtgtatctacagccagacctgtgggctgtttattttagttcaacatgtggatgattccctcactgatgggggctgttgttgtttgtaatatgtgctattgaatagccttttattttatgaactggccaatggcctttgtggttc

SEQ ID NO: 17644 - DNA, 206 bp, Zea mays
  Clone ID: MRT4577_116095C.1
cgagactaattttttttactatttttattaaactctgagcggcaatggcatcttcgccggtgtagatttgaagtaagattttacttatttgatcccttttgtttttgctgctcggtttcttgaaatctcaacaaatgtaccactgaaaatggtctgaaagtgttcagggacaacgtggaatgcaatgatattgttttttttatgtt

SEQ ID NO: 17645 - DNA, 853 bp, Zea mays
  unsure (1)..(853): unsure at all n locations
  Clone ID: MRT4577_116096C.1
gggtcggtgcacaccggacactgtccggtgcgccactgtcagcacactcttaagtctttgctccaaactttgttaagtccccaacttaatttctttcttggtttatgttgaaccttatgcacttgagataagagacatcttggcaaactaattagtccacgtggtttatgatggacatcaaccaccaaaatcgattatagcaaatgattaagcccatttccctttcaatctccccctttttggtgattgatgccaacacaaaccaaagcaaatatagagtgtaaaaatataacttagtttgcaattttgatagatgtgcataggttacttagatttaaaccaattgaaatactttctacataagtcttaaaaataaaagtgattgctttcttctatttaacattttggaccacatttgcaccacttgctgtttttgcaaatcttttggaaaaatattttcaatttcttttgcaaatagccaaaggtataagaatatgatttcaagaagcattttcaagatttgaaattcctcccccctgtttcaaatgcttttccttttgactaaataaaagctccccctgaagaaattctccccttagctttcaagagggtttttgaaatgatttccctttttgaaatagatacaaaatgaaattatacaaattgaaattatgatactaactgaaataccaattgaaataattttctcctttagtttttgaaaatttaaaatggtggtgctgtcctcttgctttgggcttaatacttctncgcattnggcatttatcgccaaaatggagaacttgagagcctttgaattctcccctttgggcctatttcttccttttggtaa

SEQ ID NO: 17646 - DNA, 204 bp, Zea mays
  Clone ID: MRT4577_116097C.1
ctcacgcgtgcgcgcactcgtggggacgtacgatcagcaacagcttgttcatcgacttcttgatagaggaagaggcgctggccgataccctctccgatacctcgtcggtcgcagcgccctcgtcgttcggctagaactcgttgagaactcctcctctgacgacgtcgacgacgacgtcgacgaggaggtcaagagcaatctcac

SEQ ID NO: 17647 - DNA, 417 bp, Zea mays
  Clone ID: MRT4577_116098C.1
cacaaaaaaaattttaggttttaaaaacggggggggcccaggggggcccttgtgggttacaaagggggaagtccccttaaccttttgaacaaaaaacccttttttgactggggcccatgtttccaactgggactggtttaaagttacatgaaatggggccccaaaatcaacccccccccccttgggggcgggaaaaccctgccaaaaattggaacaacctacactgaacccttgggtggcccctgcccttgattagtacggggagaacaaaacccccctaacttttttgggtacttaaaaaaacattggtcaaaccggtggggttttttgttgcaatgcttggaagggtaaaaaaaccccccttttccacctttcttgggggaaggtggttaccctttttaggacccatgggtttgg

SEQ ID NO: 17648 - DNA, 507 bp, Zea mays
  Clone ID: MRT4577_116099C.1
tgggacctcgagccggcgggatgttaacataagaggctcctatccgctcatctttccggcacatcgcccgactgtgcgcccctctcgtccgtggtcatgtaggacgtgtatccctacggctcctcgtacgaggagcgcctgctcgtctacatctcggggacgactcggcgctagcatcacgagtgggtgcagaggcgagtgtagataccagggagacgacgcaggacgttgcggggagccgcgaaggaactacatcaggcagtgcgaggtggcagctatcgaagatgagcactagctgccggacgggctccgcaagagggttctcaggtccatgctgcgccagccggtctactttttgtgctccgccctatcgaaggagaccaacaagagacccgaggctaactccgagatgctccgaatgcctgtgacaacaaccaggttggtgtcgcacttgtttgagtcgcagaaaatcatggaccgagcgttctgcgtctacgtcgcaaagct

SEQ ID NO: 17649 - DNA, 360 bp, Zea mays
  unsure (1)..(360): unsure at all n locations
  Clone ID: MRT4577_11609C.1
acgagtattgtcactatgtagccgggctagttggttatggactttnnaggcggcgggaggcgtggtgtgnctgctcccacctcgagggggcttgctcgccggcggcgggctgtgcttcggcgcgcgggcaggcggccagggtgagcttggggctgagcggacgctgtgggtgggatcgccgtaatagaaggaagagaaaggcggggtggggggggggggcaacaagcaccgggaggaaggatagctagaattgcttccaagggagagcgtcggcagcgcagcgagtaaaggggaatggatgccataaggaatgaaaaagaaaggtctagccatgctagtgcgcttggatgaatagaagac

SEQ ID NO: 17650 - DNA, 247 bp, Zea mays
  Clone ID: MRT4577_1160C.1
aaaaatcatcttttttattggtaagctcaatttttcaaaaaatccaaaccaaccccctcattataaaacccaaactactaattctaaccaaaaccacccacaaacataccatcaactaactccgcaaccaaccactcaaaaaaattcattacactctacaccaggcatttttccatcactttcatgaaatacttccctaacatcacatacattccctttcaggtacacaccacaccatcattcaatg

SEQ ID NO: 17651 - DNA, 397 bp, Zea mays
  Clone ID: MRT4577_116100C.1
gggggggaaaaaatccttataaggaagggcccctttcagttaaaaaacaagggtttttaaaaaacacaattttaacatcccccccacatttggttttttaaaaaaaaaaattttggcatccccccccaatttacgggtttcaaaaaacactttttccttccaaaaccccccatttttttttgggaaaaaaaggggctaaaaaccctcaaaaaatatgctgttttggaggatgcttaaacaaaaaaatttcctcctcaaccttgggcctggggcccctccccaccccccaaaccttaaaaattttctcccccccccctttaaaaaaaaccggaatgggaaacccccccaccgtgggaactatggacccccacccttcgggttgatttttccccccccc

SEQ ID NO: 17652 - DNA, 390 bp, Zea mays
  Clone ID: MRT4577_116101C.1
ggaacgacccactcgaccgacgcgtacaagggaacgacaaggacaaggctttgagcgtcctgcgccaagaacccgatcccggccattggtgaccgacgtatgggcgctcgctggatgccgcccaccgtccaacgccgccgcagtagcagtagcagcccaccagttgcacgcgcatcatgcttctgctcccgtactaggaagacggaaggcccataagagagccctgccactgtcgttcaaaggcgtcaacaccaactgttgccaggaccaccagcttaaggcccccgacctcctcatccgtcggcggcgcgggctaccgtaccgcgcgctcaacctcgtgctcacctccgtctccgtccgcgctgaccggctctggccgtcgcttgtcct

SEQ ID NO: 17653 - DNA, 972 bp, Zea mays
  unsure (1)..(972): unsure at all n locations
  Clone ID: MRT4577_116102C.1
cgtctctctggggcgattcccgggggggaacggccgggggggggaccaggacagacggaagcaggccccgacgaaggaccaggacgggaaaaaggggcccgcgaccgcaccagaaacaaaagcccgggcccacccacggacagacaaaccaacagcggggccggcccaggcgcccgaccccggcgggggggggggcccccgggggccagcgccgggggccccgcgggcgcgcgggggcgggcggccccccggggggggcccccgggggggcccgggccccccggggtcggcccgcgccgccgcggcggccggccgcgccgcgcgcgggccccgcctgccggcgccgccgcgcgccccccccccccccgctnncggggggcganggggggggggggcggggggggggggggggggggggcggggggggngggggggggggcgggggggggggggcggcgggcgcgcgcgcgccctcccccgcgccccgccgccggggcgccgcgggcgcggccggcgccctccggggcgcgggcgcggggccgcggcggcgcggcggcgccgggccgcgggcggcggcgccggcctcgcccgcgcgctcgcgcgcgggcgccgggtcggggcggggcggggcgcggggggggggggggggcggggggggcgcggtgggcggcgggggggggcgggggggggcggggcggcgggggggggggcgggggcggggggcgggggggcggggggcggcggggggcggggggggtgggcgggggggcgggggggcgggggcggggggggggcgggccgggggcgcgggcgggggtgggggtggcgggggggggggggtgggggggcggcgggcggggggtggcggcgccggcggggggcgcgggggggtcccgcgttncttgggggccgntgcggttntgggcgcgggtgtgcggccgggggggggcggggcggcgggggggggggggg

SEQ ID NO: 17654 - DNA, 237 bp, Zea mays
  Clone ID: MRT4577_116103C.1
tcgcccactcgtccgtccacgcgtccggatagttagagagagagagagacaggatcgatcgagagacggtcatgtccttttggctgtttggtttattcatatcacaacttttgagtgtatacaagattatttatgtggcaaacctcaaagattgtaaggcgatacatgccgaaaaaaaaaaaccttgcggagttaggatattcacggttttaatgttcgtttgaaccttgtttttca

SEQ ID NO: 17655 - DNA, 686 bp, Zea mays
  Clone ID: MRT4577_116104C.1
gcacgagtattgctgatgaatctgattctgtagacaaagatgcagaagatttacctgatttctctgatgatgaaaaggaggctgagtacaaacgatcattacgtcaagcaaaaaggcagactgatagacagcacgagcctatgaagacttcttgttacatgaagggatcacagcctagaggtggtggaatacggaagcccatgccgccaaggaacctggatacatcaacacgaggtcaccagccacaacctcattttcgccgctcagatatggctcctgcaggtactgaaaatacagcacgttcattgggtcctcaaaatgcacctatgattgctccaacaatgttgcagcctggcccaatgaaccctgctgtgccaccacctgttcctcttgcaaatcagatgggttggctgcttcatgaacctggcacagcagcagctcttaccgcagcagcctaatatggtttggcctggtggatttccacaacctcctcttcccaacattgggggtagatggagttcctcccttgccaacatcatgcaaaaccccctcacaggagccagccaattccagcagcagtttcagaacctgaacttcagtggtgcaggagccaaccagttcccgcagcagtttcagaaccagaacttcagtggtggcgcaggagccaaccagttcccgcagcagtt

SEQ ID NO: 17656 - DNA, 247 bp, Zea mays
  Clone ID: MRT4577_116105C.1
gatcatcgtccatgcgggagatatccatggactctttggaatttgatgcctccgagtccctccttcaaacctcgcttcattgcttctgttttgttcacattgctctctttttgaactgagcaaacctatctcgactgaatcatgatgggaattctagaaaagtctcgagaaccagactactcgccagttcctgacgagcggtccacttcgtcgtccgatcaacttctcgactatgaagaccgcttgg

SEQ ID NO: 17657 - DNA, 385 bp, Zea mays
  Clone ID: MRT4577_116106C.1
aaacaagccggccgggaaaaaaggattgcacttgcgcgacagggtcgaagactcagaaggggaatctccggaggatggaggtgggcaggactccgcggcgacgggcgtccccagcggcagcggcggcggcggcggcggcggatgtgccttcgctgcttctgttcgccgcgctattcgtgggccgggcggcggcagcatgtgggcgcaccgcgtccgccgctatacaagcacgcgacgctcttcgacagaaacgctgacggcgtcttctccttctcggagacgtactgcggtgagatgctcgtccccgctcccccgccccacatattttactctgatctcgcggccatggactgcccgcctccccatgtaatgatgtgagttcccc

SEQ ID NO: 17658 - DNA, 207 bp, Zea mays
  Clone ID: MRT4577_116107C.1
cctaaaccttgttttgtttataaaaaacaaaccccaacccaatgggtttaaggccagccatttgagccacccttgtgggggaaacaacacaggcccataagagccaaagccaccaaattttcacaccattacattgggcagtatttaggcttgtagcctccaacaacaggttaacttaaacagcaccccggtctgatataaacgttt

SEQ ID NO: 17659 - DNA, 707 bp, Zea mays
  Clone ID: MRT4577_116108C.1
tagaatgacgatccaggcatctaagcagagcacacaaaattaacaacacaaacaggcggatcgatcgagcaacgtacaatggcagctcaggccccatccattgtagttcccacagacgccgagctgctgcaggcacaggccgatctatggcaaaacagcctgtgctacctcaaatccatggctctcaagtgcgctgctgagctcggcatacccactgccatctacagcctaggcggtgctgcctcgcttcccgacctgatcgcctcactgtccctcccccaggctaagctacctttccttggccgcctgatgcggctgctgtcgtcctcgggcgtcttcgccgttgtcgagtccccagaggctgtctactccctcacaccactgtcatacctcctggtggacggcatcgctgccgataacaatcacatggaccatgcacctttcctactcactgtgacgtcagcacactacattgacctggcaatagacctagctgactggttcaagaaggaagccaagacacctcctttcgatcacaagcacgcagcatcgctgttcgaggagagtatggagcgcaaggctcccgggttccacaagatgtcaatactaggtttgttggtccatgacaactttgcaaccagcattgccgtgcgggagtaccaggacgtattccagggggtgaagtcagtgactgactgctgttacca

SEQ ID NO: 17660 - DNA, 328 bp, Zea mays
  Clone ID: MRT4577_116109C.1
atgtggaaaaaagacacctttaaagacaccaaaacctttattcctccaaagaattggggtgtaccaccatcaaaaaataaggagccaaatcatggatgtgtttattctcaggggggtccaaagagtattttagccgatacaacattttctgggggttcatatcctgatcgctcaactgtactggacatataacccctggggacaaaaaaaatcagattcaatgttaactcaccttgccagtatggccttccaattgtacttgggttgtccaatggaaacctggtgataaaagattggaaagcccaagctttaaggtccattgcgccct

SEQ ID NO: 17661 - DNA, 190 bp, Zea mays
  Clone ID: MRT4577_11610C.1
ggggcgcccaacccgatatggttggtgggcccctgtcacactacgctataaataaaagggtgggggccggcggctaagggcacgtgtttcactagagccgtactccccaccgacaaaaccctaacaccgatctgagagggtgcgtaccagtgacgggaagacacgccgttcatcgccgtcgacaacctcg

SEQ ID NO: 17662 - DNA, 1841 bp, Zea mays
  unsure (1)..(1841): unsure at all n locations
  Clone ID: MRT4577_116110C.1
catggttacagcagtcagtcactgacttcaccccctttggaatacgtcctggtacttccgcacggcaatgctggttgcaaagttgtcatggaccaacaaacnttagtattgcatattgtggaacccgggagccttgcgctccatactctcctcgaacagcgatgctgcgtgcttgtgatcgaaaggaggtgtcttgccttccttcttgaaccagtcagctaggtctattgccaggtcaatgtagtgtgctgacgtcacagtgagtaggaaaggtgcatggtccatgtgattgttatcggcagcgatgccgtccaccagcatgtataaggggctaatatggagaggttcacttttgtacgtggccgataatacaataccaattacaaggtaatacatatatcctacacctggatggtgggtacatatatattaatagaatacgtacgatatatgtaacatctcatgatgtgcctagatacttctccaaacgaaagttaaacagatcgttgaggcaaccaagcttgtcacagctggctttacactctgtcgttccatggaaccatcattcagaaaataactatggcgcactccgatccctttatttttgtaatgtagatttcgtcgcagtaccaaaccacaatataaagtcggtgctgatcgatggaggagatgccttagggataaatctccaggacgcctcgagctccaaatttcttcagcagcttgtagtcactgaaccctgctttctggatgaggtcacgccagtcattcacgtcccgttgccggcctcctttcatcagcatcatgcagacgtccattaggagttgagtttgaaacatgactggtcctgaggctgggtcgagaataatatctgcgatgacaaccttccctccctcttcccgtgaaggtattgccttcctgcagttggcaaggatcttcacgcagtcctcatcactccagtggtgcagcaccatcttaagtaacaccatttgagcacgtgggatggatttgaacatgtcacctccaacatagttaacaacaccatcatccggtatcatgcgaatctcctgcggaaggtccagtactgtgatcttgatcagtgacgtacgatatatgtaacatctcatgatgtgcctagatacttctccaaacgaaagttaaacagatcgttgaggcaaaccaagcttgtcacagctggctatacactctgtcgttccatggaaccattattcagaaaataactatggcacactccgatccctttatttttgtaatgtagatttcttcgcagtaccaaaccacaatataaagtcggtgctgatcgatggaggagatgccttagggatagatctccaggacacctcgagctccaaatttcttcagcagcttgtagtcactgaaacctgctttctggatgaggtcacgccagtcattcacgtcccgctgccgccctcctttcatatgcatctggtgtgagggagtagacagcctctggggactcaaccacggcgaagacgcccgaggacgacagcagccgcatgaggcggccaaggaaaggtagcttagcctgggggagggacagtgaggcgatcaggtcgggaagcgaggcagcaccgcctaggctgtagatggcagtgggtatgccgagctcagtagcgcacttgagagccatggatttgaggtagcacaggctgtttcgccatagatcggcctgtgcctgcagcagctcggcgtctgtgggaactacaatggatggggccagagctgccattgtacgttgctcgatcgatcctgtttgtgttgttaattttgtgtggtctgcttctcgagccgaattccga

SEQ ID NO: 17663 - DNA, 426 bp, Zea mays
  Clone ID: MRT4577_116111C.1
cgcacgcgttctccgactcgtgcgcttacttgtgatcccatacgctcagagacactcggctgcgttctttcctatctccgcgactcaaagcttcttccatttcctaccgccacccctgcagctgcaccccattccgtctacaccatgacgtagtgcatctagatccacatctgccaagccactatccatgtctcaaacgcgtgctgcgagctctactgcctcaagcatagcattcatgctgatggtcacatgcccagagacaacaccattgaggctggtcatgatgctttcaacaccttcttcagtgatactgatgctgggaagcacgtcactcgtactgtatttgttgaccttgaaccaactgtcatcgattacgtgaggactgtcacctaccgacagctcttccaccctgagcactttatcaat

SEQ ID NO: 17664 - DNA, 308 bp, Zea mays
  Clone ID: MRT4577_116112C.1
cccacacacccacaaacactttcaacacacctactattacacccactgcgccataccccccgatgtgggtatacccaaccccaaaaaccacctacattcccataaccactccatcgccatcacagaccactccacccactccattattcactacccaacccaacacccctaccccaacatcattccgttccgaccaccaaccaactaccatcaccatcaagaccctcctccccaccatacgctcacacaaccaagcccctctataaccaaaacagcaaaccagcaactactaaaacccctaaccccct

SEQ ID NO: 17665 - DNA, 719 bp, Zea mays
  Clone ID: MRT4577_116113C.1
gaaagcaagcaagtcaactgaaactgtacatatattggtaggagtaatgatatgttgaatagcagcatgagaagctcagagattatattacaatagttatagctacatatatgccaagcaaaagtattggtttaaaggccataaaacagcttagaagcaatacagaaaatatggcttttcttaacagcaacgtttaatcttcatggtcgtccggatcgtctcttttcatgtgtgaagttcctttcttcaacctgatgtcattggaatttgaaacactggtaagtggaggaatatcatggcagcttggtggggcgacctttgctgctctgagtaaatattacccctcttcctgaacacttctcattgccatctcgttgtttttcagtgagacatcatacttcagcagttcagcaccaagtatttaagcttccgtgggcaataaccctgatgactatcttgatgatttgaacatggatagaatcatcagtaccacttgtaaattctcactgtcccattcaggtgtcaagaaatcattctgagcatcataaaatatatcaccattggaagagatgttgttcaaataatcctatagcaactgacattcagaaagacttcctgaaaaccaataagtgatcaatgttgaagcttgaacgacaatgtcaaattcccttctcttcatttttttggactgcacagccattgaccgcacgcgtgggcgc

SEQ ID NO: 17666 - DNA, 273 bp, Zea mays
  Clone ID: MRT4577_116114C.1
aacagggaagaaccagtccatgattagggtgatattaaagggacaatactccaccgtcacataagcaaaaaaagcgggggttaaactcaaaaaaaacattttcaaacgacagctttttaatgtaaaggggaaacattgggagcttaagctcgaaaataaaaaaaacagttttgttcacctcccaaaaatttaaaaaaaaaatgccttttggaggaataaagggcccccgaaaaaaaaaaaaaaaaatggtgaaccgtggattggaaaaaccct

SEQ ID NO: 17667 - DNA, 231 bp, Zea mays
  Clone ID: MRT4577_116115C.1
accggtcaatttggtggatgccgcctatggttgctgctgcgctcatggtcggaaagatgagacagaggagaatggacacactgtctgaggataatccagccatgcggactgtcatggagttagatttcatcacgctgtagagcctcgtaaattgatccaaggcctgcgcaccagccggagcagatagcgctagcctcaattctgaatacttgcacacatacagatagattt

SEQ ID NO: 17668 - DNA, 1752 bp, Zea mays
  Clone ID: MRT4577_116116C.1
atattgttggcaagggcgatgtttttttattcgatgagaaaagcaataatatattacatggcaaaagccgatgtgatacatacatatatatatgtccttcgcttaagtcccggaacatcacttttttctccacagaaattaaagcataagaaaatacaagttaaatatactagtagatacatcttacggtacaaaaaggtagcaaaattcaaaagggcacagaacaaaattattccagtccttccactctgcatcgcagctgcctctctcaatcacccgaccctgtgatgcatgcaacgtcagtagatactaggggacacacatggcaatgcaaggaaaggaagttagcagttggacaccgcctcttccatgcatgttccatcaaactgcaccagcagctccgtgtccacgggaggatgacttcaccaccccagtcgccttcctgcactccgagtcatctcctccaacagcgccagcgccggcggcggcgatctccttgacgaagacgacgtcatcgtcgtcgtcgtagacgactccattggttttggatgccattattgccacgacgggcagctctgtcgtctcatcggcctccttgtcctgcgtctccttgtgcttgccccagagcaccgagtagagcccgatgacgatgaggacggcgccgaggacgccgccgaggaatatcttctcggcgaggatgaaggagcccatgacggccacgatgatcatcatcagcgggctgaacgccgacgcgaacacgggcccggtcttctggatcaccaggccttgcacgtagtacgctatgctcgacgtgacaatgccggcgtatgcggcggcgaggaggttcatgtcgaagccgatggtccagacggaggggcggtgctccatggcgaaggtgacgacgatggcctgtagggtgccgacgaagcagatgagggtggtgagggagagcggcgccgcgtactgcttcagggtgtgcgcctggaggatgaagagcgaggcccaggcgagggtggcgacgatgacgaagagcgagcccaggaaccactccctgccgctggggtcgatgacggccgcctcggcgccgccgccgccgtgcgcgtggccgtggccgctgctggtccacgccatcttcatcagcgggcccttgtacagcgtcatcatcatcgcgccggccacggtcaccagcgtcccggccaccttcgcctggcaccgcaccttcttcaggtccaccttctccatcctgaaaatcacggccatgacgaaggtcatggcaggaaggatgttgctcatggcgcacgcgaaggtcggcccggtgaacttgaggccggcgtagtagaagttctggtctatcacaggcccgagcagtgccaacacgaagatctggaggaagacggaccacgtcatgttgggcctcaccttcctctcaaggatgagagcaaacggtgcaatagagacggtggcgaaggcgtggcggtagacgacgagcacgtagtggctcatgccgtggttgagggagaccttggtgatgacgttcatgccggcgtagccgaactgcagggagatcatggcgaggtaaggcttggccttgtcgaagaaatcaccgtagcagcagcccatggccatggatggatcgatcagctgctagctgcagggtctcggtcagtgtcagtgctagctagctagctggccaggcctctggacgagctagagaactcaagacaaggcctcgagctcccggccggcctcgag

SEQ ID NO: 17669 - DNA, 957 bp, Zea mays
  Clone ID: MRT4577_116117C.1
ggcagcgacgatgagccggcggtgcgcaaggggccgtggacgctggaggaggacctcatcctcgtcagctacatctcccagcacggggagggctcctgggacaacctcgcgcgcgcagctggactgaaccgcaacggcaagagctgcaggctgcggtggctcaactacctgcggccgggggtgaggcggggcagcatcacggcgggggaggacacggtgatccgggagctccacgcgaggtgggggaacaagtggtccaagatctccaagcacctccccggccgaaccgacaacgagatcaagaactactggaggaccaggatccagcagaagaagcagcagggagccaagacgacgcagcagcgggaaccgtcgacgaccgccagctccggcgccggggacgactactggtgcaccaagcccgaccccaaccagcaagcgcactactgcctgcagaaagccgccatggcagctgcgactgcgacgacgagcgcggtcgtcgtcagcagcgaggacgacgcgccgtcggcggcgctgacgagccaggacagctccgcggcggccggcggagactggtacatgcaccagcagcagcagatgtgctacccgtactgctccgagctgagctttgtcgccgccggccacgatgaaacggtcggcctggacgctgtgacgatgcagttcttgtcgtcgcacttcactgccagcttttggacgaacggcgtggatgatttctgggagtcaaaaccgatcgattactgatgcgttctgaacactcatacaaacgtacttacttctgatactagctacaacttaacgggcaacaaaagggaagagtatatatatttgtcgatatagaactgtagaagcgttatatatatataccttgtactagagcactttattactctttttgtgatgcgtggtatgatgatctcacttaatttttcattattg

SEQ ID NO: 17670 - DNA, 2445 bp, Zea mays
  Clone ID: MRT4577_116118C.1
ttgggtacctcgaggccggccgggagtgatgcaccgctgcacacgccacacgggcacggcgccttcgtctccaacacggcgactaattaaccccactgattccgacgaccgagctcccccacactttttcctggcaaaccctgcacgcctccgcaaccgcaaccgcgtcgtcggcgtgcgcgatcccgagaggcccagccatcagcttccttggcggggtgtgtatgcgcgtacgtcggccgtgaccagatcggctgagccaaggccatggcggaaccggccctcctcgcgccggaccccttcgcggacctccccttccccgaatttcaggcgcccatcgacggcgacagcttcgcgctcgaggacttcgatctggaggatctggacctggacgtggacttcgacctcgacctcttcgcctcggacgggcaaccctcgcaaccgcccccgctcgcgacctcgtcctcctcggccgggtctccggttggaggctcgtcctcttccggtgccgtcggggacggcggagggctgaggaatgaggagtcttcggagtcgtcttcgaggagcgcgagcggcacggatggcagcggcaaggggaagggggaggaggacgaagcgaagcggcgcgcgcggcaggtacgcaaccgcgagagcgcgcacctgtcgcggcagaggaagaagcagtacgtggaggagttagagggtaaggtgaaggccatgcaggccaccatcgccgacctctccgccaggatctcctgcgtcaccgccgagaacgccgctctcaaacagcagctgggtggcgctgctggggccgcgccgccgccgatgccgatgtaccccacgatgtattctttgccgatgccgtggatgcacccatcgtatcccatgcgtggatcgcaggtgccgctcgtgccaattcctcggctgaaacccccgcagcctgcatctgctgtagcagagccaccggccaagaaggctaggaagaccaagaaggttgcaagtgttagtctcctggggttgatttgcgttgcaatgctttgtgggtgtttgattcctgcagtaaatcggatgtatgactctgttgatgctggagaaggtgctgcatacggtccatctcatcgtgggagggtgctggctgttgaggggcctcatgataatgtttcagatggtgtcgatccaaagccgccacagcgtgccagtgagacgcttccagcactgttgtatctaccaaagaatgggaagcatgtcaagattaatgggaatcttgttattaagtcgattgttgctagtgagaaagcttcattgcagatgtctggcaatgatgggaagcgtcctcaaaaccaagaggaggagactagactggcaattcctggctatgtgactccattgaaagctggagaggttatggaatcaaccgaaggaatgatgaacaatgaactgttggcgttagctcctgcagatggaagcatgtatagggaggaggatggattgctgccacagtggtttagtgaagcaatgtctggccccctgctgagctcaggaatgtgcactgaagttttccagttcgatgtgtccccatcatctgctcatccaaatggcatcattcctgtctattccaatgccatgtcaaactcgtcacagaacttcactcaagatcttccccctgctcgtgttcgcacggtcaagaacagaaggatttcgtactccgaggccattcctctgagaggttcaacatccaacgacactgagcacctcaagagctttggcagtacgaagcctgtttcgtcagtggtcgtctctgtgctggctgatcccagagaggctggcgatggggatggtgagggaaggatctcttcaaaatcattgtcccgcatcttagttgtcgttcttatagatagtgttaagtatgttacgtactcttgtgtcctgccgttcaaaagccatagccctcacctttaggtctgggttttggacgtgagttgataaagctgacctatacatttttatagcagaagaggtgtaagacagctgcctttgttcatttattcaagttttgtgtgctcaaaaaaaaaaaaaaaaaaaaaaaaacaacgacactgagcacctcaagagctttggcagtacgaagcctgtttcgtcagtggtcgtctctgtgctggctgatcccagagaggctggcgatggggatggtgagggaaggatctcttcgaaatcattgtcccgcatcttagttgtcgttcttatagatagtgttaagtatgttacgtactcttgtgtcctgccgttcaaaagtcatagccctcacctttaggtctgggttttggacgtgagttgatagagctgacctatacattttatagcagaagaggtgtaagacagctgcatttgttcatttattcaagctttgtgtgctccatgatgtaaaaaaaaaaaaaaaaaaactcg

SEQ ID NO: 17671 - DNA, 448 bp, Zea mays
  Clone ID: MRT4577_116119C.1
aaaacaaaccgcccaccgggggggtttatttttgaaaaataaaagggaatgccaaccttggatctttgctggggccccaaattggccctgatggggcccaccccccccctgctgatgcggaaggccttggcgaggatttcggagggcaccggcggcaccgccccaaaaaactaatgggaaaggcccgcgtcccctggaactggcttttaaagggggaaacaaccgggggggggcccccccccctttttttctgaaaagggaccaagccccccggaaaaaaaaaaacctcccccttggggaccgtcttggaaaaaaaccccttggcgggggggaaaaaacccacctcaaacgggcccttaaggaccaaaattatctccggggccccccggtgcctttgccgcgggttttggccccccggcgcgtaatccatgccccccatggaaacccc

SEQ ID NO: 17672 - DNA, 1289 bp, Zea mays
  Clone ID: MRT4577_11611C.1
cattgggtacctcgaagccggccgggaaagccttttgccctgtcgtcacgcgcgaggtttcatcaacctcagcgggaactccccacgtacctcaccctcctctcccggagagcctctcgcctccgctccgctcctctgccctgccctgcccttccccgccacaccaaccaaggcgccaaaaataaacgccgcgccactgcgtggcgagggagcctgtcacattgcttgccgctgcgccctgccgcctcgtcttcgcggaggcctcgtcgcgcgacgatatggagctcgccgaggcgccggcgcccgtgcccgacgaggacgggctggacgaacgcggcgtggcgctgcacctcccgaggctgctggccggcgtcgtctccggcgccctcactggcatcttcgctctcgctggagctctgaccggggcagtcaccggcgcggtggcgggcagggcttccgacagcggcggcgtcctgcggggagctggactgggggcggtcgccggagctgtcctctccattgaggtccttgaggcttctcgcgcttactggtgctcgtcggaccggctgggctcgcacggcggagcatcgtccatggctgatttcattgagcagcttcttcgtgcccggtttgtgcaagagcaacttactgcttcaggatatgcatcatatcgctggcaggatgacctatacgacatctttggggacatttcatctgaagggctctcgcaagagtcactgaagaaactaccacatcatgtggtcagtgaccaccagacgcgggacttactcggcgaaatcctgtgttgtcctatctgtctacaggacattgtggccggtgagacagcgaggaggctgcccggctgctctcacgccttccaccagccttgcgtggacagatggctcgtcggccatggctcgtgccccgtctgcaggcaacgcgtgtaaaagatatataggcgacctgtgtctgtgtacgtagatagacgtggagtgaagagaaacgaccgtgcgcatctggcaatctcacttcgtttcttgcaccccggttcccaacatgtaatggcaatggaataagattgctgtcggagcagttcctgtttctgtaacaatcgtgcgtatacggcaatgtgaatttgacttggtttcttccaccccgtcaccaacgtgtaatgaaataagaacgctgccgttgcgattctgtaataacaaaaaaaaaaaatggtcggcacttagcctagctcccggcgctgcttccattccaccaaaaaaaaaaaaaaaaaagggtta

SEQ ID NO: 17673 - DNA, 380 bp, Zea mays
  Clone ID: MRT4577_116120C.1
gggttgggttttttttgatgaactaccggaccacagaatgaacaaatgaaatacagacctacaaatggttttaatacattacttcgtagctacaggcttacaggctcaccagaaaaccatataggagcacgcggagaaaaactatagctggcctgcaggagcagcacgcggcattagcacacactacaagcagaggaaaacgcgtgggcactactaaactactgctgatcctgcatatgcgatccggtggaactgaacggggggcaaccaagctttctttctcacagttacagatcgggcatgaccatgagacacggcaagtaaaaaaactgcaatctgtactctggcagtgagcgcttcagggcagaacataagaggag

SEQ ID NO: 17674 - DNA, 849 bp, Zea mays
  unsure (1)..(849): unsure at all n locations
  Clone ID: MRT4577_116121C.1
ggtacccccgggttcggccgggaatatcccctaatagaagggaacaatctaacttaaaaggtttccttgaaataaccaaaacagtgacgattttactgaaggttttgcatctcttaaaatgcatctaatatatcgacaagctccgttttacgcagttctttgtgacatgctcaagcaaatgtgcccacattggagtttgattttaccactttacacatgctatatgcctctcaacaaagggcactattctttcaaatttattatttcgtctgtaattcaaaaggagcaaaatatcaatttaatgatttggccatggaccttaactgttatagatgcatggagggcagccagtgcacaagagcaaagtccagctccagaattaaattaaagtagttctaaaacaaaatatctcttccatgtggtctccatcaccaaagaaaccaaaaacgacctgatcccacacaggcatggtagccacaagatgataccaagaagacaagatggaatgctccagttatctgagtttcatgagtgtctaattgagtggtacaggaaggacatcttaattcatatgtctggctttcagcatgcactgcctagaactttggatgcacttctaccacaatgtgctccagctaccccataatattttttttacaagatgcttgtatggaaaatggatatgcagcttaaaagtgctcaaggcagtgcacttgagaagcgtacatggtacaaacactaacacataaactaattntaataatagtgcttggcagaaacttccatagtgcagcatgtgattgagcagagaaaccaaccaaaacactatttaattaatacagagaacct

SEQ ID NO: 17675 - DNA, 309 bp, Zea mays
  unsure (1)..(309): unsure at all n locations
  Clone ID: MRT4577_116122C.1
tttgttttatgcaactcttttgcgaaccctgttggctatggggcgcgagttgctcctgcatcttgtaagcattacatcggtcatgtacgtcaactatacatgtttgtcgggtatgctactgtgcatctttctcctggtgatatattatggtaatggagtgcttgtgtcttaatgtgtatgtatattgcgctcgcacgccgttctggctgagttatagtagagatgcaatatcgtgtattcatgatcttttttacatcctcnattataaaaaaatggcggttctctatatgatcctcgtttatgtatatc

SEQ ID NO: 17676 - DNA, 163 bp, Zea mays
  Clone ID: MRT4577_116123C.1
gttcaccgaaaggattcatgggagtttagctacaactgctcgcacggcaacctgagttatctatttttctttctccatccataggatcattcgtgctaacaggaaacactgtcacctctcaccccggcctgttttacaggggagctggttcgattaaattgaa

SEQ ID NO: 17677 - DNA, 220 bp, Zea mays
  Clone ID: MRT4577_116124C.1
gggtccgcccacaggcgtccgccaactcgtccggttggcattaactattaagtttggcccaccagagccaccatgggccagggggacttgtttaaaagcgggggcgctgaacccccccgttggcagaagggccgggttcctggtgggaaccttgcaggggctgccgtcaaagcgggcgtttgggccgttgtccgtgtgccgggtaaccactctccgtccg

SEQ ID NO: 17678 - DNA, 408 bp, Zea mays
  unsure (1)..(408): unsure at all n locations
  Clone ID: MRT4577_116125C.1
acccccctcagggcccggccccgaattcccggggggcgccccccccccgccgaactcattatgttgtctctctgccagtgggcatgggcactgctagtaccgcaatctactgctctcggaacgatactgcaggttgcatatgccatgacgggcccgcacattgtggctggctagccctgcatgagcacaagacacgtggatcctcttgctacccttccatgagttcatgactggcctgtncgctggccctatgtcacgagacatagcacatgtcaacaggatcagagcctggtgcttcatttagcccgatccactttgtgcagaggttccagagccatccatgattggctcgtggcactcagatataagatgagctcttcaagctgcctttgcaaacatcgatggccc

SEQ ID NO: 17679 - DNA, 445 bp, Zea mays
  Clone ID: MRT4577_116126C.1
ggccgcttttttttttttttttttcttttttttttttttttttttttttttttttttttttttttttaatttctaattttacctatttttattgcagaaagacaaacctcgcccccattttattcgccagggaaaaacgggggcccgccctagaggctacaaacggggggcagttttttgaaattgccctcccaccccaccaggcaaaaaacatgggcttgaccccccccagggcaaaaattaacctgggaccccaccccaagaatgcctttccccctgccccgagccgaaaaaatgcacttccccccccaaaggggggggccaacgaatttcaattcggaggggcccaaacaaagtaaacacaggggagggggccccaaccgggaagggaagtggccacccgggcccaaccggtggggaactgggggaccgacccaaccccggg

SEQ ID NO: 17680 - DNA, 758 bp, Zea mays
  unsure (1)..(758): unsure at all n locations
  Clone ID: MRT4577_116127C.1
acacctattctgattcttcggccacccagaagtgtacatcttaattcttccagggtttggaattatttcacatgtagttacctattactctggaaaaaaagaacccttcggatatataggtatggtatgagccataatatctattggcttcctaggatttattgtatgagcacatcacatattcacagtaggcctagatgtagacacccgagcctactttacatctgccactataattatcgcaattcctacaggcgtaaaagtattcagctgactcgctacactacatggaggaaatatcaaatgatcccccgccatattatgagccttagggtttatcttcttattcacagtagggggcctaacagggatcgtactatctaactcatcccttgacattgtacttcatgatacatactacgtagtagctcacttccactatgtcttatctatcaggagcagtattcgccatcatagctggcttcgtccactgattcccactattctcaggctataccctaaatgacacatgagcaaaagcccacttggccattatatttgtaggtgtaaccataacttttgtccctcaacacttcctaggattagcggggatacctcgtcgttactctgattatccggatgcctataccacatgnngtacagtctcctctatangctcattcatctcacttacngccgtccttgtaatgatcntcatgatttgngaagccttcgcatcanaacgagaagtactctcc

SEQ ID NO: 17681 - DNA, 877 bp, Zea mays
  Clone ID: MRT4577_116128C.1
gacagcaggtgccaccgcaaccggggcaagttgcatttgtcatttataaactggcttctggaaacaagaatgtctgaacaaaaaagtaaccacgctgattagcagatggagctgaacatatattattatatactttggtccttattacgatcttaatcctgaaaatttggatttttaggggaccaaaagcttgtgctctacgagtacatggagaagggcgacctgcaccggtggctgcacgagctgccagtgggcagcatggacacggaggacatatgcatcgacgcaatggaagccatgacggaagacagcagaaagcccgcgggcgactggcccacgcgctaccgcatcatcctaggcgtcgcgcgagggctggcgttcctgcaccagggatgggccggggccgggggcgggcggcggccgatcgtgcacgggcgcctggtcccgaccaacgtcctgctcggcgacgacatggagccgcggatctcggacttcctcccgcaccccggcggcggcggcggcgccgagacggcggagggcgacgtgtaccgcttcggcgcgctggtgttcgaggtggtgacggggcaggcgcggtggggcgacgcggcgaccacaagctgggcgcgcggcgtggtccgcaaccgcaagggcctcaacctcgtggacgagcggctgcgtgacgagacggcggggacgggcgcggagagggagctgctcgagtgcctgcaggtggggttcctctgcacggccgccgcgccggagaagcggcccaccatgcagcaggtggtcgggctgctcaaggacgtccgaccggccgccaccgctggaggtggcgtgccgccgccgccgctcaggtcgctcgccgacgtgggcggtc

SEQ ID NO: 17682 - DNA, 471 bp, Zea mays
  Clone ID: MRT4577_116129C.1
aggggggatttctgttcgtattcttttctttctaccagtttcatcacgcacacaagagttatacccgtgtcccaacgtcggcccatatcaatgttcccattacaacggcccattcggcccacatcaagccttacacctcctattccacatccgccagctcctggacgtcttcctcccctgccatctccacaccgtcatcagtgctggcgcctgctgcatgtgtaacatctgccccccctgcagaattggcttgtccccaagcaatggcatccggaaaacgctgacgaaggacatggtaatcttcccaagtagttgcttcttttggcaccgaactccagcgaaccagcacctgaggaattgcacgattacccttcttgaccagccgacgatcgactatctccaatggaaccagttcatacttgctgaggtccacagaaaccggaagagtagaaaacactggcgagtaattag

SEQ ID NO: 17683 - DNA, 937 bp, Zea mays
  Clone ID: MRT4577_11612C.1
gctgggaattcggctcgaggtggactatgcagaaatttattgcaattcctccctgtacagggagaacaggggtctaattgatgaattggaacaaccagaaccaaatacagatgctctgtattttcctcagggttattggcaaaactttacgatacaatgtgtggcatgtttgtggaagcaaagttgtgcatactggaaaaactcagaacacaatgttgtccggttcattaacacttttgctgtttcaatcatgtttggaattgtattctggaaaattggctcaagcatcaaggatgagcaagacgtattaaacatacttggaatcgtatatggatcggcattgttcctgggtttcatgaattgcagcatcctacagccggttgtggcaatggagagagttgtgctctaccgtgaaaaggcggcaggcatgtactccaccatggcatacgctatcgctcaggtgtcggtggaattaccttacatgttggtgcaagtgatgatcttctcatcaatcgtgtacccaatgattgggttccaggtgacagcgagcaaattcttctggttcttcctataccaggtgatgagcttcatgtactacactctatacgggatgatgacggtggccctgacccccaacatcgagatcgccatggggctgtcgttcctcatctttatcttttggaacgtcttctctggcttcataatcgtgagagagatgatgcctgtgtggtggcggtgggtgtactgggcggatccggcggcatggacggtttatgggctaatgttctcacagctcgcagacaggacggagcagatcctggtgccggggctcggggagcagacggtgcgtgagttcctagaggggtacctgggcctgcaggatcgctactttgtgctggtgacctgcctccatcttgccatcattggcctcttcgtc

SEQ ID NO: 17684 - DNA, 327 bp, Zea mays
  Clone ID: MRT4577_116130C.1
acgcacattcttcgtctgcataatccacgtactcatgaacaacacgtactatcctcatattggcgttaagggactatcttcaaggacgcaaggcaaactgaatcctacaagctccggacgcattagctcctaattcacattcaggatccagggcactctacgtgtaacttcactacgcatgatgcaacagatactggcaataattctcgaccattgacatcagcagatgtcatttggacgaggatgcactcatagactactactcctctgactattacttgcaaagcttaccctgtataaactcctgtgaagatcaagtaagttact

SEQ ID NO: 17685 - DNA, 181 bp, Zea mays
  Clone ID: MRT4577_116131C.1
attccctctcgacgcactcttccttctcactctcctctcctctctcactgtttcaactccacgcttcactcaaccttaatatgttataatctctaagctctaactatccacaccactccttcatctatccattacccttctcatccacacaaactaccacctcctacttccaaacccccac

SEQ ID NO: 17686 - DNA, 195 bp, Zea mays
  unsure (1)..(195): unsure at all n locations
  Clone ID: MRT4577_116132C.1
ccaactatagggaaaacttttacatatactgcggcaggtatgcaaagnaaatatatgacccggcgtcgattttctgacaggtgggccgccaaacgcaacacaacggtgtgcaacctaacgcactgcgaacgcccgagaggagcctgaaaaagatggattgacccaatcaacggtttggaggcaccaaaaagcctc

SEQ ID NO: 17687 - DNA, 372 bp, Zea mays
  Clone ID: MRT4577_116133C.1
gggaacaacgggcccccccatccccattaacatccttaaaggcaaaatgggcccaaaagttcaaaacgggccaggggggcaaaattttttaaggtaagttaacctttttccaggggggccccaaaggcaggcccaactttgagcaggggggggggcccatccccacatttgaaaaaagggggggggattcaaaaagaaagcccccaactccgggtaaaaaccccctcgttttcgtttccccttccaggggccaaatttggggaaactaaaaccgaaagaccacaaaattaaacgcctaaccaaaaaccttaataagtttttaaacaattgggggggggaacccctttaaacagggagatttaattttggggc

SEQ ID NO: 17688 - DNA, 275 bp, Zea mays
  Clone ID: MRT4577_116134C.1
ggctggtacgcggacgccggcgccacagcctcacggggggtcgctgaaggacgccgagcgagcggcggccgccgaagtcgacaacgccggccacgccaagccccagacgcctggcgggcgcgcgggacaccacaaccacggcaagaccacggccgggccgaggaaacccgaccacgcgacccacaacggcgggcgggacgggaccgggaccacggcgggcgccgcgcggcaacacggacacgcgcgcgcaggggaaaggcgagcaaaccgaggcc

SEQ ID NO: 17689 - DNA, 364 bp, Zea mays
  Clone ID: MRT4577_116135C.1
gcactatcaatgtacacattgcacgtgcacgccaccacatccagcatcgttgccaggctcaccaccaccgcgccgtgctcctactacagctccggctactgccgtcccaatcccaggctcatccagaacgcccccttattggtccaccccgacaccatctatggcatggaccccaccgactagcgcttgaagagcggattccagaagttcaagaccgaagtctatgacaagaagccggagctgtatgagcctctcaagtacagccagagccccatgtacatggtgtttcgctgctccgactacagcgtgtgccactatgtgacactgagcctgcagcccagagaggcattcaccaggcgcaaca

SEQ ID NO: 17690 - DNA, 386 bp, Zea mays
  Clone ID: MRT4577_116136C.1
ggtattatatttttttcgcgtgtgttaacagggaccgtagggggggacccttggtgtaaaatttccaaaaacggcggaacaaaaaaaaggaggggtaccaagcgggggccttttggggggcgcaccgggccttttgggggggggaagggttgggcttaaaaggggggtaagccctggtggcgctggaaaaagggtctgcgcctgtaaattaccggggaaaattttagaggcgcccacttggggaaatctttcatttccaagggggagttatgcgttttttttttgaaaaacccctcagggtacacaaaatttctcttataaaaggttagcaaggaaggcttcttcactgagaagtggaaaaactaatggccctgggtttggggcct

SEQ ID NO: 17691 - DNA, 263 bp, Zea mays
  Clone ID: MRT4577_116137C.1
acgaaatagaagaatattaattattaattcgacataagaaatgctgtcataattccgatggaataaatattagtaaaggatctatcgatgaacatacaaaaaaggttattatccaatcgtaactaaatcttcttttgttttgtaggaaacggaagcgcagtaactaaaaatagatggctctatagttacttacaaccgagagcatagcatactggctgtatttcgagggaaacccaactcttttgctcatgatgtctggggtg

SEQ ID NO: 17692 - DNA, 352 bp, Zea mays
  Clone ID: MRT4577_116138C.1
cggtgaccaggttgaccatgctgttcagcctggtattgccctcaccaacaggtgagacaatgacacctccagcactgtcggtcaaacagtaagggtagtacttcaggtcgaggatgtcagctactccgctaaacaacgagcagtactacgaaagcgcacgtcgtgcaacatcttgcatggctgcctcgacagtatccctctcagtgatagaatagttctctgagaaggcctctgcaccccagagatcatcgtccggacggcgcaccaagcaagtagcctcccactggtctgggtataacctgcgatgatgctggtagactacacaacggtactcaatagatcaagtgtgtcg

SEQ ID NO: 17693 - DNA, 521 bp, Zea mays
  Clone ID: MRT4577_116139C.1
tcgagcggccgcccgggcaggtgaaaaaaaaaaaaaaaaaaaaaaaaaaaaaaaaaaaaaaaaaaaaaaaaaaaaaaaaaaaaaaaaaaaaaaaccaaaaaaaaaaaaaaaaaaaaaaaaaaaaaagggttggtccctggggcggggccccccctaggggggattttggggggttgggggcgccctgggggccgttcgaccttgcttttggggggcccatttggccctttggggggcggttttacatttcatgggccggggttttacaccggggggatggggaaaccctgggggttccccaatttattcgcttgggagcacttccccttttggccggggggggtattagcaaaggggcccgccccgttcgcctttccaaaaagtggcccaccctgatggggaatgggcccccccctgtaggggcgctttaaggggggggggggggggggttccccgcagggggaccgttactttggccggggccttagggcccgttcttttggtttttttcctttcttttt

SEQ ID NO: 17694 - DNA, 1112 bp, Zea mays
  Clone ID: MRT4577_11613C.1
cattgcgtcaggggcgaggtttcatcaacctcagtacctcaccctcctctcccggagagcctctcgcctccgctccgctcttctgccctgcccttccccgccacaccaaccaaggcgccaaaaataaacgccgttgccgctgcgccctgccgcctcgtcttcgcggaggcctcgtcgcgcgacgatatggagctcgccgaggcgccggcgcccgtgcccgacgaggacgggctggacgaacgcggcgtggcgctgcacctcccgaggctgctggccggcgtcgtctccggcgccctcactggcctcttcgctctcgctggagctctgaccggggcagtcaccggcgcggtggcgggcagggcttccgacagcggcggcgtcctgcggggagctggactgggggcggtcgccggagctgtcctctccattgaggtccttgaggcttctcgcgcttactggtgctcgtcggaccggctgggctcgcacggcggagcatcgtccatggctgatttcattgagcagcttcttcgtgcccggtttgtgcaagagcaatttactgcttcaggatatgcatcatatcgctggcagctcagcatatcatattttggtcaggatgacctatacgacatctttggggacatttcatctgaagggctctcgcaagagtcactgaagaaactaccacatcatgtggtcagtgaccaccagacgcgggacttactcggcgaaatcctgtgttgtcctatctgtctacaggacattgtggccggtgagacagcgaggaggctgcccggctgctctcacgccttccaccagccttgcgtggacagatggctcgtcggccatggctcgtgccccgtctgcaggcaacgcgtgtaaaagatatataggcgacctgcgtacgtacgtagacgaagaaatagctgggtggagtgaagagaaatgtttgctcgggcacttcgtattagaggtacatacgaatctgcctgttttcactaccggcggaaacggccgtgcgcatctggcaatctcacttcgtttcttgcaccccggttccaacgtgtaatggcaatggaataagattgctgtcggagcagttcctgtttctgtag

SEQ ID NO: 17695 - DNA, 826 bp, Zea mays
  Clone ID: MRT4577_116140C.1
gggaccctcgggtttgccgggatcctctccacttcctagaaatgactgcggttatggctagggtttctcaaacgcaaatcatgatgttctgctcgactgccgccgatacgtgaaagctgaagctccattagttttagagttcgcttcgcctacctacatgccgaggtatccctgcaggagtgggcgccgccatggtctctggcctctgccgcggcgatccgcatagggcgagggactgtgaggatcagggatccctcggcctcgcgctctgtgcgctctctctgatttttgtcatgggacaaagtatgggcttcatggacctttgtcgtgcgacgacctgggtcctggacttcaccaactttgctctttgctctggctatgaacctctccctgattccatcaaggattaaggtacggacgattgcagcacaagttatacaaatgcttatttctttgtgcctcttcactacctgtcagggatattatttcccccttcaaaatgtttgcttttgtggcaggtagagatagtggcctgacaatgttacattggttattttttgaaactgaattaaatagtggcctggcaatgttagatgacgacaaaatgtgtatgtacatatctaattgcattgcataaggaatagatgaaatctttgtgaagatatataaaatcttaaggacgatgttggcatggtggtattctaatcaacaaagaactacaaacactcaccacctgatggggcaggtttttaagccaagaccaaccttttaaatttcaccagcacaattagttatagggttcaaaacaacctccccagcaattcaa

SEQ ID NO: 17696 - DNA, 413 bp, Zea mays
  Clone ID: MRT4577_116141C.1
gagagacgtagatcatacttacactggggtcaaaaggcgcgatcttcttaccacatagttatactcctgctacgtctaacaaaggtcactataaatcacataaaggtggcgctacaacaggctctgcttactcggggggttatccgcgcagtgatgagaccagctctgccactggtgcagggtgacacacaaagaaagggctactgtgaaatgaatctaaaccttgtggggctaaaaaaactctcaatgctatcatccacgcaatcatgtgggtcctaaatcccaaacgggccctagtccgcgggagcaccctcttcacggtactcagggtgagacctgctggcgatcctatcttgcgccatctacaactgtggctggatcactatcctctacatctgggacaatggcctttt

SEQ ID NO: 17697 - DNA, 437 bp, Zea mays
  Clone ID: MRT4577_116142C.1
cagcaatgtcaggtttgctttttttcattctctccacacttcaacttaaatcactaaagttctgttagtggattaaccatgaagaatactatagacatcgaatgaatgtttttattttccatgtcattcaaacttatttcagtgctggagtgttttttccagccaaagtaattatttatccttgaatgtagtgttatctgctgtcagtggcttgaaagttgggctaccaaatacctcacaaggtgatttctttggggttaaaatttctcgtatcttatagcatggagtttatttttaataaattatggcttactttgtgttttcattaaacgttctttgcagatgctgttgtgatgatttcaattgcacttcttgtagtattgtttagtgtacagaggtatgccactagcaaagtggggtttgcaattggcccttct

SEQ ID NO: 17698 - DNA, 485 bp, Zea mays
  Clone ID: MRT4577_116143C.1
acgccaccaccctatatctgcgtgttctatctctcaaggggccatactatcagattctacatttacatacctgcggctctgcgtgaccgcaccaccaaacacgaacttatgagacatcaccacagtgacacccatgcataaaatagctattgtcgaccacttctgattaattgcatcaatgccacacggttgcgaactcaaaatcaatgccggccgcctatattcgtccactgtgcattcacctccgtacaccttaacactgcaaggagagccatagatgccttttgttttaattgctttcggaatcgcaggcgtttaccacaatatgtttgattatcatggcaatataccctgggttttggggaggagctgaaacttcatgtatgagtcattgtgttatgaaggatgtcgaagataggctcctttaatacagtcaaaacccttttctgaaaggcctattcttataccggtgacctcatcccaaa

SEQ ID NO: 17699 - DNA, 210 bp, Zea mays
  Clone ID: MRT4577_116144C.1
gaagctgcactcacttgaaggtggttccaataagttgtcatatgtcttatcaggggctccaaactcatgatgtataattttacagtgtaccatctgctatttcatgatctttgctactaaaacaggatgatccatttcctcaagttcttcaactggctgtattttaaaagtataaaagctttgtggctttcgcattgaaagtgatgtgta

SEQ ID NO: 17700 - DNA, 791 bp, Zea mays
  Clone ID: MRT4577_116145C.1
ctggatctcctaggtgacagcactgcggcttagcaagcccgagaccccaacaaataggatgcaggcgccggccggcgtgagcacgacgaggaccacgacgacgatggcgagacacttggcgtggggacgagacacagctcccaccgtcaccaccatggacagatacagcccgagagctatcgcacagaagaagaagaaaccaaccgtgttgaatggccctaccatgaagcgtccggcgatcgccgtgaagaggccgccagaactggcgatgccttgtgaaaggtccagcaaatggcccagagcgagacagcaagagagatgctgctggaaggaagcttgcgaattcgaaggacggtaaatgagttctttgcgcgcgcgaaaggatgggctcctgtgtccagaaggatcgtgggttgacaaaaagtctttggccctgtcttgcttattgatgtgtggttgcagtttggtagttctctgctggctcttggctgctggtttgtaatatatcgttatgttagctgatgaatggtcggcttttgatactttccatcgttaggtctttatctcgtgtgtgagttccgctaagtcgaactcaataaaatcgctagtgacttcacagtctgtagtaaggctgtccagtagttgatcgtcggttaggcgtttgaggtctatggtaccttaagttcgccgcctggatgtaattgcactcgttttgttatgtttcctatttcttaatgaaataggggggttcttcccctttctgtcaaaaaaaaaaaaaaaaaaggccccta

SEQ ID NO: 17701 - DNA, 162 bp, Zea mays
  Clone ID: MRT4577_116146C.1
ggagatggctagatattaccaagtggtgtatgctctttatgaagtgctacaagatgtagcaaataaaaacattgatgatcaggtgttgcggtgtgcagacatggttgaagaaaatggtcgtcatttcaagaactacaagtacaacattattcccctcaattt

SEQ ID NO: 17702 - DNA, 191 bp, Zea mays
  Clone ID: MRT4577_116147C.1
gggtgttaaaaaaagcgttttttttattcctgtttaatgcactggaataacaagctttatgtcccgttgccggctacaggcctacctcccctgaaaagaatcgcccccgaaccttccctacggttcgaccgggggcgccccatccaccacgttttgcccggcttccagtttttctggccccccgtcctggt

SEQ ID NO: 17703 - DNA, 368 bp, Zea mays
  Clone ID: MRT4577_116148C.1
ggccattttcatggcagaaatagaaaacctcaggaggaagataggggaaagtcaccccagcaatggaagccgtcaacataagcaccgcgcaacagagatgcagaggctgacacgctggaggatgaactagcaaggatccgtctctgtttgtcacaacttcaagcgtgctgctacgaacttgatgccaagcagtgctgcctagaactacaagaagaactctgtccaaaacgcactagtgtacgggaaggtctaacgttacacgctcaagactaaaatcgagtaactcgagaatcacattctcttccaggacatggagaaatgtaaactgaatgctgcgtttgaggacaagattacttatatcaatgctc

SEQ ID NO: 17704 - DNA, 1050 bp, Zea mays
  Clone ID: MRT4577_116149C.1
ttttttttttttttttttttttttttttttttttttttttttaaataaaaatttagatcacaatccattatcacccctattcaggccacatgttgggaccgtctgacttggcaactgccattttagtgttcatgcactcatccggaagtcctgaaagggccgaaaaatagggttacatgcaattttaaaattatgtccgaaatttactgcaaggcgcaaggaagcacacggttttatacagattataatgtaaaagcatgcgttcaagtttggaaatttcaattcacagacaagagcttcctatagattacacagatttttccccaggaaggtaggagggagaactgctgccaggttggtttttcttcttatggaacatgctcgtgatgtttggcagcatgaagctcctcctcagtagcgttctgctgttcctatgcccgtcgttcttctcagaagctttcccagctgaagtctgaggtacaggaggcgatccacttccaagttcttctgcccctgccgacggctgagcctctgcggttttcttctccttctcgcgccatctcttgagctcaccttctacagcctttttggctgcctcagccatctctgccctctttagggcctcttctgttgccaattccatgtcctccatttccttgcgggcagtttctagtttcttgattgcctcattctcactggctctgatggcttccacttgagccatagcagcagcaactttcatatcactcaacttctctgactcctcaacctttcggctgagagatacaaactcctctttagaaattgtgataattgctccagactcggatgttgaggatctagcagcacttgctctatccgagagttgcttgatctgatcaagggctcttgcttcagctgctttagcctcttctgcttcctttaaagccaattgcatcttttgttcggcttctgctagttcaacccgagctttttccccttcctctcttagctctgctgcactatcgccatcgtggcagctcgcgtgagcgcatgcgtgggctccgaccg

SEQ ID NO: 17705 - DNA, 650 bp, Zea mays
  Clone ID: MRT4577_11614C.1
caataaaagaaagaacccgcccccatggcgacaccggcaaaaacaagggggacccacccccccgcgcgcgaaaatagaatcaaacccccccccgcctaacggccccgcgcaataagggaggggtccatgggcaacagcaacctcccgcgcccaataataaaggagacacaccggctcctcaccgaaccaaaaccgggaaataacccgtccccgccggaagaaaacatgcagaactccaatgacatgatccttggccccgcacagacaccctatgaaggtgaagatatcaaagcctgagctattcttgcctgaaaaaaaacaaagacatgtccccaaaagcaaggaatcataaaccaaaaatttacacatcccaaacatccaacaaaacatagagaaggaaaatgcccccgacattccttaaacgaacaaaaaggaaagacccacgctcctttcaagaataccaaaacaaatatcctggcctacaaccatatcaagggcacctccctgaaagaggcccccaaaatcccaaaaaaggaaacccctccttcttcaagaacaaacaatttgccaaaaacaaacttggaaaaaacccaaaaaggaaaagcctgaaaaaacctatatccaaaaaacaccccaaaaaggaaaaggga

SEQ ID NO: 17706 - DNA, 673 bp, Zea mays
  Clone ID: MRT4577_116150C.1
ggcgacatcattgcattctcactcattgttcaaaggtaaaaatgtacttggacaagaataacacaagaatacagggggcataacccaacgatgacagcagagctgaccttattagacttacaacggataagcaaatgagaaaaaagggtaaaaattgaaaagcgatgaattcgcaaaacacttgctcacataatgtgttggtcgatgaaccatagcacaaaggtttatcaattaccagggcttagtttttcaactctcggtcttggtggagccggtcgagtcatccaatctgctggagtcattgtctttgttccgaataccagaagattgctcgacagatttgtttgaagcttcttcctgagattggctactgttatcctgatagctatttgcttgaaggcctccgttgctaggatgcccagtttctaagcttggtgcatcagttccaggaactcgtgccttgtcttcagactgtagctgcaccttggattcttcagatctcgagctgtgctcggatttactaactgcttttccatcacctggtgcatcctcagttgagttgagggcatcttttgtgttctttcctagctgctgaaatactgatgcttgctttcctgatgaatctaaagtttccacttgtgatattctgttgttcttcagacggacgcgtggg

SEQ ID NO: 17707 - DNA, 310 bp, Zea mays
  Clone ID: MRT4577_116151C.1
cggacgcgtgggcgagcgtagagagagagagtctgcctccttcgcaacggtgccaatggcgacctgctgcagcatcttcctgccaccgtcgccatggctcctgctgatggcggtacttatcatcggcaaccccgcggctgtgatggccgtgcaccctaccatggacggtcctgctcatctccatatccttaacggtcgacatcccgtcctactcgctgcgttaatacgatatcctcttccttaaggccgagtagcagtgttctaacctgtagttagtgacttgcagggggaagatcagggaattcctgta

SEQ ID NO: 17708 - DNA, 1935 bp, Zea mays
  unsure (1)..(1935): unsure at all n locations
  Clone ID: MRT4577_116152C.1
ccgggngccatttatanntttgttattaagccgccgaaaccgctgggagggaaatttgagcggcggagtagctgctggattcacacgtacacgggtgagggttgaggaagagacggggaggaggagcttgggggcgaggacaagtcaaaggacaaaggctcgcactcccccggcgccttctcgtcagcttctcccccttcgtcgtcttcgtctgctccgcccgcctaccacgcacgttttcgcttcccctcttttaacaacgcccagcaccgccgcctccgcagtcgagcagagcgcccctccctcttcctccctccccctctttctcgctcgcctcccacttgcgggcgtctcgctgaactggttgcgccgtaccagctgcgctccgtctccacagaaactgcttccaagtctctagctctctgcgggtgcatctgcggttgtatttgtaaagatgggttgctgctttatgttcggaaagaaagctaagcaggccgttgaaggcgatgaagatctacatagcgtcaaggtgttttcttacaacgacttgaggaaggctacacaagatttcagtgacgcaaacaagattggcgagggcggtttcggttctgtcttccggggagtgcttaaagatgggacactagtggcagtgaaagttctatctgctacttcaaggcaaggcgtccgcgagtttctgactgaacttacagcaatatctgatatcaagcatgcaaatctcgtcactcttatcggttgctgcgctgaaggctctcacagaatcctggtttacaattacctcgagaacaacagccttgcgcagacattgctaggatccagatacagtaacattcggttcaattggcgggctcgtgtcaaaattgcagttggcattgcctgtggacttgcgtttctccatgaggaaatccgtcctcacattatccatagggacataaaggcaagcaacattcttcttgacaaggacctgaccccgaaaatttcggatttcgggttggcaaggctcctaccacccaacgcgacgcatgtgagcacccgagtagcaggcacattaggatacttggctcctgaatacgcaatccgtggtcaagtgacaaagaaatccgatatctatagttatggtgttcttcttttagaaattgttagtgggagatgcaacaccaacacaagattacctagtgaagatcaattcctccttgagaggcattcttctcttgcagacatgggcactctatgaggaagggcgtttagaagacatcatagatattgacatcggcgatgacctggatgttgatgaggcatgcaggttcatgaagattggcctgctatgcacacaagatgcaatggcgcgtcgtcccagcatgaccaatgtcgttcggatgctctcaggggagaagagaatcaacgtagaccagatcactaggcctgccatgatcactgattttgctgatctcaagatcagcaacaaggagcaaagaccaggcgagacacgctctcccacgacaactcctacgacgaaatcattcaccaccaccgaaccattctcgtcgtcagagacgcccacgcagtcatccatgtgaaagtgtgggcgtaagaagcagttttttttttgttgttttcagtttgtatagtgtgtgaatgtggtagatgggccaggttacatgaattttttttgaagagtttattgtttgttttgttatgaggaaacatctcataggtctcttattgcatctttgttgctgtaaatatttgaaaatgaagatggtcaagataagctttgcacgaaaaaaaaaaaaaaaaannnnnnnnnnnnnnnnnnnnnnnnnnnnnnnnnnnnnnnnnnnnnnnnnnnnnnnnnnnnnnnnnnnnnnnnnnnnnnnnnnnnnnnnnnnnnnnnnnnnnnnnnnnnnnnnnnnnnnn

SEQ ID NO: 17709 - DNA, 505 bp, Zea mays
  unsure (1)..(505): unsure at all n locations
  Clone ID: MRT4577_116153C.1
cggacgcgtggggtaagcatgccccccctaattcctgtttgtgaggcctttctcatgattgatggtagctctgacttttctattctattttatgtccagaggatacttggctcctgaatacgcaatccgtggtcaagtgacaaagaaatccgatatctatagttatggtgttcttcttttagaaattgttagtgggagatgcaacaccaacacaagattacctagtgaagatcaattcctccttgagagggtaagcccttgttatcacatatatcctgcaaaaaaacaagcctggacaattttgtctaaattcgcacggatcagtgcggccgggaactaaaaaaatataagaaactactgaccatattaacacacattcttctcttgcagacatgggcactctatgaggaagggcgtttagaagacatcatagatattgacatcggcgatgacctggatgttgatgaggcatgcaggntcatgaagattggcctgctatgcacac

SEQ ID NO: 17710 - DNA, 794 bp, Zea mays
  Clone ID: MRT4577_116154C.1
atttcagaacaggcggcaacacagggcaggtgtgggccgcatcgcatcgcatcgcacccgcgtggtgggatggagcggggcggcaccgccgcgctcgcctgcaccttccgctcctcctctccggcttcccactgttcgcctctcctccgcccccgtagacgctcgcccgcggccgccggggctcctcgcttcctctcgccgaccggccggcgcttcagatgggatagtcgccttgggaaaatttgatgcccttcacattggccaccgggaactagccatgcatgcttctaaatcaggaaatccttttcttctttcttttgttggaatggctgaagttcttggctgggagtataggcctcccatagttgctcattgtgatcggaagcgagtcctttcgtcttgggctccatattgtcgaaatgtggtgcctcttgaatatcaagttgagttttcaaaggtcaggtacctaactccgcgccagtttgttgagaggttatcaacggatcttagaataaaaggtgttgtagcaggtgaaaactacagactcgggtacaaagcatctggcgatgcagctgagttagtgaaactgtgtgaggaattcggtttaagtgcatttattgtacggtctgtcatggacaccgcaaagggatcttataatggagcaatacccaccgtgaattcaagcgataaaggacaggtgtcttctagtcgtgttcgccaagctttgtcggccggtgacattgaatatgtctcccaattacttgagaggaaacaccgccttgcgctaacagtga

SEQ ID NO: 17711 - DNA, 318 bp, Zea mays
  Clone ID: MRT4577_116155C.1
gttcttattagaggggtttttttattgtattggaacagattttttttttattcttttcatttggagaaacacccgtttttaagtattataaacagaagtctcggatgttttatacgacaaggagcaccacgacaaaatggcctgagttcatcactgcctcctaaatggacattctacttgttaccacaaaaaaaaattccccatggaataaacaaaagggtacttattccgaaaagaggatttattccttaccaccacaatggggccaaaaaaaaaaactgtaaaaaaagaaccttgaaggtgtaaaccactcccttt

SEQ ID NO: 17712 - DNA, 279 bp, Zea mays
  Clone ID: MRT4577_116156C.1
gccggccggtcccgggaaggttgtattagtagtaagcagtgatgaaaagttaggtgcttgagggtctggtaccattctccctatgatctgggatagatacgctaaattcagagcttgctttttaaaaaaaaaaaaaaaaaaaaaaaaaaaaaaaaaaaaaaaaaaaaaaaaaaaaaaaaaaaaaaaaaaaaaaaaaaatgggggttccttcaactgtacatgaaaacaaaaactaaggaaagctccattcccaaaaaaaaaaaaaaaaaaaggccccta

SEQ ID NO: 17713 - DNA, 458 bp, Zea mays
  Clone ID: MRT4577_116157C.1
actaaactcccacagtctcataacataacatgccattttaaagacaggagttcaaagcaatcaaggcgacactccggtccaggcccaggaagtgctttccgcttgctgcttccctagtgaaagccctacaccagttgccgctagcatttattgcgtcataatatagatcttgcttaggcatatgctcctcggttggcatgtggggaatccatatcggggagcatgagaacttctattacgcttacaaacaggacttgtgatcctgccctacaaaacatatacaggacttgctgggcgaccatatacccgactagaacgtgatctgtacgctgggctatatcacccacctaccatatatcaccacctgtaattgggctgtcctacctatgacttcgcacatcataaatcctaaaggcatactcaacagaatacacccacgggcaattgctgaccggtac

SEQ ID NO: 17714 - DNA, 279 bp, Zea mays
  Clone ID: MRT4577_116158C.1
tttttgtggtatgttttaaaaggtttagagttacatcctcacgaacaaataggaagcggtctgtgaacagaactccagactaagaagcgggacaccgttgtgcatcaacagggttattccgatagctctcaatccacgggaaaaaaacaaaaatgcaaacttaagaagtaacatacaagagaaacgttttgtaaagtgaatgcgaatgcattcaaatacaaggtattttaaataaccgaacaaggattaccaagcacccggtgggggcttaagctaacc

SEQ ID NO: 17715 - DNA, 410 bp, Zea mays
  Clone ID: MRT4577_116159C.1
tggagtggatccagcatggatgatttggagctgttcaacgacgcagacattggcatttcttccccccaaggtcccgcaatgtcttcaccgcctagttcaagttccttaccactagttcccttaggtggtcagactgctaataaggacaatgattggaaatcttttgtactaagtgatttttggaatgaggaagggagacgtgatgttccaagtgagatgcagatgtattctcaactaggactgaatgaagaggacaaggcacaggaaaatataagagatgaaaccattttaggtggtacaagaaattaggatcactcaggagcctatgaaaaggggagacaatgggttagaccaaccaatggaagactttctaccaaatgaaaagagggtttggtcataataaatgaatc

SEQ ID NO: 17716 - DNA, 755 bp, Zea mays
  Clone ID: MRT4577_11615C.1
cctgccgggccagcccttttcacagttttgttaggaagtggttgctgcctgaccctagtcgtgtattgcagccatcgcacggcaaattggccagcggcggcggcaggtggtggtgtgagcctgcgaggcttcctacctgcgctggaagtttaggtgcttgatggcgaggaagaagagaaagacgaagaggccaatgatggcaagatggaggcaggtcaccagcacaaagtagcgatcctgcaggcccaggtacccctctaggaactcacgcaccgtctgctccccgagccccggcaccaggatctgctccgtcctgtctgcgagctgtgagaacattagcccataaaccgtccatgccgccggatccgcccagtacacccaccgccaccacacaggcatcatctgcagcaaatttactcaactcgtcagccgattcagatggggggttacctctctcagattatgaagccagagaagacgttccaaaagataaagatgaggaacgacagccccatggcgatctcgatgttgggggtcagggccaccgtcatcatcccgtatagagtgtagtacatgaagctcatcacctggtataggaagaaccagaagaatttgctcgctgtcacctggaacccaatcattgggtacacgattgatgagaagatcatcacttgcaccaacatgtaaggtgaacggggacgtccaatatccccagcgcaaccatggttggagatcatctgtttcagtttgcagaa

SEQ ID NO: 17717 - DNA, 866 bp, Zea mays
  Clone ID: MRT4577_116160C.1
aattcggcacgaggctcaacgcccacaagtcttgctagttgagaaaagtgtgccattgcatgcacaacagcttcttgcaaaagatatctctttagtattgaacgtcaagagatcacttctggaaagaatttctcgctgcacaggtgctcaaattgcatcttctgttgaaaatatcacttctacaggtcgtcacgagggccaaacattctggattgagagagttacagaatgttcagcaccgaaggtctcaaacaaaaacacagtcaagacactgatgttttttgatggttgtccaagacgcttggggtgcacggttcttttaagaggaaaatcatatgaagagttaaagaaagtcaaacttgctgtacagtatgctttatttgcagcataccacctgtcacttgaaacctcatatcttgctgatgagggtgcgacacttccaaaagtcccttcagaccttcaacttgagaagccgaattcttcctcaagatactatcagcagaatttgaatgaatttcaaaccattgaaggggaaacttatggagctggatgcatcacaccttgccttaatggctctgcaaatcaatctcattcaagagatggcataattcatgaggaacatgcacactgtcattcaagatctgacttaagttgggaagaatatactggtggaaccattgatgtatacccttattccacagaagcttcaatgtatggtagaatgtatgccacctgtatgcatgactgttcagacacctaaaagttcacttgccagtgcgagaaaaagtacaccaggagatttgtttttttccataatgttcacatagatgagcggttgtgaatgttaaggttgatatgacttcctg

SEQ ID NO: 17718 - DNA, 206 bp, Zea mays
  Clone ID: MRT4577_116161C.1
catcgatcgacgaccatggatatgattattatctatctagcttgcggagatggctgaacaataataagcgaggccgagctgtctgtcatgcatagggattgggtcgtgtgcgtgtgcagacacacagacacagagctgttcaggctgctatctatgtatgcatgtatggcggcaggctttgagctcatgtacacgggtctacatgc

SEQ ID NO: 17719 - DNA, 319 bp, Zea mays
  Clone ID: MRT4577_116162C.1
gggagcaacactcttttaaaaaaaagcagcccctcacaccccggggatttaccggaagatgacattttttcctcccccggtaacccgtaatataacaaaacccggaccaaaagcttttttaaacaggtcccatggccgggggggggctttttgttcccaacctccttaaaacccctagctgctgctgaagggggctggcttcccccatccttgggctggggccccgatttggcccggccgggttctttaacgggccagcgaaccgatcaccccccaatcgtacacgggggggctccttggcgtgcccggggcgtaggcc

SEQ ID NO: 17720 - DNA, 338 bp, Zea mays
  Clone ID: MRT4577_116163C.1
acgtaagctcggaattcggctcgaggtcccgctctgccggagcctcatgaccgggcggaaggggctcacgaacctggggaagaccggcatcggaccgggactacacatcgtgcgcatgggcgccgcggccatatccgggaagaagcgccttgccgtggccgacacaagtggcgttacacggcatgggtcgctgcccatgaatgtgatcatgctgacaccgcaattgctgctggtgtgcgcaggcaaggcgtggatacacactgtggaggtggactttttgatcactaggtcggccaagagcatgaagaccatgatcactggcctctgtctcaccacgc

SEQ ID NO: 17721 - DNA, 1619 bp, Zea mays
  unsure (1)..(1619): unsure at all n locations
  Clone ID: MRT4577_116164C.1
gccggccgggcctcaaccatcattactccacattactctccttccactccgactccgggagaagtcacccaccacagtctcacatctctggtacatccacagttctgcaagcaaaccattcactcctccctctgcctgtattcttcgtttcgcccctgggatcggatcctcgtcacgccatccgcccccaccgccaccacctgccacaccatctctgttttccagtcacgccagaacccacaattttcatcacaccaaaccatccactcctcacctttcccccccaaacgagtccaatctctacaacgacattgtcgccaactacagcccctttcccttctgggtgcctcaccagattacccactcaaatccagctaccgtgcacaaaagctgcggcatttgccatactgtttcatccgcggaacccaatcttgcctcccgatccttcgcaaaatccaccgtgcttgctgcccctgttccagtccagactccagacaatgctgtccgcgccgtggaatccgagcgttgccagctaattccgctcgggaacacgcacgaggagatccgctagttcgcaagaagcgatatccatcaacggcgttgccctggctgctcgcgctccgccagctcccatgtcggacacggagctgtcccagagcacggtggtgtttgggctccgcatgtgggtgctcgtcggcatcggcgtcggtgccgccttcgtgctactgctcgtcctcatctccgtcctctgcctcctcgccttccgccgtcgccgtcgccggcggcagcgagccggccaaccccgcgcagcagctccccaccaccgccccgcccaagaatcccacgaatgccaaggcgcccaaggacatccaagaagtcccctcccacgccgccgccgccgccccagcgaagacgccgcttgcgctcgcgcaggtgctccagctccccacgccaccggtctccgagcagctcgtgaccggcaaggagcaccacgtcacgcacccggagcagcagcagcaccccagccaccggagcgacgggccttcgccgcacggcaacggcgagagccgcggtggcgccgcggagcgcgcgcccccggcggtgcccgaggtgtcccatctggggtggggccactggtacacgctcaaggagctggagaccgcgaccgggatgttcgccgacgggaacgtgatcggcgagggcgggtacgggatcgtgtaccgtggcgtgctcgaaaacggcacgcaggtcgccgtcaagaacttgctaaacaacagggggcaggcagagaaggaattcaaggttgaggtcgaagcgatcgggcgtgtgcgacacaagaaccttgtgcgccttctaggatactgtgctgagggtaatcagaggatgcttgtatatgagtatgttgataatgggaacttagaacaatggctgcacgggggatgttgggcccagaagccctctcgcctgggatgacaggatgaagatcatactgggaacagcnaaagggttaatgtatttgcacgaggggcttgaaccaaaggtggttcacccgtgatgtcaagtcaagcaacatccttctggacnnagcatgggatgcntagctctcggatttcggactt

SEQ ID NO: 17722 - DNA, 417 bp, Zea mays
  Clone ID: MRT4577_116165C.1
gggagccgggggcaaccaacaattattgacaaaatacggggccaaaattcttttttcccaaagacaaaagcaaaacagctttcctgcttttgctaggggaaacaacaagggcccccttccacaaaaaaaccactggaaaaaaccagggttaatcttccaagcttttaaaccactaaaaacccccatccccaaaagccgtaactactggagttaaaaaaaccaccaacctttttgggaggcgtttaaaacaaacaaaggaacaggccccaaaatctaaaaaaaacctttggggccttggccggaactaacctccctgtaaaaattaaacccctcgttaaaaaaactggcctgaaaaaaaaactgccccctttttttgctggaccggggaatcaaaaaccgacccctgggtccaccccg

SEQ ID NO: 17723 - DNA, 563 bp, Zea mays
  Clone ID: MRT4577_116166C.1
ggccgcttttttttttttttttttcttttttttttttttttttttttttttttttttttttttttttttttttttttttttttattcattcaatcatttatttttttcatttttttacagacacacaccaattaaatcataaaggggaaaaaaaaaaacacacacacaggaggcaaaaacctcccgaaagccccttctttcccgggcagaaaacacaaccgaagggggggcccttttcggggccccgtatttttttatgggcagaaacctcccatatggggcaaccggcatccctacagaaggcctacaaattggggtacccccacccctgcaaaaatttttttggaggttcgcccccccccgggggtttgttttctaaagaaagaagctactttgccacgagcgtggcgaccatccgggagaggaaatttttttagggttaggtgctcaattcaggggggggccaaccaacggggggggagagcctacgaaaggggggagcgaccccccccccgcagtaaaaaaccgattggcgggggccgccgccaaaatgttggaaaccc

SEQ ID NO: 17724 - DNA, 259 bp, Zea mays
  Clone ID: MRT4577_116167C.1
tatggagttggcctccctgttccaagatggattgtgaactttggtggtggtactgtattattgcttgccccaccggaaatcatgatgtcctgcgtagaaatccacaatgctctattgttcattgactgtggtgcaatcatatcttccaaggggtctactgtgcttttcccaacaaaggctagcagtgagcagaaactgcttaccaaaccaactgcagtaattatcgtatcatctgatagctctggcgccataccatctg

SEQ ID NO: 17725 - DNA, 411 bp, Zea mays
  Clone ID: MRT4577_116168C.1
ctggtgtctctgtggtctgtgttgcaagccaaagctcttctccccagccaccaagttagctctctccaattcatcaagtgccactccattatctggtgaccaaagcagccatccttccacctcaccgtggccaaggatcttcgagaggtgtttcggccatgttgtgcctgttctctactcctcacaggttgtctccattgcaacaagtgcttaggagaagatgaagacaacattgaggactttcaggagtttcaggacttcgacgagttttagaatagattagtgacaaattcccagtcagctgcctgtaaaggccttatcgtactgtgtttcgtttagcactttgattatgacttaataactttgtggatgtttcagacatcatgatgtaataaagtacttatttcctct

SEQ ID NO: 17726 - DNA, 426 bp, Zea mays
  Clone ID: MRT4577_116169C.1
atgctttctgaaagataagtgcatttgaatgcagttaaaggaagtaaaaatatgaaatcgatggtcaagttcttggaagcgcccaaagcctaaccattggcagaagaacaaaccttgatcattcacacacgcctggaggaggccctaataatgcccttcctgcctatggtggtggtagctacatggcacatccatataaaacttatggcggaagaaaccctggatacaaccagccaatccatatataggatttaagaccagggccaagaacgaatgctgatagtgccgagggtaataactgaaagccttcttacctatgttcgggagcaacccccttaaatgaaaacttcgtaaggaccatttaggggtattgacccttgagacagtgtgagagggggtttagggcacatccccctattggggggg

SEQ ID NO: 17727 - DNA, 1274 bp, Zea mays
  Clone ID: MRT4577_11616C.1
gggtacctcgaggccggccgggccgatacccaaccacagcgaccgaacaaacaacatgtatgatttcacaagccgcccgctgaaaccaaagccttttgccctgtcgtcaggggcgaggtttcatcaacctcagtacctcaccctcctctcccggagagcctctcgcctccgctccgctcctctgccctgccctgcccttccccgccacaccaaccaaggcgccaaaaataaacgccgcgccactgcgtggcgagggagcctgtcacattgcttgccgctgccctgccgcctcgtcttcgcggagaggcctcgtcgcgcgacgatatggagctcgccgaggcgccggcgcccgtgcccgacgaggacgggctggacgaacgcggcgtcgcgctgcacctcccgaggctgctggccggcgtcgtctccggcgccctcactggcctcttcgctctcgctggagctctgaccggggcagtcaccggcgcggtggcgggcagggcttccgacagcggcggcgtcctgcggggagctggactgggggcggtcgccggagctgtcctctccattgaggtccttgaggcttctcgcgcttactggtgctcgtcggaccggctgggctcgcacggcggagcatcgtccatggctgatttcattgagcagcttcttcgtgcccggtttgtgcaagagcaatttactgcttcaggatacgcatcatatcgctggcagctcagcatatcatattttggtcaggatgacctatacaacatctttggggacatttcatctgaagcgctctcgcaagagtcactgaagtaactaccacatcatatgaatgcatggttggagtgcaatgacagatttcataccgaaatttgtttgctactaaatgcagcgtctggccttggctggcaccttttttcttcttcttcttctaataattataaacaacgccgacggccgacctaatggctagcgtccttcgtcttgccgcaggacattgtggccggtgagacagcgaggaggctgcccggctgctctcacgccttccaccagccttgcgtggacagatggctcgtcggccatggctcgtgccccgtctgcaggcaacgcgtgtaaaagatatataggcgacctgtgtctgtgtacgtagataaacgtggagtgaagagaaacgaccgtgcgcatctggcaatctcacttcgtttcttgcaccccggttccaacatgtaatggcaatggaataagattgctgtcggagcagttcctgtttctgt

SEQ ID NO: 17728 - DNA, 198 bp, Zea mays
  Clone ID: MRT4577_116170C.1
ctcaagatccacgtataacaagcggtttatgcgggttatatctttcaaaccacctgagttagtgcaggtgtgcacttggaaactttacaacagcggcgctttcttattccatgaaaggcagggcaagctccttttaaatgactcaaacaccttgcctaaggcctggaggggccaaagtgcctaaacctataaacgccc

SEQ ID NO: 17729 - DNA, 335 bp, Zea mays
  Clone ID: MRT4577_116171C.1
agctcggaattcggctcgagcgcacctgggccacagggtattcttatcctcactgggactaaagctactggggaggcttgacagcccattccagtttagcgccaaaaaaaagggaacagaaaagcgcacaggtcacgtagacagagattctttgctggtaattttgtgaataatcctgaacagtatggcggtgtgtcagaaagccatccaggcacatcaggcggacatttctagggatctactccagacaattacaggtatgaacgttcaaagctgagtccatattctcatggcattgctactggcagctcgcctgttgcgtctgtgcccaaatg

SEQ ID NO: 17730 - DNA, 371 bp, Zea mays
  unsure (1)..(371): unsure at all n locations
  Clone ID: MRT4577_116172C.1
tacacggaccagaatcaacgcaccgcgactcacaagctcactagtacatccgccgccacgtatgtgtatgtatttgaactgaaccaaacgaacgcccgggtgaaatgcatggttttatcgggaccaacacacacgaacagaagcaacacttacacctgcataccaaccaccgaggcatgcaataaaaaagaccacccagtccacaacagcccctgaaaccgaaactaatcacatgagactacacgcccgttccgcacgaatcctatgcaccccaactaaatggcacacatacacaccaacggaacccacgacaactatacattgaacagtcactgggctcagntccttcggccaacactgggatcgatttt

SEQ ID NO: 17731 - DNA, 334 bp, Zea mays
  Clone ID: MRT4577_116173C.1
gcgtttcctccctccgcgcatcgtttccttcctcaccctgtgcctcagatctcgcccacctggtagactcgccactccgtccgcctcctccccgcctcgatcgccgtcgagctcctctcccccacgcttgactaaccccacctgcgcttggattggtggccagggagaggcgcggaggcgacgcgcccagctacctaccggttccatactctgaagtctgaactggcctcagctgttccaccacctcgctgttcttggcccagctgctctgctcttgtcgagggatgatggtccagtgctcctccaacaaggctccacaccgacattgagctac

SEQ ID NO: 17732 - DNA, 388 bp, Zea mays
  Clone ID: MRT4577_116174C.1
gaccgtcacaccattagctttatttactccagagcgcagaacaacccaatcgacacgacgaggttgttgctcgtttcgctcgctctcctggctctggttgcgagcgccacgtccactcatacaatccgaggctgcggttgccatccaccgccgccgggtcatctaccgtcgccggtgcatctgacatctccggttcagctgacacgtccggtgcatatcatatcgccggtccagttgacgtcgccggtccagctgacatcgcaggttcatgtgccgtccccggttcatttgatgtcgcgaccatgccattacactactcaactgaaccgccctgagcttaatcccatcccaaaccaatcccagtgccatcagacgaatccaagccagt

SEQ ID NO: 17733 - DNA, 333 bp, Zea mays
  Clone ID: MRT4577_116176C.1
agctcgactgcctcgccatcatccccgtcgctgccccctcccgcggagcagaagaagtcgtctcgccgccgcagaccgagcagcgcgaacagccgggcagcatggccgagagggaatacatgaagggaagaggaagacaggaggggacgacgggaggtcagtcgtctacctcgatcgtgcttatggagctgctgcatactgcgcaccgcgtccatggcttggcatggaaatcggggacgcctgattcctgatcgacgaaatgtctgacaagcaatatacacgtgaacgatgttctgtccaatacgaatttattttagaaaactgagtcggtta

SEQ ID NO: 17734 - DNA, 403 bp, Zea mays
  Clone ID: MRT4577_116177C.1
ggggctccggcatacatagtttcataccggcatcaactcccattgcgtcggttgataccgacgctcaggagacttatccatggcgaaccctgacgcctacctacgacagcaacaactgactccatctatccctctagctgtggttgatgcacctacatacctgcttcatcagggggctgctacagattggaccagctctgactcatctagctgagggaaaccctgctgactacttgcagcagctgcttgcattcaaccaactgagtgtgtccaactctgctgcctacctacaagagcgtccacagcatcttgatccactacgcggaggctaacccattgtgtgtagccttactacagcagcatcaattgctgccatacgagcagttctttttgatgaaccctg

SEQ ID NO: 17735 - DNA, 323 bp, Zea mays
  unsure (1)..(323): unsure at all n locations
  Clone ID: MRT4577_116178C.1
actttttnttaatttgctttaaaggtccctcgcaacccggggaagttttgcctaatatatagatttgccgcaaacaccggcataaatgattatgaattgcagtggacatatataagaaagactagttagatgcccgcgctttgcaaaggcatataaaatatcccacaaaatagcacctcaataactaaatgaccctgcatcaaggaaaaccagactaattgctccacaaccaatgcatgccaatattaaatgggcaacactaaattctgcttgcacacaacagggtgttggcttctgccctttccccttcagtagcccccttg

SEQ ID NO: 17736 - DNA, 627 bp, Zea mays
  Clone ID: MRT4577_116179C.1
gccggccggtccaaagatacttcacaagcctatcacatctgctactatacctacctacgccaatcccctaacatatgcctccacttctcgttgctgacatgaaccacgctgctctgcatgcctgggcttagaaatcatctagtaggacccaagaatgagagattctcacggaaccacctgccaggcttcctctccacagaggagtgagagaacgagcaagctgagatttactccacgatctgcaagagtaggaacacaaaatggagcccaaatgttgagcccttcggaaatctcataaaggaagtggttcccctctgacttcaccttcagcgcctccacttcatcttacctgattgaaggcgcttggaatgaagatgtaaaggctcatatgaactgagatctcttctgccgcgatcattcgaaaaggatactggacccgaggaattcacacattgaagtgaattccaaccatatgaacaaaacgaacgtgagattgctcaaagaaatgctaatggacgcatatagatgctctatatcttggaccattatactgccgaaaggaaccaaagagcgagggattaacccgcatgctatctagtactaccgaaaactcatcaacttgttgat

SEQ ID NO: 17737 - DNA, 167 bp, Zea mays
  Clone ID: MRT4577_11617C.1
ggctgggacacagactaccacattatcagaaacacaagatttttacatcgtctttgcagccagcggagaaacaaggctgctcgaattaagcaagcgggggggcaaactaacttcacacaaccggggtgaaacttaactgactcttattaccctttttttttgggggg

SEQ ID NO: 17738 - DNA, 243 bp, Zea mays
  Clone ID: MRT4577_116180C.1
acctcatattccatcagaaggaaggctcggtaataggatcaaaagctatacgtaacacatcgccgaaagcaaaagtgcatcagcgtgtttatggatgggttgttatgcattggcaagagtggcgtcctatggtggtgaggctgccgtgcaggtgtgagtggttaagaaacacgacctcaggcacataaacgaaatttagtaggtagaaaaaacaattaaaaggtgcttaggagcgtattcgtg

SEQ ID NO: 17739 - DNA, 466 bp, Zea mays
  Clone ID: MRT4577_116181C.1
gtgcgtccggccggctgccacgggcggcagcaggggcggtgccgtcaggatcgatcacttcgcgcccatgtctccagagcgtgctgagccactgcgtcgaccgcgggtgcgcagggcagccgtctacgcctactacccgatcatcaaggtcgccagctactccccggattcggaaccaccggcgacgaacacacgcctaggggactagctcgccgccttcttcggactgacgtcccacgaagccgccggtggatggtcgaatgctcatggaggaccgcttgcctgtcgatattgccgggagataggaacaaaaccctacggacccaccctactatggacaacgacccatacagctaactcatgagtaccactacaagctcggcgggctagtgctgaacctgaacctggtgggtaacccaggagctggtggcgagcgaccccgtggtagacttgaagacgttcatct

SEQ ID NO: 17740 - DNA, 581 bp, Zea mays
  unsure (1)..(581): unsure at all n locations
  Clone ID: MRT4577_116182C.1
ggtaccctncggagtctcggccgggnattaatggnaacaagccaacgagccaccgtcgttttatgaaatcctaacccctccctcagctcggcgtcaccaccgttggtcgcttctccaacctcgtattgggagagatccgctcgccgcctcccccgcggcttcctcttcctccgcgcaaactcgccgtggcagagttatctcgcgccggtaccgcacgcatcgggggaaaaacaaggtttttgggatgccgggggccggtgtggagccgccgtcgccgccagccgaggccgcggcatggctaccgccgcgcaggttgagacctgggagggtctccgccaagcggtgctggccgcccgggtgcggtcggttcccttcgcccccgccagcgccggcctctgcggccgaggcaggtcctgaggtgaagggcgtggatggcgcctccacatcgtcgtcggcagagccgatgaaaagcccgcccccgccgtcatttcgccttcggctcagaatggatgcccagataaggtgggaggccccccgcccccgtttcacctgcgcctgagagcggcgccccgcctgctgat

SEQ ID NO: 17741 - DNA, 187 bp, Zea mays
  Clone ID: MRT4577_116183C.1
cccttttcttacctacttttacgggacctacacgcatttttcgtgtttttgggcgcctagtactactgtcgatgcgcgattcctgtctactggaactacaaccacaaaactgccggtgacaggatcaaggcggatctgctccatcacacaaagtacctggagcagaacgcgacgctggcattcatgg

SEQ ID NO: 17742 - DNA, 269 bp, Zea mays
  Clone ID: MRT4577_116184C.1
agcgccagcatcttcaatccactcccgcgcctccgcaagaagaaaagaagctcctatattctaaattgaggaacattcctgtgaatgagagggcaactactgtagagaaaccttcagttgataaaaaagatgcatcaaccgtgacagaagatttagatactggggaaatcagctcttcagagacactgaccagcactgttgacatattggaagacgctggaacatctgttttgcgttccaacattgtgtctgattttccttcctcggaa

SEQ ID NO: 17743 - DNA, 2608 bp, Zea mays
  unsure (1)..(2608): unsure at all n locations
  Clone ID: MRT4577_116185C.1
nacctctccaanaaagccatgcatgcccaccatctcactgctgatggcacacacatatatatcgtcgtcgatctgcaaccttagcttcaaccatactacggtagtagtttccctgctgcaacagcttggcatggcgcccaagcttcctgtgctacgacgagcaaggtcgctgccgctgctttttcttgccaactttgttgtgctgcagttacaatgctcctatgggcttccgctccagaatgaaccgagacaaatatacatcatctaccttggtgggcgacaaagtgacgatgctgatcttgtcactgcttcccaccatgatctccttgcgtctgttgtcggcagcaagcaagaagcggtagagtcgattatctacagctatagacatggattctccggcttcggcttcgctgctttgctcacgaaatcacagtctacaaagattgcaggtctgcctggcgtggttagtgtaacgaaaaaccgagtccaccagacacgcacaactcgaagctgggactttgtggggctgcactacaacgatcagccaaacggtttgctcgcaaaggcggctaaatacggagacgacgtcattgttggcgtcatcgactcaggcttctggccagagtcgcctagctacgctgaccacggctacggcccccctccttcgcgatggaagggagtctgccaaggcggcgacgacggctcgttcggcccgaacaactgcaaccgcaaggtcataggggcgcggccggtggtacgctgccggcgtgagcgacaaggagacgctaaatggcaagtacctttccacccgagacgccggtggccacgcaactcacacctccttcactgccgacggtaaggtcgtcggcaacatcggcttccacggcctggcggcctgggcggcgtgaggcggcgccccccgcggcaggcttgttatttacaaggcctgctggggcgcgcacccggtgtcgggctcgtgcggcgacgctgatgtgatgaaggccatggacgatgccgtccacgatggcgttgacgtgctctcggtctccatcggcgggccctctgagacgccgggcacgttgcatgtcgtcgcgagcggcgtcacggttgtctacgccgctgggaatgatgggcctgtctcccagatggtggagaactcgtccccgtggctgttcaccgtcgccgcaacgactgtggataggatgttccccacagccatcaccctgggaaacaaccagattgtgcatggtcaatccttatacgtggggacgcaagggagagaagatcatttccacgaggtcgtgcccatggtgaactcaggttgtgatccagagtatgtaaacagcagcgatgtgaaggggaagattgtcttctgcatcacagaggacagcttgaatccatctgctacagttactgctgttggacagctagtgttggacaatggagggaaagggttcatattcacgggatataacagggacaatatcgttcggtgggaacctgttacaagcaaaatgataccgttcattttaatcgatcttgaggtcgcctaccacatcttgcagtactgcatctcaactgacggtaccccaagagcaaagatctctttggctcaaacaacttttggaactggggttcctgcccccaaggtagcagtgttctcgtctagaggacctagtgccgtctatccaggcgttcttaagcctgatatagctgcacctggggtgaacatcttagctgccgccccacaaattccttattacaaagagcagctgggtggcgtcctgtaccattttgagtctggaacatccatggctacccctcatgtgtctggtatcgtcgccctgcttaaatcattgcatcctgactggtcaccttcggccctcaaatcggcgctcatgacaactgcacttaccaccgacaacaacgggatcccgatacaagcagatggaaacccagtaaagatcgccgacgctttcgattacggagcagggtttgtcaacccaaccaaggctgacgatcccggtctcatatacgacatccaaccgtcagattacctcaggttcttcgactgcacgggagggttgggtaccaacgacagctgcacgacacctagggcatctgttgtagacctcaaccttccgtcgatcgcaatccctagtctcaaggcgccccaaaccgtcacgcgcaccgtcaccaacgttgggcgccagactaacgcagtgtacagagcagtcctccagccgcctccgggcgtggagatgtccgttgaaccgtcggtcttggtcttcgatgccaagaggaaagcacagagcttcaaggtggctttcatggcgacgcgtcggttccagggtgactacaccttcggtagcttggcatggcacgacggaggcagccactgggttcggatcccgattgcggtccgcatcgtaatccaggatttgtattcgaccgtctcttgaatcgatcccattgcggaaatcgtctagaaaaagaaataattaatgttatatgaagctagcgagtttccataaggaaccctcgctcgtggtggcaagatggtatttggtgcatatatatgaaaaatatatatccttaagtttgcttg

SEQ ID NO: 17744 - DNA, 431 bp, Zea mays
  Clone ID: MRT4577_116186C.1
aaaatcatgctgtacagggaacacatgactggggaaacaatttgataacacaatcaacagcttgtcaaaacaaagcataccctggagttctgggctctgggagacccagagtctcgaggaacaacagatttcatgccggagggccaactggttttacaccctggtcctgggagccgcactgcactggtggtggccctggatgacctcgatgacagcatcgagaagaatccttcctgtcaccggtttcctgcgggcgcgaatggcgtacattccggcttctgtgccaacgctcctaatatcagctccagccgagttggggcatagctcgcggccagagcttgaaacgaatatctggctcacaggacatggtacgtgtatggatcttgaaaatttgggtccggtcctccaagacaggtagcctgaattccacc

SEQ ID NO: 17745 - DNA, 913 bp, Zea mays
  Clone ID: MRT4577_116187C.1
caaaccccgacttccgggaggggcgcatttattagataaaaggctgacgcgggctctgcccgccgatccccggccgggccgttgagccagacaatcaaaagctaccccctatccgatccaaccctttctggctgctcctccgtccggccggcatcggcagtgcaggatggctctgaggatgtgggcgagctcagccgccaatgcgctcaagctctcggcgggcggcgccggagcccgggctgctgccttctctatctccaggttcttctccactgttcacgatgggttgaagtacactcagtctcacgaatgggtcaagacgacgggcgacgtcgccaccgttggcatcacggaccatgctcagggccacctgggagaggtggtgttcgtggagctgccggaacccggcactaaggtggccgcgggaggacccttcggcaacgtggagagcgtgaaggccaccagcgacgtcaactccccgatctccggcgaggtcgtcgaggtcaatgccaaactgtcagagacgcccggcctgatcaacacgagcccgtacgaggacgggtggatgatcaaagtgaagccgagcagcccgggggaggcggacgccctgctggacgccgccaagtacaccaagcactgcgaggaggaagacgctcactagacccaggccccagccagcaagcgtggatgcttacaacgacagcgcgcgtttggtggtgttgatcctccgctcagtctctctttgttgcaaaaactccaccaagcagtccgccatagccaagaaggccacactcacctttatcatccatgccttccgtttttctttttttttttggtgtgtgctactacctttttttttaaagaaaagaagtggttctgaataaaaaaaaaaaaaaaaaaggcccctagggcc

SEQ ID NO: 17746 - DNA, 590 bp, Zea mays
  Clone ID: MRT4577_116188C.1
ctgcaggtcgaactttagaggaaggatgaaccggttccgaagctatggatggagaagcttcgacttagcacaaggatggtgatggagaatgaaaccgacctaaaggggaaaagactacttaatcctcgacaacttaccttttgactaatagtaaatgtcagggacatgaatgtaattttgcctaggctgcgtcctgtgtctataaatagatgaacagtcacaccgtactgttcatgctaatttgtaatcactcgcacgtcactcttggacctttaccttctgtcaagccgaaggtacaaatgtgatttgatatcgttagtatttgttcatgatcatataatgataatatgaataatttgatgacttgatgtagttattcatgcttttttcatgtctcatatatccctgtttatattcttgcatattggaatgatgaaagtatgtccttcatgacctttcgttgaagatcaattatatcctaaaggagataatgcttcgaaagacgaaagtctttaatcattaatatttgagttgccttgtcttaaactatagcatctgagaacatgtgaccaaacattgcgcccaccttc

SEQ ID NO: 17747 - DNA, 662 bp, Zea mays
  Clone ID: MRT4577_116189C.1
acaatcaaaagctaccccctatccgatccaaccctctctggctgctcctccgtccggccggcatcggcagtgcaggatggctctgaggatgtgggcgagctcagccgccaatgcgctcaagctctcgggcggcgccggagcccgggctgctgccttctctatctccaggttcttctccactggtacgttcggtggcagctagctagctagatagctaggtttcgtctcttgtccttgtcctctcctctgctgcgaaacaaacaaagattttgggctactgtcttgtagctagtatggtctttgtatttttgctgtgatgtatcggtgtgtgtgtgtgtgtgttgcgcatgcagttcacgatgggttgaagtacactcagtctcacgaatgggtcaagacgacgggcgacgtcgccaccgttggcatcacggaccatgctcaggcggagtgaactagctggcgacattatatatatatacttgcgatacagcttgcttgttctccgtcagctcagctcttctagttctagctagctgacgcgaagtgacgagcgagtagttccaagaaaacattacaagctagctagggacaaacatttcgttattattattatacaatattgttgtcacatgcagggccacctgggagaggtggtgttcgtg

SEQ ID NO: 17748 - DNA, 1087 bp, Zea mays
  Clone ID: MRT4577_11618C.1
attttgaaggtcattggaatgtgttggaatcgtatatggatcagcattgttcctgggtttcatgaactgcagcatccttacagcccagtggtggcaatggagagagttgtgctctaccgtgaaaaggcggcaggcatgtactccaccatgggcatacgctatcgctcaggtaacaacacacatcaatgatcaacatgttggtgcaagtgctgatcttctcatcgattgtgtacccgatgattgggttccagctgtctacggccaagttcttctggttcttcctatacctggtgatgagcttcatgtactacactctgtacgggatgatgacggtggccctgacccccaacatcgagatcgccatggggctgtcgttcctcatcttcatcttctggaacgtcttctctggcttcatcatcgcgagagaggtacttatcacacacacccatctgatgagttgagtaatttgctgcagctgatgcccgtgtggtggcggtgggtgtactgggccgatccagcggcatggacagtttacgggctgatgttctcacagctcgcagaccggacggagcagatcctggtgccagggctcggggtgcagacggtgcgtgagttcctggaggggtacctaggcctgcaggatcgctactttgagctggtgacctgcctccatctcgcaatcattggcctcttcgccttcctcttcttcctcgccatcaagcacctcaatttccagcgcaggtaggaagcctagcaggctcacaccaccacctgccgccgccgctggccaatttgccgtgcgatggctgcaatacacgactagggtcaggcagcaactacttcctaacaaaactgtagaaaaggtctgggaagaaaggtcttgttgcaaaagtgtgcataaatttctagtagagaaatgaattagtagtaactaatcatgtaaaggaatacgagtagatccaaggggagtgcaaacagtgtaatgattaagattcagaaaatgaaaatgtgttgtttgtcattgtttcagtttttgaatcttgacacctacatagaatggaattgctgcaattctcagttccgtgtg

SEQ ID NO: 17749 - DNA, 1183 bp, Zea mays
  Clone ID: MRT4577_116190C.1
gggggcacacccccaccatagaaacatatccccccgcacacacctttctgaattctgagccaggcgcatttattagataaaaggctgacgcgggctctgcccgccgattgggtaccccggggccggccggggagtgctgagccagacaatcaaaagctaccccctatccgatccaaccctctggctgctcctccgtccggccggcatcggcagtgcaggatggctctgaggatgtgggcgagctcagccgccaatgcgctcaagctctcggcgggcggcgccggagcccgggctgctgccttctctatctccaggttcttctccactgttcacgatgggttgaagtacactcagtctcacgaatgggtcaagacgacgggcgacgtcgccaccgttggcatcacggaccatgctcagggccacctgggagaggtggtgttcgtggagctgccggaacccggcacgaaggtggccgcgggaggatccttcggcaacgtggagagtgtcaaggccaccagcgacgtcaactccccgatctccggcgaggtcgtcgaggtcaatgccaaactgtcagagacgcccggcctgatcaacacgagcccgtacgaggacgggtggatgatcaaggtgaagccgagcagcccgggggaggcggacgccctgctggacgccgccaagtacaccaagcattgcgaggaggaagacgctcactagacccaggcccgcccagccagcaagcgtggatgcttaccacgacagtgcgcgtttggtggtgttgatccgctcagtctttctttattgttgcaaaaactccaccaagcagtccgccaatgccggcgtacctgatgccttccgttttctttgtgctggtaccttatttttttttataaagaaaagaagtggtgctgaataaaaaaaaaaaaaagatcaaaaaaaaaaaaaaaaaaggcccctattggaaagcactcctttatgttcgatgcaaggacaacaatgctgcacatgccagtgaagctctgcgacgcgccaagttcaagttccctggccgccaaaagattattgagagcagaaagtggggcttcaccaagttcagccgtgccgactacctgaagtacaagagtgagggtagaattgttcctgatggtgtcaacgcaaagctgctcggtaaccatggaagacttga

SEQ ID NO: 17750 - DNA, 991 bp, Zea mays
  Clone ID: MRT4577_116191C.1
gtaagctcggaattcggctcgaggacaatcaaaagctaccccctatccgatccaaccctctctggctgctcctccgtccggccggcatcggcagtgcaggatggctctgaggatgtgggcgagctcagccgccaatgcgctcaagctctcggcgggcggcggcggagcccgggctgctgctgccggcccggccttctctatctccaggttcttctccactggtacgttcggtggcagctagctagctagataggtttcgtctcttgtccttgtcctctcctctgctgcgaaacaaacaaagattttgggctactgtcttgtagctagtatggtctttgtatttttgctgttatgtcgtatcggtgtgtgttgcgcatgcagttcacgatgggttgaagtacactcagtctcacgaatgggtcaagacgacgggcgacgtcgccaccgttggcatcacggaccatgctcagggccacctgggagaggtggtgttcgtggagctgccggaacccggcacgaatgtcgccgcgggaggaccccttcgcacgtggagagtgtcaaggccaccagcgacgtcaactccccgatctccggcgaggtcgtcgaggtcaatgccaaactgtcagagacgcccggcctgatcaacacgagcccgtacgaggacgggtggatgatcaaggtgaagccgagcagcccgggggaaaggcggacgcccttgctggacgccgccaagtacaccaagcactgcgaggaggaagacgctcactagacccaggcccggcccagccagcaagcgtggatgcttaccgcgacagcgcgcgtttggtggtgttgatccgctcagtctctctttgttgcaaaaactccaccaagcagcccgccatagccaagaaggccacactcacctttatcatctcacgccttccgtttttctttttttttttggtgtgtggtactacctttttttttaagaaaagaagtggttctgaat

SEQ ID NO: 17751 - DNA, 531 bp, Zea mays
  Clone ID: MRT4577_116193C.1
gttctagatcgcgagcggccgcccttttttcatatttttagacctgagtatgaccctttctcgcgtggtcattaaagtattcggggttgcataaatataattttggcgattcggcttaactaaagactgtggactgcgccacgctttcttttcttttacagtgtaaaggaacttgtgattggcattctcagcatcacagctttgtgaacatggatcgacttcgacaggtcaagaaaacaacgacctgcagacggagattgaacctaacactaccaagcaatacatgggtcatgggatgggacgaaagagaagagaagggtgaagggacatgcaggatgcgcatagcagagcagacacgcacgcacaaggacgtcttctcatggccagggggcgaactcgaagaccttgccgacgatctcgagcccgggggggatctgccagacgaagagcatgacgttgacggcgttgagcgcgatgtgcaggctgcgggccgtctcgtcccccttttgcatcgccgggacgagcgcggtc

SEQ ID NO: 17752 - DNA, 317 bp, Zea mays
  Clone ID: MRT4577_116194C.1
cttggggggaatgatgaaggccttcaacccttaaaaagggtggttgaaaacattaaccaacaaaccggttttaaaaaaaaagcatgctttaaataggccagggagatcccggcccccccatgcaggcaatcaattagcctaaggtggtgcaccaaacaatgcaaaacattaacaaacccatttttaccgggaacggaacgggaggcacccgggggtttattaaaaaaacaaaatgtgcaatggtgccagggccacacccggcgaagggagcttcccccaaaattaacaaatggcccggcgggacgggggtttttcac

SEQ ID NO: 17753 - DNA, 318 bp, Zea mays
  Clone ID: MRT4577_116195C.1
ctgagagccggtcaggggaggaaaaaaaattctaaccttagcatccgcagggctagggttagggggttgcgaagtcgggggtggggatgcaccgcgaggcggtgaagaggttcaacgacaccaagggcttagggttcatctaccccgaggacggcagcgaggatgtcttggtgcaccaggcgttgatcaagtcggagggcttccgctcgctcgctgagggcgaggaggtggagcttctcctattgaacggcgaccccggtcttattcaggccgttgacttcaccacaccccactagacatacggggggggccatatga

SEQ ID NO: 17754 - DNA, 456 bp, Zea mays
  Clone ID: MRT4577_116196C.1
tcctcccagatccaacatgcaatgggcactgccatatttaccttttcacccttgatgcctgctggggttgtcaaacctattacagtgaatgcctttggtgcatttattggcacaaagctccaggcacagcaactacgacctcttgtgatagcaacaccttgctgtctactctcaaagcagcaggttcttacattctacctacttgcttggttgaactctgctttttatttgcaacaacaacaactaccattcagccagctatttgctggctaccaacagctatttgttgcattcaaacaactgacagcattgaactcttctgcttatttacagcaacaacagctactaccattcagccagctagctggtgtgagccctgctaccttcttgaccaaccacagttgttgccgctctaccagcacgctgcgcctaacgctggcaccctcttacaactgc

SEQ ID NO: 17755 - DNA, 1312 bp, Zea mays
  Clone ID: MRT4577_116197C.1
gtcgtcccacactcccacccctaccaacgctctgcgccaacgaacgcgtccgcaagtcaaaccaggcccggaggtaccctcgattggttcccgcgaggccgggggcgcacaaaagagagggtctggtgtgtggatgattccagtcctcctcctgttctttgtttcccgtcccatcgtgtgtgagcgcgtctgctggtctgccaagaggaggaaaggaaggaggagcaagtagagatggcttgccctgcgcagtccatgctctccgccagcggctgcatcttcctgaggagcaagcctcaggcggcatcccaagtgcgagggggcatcatcggcggtggccgcagcagcaggccgttcctgctcacctgcaacgcttcctcttctccgtccccttcctcgccggcgccggcgcaggaagaccccgactgcaacgaggaggagtgcgccccggagaaggaggtcgggagcctgagcgccgagtggctggccgaggagaggacccaggtcgtcggcactttccctcccaagaagaaagggtggaccggcttagtggagaaggacaccgccggccagaccaacatctactccgtcgagccgatggtgtacgtggccgagagcgccatcagctccggcacggcgggtacgtcggcggagggcgccgagaacacggccgccatcgccgcggggctcgtcctcatcaccgtagccgcggcctcgtccatcctcatccaggtgaacaagagccaggtgccgcaggtgccggaagccgcctacagcggcccgccgctcagctactacgtcaccaagttccagccggcggtggctgcgccggcgcagaccctcgaggcccccgcccccgacgaggcacaagacggcgccgccgccaccgtcgcggctccggaggtaccggcaccgcagctgtcgtcgtgagctgattcggttttgtggcatgcagctttatactacggatgagccagtagcgcatgatgatggaagatatgaatccatgatacaagcatttcggaattgtattaaagtttgtatatacacatgcattcagctcgcgcattctgtatgcttatttgaattcagacatcacggcactcccacaaaccattcagttgtaacaaggtgaacataccattttcacgcgtagtaattgaacacaatttttatttttaaaaaaaaaacatttgtaacaaggtgaacataccattttcacgcgtagtatttgaacataatttttatgttgttggggctcagagaaattcttattctagaaataagtttggggcgtgccgtttataggagg

SEQ ID NO: 17756 - DNA, 893 bp, Zea mays
  unsure (1)..(893): unsure at all n locations
  Clone ID: MRT4577_116198C.1
tttgttatggggtctttacagggctcacagcaatgctgaggatgaaattgtgttcccagcattggaatccagagaaacattgcacaatgtgagccattcatatactcttgaccacaagcaggaagaacaattattcgaagatatctctgatgttctctttcagctttcacaactacatgatagccagggccatgcccagactaaagttaatgaagtaaagcaaagctgtttccattcatctaatgacgttgattttactaggaagtataatgagcttgccacaaaacttcaggccatgtgcaagtctatccgggtcgccttgactaatcatgtccatagagaagaacttgaattgtggccgttgtttgacaaacatttttctgtggaggagcaagataaacttgtaggtcgtataattggttcaacaggtgctgaggttctccaatctatggtaccctgggttacatcagctctcactcaagaggagcagaacaaaatgcttgatacctggaagcaagcaacaaaaaatacaatgtttggggaatggctaaacgagtggtggaagggagctggaacatctgattcttcagcagaggcaccctctgctccagaagatagtcatttacaagataagcttgaacaaaatgaccagatgttcaagcctggctggaaggacatatttcgaatgaaccagagtgaacttgaggctgaggtgcgaaaggtttcacgagatcctacacttgacccaaggcggngaagngnccctatctaattcagaatctcatgacaagccgctggatagctgctcagcacaagttaccggaaccaaattctgaagaatgtagtcacgatgccagtatacctggatgtgcgccttcataccgagaccagga

SEQ ID NO: 17757 - DNA, 134 bp, Zea mays
  Clone ID: MRT4577_116199C.1
taccttctcagaggcccccactgcctaagggtgggtgttcttgcatctgccggcgcgtgctcaagacggacccgtagagctggtcgtaccacacgggaaactgctgcaatgcacgtccatgcaggtcggggctc

SEQ ID NO: 17758 - DNA, 2043 bp, Zea mays
  Clone ID: MRT4577_11619C.1
atgccacgcacgaagaatgcgtcggcgtcagggggtggcgatgatgaggaccctcgtcgccctttcaggcaggtgaagggcaagactgtctatttggagcagcaggaaggccgcaagaagcggcgtacggacagagaggctcgtgcagcggcagcagctgcagcagtcgctgcgcaggccgcacttggagatcagccgcatgttccatccgatcagattgcattccgtgctcgtcgtctcgtctcccggcctcgctcttccactcacacctccgcttccactccgccacccactctgcctgctcccgtcactcctattgctccatccacctccacagccatacccactacctcctctacgccagcttccactgcttcccctgctcccgctcccgcttcagctcctcctgtccctccacctcgcttccgggagcgtgatgagactgaggtccgtcctctggtttcggatcctcgtctgtttgatcttcagcgtgctactgcagcacgggtacgtcggttcaggtacgtacccgtggagtcttggctacctgctcagagagacccagcagcaggtgttcttttcagcacacggattcaggagtcatttttcagagctcagatgtctgctcagattgcgctgcgagtgcaccgcctattggatcttccagcttttttgctagcagccggtgctgagtctgaggcgcatctcacctatctgcctggcctcctgacccttctgactatcagcgacagatatgttgaggagtgggtccgcgtcttctacgcctccgtttggattgacccggatcatcagtggatgaggttccgctttgagcgcgaggatgtcacgatcactgccaggacagctcacgtcgcggctctgttccgcccgcctttcacagatgggtcgcgacgttctccagcagactttactacagcagcgaagtacttatatgagctcgtcagacggacactcctgccgaggatgggatacagggaggctaccactcatattcagctttggctccttggtgccctggtatcccactcacagtttgatgttgtggacttcctgatctgtgagatcgaggacactgttctggatgggattcgtgctcgtcggcagttaccttatgctcactacttatgccacatctttgcgcagctgattcagccacctcgttttcagagcacccttgaggcctcacgtcttgtatttggatcttaccgtcctgctcctgagattccagtgccagcttctgcttctgtgtttgactctcaggtcgaggatgcagctcttcgacagtttgactctcagggtacagcagctgatgatgatgatgatgatgatgatgattttggggttcctcctccgcctccgcctccgcctcctatgcctccacgctcacatgatcatgaggctgggagttctagtgctgctcctgctactcctcaggctatggaccctgctcttgcttcgattctccagactctctctcagcagcaggctcacctggcagccgagcaggcccgtttatccgagaggatgctctcgatgtttcagaacatgcaggacaggcaggatgcgtttcagcagcagctacttcaggatcgggctgagagtagggcattcatggctctcatgctacagcagtctggtgtctctgttcctccggttctgtctgctccacctcctccgcttcacgctccagtggtgccttcgattttgtctggaccccctgttgatacctctccgctccggccggtcactttggcgttcacctctccggttctcagctctgtctgtccgcagccgccagtgccaccagcatctgctgttaccactactgctgtggcagtatctgtgaccgcttctgttccggtagctcctgcagcgcagcctccgtccgagtcagtaccagctccagcttctaccgcagatcctggatccgagactgactctgaccctccgccggcgttcgctctgctacctcgacctcgaccggatgcgcccccgccgcctcctcctgcttcaggtgtttag

SEQ ID NO: 17759 - DNA, 387 bp, Zea mays
  Clone ID: MRT4577_1161C.1
tcgaattccgttgctgtcggcagccccagaagcagcggcagcagcagcagcaggccaccggcgcagcgctggcgctgccccaggactggtgctaccgctgatgatgtgttggaggcgcgtgcgtgcatgcatggacatggacatggacatggacatggatggacgcgatggtgcctgccaagacagatggcgaacgttcaagcattcgtattcgtactagcagacgttctttagtagtggcagtggccagggaaaaagaataacaacaacaataataaataagaataaggaaacgatggtggatggatggatggatggatggataatgtagctgcagctgcaagataaacaaagacaagggtagcaggagtcttatcgacagcaacg

SEQ ID NO: 17760 - DNA, 334 bp, Zea mays
  Clone ID: MRT4577_116200C.1
ttttgacaaaagctaccaggatcctttggggcctcattgaacttacatacacatggtacagtcaaaactgcttgattctggacgcacgggccgctggggcacatggcgggtgcatttaggaggcttactgacaatcgctagcaacaactgactaaggggaggctataggagacaacacatatatgtgtctagtaatacgggacacatggatgggggtgtttggttctaaaggggggggacctaatggggcttcatactgtggcctgacatcgttctgttcggctcagcatggcccaaaccttccaccgatttgcccggctggttatgatggggg

SEQ ID NO: 17761 - DNA, 909 bp, Zea mays
  unsure (1)..(909): unsure at all n locations
  Clone ID: MRT4577_116201C.1
attgggtacctcgaggccggccgggctgagttttttgaaagggggaaaaggaaaaatggcaacaggcacatggttgggcgggcggtttgccttttgcccgtttctcacacacgcattctgagtttctgacgagacgaccaacaccacacggagaagacggaggacagtagagtcgtcgaagcagctgtacgccggaaggcctacccccgctatactatctgccttcctactcgcttccctccccgagtccctgtcctcctccgccgtgcagcacccgcgcagcctccactccggcgtcgtctccctccctcctccgccatcgccaccgggacacgcgaagcttccaggtcttgtctttgggtagaacatgtcgtgctttgcatgctgtggtgatgaagatacacaagtaccagacaccaggactcaatacccaggacatcatccagcaagagccgacgcataccgccctgctgatcaacctcccaagggttcccagcctgtgaaaatgcaaccgattgcagtccctgccattcctgtggatgagcttagggaggtgactaagggttttggtgatgaagccttgattggtgagggctcctttggcagagtatacttaggtgttctaagaaatggcaggagcgccgcgggtcaaaagttggattctaataagcagccagaccaaagattctttggcgcagggtgtctatgggtgtcaaggctgaagcacgaaaatgttgttgagttgcttggttactgtgctgatgngacactccgcgtccttgcctacgagtttgctactatgggttcccttcatgatatgcttcatggaaggaaaggtgttaaaggngctcaacccgccccgnntctatcatgggtgcagcgtgtgaagatagctgttggggcagcaaa

SEQ ID NO: 17762 - DNA, 1039 bp, Zea mays
  Clone ID: MRT4577_116202C.1
cattgggtacctcgaggccggccggggaaaaaaaaaaaaaaaaaaaaaaaaaaaaaaaaacgcctcgaggcccggcgggccacacgcattctgagtttctgacgagacgaccaacaccacacggagaagacggaggacagtagagtcgtcgaagcagctgtacgccggaaggcctacccccgctatactatctgccttcctactcgcttccctccccgagtccccgtcctcctcagctgccttccgccgccgtgcagcacccgcgcagcctccactccggcgtcgtctccctccctcctccgccatcgccaccgggacacgcaaagcttccaggtcttgtctttgggtagaacatgtcgtgctttgcatgctgtggtgatgaagatacacaagtaccagacaccaggactcaatacccaggacatcatccagcaagagccgacgcataccgccctgctgatcaacctcccaagggttcccaacctgtgaaaatgcaaccgattgcagtccctgccattcctgtggatgagcttagggaggtgactaagggttttggtgatgaagccttgattggtgagggctcctttggtagagtatacttaggtgttctaagaaatggcaggagtgccgcggtcaaaaagttggattctaataagcagccagaccaagaattcttggcgcaggtgtctatggtgtcaaggctgaagcacgaaaatgttgttgagttgcttggttactgtgctgatgggacactccgcgtccttgcctacgagtttgctactatgggttcccttcatgatatgcttcatggaaggaaaggtgttaaaggggctcaacccggcccggtcttatcatggttgcagcgtgtgaagatagctgttggggcagcaaaaggcctcgagtatcttcacgagaaggcgcagcctcatatcatgcaccgagacatcaagtctagcaacgttcttcttttcgatgacgacgtagctaagatcgctgacttcgatttgtcaaccaagctccggacatggcagcccgactt

SEQ ID NO: 17763 - DNA, 274 bp, Zea mays
  Clone ID: MRT4577_116203C.1
gtagttgccatatgttcagtaattttttcctattaaattgtttatgtatagaaaattatgcgagaaaaatggaatggttaagatctttacaaaaaaaaaaaaaaaaaaaaaaaaaaaaaaaaaaaaaagaaaaacaaaaaaaaaaaaaacaagacttacagacacatgcaagcaaataactaaattataaaatgagctaccttaaattaattgactggccatcgatatacaactgactgacaagaaaaaacctgtacgtaaccaaattaatcgg

SEQ ID NO: 17764 - DNA, 147 bp, Zea mays
  unsure (1)..(147): unsure at all n locations
  Clone ID: MRT4577_116204C.1
ggactcggtccctagtaaggccgccgtgtgctgggtatatcataagtgctgccccatggctctccatcagaagaggcatgcaggggacgactcggntgaactccccctctaacgccccaaagatgacaccacaggacgggaagnaga

SEQ ID NO: 17765 - DNA, 381 bp, Zea mays
  unsure (1)..(381): unsure at all n locations
  Clone ID: MRT4577_116205C.1
cnccnnttcnctttnnannaaaaaaaaaanancaggggggcnnatggggggnaagggccaaccccgcgncacgacggancaagagaggcccccaaaccggcgaacaaaaacaacacggaccccaaaccgggcaggacccagggacgaccggnccaaacacaacaccgaacaagacccgggccaacgacaaggnanncaaaggcgaggccaaaccaaagaccgaccggggcggcggccccaagaggagacggagccccaaaagcgcccacaggacccccccagcgccggagaccgggaacggcccgccccccccgaagnnggcgacggggaccgggaggccgccggccaggaaagcgaaccnnnnggaccgcacgcccagcc

SEQ ID NO: 17766 - DNA, 193 bp, Zea mays
  Clone ID: MRT4577_116206C.1
atcgacgaaagctatatccagctagtgacaagagcaaaaacaccatcatcttatacgcccgtatcagacgccacctcaatggcccagagcacgaggatggtggcgctagccctggtggtcctcctggtggctgagacagctttcgtgtttaatgtcaccgagtacagctgtttccataactgctacaagcggt

SEQ ID NO: 17767 - DNA, 177 bp, Zea mays
  Clone ID: MRT4577_116207C.1
atgtatgtgccgtacgtcgggtcggaattcgtacgagtgatgacgaaacactggccagcctgcacacttcactccaattcaggcacggggtcctgggccgtggtgaccacgacgcacatcatcgttgcccaggaacagactacgtgtcaatcaggaggaagccgctggtggtgccaa

SEQ ID NO: 17768 - DNA, 2154 bp, Zea mays
  unsure (1)..(2154): unsure at all n locations
  Clone ID: MRT4577_116208C.1
agatttctttcccttcccttccttcgcctccgcttcctcctcctcctcctcctgcccctcccccacccccacccgtcgggacgcctccccactttcccctcccccggatccgcatggcgcctctgcagcccgcgccgctcggcctcccgtagccgacgcccggccccgtcccaccgcccgctgcgccgagcgctgcccgtcccaggctcatatttgcacagagtcattggaggaagtttgatgtttcagcagtactgtgacctttattagatgtctttccgcagcattgtgcgtgatgtaagagatggctttgggagcttgtctcgaagagggtttgaggtgaagtttctgggccaccgccgaggcagatctcacggtgctgtccatgagctgcgtgatccagccccagtgatccagagcagttgctgggctaatttgccccctgaattgcttcgagatgtgattgagaggttggaggccagtgaagccacatggcctaacaggaagagtgtagtctcttgtgcagctgtttgtcggacctggagagaaatctgcaaagagatcgttaagaatccagagttctctggaaaaatcacttttcctgtgtccttaaagcagcctgggcctcgagatgtaaccatccagtgcttcatcaaaagggataaatctactcaaacctactacttgtatctgtgccttagcacagctgtgcttgttgaaagtggcaagttcctcctatgtgcgaaacggacctcccgcccaacctgtacagaatatacaatatttatgaattctgaaaatttatctaggtcaagcaaaatgtacattggaaagctgaggtcgaatctcctcggcacaaagtttgcaatatatgatacccagcccccatgcaatgcagcagaacccgggaaaacaagccgtcggttctactcccggaaggtgtcgccaaaggtctcctccagcacctacaacatagcgcaggtttcacatgagctgaatgtcttgggtactcggggccctaggcggatgaactgtgttatgcactccatccctacctcgtgccttgaggctggtggcagtgttcccagccagctggacagcatccttgctcgctccactgatgagtcatttggcagcatttccttctccaaatcatctgttgtggaccggtctatgcgtttcagcagctcaagattctccgacatctcaatgagcagcagccgcaggattggagacacggcatcgggagacaatgatgagtgcaaggagaggccattgattctccggaacaaggccccaaggtggcacgagcagctgcagtgctggtgcctcaatttcaggggcagagtgacagtcgcatctgtcaagaacttccagctcgttgctgccacgcagcccgctgctggagcaccaaccccatcacaggctaccccagtgccgccgccggagcacgaaaaggtgatcctgcaatttgggaaggtggctaaggacatgttcaccatggactaccgttacccactgtcagccttccaggccttcgcgatctgcctgagcagcttcgacaccaagctggcctgcgaatgaagccaccagtcatggctcaaagtcaaggacgatctgtctgtttcacgaagacggtggccccaaattttgctgggccaccattctgttgtatgttgttgatgccttcttaacttacctaggaagctgcgtttagacattttgcacctgatctacagctgctgctgtgtttctgtcctgatcgcattgttttccatagctttgctctgtggagcggcaacttgatctgccctgcccttaactagccggcaggtttattaatttggttttccatactatggttgtattaactgagaagagactccgacactttcgttgtgcctacctaagagctctgtctgcctttgccctctgggatatgcaaatgtgcatcttgtaaaatttctgaattgcttttgtggcaagtcatagtaataaaagaactagcttccattcaaaaaaaaaaaaaaaaaaaaaaaaaaaaaaaggtttataaatttgcttttccagacgatggttgtattaactgagaagagactccgacnttttcgttgtgcctacctaagagctctgtctgcctttgccctctgggat

SEQ ID NO: 17769 - DNA, 297 bp, Zea mays
  Clone ID: MRT4577_116209C.1
ttaaggcggcttccatcggggagtgctctatattttttttttttttaaaagtaaaccatcaccatttttgctgcccctgttaaacgcaccccgatcaaaataaccgtgctaatcgaccctcggaccccgcaccgcagagaagccacacctactcaaacatgccagatgtggcaggacaaagattgacatacaaagctcacatttattatatgacacatgtaccagccggataacaactgcattcagatgcacaataacaggccccccccgaccctctgcttcaagccccagaaccta

SEQ ID NO: 17770 - DNA, 360 bp, Zea mays
  unsure (1)..(360): unsure at all n locations
  Clone ID: MRT4577_11620C.1
gggacaaaatccttttccctcgttttttagagattataaaagcacggaaccagcaaggaaaatggcgcgcggggcccacgacggcgacgggccagccgatgaacctgcaccgaatccgcacccgcccccaagcccaaccggagcgccgagtggtgtcgccgcggccgccgctcccctccactcgcttcccgcgcggggcccgcccgtcgccagctgtcgcggtccacaagaccacaacaatggaaagagcgggcgcgcctccagctcggcgccctgacgtgtaccgctctttcgcggcccccccgcggcgccacgggaggccgagcaacccacgcccaaccgacgtgtggngtcaggatg

SEQ ID NO: 17771 - DNA, 354 bp, Zea mays
  Clone ID: MRT4577_116210C.1
ggaaaaattacctccactatcccaacagcgggggaaaaggttttacatttcggtacaccacttgaaacagacaaaaaaatagaacctgacccaccgttgctctattcccaaatacagaaccacaaacacattgtccaaacactggagctccaaccaaacgaaacaacaaaagagcactttaaaacccacgcacacacacataacctgttaaagcctccagtgcctgttcccattcaaacacgcatactgccgaatatgccgattcacttgctaaaaatccaataagaatcctgatcaatcccactgtactttctcagcctacaagctcaagatcgactctgcaaacacccataa

SEQ ID NO: 17772 - DNA, 292 bp, Zea mays
  Clone ID: MRT4577_116211C.1
aaaaaccaagggggcaaaaacatcctttcccggggcattttctttggtaaaaaaaaacccgtatcaggagaaacccaccgtttgtagagacctccctttctcagggggggaattttatattggttggccgcccgggcacattgtgggagagcccataaatataattggggcaccccctgtaccgtttaaaccccaatttacaggaactcccttgggtgctcctacttgtcaaaaaaccagcagggggccgcttttttgggaaaaacccccccccccccttcttttttgggga

SEQ ID NO: 17773 - DNA, 816 bp, Zea mays
  unsure (1)..(816): unsure at all n locations
  Clone ID: MRT4577_116212C.1
aacaccctagacatggccatggccacccgtccaaggccgccccgcccgcgcaccaagtttcctcgtggtccgagcgcgttctcaaacggaaaacccgcactcccgtgtctcgtcgtcccgtgcgtgccgctgacttctcggcttggccgggcgggacacgcccacggcatcgcgatggctgcgcgcggccactgcacgcgcacacggcggcgtcccgcccggcggtttccccaggcccagggcatccacgaggagaggacaagcgcgcggcgcggtcgagctgttgaaacgccggccgaggttgattttctcgtgcgatggacacgacacggtgttgacgacgacacggtgttgacgtggccggcgccgttgacgcgttgcggttgcgcggaggaaagagatcgcgcgctagctagctctgaaaagtcactagcgttcaggagcaccaggcaggtcttgttcttttacacacacaatccaactctggattaacacggtttgaaactaaatttatgtcacaatatatattccaaaataaactaaggctactctaacttttttattcggttaaatctattatggattataacccaatggtttggaaaaaaaattaaactatgcaaaacataaattaaatgatggatttaatctcattatgggattgagtgtgaggtatggattcattcatttagatccggattaaatccgtgataagattttattncatgtaaccgaacaaaaccttatatagacgaccagcgggacgagactgtcaaggtgtaaaaccggtccagcgttatgtggttaggacatgta

SEQ ID NO: 17774 - DNA, 411 bp, Zea mays
  Clone ID: MRT4577_116213C.1
aaggggaatggattatcgaactctgctttcatattttgaatattacaaaaatagacgaataaaaaattcaatttcggaaaaaaatgagaataaaacgttttgattgaatgaaatatttttaaatatcaaccgatcggctcaactgatcggcaatcgcatccaagaactcttctgtatttaaatacatagattcagttacatttggtaatccatgaatgcaaccagctaaatcttttgtcattaagccagcttcaactgtatcgacacatgccttttctaatgccaatgcaaatcgttccaattcaggtgtattatctaacttggcacgatgagctaaacctcttgtccatgcataaattgaagcattggattgttggatgttgctttacccttttgatgttgacgataatg

SEQ ID NO: 17775 - DNA, 639 bp, Zea mays
  unsure (1)..(639): unsure at all n locations
  Clone ID: MRT4577_116214C.1
ccggccggttcagttgttcctcaacctacctacgccgctccgcgctcgaccgcctttgcctgccttcccattccccccgtctcctcttcccttccgccatggcccagcccgctttcctctcctctctccgctcccgcctcggctccgcgccgccgcccccgccgaaccatcgcctccagcccaggcgcggctaccacgtcgagcttggggctcgcgaaaaagcgcttttggaggaggatgttgctttgaagagctacgagcttgctgtgttggcgactagcacaaaatgaaggaaaactcagtcatgtggcggcacggttattccgggaagtgatccatcagcatgaactggcactctctctcttcgtgtttttttagccccgtttgttgatcactcgtaccgtgtaaaataaaataaactaggttaaccttgattggcaaataatgtccctgtttttatggcctagttgcaaacaaagtgagagaagcattccgtggtgaatcgtgaagaatgaacgccgcctgctttgtttaccacctgggagtgtatcctgctgcacattgtaacagacgtgcatttattgaactaagtttaatactatcaccatttctcaaaaaaaaaaaaaaaaacccgcggnc

SEQ ID NO: 17776 - DNA, 442 bp, Zea mays
  Clone ID: MRT4577_116215C.1
tctgagccgtccgtccagcgtgccgcctcgatcatatcatacagtgcgatgcccagcgttcgtacgatgacagtccaagagtgcctttcgagcgccggcccaccatgtgcagtcatgcgcccagacttcagcatgaaccccatcaagtcctgagccatggctgcgagtgactatggatatacggactcatcatcgtacgctcagtcgtcggcgctggaaccaaaccaaaggacaacgaatactatgtcatagatagctattcccacctgtcggctggacttacctgagcacatgcctgccttgcttcatcgcatcgtccattggcatcggtgcagatgctggcgcaaggacgaacgctcagcaacctacatggcgtgttgtcctgatgctcatgcttatttttgatgatacacttgccctctatgagctcatcggcagtatt

SEQ ID NO: 17777 - DNA, 1042 bp, Zea mays
  Clone ID: MRT4577_116216C.1
cgttgctatagggcgattgggctcctcgaggccggccagggtccctcgttcagttgttcctcaacctacctacgccgctccgcgctcgaccgcctttgcctgccttcccattccccccgtctcctcttcccttccgccatggcccagcccgctttcctctcctctctccgctcccgcctcggctccgcgccgccgcccccgccgaaccatcgcctccagcccaggcgcggctaccacgtcgagcttggggctcgcgaaaaagcgcttttggaggaggatgttgctttgaagaggttcaaatcatacaaaaacagtgtgaaacaggtctccaagatcgggaatgctctcactttagctgttgtacttgcttgcagctacgagcttgctgtgttggcgactagcacaaaatgaaggaaaactcagtcatgtggcggcacggttattccgggaagtgatccatcagcatgaactggcactctctctcttcgtgtttttttagccccgtttgttgatcactcgtaccgtgtaaaataaaataaactaggttaaccttgattggcaaataatgtctctgtttttatggcctagttgcaaacaaagtgagagaagcattccgtggtgaatcgtgaagaatgaacgccgcctgctttgtttaccacctgggagtgtatcctgctgcacattgtaacagacgtgcatttattgaactaagtttaatactatcaccattcttgaaaaaaaaaaaaaaaaaagcggcctaaaaaaacaacaggcttatcaaaaataaaagaaatgatccttgaaccaccatctttcatgaaacgcacaatggagaaaataattgagttcattctgacaaatgggaaggagttcgagaaaaaactgattgagcaagacagaacaactgggaggtttccatttcttctgtcttctaatccataccactcatattatctaaagtttctccaggaaactgaagagtctaactcacatggtagaagtcctaataacaaggacagaagaggttcttctgaccggaggg

SEQ ID NO: 17778 - DNA, 687 bp, Zea mays
  Clone ID: MRT4577_116217C.1
ggggttcagtacgttcctcaacctacctccgtgctccgcctttgcctgccttgccattcccccccgtctcctcttcccttccgccatggcccagtccgctttcctctcctctctccgctcccgcctctgctccgcgccgccgcccccgccgaaccatcgcctccagcccaggcgcggctaccacgtcgagctcggggctcgcgaaaaagcgcttttggaggaggatgttgctttgaagaggttcaaatcatacaaaaacagtgtgaaacaggcctccaagattgggaatgctctcactttagctgttgtacttgcttgcagctacgagcttgctgtgttggcgactagcacaaaatgaaggaaaacacggtcatgtgggggcacggttattccgggaagtgatccatcagcatgaactgacactctgtcttcgtgttttttagctccgtttgttgatcactcgtaccgtgtaaaataaaataaactaggttaaccttgattggcaaataatatctctgtttttatggcctagttgcaaacaaagtgacaagcattcattccgtggtgaatcatgaagaatgagcgccgcctgctttctttaccacctgggagtgtatcctgctgcacattgtaacagacgagcatttattgaattaaattcaatactatctctattcttggatattg

SEQ ID NO: 17779 - DNA, 750 bp, Zea mays
  Clone ID: MRT4577_116218C.1
cctcgagggggcgaagaagccggccgggccctcgttcagtcgttcctcaacctacctccgctgctccgcgctcgaccgcctttgcctgccttcccattgccccgtctcctcttcccttccgccatggcccagcccgctttcctctcctctctccgctcccgcctctgctccgcgccgccgcccccgccgaaccatcgcctccagcccaggcgcggctaccacgtcgagctcggggctcgcgaaaaagcgcttttggaggaggatgttgctttgaagaggttcaaatcatacaaaaacagtgtgaaacaggtctccaagatcgggaatgctctcactttagctgttgtacttgcttgcagctacgagcttgctgtgttggcgactagcacaaaatgaaggaaaacacagtcatgtgggggcacggttattccgggaagtgatccatcagcatgaactggcactctctccattcgtgttttttagccgcgttaccgtgtaaaataaaataaactaggttaaccttgattggcaaataatatctctgtttttatgacctagttgcaaacaaagtgacagaagcattcattccgtggtgaatcgtgaagaatgagcgccgcctgctttctttaccacctgggagtgtatcctgctgcacattgtaacagacgtgcatttattgaactaagtttaatactatcaccaatctcgaatatttgtataaaaaaaaaaaaaaaaaaggcccctagggcc

SEQ ID NO: 17780 - DNA, 375 bp, Zea mays
  Clone ID: MRT4577_116219C.1
gacccatccaacaaggggggcgggcctaccaatttattcttcctttcaacctcataaaaatgggttcttttctactgccactggggaaaataaactaaaaatcccccaccgaccggggggaaattgtgtacataacctcaaggggatccacaaacatgccgccgaaaaaaaaaacacgtagaaaatcccctttttttttaactccgcccctttttttttttcccttgggccccgaaaaaactaggcgttggaggcacgttagccccaggttttcctcccatgtttacccagccacagccgtccacaccttggatgctaacagttcgtccttgacgggctaggggggggttgccttctcggatcccggtgacccct

SEQ ID NO: 17781 - DNA, 197 bp, Zea mays
  unsure (1)..(197): unsure at all n locations
  Clone ID: MRT4577_11621C.1
cattgggacctcgagccggccgggaaaaaatacaaaaagcccgagaaaccgtcgccggtgcctaccgttcccgtcgccggtgcctaccgttcccgtcgccgcccgtcctctctacggagatatcgctagggattggtgagttgtacggttcagagcgcttctacctgagttttctggtctttgatcagcgntgtgtg

SEQ ID NO: 17782 - DNA, 199 bp, Zea mays
  Clone ID: MRT4577_116220C.1
gaaaaacggggccgacccacgcgttcgttaaccatacatacagtctcatactttttttttacatcacaccccaataacatatcgggcttgcagatgctacagcttctttatctatcacaaccatgaggccacttcttcaatacactaacccaactcgtacgacccccttattaccactaatgcaccaccaagactcaac

SEQ ID NO: 17783 - DNA, 800 bp, Zea mays
  Clone ID: MRT4577_116221C.1
gggctcgttcagtcgttcctcaacctacctccgccgctccgcgctcgaccgcctttgcctgccttcccattccccccgtctcctcttcccttccgccatggcccagcccgctttcctctcctctctccgctcccgcctcggctccgcgccgccgcccccgccgaaccatcgcctcctgcccaggcgcggctaccacgtcgggctcggggctcgcgaaaaagcgcttttggaggaggatgttgctttgaagaggttcaaatcatacaaaaacagtgtgaaacaggtctccaagatcgggaatgctctcactttagctgttgtacttgcttgcagctacgagcttgctgtgttggcgactagcacaaaatgaaggaaaactcagtcatggggcggcacggttattccgggaagtgatccatcagcatgaactggcactctctcttcgtgttttgtagccccgtttgttgatcactcgtaccgtgtaaaataaaataaactaggttaaccttgattggccaataatctctctgtttttatggcctagttgcaaacaaagtgacagaagcattcattccgtggtgaatcatgaagaatgagcgccgcctgctttctttaccacctgggagtgtatcctgctgcacattgtaacagacgtgcatttactgaactaagtttaatactatcaccgttcttgaaaaaaaaaaaaaaaaaaatcccgcgtagttcggaaggcatgaatcctgaaaatagcatgactcttgatgtgcagggccatgtaaaatctgcatcaattatgcctg

SEQ ID NO: 17784 - DNA, 1115 bp, Zea mays
  Clone ID: MRT4577_116222C.1
tgtgaatctctcgactcatttgttacggccattgaagatgccaaagctgtttttgagatgggaaaaaatttaggctttgacatgcatatacttgatttaggcggtggatatcctggcacatctgatgcgaaaataccatttgaaccgattgcagaaattattcaagaaacacttgatcgttgcttcccacctgttgatgggctagaaataattgcagaaccaggtcgatattttgctgcttctgcgttcactttggtgactcaggtgattgcaaagcgcgaaattcaatatgatgataatgctgcagccgaagcaatcgaattcgccgaaaacaacaatgtggttcgatgttatccacatgtattgcgatctgcatcgccagatgtgcctcaaactgagagtttgcactgccaagatctcgatatgagtcgagaaatcatgtactatttgaacgacggtgtgtacggctcgttcaactgtactatttttgaccattggactgtatatccatgtccatggcttgaagcaaaccgttcagtgcagtcttacattcgtactgtgctttggggaccaacatgcgattcaatggatatgattcgacgagatatttacatgccagaacttatcatcggggattgggtcgtatttgatgaaatgggcgcttacacgattgccgctgcttctccgttcaacggctttaaattgcctaaattaaaatatcaaattagcggacgcgttatggcagtcttgaaagctacgaaagattggccagcattgaaaaaattgttggtcagtccagaatcctcagcagaacatcaacaaatgggatgttctagttcttcgttgtcatactcgggttcatttggcaacagtgaaaatcatttgcacccaactccacctgatactgaaccaggagatcgcatagagccttgcatgaaaaatggcaaaatttcttatattcaagttcattaaattatgttgatacattttgaaatttaccaaagtttgtagttacaatttttatacttacattttgtaatgaattccaattgtaaatttgtgtagttgttttatttaatatgattaaacaataaagattatatttttaaatgatt

SEQ ID NO: 17785 - DNA, 1491 bp, Zea mays
  unsure (1)..(1491): unsure at all n locations
  Clone ID: MRT4577_116223C.1
attgggtacctcgagccggccgggacattctcttgtctcttgcacatcccccgcttccttcttggttgtttctccccttctgatccgtgctagccagcttgcgttgttgtggctgcttgtcgccagatctacctatccaccgtaccacagtcgtccacagcgcgcgctaacgatggcggtcgccgccgccgctcgccttcttcttcttcgcctcgtcgtcctcgcgctcctcgcagccgcgcagcaggtcgtcgggaagagcgccgtgctgtctctgcgggagttggatggacgacgacggagtgccgcgacgacggatacccggagcagccgctactacgtcgacgcaatgcttgctgaaacgctaggggagcacaagaaagctggggcagcaacaagcgtgctagagctcaagcgccactccctcactgccatccctgaagaccccgtcgcccgcgaccgctacctccgccgtctcctcgcagccgacgagtcgcgcgccaactcattccagccccgccgtaacaaggacagggcatcagcgtccacgcagtccgcctcggcagaggtcccgctgacctcgggcatccggctccagacgctcaactacgtcaccaccatctctctcggcggcagctccggctcgcccgccgcgaacttcaccgtcatcgtggacacggggagcgacctcacctgggtgcagtgcaagccctgcagcgcgtgctacgcgcagcgcgacccgctcttcgacccagcgggctccgccacctacgctgcggtccggtgcaacgcctccgcgtgcgcggactccctcagggccgccaccggcacgccgggatcctgtggttcgacgggggcaggcaacgagaagtgctactacgcgctagcctacggcgacgggtcgttcagccgcggcgtgctggccacggacacggtcgcgctcggcggcgccagcctgggcgggttcgtgttcgggtgcgggctcagcaaccgcggcctgttcggcggcacggcggggctcatggggctcggccgcaccgagctctcgctggtgtcccagaccgcgtcccggtacggcggcgtgggcgcctactgcctgccggcggccacctccggcgacgcctcaggctcgctctccctcggcggcggggacgacgcggcgtcgtcctaccgcaacacgacgcccgtggcgtacacccgcatgatcgccgacccggcgcagccgcccttctacttcctcaacgtcaccggcgcggccgtcggcggcaccgccctcgcggcacaggggctgggcgccagcaacgtgctcatcgactccggcacggtgatcacgcgcctggcgccgtccgtgtaccgcgccgtgcgcgccgagttcatgcgccagttcggcgccgcgggctacccggccgccccggggttctcgatcctggacacgtgctacgacctgacgggncacgacgagggtgaagtgccgntgctgacnctgcggct

SEQ ID NO: 17786 - DNA, 390 bp, Zea mays
  Clone ID: MRT4577_116224C.1
atcttcctagttcttcacaagtttttcactttccggtttccgggggttatgtggtggtttttggcacggacggactttttgacaatctatacaataatgagataagtggtgttatcgtttaatcgcttatggttggacttgaaccttaagttgcgtcacaaaaaattgctgacctggctcgacaaagagccacagacaaaaataggcagtcaccatttgcatctgccgtccaagaagctgtgtaccggtactactgtgggaagctcgactacataactatttgtggtgtcttatgtgaaaactgcttgatttcgagcctttttttttattatatgtctttgatcctaactaaattgcacaatgtgtatttaatgtgtgaaattttcttat

SEQ ID NO: 17787 - DNA, 398 bp, Zea mays
  Clone ID: MRT4577_116225C.1
tgaggaccaacggaccacctgacgcaccttttgccccatctcagcgtccgtccccgcggcgatcactgcggcgattgcgggtggcatcgtgcgtgccgtcgccgatgcgcctggcacatttcctgttttgttctaactggggggggagctgggcgaggggaccggtgcatggacccgagcctagctgaggccccgtctgaagccaagggtggcagcccggctggcggcgaatcaggaggatactgaggcgcttacactggcttctgcactcatcactggagtcaggagggtagatggcaggctgcttgtcgtggacgtcgacctggacgtgagccagctggagagctcgctgcataaccttccgagggaccaagcataggcgactgctgccaggactg

SEQ ID NO: 17788 - DNA, 505 bp, Zea mays
  Clone ID: MRT4577_116226C.1
gggaccaaaaccggttattaaaggaccattgaccaaaaaaaccgattattagtagggacgctgacaaaaaaaaaggggctatgccctgctcggggggggctacatcgaggcattaacaaaggggggtacatctttaggccaaaaaaagctttgggagggggaaaacatgtaaaaggattttacacatctcaggaaggggaagggccattacccccttaaatcaggaagaacggggagggaaaacggggggccgagttgcttctgggcatgttgaaaccccggaggggctccaaattcatcacgggaaaggggccaaaaaaaaaatttaccctggggccaaaacgggggaaaaaccactccaaggggggggaggtggaaacctaaaacaggggtttaaaaagcccgagccgggctaaaattttggggaagaagtctgccctcaaaaaatcaacacgctgggaaaaattattaggatggatcatgatcatatcagggcctggttcca

SEQ ID NO: 17789 - DNA, 249 bp, Zea mays
  Clone ID: MRT4577_116227C.1
gtctacaacggcaagaccttmaaccaggttgagwtaaagcytgagatgwtcggcaactmccttgytgagttctccttctcctamaagccggtaaagmacggaaggcccvgtatcggtrcwacccacycctcgcggtttatycctctgaaatgrgctggtactcggctctttrgtatcccargacattttgtgttgttccattccrgctcaagaattcaaagctarscattgcacaattatgctgttttg

SEQ ID NO: 17790 - DNA, 444 bp, Zea mays
  Clone ID: MRT4577_116228C.1
accaaatgcatccgctgagactgttgcccatgcacatgataacggcgcatgactaaatagctgcaggcagcatgcaactacgagtgccactagaagcccaaacatgtgtgatttggtcgctaccatgggaacggggactaacatatagcgttggcgccatccacataacactgcggatgaataacatggccatgggggcttgtcttgacagatcacgtggatcctgcggtaacatgtggacaaaaggcaccaacagatacagcacaaagcatttgttgcttctggggcactggagctagaagacgagcactaagactgtaatatttaacaccctacatggcagctgatatacaatcttgctttctctagaggacgagcttgaaccatataagtggggatatctcaagcagatctttgccaactcatgagtaggtgaaacataac

SEQ ID NO: 17791 - DNA, 301 bp, Zea mays
  Clone ID: MRT4577_116229C.1
ggccggccgaattcccgttcgcccaccgtccccgttctttctaccccaacccaccgacctggagggcggacttgaaagtatgccgggaacggacccaaaggtaccggaaggacgtcgccgacaataacatcacgaacgatgtcaaccggggccatagtcgttacgttcttcagaacactcacagtgtcacagggtcacgaaacatgatacagtgcccaacacatgagcactctgttgccagaacgctatggcaggccgaggatgcctgaagcgctcgatgcttcaaacccaccataaccca

SEQ ID NO: 17792 - DNA, 1548 bp, Zea mays
  Clone ID: MRT4577_11622C.1
agtgcacatgctacgacgacgttcaggttttaatcgaattcccatgctgccgcatagatccaaagcccaggaaccttgtgatggaagcaaatagcttgtgctagaaccttctgctatcaggtactcatctcctggtacttgcatgctgaatgacttctgatgcttcaacttcaataggtaaaagcaagaaatgaaattccattgcttatggcaggatcctccagcactttctggtactttttgccatgcatcaaatgtcaatgggcttgtatcgcttcttagcggccataggaaggacgcaagtgatggccaacatgctagggactgcagctcttattgcaatctacatacaatctttactaaaagtttgtgcaacaagttgttaaccaattctgcaaactgaaacagatgatctccaaccatggttgcgctggggatattggacgtccccgttcacttgaaaaatgccatggtaggcatcccaggagcaactggcctgtcagccgagcagcggaaaagactaacaatagctgtggagctagtggccagtccctccattatattcatggatgagccaaccaccggcttggatgctcgtgctgcagctattgtcatgagaacaggacgaaagacggttgacactggacgaactgttgtcttacatgttggtgcaagtgatgatcttctcatcaatcgtgtacccaatgattgggttccaggtgacagcgagcaaattcttctggttcttcctataccaggtgatgagcttcatgtactacactctatacgggatgatgacggtggccctgacccccaacatcgagatcgccatggggctgtcgttcctcatcttcatcttttggaacgtcttctctggcttcataatcgtgagagaggtaaccccccatctgaatcggctgatgagttgagtaaatttgctgcagatgatgcctgtgtggtggcggtgggtgtactgggcggatccggcggcatggacggtttatgggctaatgttctcacagctcgcagacaggacggagcagatcctggtgccggggctcggggagcagacagtgcgtgagttcctagaggggtacctgggcctgcaggatcgctactttgtgctggtgacctgcctccatcttgccatcattggcctcttcgtctttctcttcttcctcgccatcaagcacctaaacttccagcgcaggtaggaagcctcgcaggctcacaccaccacctgccgccgccgctggccaatttgccgtgcgatggctgcaatacacgactagggtcaggcagcaaccacttcctaacaaaactgtagaaaagggctgggaagaaaggtcttgttgcaaaagtgtgcataaatttctaggagagaaatgaattagtagtaactaatcatgtaaaggaatacgagtagatccaaggggagcgcaaacagtgtaattattaagattcagaaaatggaactgtgttgtttgtcattgtttcagtttttgaatcttgacagctacatagaatggaattgctgcccccggccgg

SEQ ID NO: 17793 - DNA, 295 bp, Zea mays
  Clone ID: MRT4577_116230C.1
tttctttttttttttactattctatgcccataagcttgggcgtgccttattcctgtataaaaaaattgttacaaacatacatcaacaaataaacggggaattgagacataaactaagccgccaaaaatggaataaactacttggcaacactagcatgtatgaccaatttgcaggtgtaacttccttggcacaagatgatcaatgtatgatacacaacccacccataatgaaccaacttggcaaaattcattccggaccacgggttctttttcgaagtccgtccgtaccactgcct

SEQ ID NO: 17794 - DNA, 644 bp, Zea mays
  Clone ID: MRT4577_116231C.1
ctaacaggggccgtgctctctaccatgatctcaatgcctatagagctctgtttgatgatccgggatggaaaaagttacagtaccaatttggcatttacgcctccagaatacatgaggactggacgtattactcctgaaagtgtcatatacagctttggaaccttgctgattgatgttcttagtgggaagcatattcctccgagccatgcccttgacctgattcgggaccgaaacttcaatatgctcttagactcatgtttagagggtcaattttcaaatgaggaaggaacagaaatggtccgattagcttcaagatgccttcactatgaaccccgtgagcgacctaatgtcagatcacttgtgcaagtattgactcctctacagagggatgtcgagactccatcttatgtgctcatgggcattccgcgtggtggggcatcttctaccgaaccactgaatctttcccctcttgccgaagcttgttccagaaaggatctgacagcaatacatgaaattctagaaaagacaggctacaaggatgatgagggaactgcaaatgagctctcttttcagatgtggacgaatcatatgcaagatacgttgaactccaaaaagaagggttgacatgcttttcgacagaagga

SEQ ID NO: 17795 - DNA, 319 bp, Zea mays
  Clone ID: MRT4577_116232C.1
tgctaacaaaaggacggtgaaagaagcacttgtaaacaggaaatggatttcagatattaagggggctcttacagtaagagtcttggttgattatctaaacctttgggaatccctttcagggattgagttacagccaaacataagggataagcatgttttcagccttgctgcagatggtaaatacacagcgaaagcagcttataatggtctgtttttaggatctgcctcctttgatcactacaaaagaatctggagatcttgggccccctcaaagtgccgttttttcatgtggttggtggcacacaacagatgctggact

SEQ ID NO: 17796 - DNA, 1226 bp, Zea mays
  Clone ID: MRT4577_116233C.1
aggaaatactcctactcctcgtgctggggctagcctagcctagcctgctactcgaacttctcgtctcgtctcctcctcgctcaggcaggggaacccaacggaactcctcctccccagcagacagcagagagtacataggagacgagaagatcccatccactaccgcccggtcgcggtcctccgccctccgccctccccgccgctcgttcggtgcaggtcgccctcgcgtggatcggaatgggcgcctgcgtgtccaaggccgcctgctgctgccgccagccgcacaacggggttaccaacgagaggactgatactgtgacggaggacgaggaggcatacgacctgcctgcgttccaggagttcaccttcgagcagttgcggctagctacatcggggtttgcggtggagaacatcgtgtccgagcaaggtgagaaggcgcccaatgtggtatacaaggggaagctcgatgcccagcgccgcattgctgtcaagcgctttaaccgctctgcctggcccgacccgcgccagttcctggaagaagctagatcagttggcctgctccgaagcaaaaggttggcaaatttgcttggttgttgctgtgaaggtgatgagagattgcttgttgcagaatacatgcccaatgatacgctagcgaagcaccttttccattgggagtcacaatcaatgaaatggaccatgagattaagggttgttctctgtctcgctgaggctttagaatattgcactaacaggggccgtgctctctaccatgatctcaatgcctatagagctctgtttgatgatgactgtaaccctagactttcctgtttcggcctcatgaagaacagtcgggatggaaaaagttacagtaccaatttggcatttacgcctccagaatacatgaggactggacgtatcactcctgaaagtgtcatatacagctttggaaccttgctgattgatgttcttagtgggaagcatattcctccgagccatgcccttgacctgattcgggaccgaaacttcaatatgctcttagactcatgtttagagggtcaattttcaaatgaggaaggaacagaaatggtccgattagcttcaagatgccttcactatgaaccccgtgagcgacctaatgtcagatcacttgtgcaagtattgactcctctacagagggatgtcgagactccatcttatgtgctcatgggcattccgcgtggtggggc

SEQ ID NO: 17797 - DNA, 1084 bp, Zea mays
  Clone ID: MRT4577_116234C.1
atcgaagaacttttaacggcctttattgatttccgtcaaacggttttagtcttttaacaactcacggcacacaacagttttttttacagctcacaacccacaacagttttttcacagccacgacccaactaaatagacccttactcaccatttgcctgctccagtcttagccgtccaaaaagtatcagatgaggtgttttagcacagaagtggagcgacctagttttacaaacgcaacaacacgactcactttagagagcggtaatgttgagggagacaaatctctctccaccatcgcaccgcgccgtcctcgccctcgccgctgcgcccctcccgcgtcttccgcctgctccggcggcgctctcgcctgcgccgcctgctatggggctgctcacgtcggcggagctcaactacctcgtcttccgctacctccaggagtcaggttttattcatgctgcatttactctaggttatgaagctgggatccataagtgtggcattgatggtaatgcagtcccacctggtgctcttatcactattgtgcagaaaggcctccaatacattgaactggaagcaagtagcgatgagaattatgatgaagttgagagggattttgcgcttttggagccacttgaaatcatcacaaaagatgttgaagagttgcaacagattgtgaaaaggaggaaaattgagagatctcaaactgaacttgagaaggataagggaaaagagaaagaacgtaacgaggagcatgaacgacgtccttgtggcgaaagggagagggaacaacatgaaaaagaaaaagagcaagtcagggacaaggacaaatctgaaaaagatagggaccatgataaagagaaggagaaagagagagaaaggcagcatgcagagcgtactgataaggttaaacacgaggatgattctcttgttggtgcaggtcccactccaatggatgtaagtacaactgttcaggagatatctaacactgatgttactgttttggaaagacacagttcagaggtttttgcttgtccgtggagccaaactagtctcttctagcttctggatcaggaggactcactgc

SEQ ID NO: 17798 - DNA, 1574 bp, Zea mays
  Clone ID: MRT4577_116235C.1
cctcgaggccggccgggccgggcttcctcttcctcgctatacagtacttcccagcagagcagagagctgagacgaaaacgagaagatcccatccactaccgcccggtcgccgtcctcccttcccgccgcgcccctcctgttccacccgctccgcttgctcgccgcagatcgccctcaggattttattccgccctccgtctccgggctcgcttggatcgagatgggcgtctgcgtgtccaaggccgcctcctcctcctgctgctgctgctgctgccgcgagccgcacaacggggttactaacgacaggactgatgctgtaacggatgacgaggaggcatacgccctgcctgcgttccaggagtttaccttcgagcagttgcggctagctacatcagggtttgcggtggagaacatcgtgtctgagcagggtgagaaggctcccaatgtggtatacaaggggaagctccatgcccagcgccgcgtcgccgtcaagcgcttcaaccgctctgcctggcccgacccgcgccagttcctggaagaagctagatcagttggcctgctccgaagcaaaaggttggcaaatttgcttggctgttgctgcgaaggtgatgaaaggttgcttgttgcagaatacatgcccaatgatacgctcgcgaaacatcttttccactgggagtcacaatcaatgaaatggaccatgagattaagggttgttctctgtcttgctgaggctttagaatattgcaccaacaggggccgtgctctctaccatgatctcaatgcctatagagctctgtttgatgatgattgtaaccctagactttcctgttttggcctcatgaagaacagtcgtgatggaaaaagttatagcaccaatttggcatttacgcctccagaatacatgaggactggacgtattactcctgaaagtgtcatacacagctttggaaccttactgattgatgttcttagtgggaaacatattcctcctagccatgcccttgacctgattcgggaccgaaacttcaatatgctcttagactcatgtttagagggtcaattttcaaatgaggaaggggcagaaatggtacgattagcttcaaggtgccttcactatgaaccccgtgaacgacctaatgtccgatcacttgtgcaagtattgactcctctacagagggatgttgagactccatcttatgtgctgatgggtgttccacgtggcggtgcatcttctatccaaccattgcatctttcccctcttgccgaagcttgttccagaaaggatctgacagcaatacatgaaattctagaaaagacaggctacaaggatgatgaggggactgcaaatgagctctcgtttcagatgtggacaaatcagatgcaagatacactgaactcaaaaaagaagggtgacaatgcttttcgacaaaaggattttactactgccattgattgctattcccagttcattgaagttggtacaatggtatctccaaccatttatgctcgacgctgcttatcatatctgatgaatgacatgccacaggaggcattgaatgatgcagtgcatgctc

SEQ ID NO: 17799 - DNA, 632 bp, Zea mays
  Clone ID: MRT4577_116236C.1
tcaacataattatattaatgatattaatcaaatataaattaatactactacttagttttgactaagttactattttaatagttgacagttaagcaagtaacttaatgaatatgagcgattctaagcgagacgaattaaggacgcacgacgtgcaaacacgatgtgcgcaacgcgcggacacaaacgacttagcgcgcggataacgcgcgatacgcgcgaacggcacgcggcaaggcgcgcgacacacgcgaacggcacacgacaacgcgtgcgaacaacacgcgcaacactcgcgaacgacacgcgacgatgtgcgcgaaacagcaccgcgacacacgcggaccgacatgcgaaactaataattaaacaacgtgattaaactaaatagttattaataaataacatttcagttaaggttaatcatattggtgactaattataaatgcgcaaatagaattcctaaattaggtttttaaattgaaacgtcgttctagtagtcactagttaaacaaacgtttaactaaattaaataaaatgtgcaaaaattaggataaatatttctaaattaagataattttaatacgaatctaacgcaacttgaatggatcgaatcgcgacagcaccgattcagc

SEQ ID NO: 17800 - DNA, 908 bp, Zea mays
  Clone ID: MRT4577_116237C.1
aaggtggtccccccgcacgtgttctgggcgcggcgccacgcgcggtcgtcgtccgtgttgaagggcaccgggcgcacgctcaagggccgcgacctcccaagcgtccgcaacgccgtgctccggcagacagggttcttggacctgtgaacgtccgcaggcagccatggcacaagacgccgatcgatacattgttgtgtgtctgtgtgtcgttctagtgtcccttacaagttacacatgaagaactgaactcaatacgttcaatcatccgatgggtctgctcttcttctccgcctgtgcacaaagcctccgacttttttttttcacctgaatgcagcaccaacccaaccgccaatatttttctcctctgctctgctctgctcccaccggcggcggcggcggggttggtggctggcggcgtgacggcataatgcggtttcgtcagagatcggagatggggaaaaggcaggctcagatccccatgccatgccatgccgtgattgtccacaagctagcctgcacaggcaggcaggcggtctccactccagatccatgccgtctctcgtgtgcgccagccgtccttttttgcatctcgtcgtttggtgcagcgtgggatatgatgtgacgtgaggtccccggtggcggcttcaatgttccaggagctaagggggtgtttgggagtgaagttttttcacagttttggaagaatactgcagtattctaaaatactgcagtattatatatataatggtgtttgacaagctagctaaaatctctgttttcaaaactgaagtattgcaaatactatagttgttttaaggcattctaaacttagctctggacctcagttttcaaaactgcggtattgtaaactgcggtattgtcatgactaaagtatactgtagtatttc

SEQ ID NO: 17801 - DNA, 249 bp, Zea mays
  Clone ID: MRT4577_116238C.1
ctcttttttatcgttcgagcgctgaacgtctcgaaggggggtttatggaaaggacggcgtgtggacaccacgccgatcggttaggactagccttctacccggaaagaagctcgatcgggcgccaccgaccgaacgctcgctggtgttaaagggctctagcggagatgatctgtgcacacgtcaggaggaacgatgtaacctgcaatgccaccctctgtatggcgaggcctaacggcgagggccggcttc

SEQ ID NO: 17802 - DNA, 240 bp, Zea mays
  unsure (1)..(240): unsure at all n locations
  Clone ID: MRT4577_116239C.1
aannattnttttatttttttnnggaaagaagaaaaaatcatggtaactgtttcattgtttatatttaacccaagctttatgccttatgggttcaatcagtatatgtattaaatttataaagtaattgaccacttgctcattgaaaaaattttatatggattggccaacaaaaagaaatcagttaatggatttgtcaatttaaatgtaaacatgggtggtgtattgtgttatcttttactt

SEQ ID NO: 17803 - DNA, 2139 bp, Zea mays
  Clone ID: MRT4577_11623C.1
ctaaacatctgaagcaggaggaggtggcgggggcgcatccggtcgaggtcgaggtagcagagcgaacgccgacggagggtcagagtcagtctcggatccaggatctgcggtagaagctggagctggtactgactcggacggaggccgcgctgcaggagctaccggaacaaaagcggtcacagatactgccacagcggtagtggtaacaacagatgctggtggcactgacggctgcggacagatagagctgagagccggagaggtgaacgccaaagtgaccggccggagcggagaggtaccagtagggggtccagacaagatcgaaggcaccactggagcgtgaagcggaggaggcggagcagactgaaccggaggtgctgagataccagaatgctggagcatgagagccatgaatgccctattctctgccctatcctgaataagctgctgctgaagtgcatcctgcctgtcctgcatgctctgaaacatcgagagcatcctgtcggataaacgggcctgctcggctgccaggtgagcctgctgctgggtgagagtctggagaatcgaagcaagagcagggtccatagcctgaggagtagcaggggcagcactagaactcccagcctcatgatcatgtgagcgtggaggcataggaggcggaggcggaggaggaaccccaaaatcatcatcatcatcatcatcagctgctgtaccctgagtgtcaagctgtcgaagagctgcatcctcggcctgagagtcaaacacagaagcagaagctggcactggaatctcaggagcaggacggtaagatccaaacacaaggcgtgaggcctcaagggtgctctgaaatcgaggtggctgaatcagctgcgcaaagatgtggcataagtagtgagcataaggtaactgccgacgagcacgaatcccatccagaacagtgtcctcgatctcacagatcaggaagtccacaacatcaaactcagagtgggataccagggcaccaaggagccaaagctgaatatgagtggtagcctccctgtatcccatcctcggcaggagtgtccgtctgacgagctcatataagtacttcgctgctgtagtaaagtctgctggtgaacgtcgcgacccatctgtgaaaggtgggcggaacagagccgcgacgtgagctgtccctggagccacaccgccgtgagggcgacgaggaggatctgaagtgccgtagcagaggctgtgaaggcgagtcgtcgactcagggaatccaaatagctgtcggatctgactggcagtgatcgtgacatcctcgcgctcaaagcggaacctcatccaatgatgatccgggtcaatccaaacagaggcgtagaagacgcggacccactcctcaacatatctgccgctgatagtcagaagggacaggaggccaggcagataggtgagatgcgcctcagactcagcaccggctgcaagcagaaaagctggaagatccaagaggcggtgcactcgcagcgctatctgagcagacatctgagccctgaagaatgactcctgaatccgtgtgctgaaaagaacacctgctgctgggtctctctgagctggcagccaagactccacgggtacgtacctgaaccgacgtacccgtgctgcagtagcacgctgaagatcaaacagacgaggatccgaaaccagaggacggacctcagtctcatcacgctcccgaaagcgaggtggagggacaggaggagctgaagcgggagcgggagcaggggaagcagtggaagctggcgtagtggaggtagtgggtatggctgtggaggtggatggagaaataggagtgacgggagcagacagagtgggtggcggagtggaagcggaggtatgagtggaggagcgagaccgggaggtgagacgacgagcacggaatgcaatctgatcggatggaacatgcggctgatctccaagggcggcctgcgcagcggctgcggcagctgctgccgctgcacgggcctctctgtccgtacgccgcttcttgcggccttcctgctgctctaaatagacagtcttgcccttcacctgcctgaagggacgacgagggtcctcatcatcgccaccccctgacgccgacgcattcttcgtgcgcggcat

SEQ ID NO: 17804 - DNA, 255 bp, Zea mays
  Clone ID: MRT4577_116240C.1
gtcgtatacaactagatattcacctagttcaccgcaacggaaataagctgaggtcaatatatacctaggcatgcgccaacactggcattcaaggccgttgctgctacagcgctcatgcggtgttggtagtacactgatcctggggtagtcctgtctgatcctgaggtatctgtggagcaggacggtgattgcactactgcatcgttcagtgtcagagcgtgttggagcagcgacgccagtgaatcaggcgggtgg

SEQ ID NO: 17805 - DNA, 476 bp, Zea mays
  unsure (1)..(476): unsure at all n locations
  Clone ID: MRT4577_116241C.1
cctcgttaggatgttagaatatactggaataattttaatgttattcatggcacggtttgagcacatggatttaccttctcttccccttagagattcattgatgtcatgtttcagttggcatgagttaaatgattgtgttacaaaaaaaaaaaaaaaaaaaaaaaaaaaaaaaaaaaaaaaaaaaaaaaaaaaaaaaaaaaaaaaaaaaaaaaaaaaaaaaaaaaaaaaaaaaaaaaccaaaaaaaaaaaaaaaaaaaaaaaaaaaaaaatttttttttccccccccgggggcccccccnnnnntttttttttttttttttttaggggggggccccccccccaaaaaaaaaaacccccccccccctttaaataaaaaaaaactttttaaaattttttggggggaaaaacccccttttaataaaaaaaggccccccccttttttgtggaaccccaaaatttttttccccccacattta

SEQ ID NO: 17806 - DNA, 2275 bp, Zea mays
  Clone ID: MRT4577_116242C.1
tcgcagcttcgcaatggcagacaacgaactgaagcttatccaatgattatgtacagaacagtcgaagcagggttcccttccctttgcctggagccgagcacgtcgacggtgacgtggccggaggtgcgctccacgagggtgtacccgtacgccgcggcggcgtacaccagcgcctgctcgtcgggggactcgccctggtactccaggagcctgcccgccgccgccgcggagtcctcgccctcgtcgtccaccacgatcggcacgacggccttcgccgcggagtcgtcgtcgtcgtcgtcgtcgaccacgatcggcacgatggtgttgcacgtcgccagcgtcaggaggaagtcgcgggcgcggtcggcactcgcgccgccgccgccgcattccttgagcagcgccaccagctcggggtcggtcttcacggccgtcttcggccgcagcgcgacaccgtcctcccctgagggcgcaacacagtaaaacctcacgttcagaaaatttggcaccgtacatcggcattgcagttgtttctccctcgaaacgtatttttattttattttatttttaaaaataaagaacagaattgtctcctcgtgacaggtcggcagacgacacgatagcagcgagtaccgcgcgctcaaagcagccttattcggttacaaggaaataaatcccatcatgaatttaatctggatctgaattggatgaatccatatatcacatctaatcctatggttgattaaacacattaatttaatccatgtattttttaaaacctagttattcttttgatcgtatgtattcataatataaaccttgtgtattatcttcatggatttgtttcatacctaatgagctatggatagaatcaatttcttcaaaaaaaaaaaaaaaatgatggtctcgcggttcatccgcgtctccaggcggctgcgcttggacggcgccccggagctgttgagcatcaccttggtgtcccggccggtgtagacggccacgccgatggcccaggtcgtgttcttgagctcgcacccccggagcacgatgttcgaggggccgagcgagacggcgcggcggccgtcgaggtcgaccgtggcgaggaagccgtagatgttgcggttgggcttctcgcacttgatgacccccgcgagcgcctccggcggcgtgggcatcgtctcctgcttggcgtaccgcgtcttgaggttggactcgccgtcgaggttgatggtctgcacgtaggcgacgccggtggggtcgctcgtggacagcagcaccatgtcgcacggcagcgtctcgttggccaccacgcgcagcacctcgcccacctgcacctccttccagcgcttgggcacgaacacgccgcccaccagcaccgacgcggtgcggttgttctcgttcctgtcggaccggtggcgcctccagtcctcgtacgcgtccttcaccgccgtcacgccgagcacgaatgccagcgggaggacggacgcggccggcgtgaacacgccgagctgcggcaccatgttcagcgccaccaggacgaggaagtacaggtaggccacccggtggaactgctcgtagaggttgcgcgggaggaaggtgacaactgagtacttggtggtgtggatggagttgtcggggagcccggccggcggcgcgttcgtgcggtccgcgtcgttgatgtacacgaaccgcgcgtcctcgtcccggaggtcgcgctgcgagccggcgcgctcggacgcggaccgcctggtggatacccgcgagaacaccgcgggggtccctgacgcggacccgtcgcgctggaaccggaagctctcgagcgaggacgcggtggactcggccttggagcccgacctgaggttggccgcgaaggtgacggacggcgagtcggccatgagggaccgcagcgaccgcgtcctcctcatcgagttggcagacgagtgcctcagtataggcgacgccactgggtctggcaacctggtgggcacgtccattcctggtgctcccaccccttcctccgtctcttgtgacggcggcagcggcggcaatggccgttccggtcgcatgctgctgcgcgctcgatttcgttctctctgccgccaactaaccagcgcggcgcagaagagattggaatcagcgaggtgcgggacaagaagggagcatcgcttgattttgtccgggctggagtttacaagagacgtggctaagtttttggagtggtcgcttggtcgtttgcaggggattggcggggagttcgaagatgaaggagagaagt

SEQ ID NO: 17807 - DNA, 857 bp, Zea mays
  unsure (1)..(857): unsure at all n locations
  Clone ID: MRT4577_116243C.1
atctcgcccagcctccgcagcaaacactgagaggttcgagaatcggctcaagaagccgacaacgttcctctgcaagcacaagtttaggaatgaactgccagacccaagtgctcaattgaaatggctgcctctgaataaggacaaggaccgatataccaagtacaggatctcgtcattggagaaaaattatctgcctaaaatgattgtccccgaggatctcgggatacctcttgacctacttgatatgactgtatacaaccctcccgctgctcagctgcccctggctccagaagatgaagagctgctgcgtgatgatgaggttctcacccctgttaaaccagaaggtataaggaaaaaagagaggccaaccgacaaaggcatgtcttggctggtcaaaacacagtacatttctccacttagtactgatgcagccaaaatgtcgatcactgaaaagcaagcaaaagaaaggcgagaatcaggggagggtcgtgataatgtcctcgaaaatcttaatgatagacagaagcggatcaaagccattgcagaatccttcaaagccgctaaatcacgccctgtccaccagactaaacgagggatggaaccagagtttgttctccctttggtacccgattttgataggtataatgatccatttgttatggtgaattttgatggagatcctacagctgattcagagcagtacaacaagctagagagatctgtacgtgatgaatgtgaatcccaggctctngatgaaagtttcaagtcagtggttcagaccctgcaaaacagagaaattctggcatatatggcntcatcaccccacgagcttgtcaaggacttggatgatgaaaatg

SEQ ID NO: 17808 - DNA, 220 bp, Zea mays
  Clone ID: MRT4577_116244C.1
cctacgcgtccggggatttttttgaaaaatattgacgcgggacgaccgttgaaactggtgctttaatatagtataaatattagaagaaatttagatttttgtctctaataaatcattctttgtactctagttccttgttttttttcctagcttcaatcttgggttccattaatcatacttacaacttctttaagaaagatgtatgctatggttggaaatg

SEQ ID NO: 17809 - DNA, 624 bp, Zea mays
  Clone ID: MRT4577_116245C.1
gggtacctcgaggccggccgggacctcagttcttctacacatatcgttgtcattactgaacagactcaatataccacaatgacaccatagccctgatcatggccagccattatagacgctttgtcctgcaccttgatgacgtacacgattctccaacgatgtcgctctctacaactgaccttgaagctgctaacatcccagctcacgatgcaacgccccaagaagccgacccataccgcagtcactcaattcctatctaccctactgtccctcaaagagaatgacgtcccgcgcctctaccacgtcccacgaaacccacgatacgacgccgacacagctgttatcgaacaaatcgtgctcagcgttactcccaccgcaggagtatattctctcataggctactcaatcgaaaatgcacctccatcttcgaccttagactcccgccccccacgaaccctatgcttcctgcaccgccccttcacgctcgaccgccgcagcgtccgacgcggaactctgatcctatccagccacacgtccttcgacgagaacctcaccgttggctggaacactgtgctcgacgagcgcttacaaatgggtatggacgacagtgtatgtctaccagga

SEQ ID NO: 17810 - DNA, 262 bp, Zea mays
  unsure (1)..(262): unsure at all n locations
  Clone ID: MRT4577_116246C.1
gccccanaagcgggggggggcatcagtgataaagtgcgggagggccaaaaannggctcgatcccaacgaaagctccgacatctccatggccaattcccgccaaaacatcaggaagctggggaaggacggtttcatcatcaggaagccaaccaagatccactctcgttccagagctcgcaaaatgaagattgccaagatgaagggtcgtcactctggaaacgggaagaggaagggtacccgtgaagctaggttgccaacaaag

SEQ ID NO: 17811 - DNA, 434 bp, Zea mays
  Clone ID: MRT4577_116247C.1
ccctgcgggtgccccggcgcagtttccggggggagccaccacgcgcgcttttggatgcgaggacgcgtgggccctagggaggtccttacaggggacaagcagaaagagctccggccgctagacgagctggacgactagaaccacggtgaccaggaccagacgcatgtaccacacagactcgatctggctcttcccatggcatgtccagcctcaaggagaggcagtgcaagcaccccttgggggtcacatagcccggcgaggtgtccagggccaagaagaacgggcttgactacctgttccatttgtacgagcagtgccgcatcttcctgctgcaggtgcaataccttgctaagctgaacggccacaagtcccctaccaaggtgaccaaccaggtgttcctgttcgccaagacgtgctgcgcgagctacatcaac

SEQ ID NO: 17812 - DNA, 432 bp, Zea mays
  Clone ID: MRT4577_116248C.1
atcggttccagtcaccattgacgtagaggcgccctttgaccttcaccgttacgttattgggcagaacggaagtgggatccgcaagatgatggatgagtttgaggtgatcatatcttgtcccggctcctgagctgctgtctgtcttcatcgccatcacgggcctcgctgcaaatttggaccgggccaaggctggactgctggagcgtgtgaaggagctacaggccgagcaggaggaccgggctttaaggagttttaagctgactgtcactgtagaccccaaataccatcccaagattatcgggagaaagggggcaggaattacccatatccggctggtgcatgacgtgaacatccaggttcctgataaggacgatgggaaccagccccaggaccatattaccatcacagggtacgaaaagaacacagaagctg

SEQ ID NO: 17813 - DNA, 232 bp, Zea mays
  Clone ID: MRT4577_116249C.1
ctagggaatggacgactaacaaaaatggagtaaagggtgtatgcctgtgtccaagcggcacgaactaaacaatacttgtttgatttaggaaaacctagatgtacaacaacagcccacacatggttagctgcagggcaatcatagagtccacagttcacaaagacgagcaagattgccatacccgtataaaaaaaacaaagccccaacaaatcaacgtataaaccggtggaca

SEQ ID NO: 17814 - DNA, 2186 bp, Zea mays
  Clone ID: MRT4577_11624C.1
ctaaacacctgatgcaggaggaggcggcgggggcgcatccggtcgaggtcgaggtagcagagcgaacgccgacggagggtcagagtcagtctcggatccaggatctgcggtagaagctggagctggtactgactcggacgcaggcagcgctgcaggagctaccggaacagaagcagtcacagatactgccacagcggtagtggtaacagcagatgctggtggcactggcggctgcgggcagacagagctgaggaccggagaagtgaacgccaaggtgaccggccggagcggagaggtaacagcaggggggtgcagacaagatcgaaggcactactgggagcgtgaagcgaagaaggcggagcagactgaactggagacgctgagataccagaatgctgaagcatgagggccatgaatgccctattctctgccctatcctgaataagctgctgctgaagagcatcctgcctgtcctgcatgctctgaaacatcgagagcatcctgtcggataaacgggcctgctcggctgccaggagagcctgctgctgggtgagagtctgctgctgctgggtgagagtctgctgctgctgggtgagagtctgaagaatcgaagcaagggcagggtccaaagctggaggaggagcaggggcagcacgggaactcccagcctcatgatcatgtgagcgtggaggcataggaggcggaggaggaaccccaaaatcatcatcatcatcatcatcatcagctgctgtaccctgggagtcaaactgacgtagagctgcatcctcggcctgagagtcaaacacaggagcataagctggcactggaatctcaggagcaggacggtaagatccaaacacaaggcgtgaggcctcaaggatgctctgaaatcgaggtggctgaatcagctgcgcaaagatgtgacataagtagtgagcatacggtagctgccgtcgagcacgaatcccatccagaacggtgtcctcaatctcacagatcagaaagtcaacaacatcaaactcagagtgggataccagggcaccaaggagccaaagctgaatatgagtggtagcctccctgtatcccatccaaggcaggagtgtccgtctgacgagctcatacaagtacttcgctgcagtagtgaagtctgctggagaacgtcgcgacccatctgtgaaaggcgggcggaacagagccgcgacgtgagctgtccctggagctataccgccgtgagggcgacgtggaggatctgaagtgccgtagcagagactatgaaggcgagtcgtcgactcagggaatccaaatagctgtcggatctgactggcagtgatcgtgacatcctcgcgctcaaagcggaacctcatccaatgatgatccgggtcaatccaaacagaggcatagaagacgcggacccactcctcaacatatctgccgctgatagacagaaaggacagaaggcctggcaaataggtgagatgcgcctcagactcagcaccggctgctagcaagaaagctggaagatccaataggcggtgcactcgcagcgcaatctgagcagacatctgagccctgaagaacgactcctgaatccgtgtgctgaaaagaactcctgctgctgggtctctctgagctggcagccaagactccacgggtacgtacctgaaccgacgtacccgggctgcagtagcacgctgaagatcaaatagacgaggatccgaaaccagtggacggacctcggtctcatcacgctcccggaagcgaggtggagggacaggtggagcagaagcgggagcgggagcaggggtagcagtggaagctggcgtagtgctggtagtgggtatggcggtggaggtggatgtggatggagcaataggagtgactggagcaggcagagtgggtggcggagtggaagcggaggtgtgagtggaggagcgagaccgggaggcgagacgacgagcacggaaagcaatctgatctgatggaacatccggctgatctccaagtgctgcctgcgcagcggctgctgcagctgctgctgctgcacgagcctctctgtccgaacgccgcttcttgcggccttcctgctgctccaaaaagacagtcttccccttcacctgcctgaaggggcgacgagggtcctcgtcatcgccaccccctgatgctgacgcattcttggtgcgcggcat

SEQ ID NO: 17815 - DNA, 306 bp, Zea mays
  Clone ID: MRT4577_116250C.1
aaaaacaaaaagacttgttttctttctaaggcccgttcccccttatcaagatttccccctccttttttttggggggctaaaggaatgtccttcccagagcgggtttgtttttcgcccccccccccccaggaaaggcatcccatggggttttggcccccattatgggcaaaccatgcttttttgtttcgaaggcatttccaggaccccctttatggggggcaaatacccccattgtttaggggattttccttggggggtctaatgggggtaattaacgctttctcaacatgggggaggtgggccctt

SEQ ID NO: 17816 - DNA, 245 bp, Zea mays
  unsure (1)..(245): unsure at all n locations
  Clone ID: MRT4577_116251C.1
gggggggggggggnnancaacaaacagagnnacaaagcaaggganaaaggagccagcaaanncaaggcgaggagnaccanccannnccacacncaaaagangcaacacanccaaggagaaaaaganganccagacaangagaacccaagagnncaggggggaacaacnnaaaacacgcaaggcacaacaccngcncaagnncaagacncanganccnnncnacncaancagancggacgcgnggg

SEQ ID NO: 17817 - DNA, 483 bp, Zea mays
  Clone ID: MRT4577_116252C.1
attgaacacaatgacatacccatgcccagattacttttcttgtacaggattacaggtacactcttctctggaccaatcacgacgcgcaccacgttttttacttcacactctcactattactaaccacaagctatccaataccagggtgctgaaagggcctaattattgagaaccataaaatcacacacgcgtgcaacacagaattaaacaagagtatggttgtttgcaccggatctagctatgtgagccgtgctccaaaggctactacagacaaatcgaaaggtggtgtcgcttcttcttctctctggcctacttggggtccttgcagaccttttttttcttgtgaaactatgataataacctttctactgctcctactgtcgtccaggctgtgatctacaataacatctttacactgtgcgacatccatttgctcttactggtctcagacttatacactagttggacagcactagtctccat

SEQ ID NO: 17818 - DNA, 297 bp, Zea mays
  Clone ID: MRT4577_116253C.1
tcggttaagcagcagcatgaaccggagcggggtctcttacgcagccatgggtttcgacctcgttgccggtgggaggaacatgaataccaagcgcacagcgcctaattccgacgatgtttatctcaagctccttgtcaagctctaccgtttcttggtcaggaggaccaagagcaacttcaatgctgtcattctcaatacgctcttcatgagcaaaaccaatctcccaccaatcttcatgcgccgactttcaagttcttggaaagaatagagaaaaacattgctgtgattgttggcaca

SEQ ID NO: 17819 - DNA, 256 bp, Zea mays
  unsure (1)..(256): unsure at all n locations
  Clone ID: MRT4577_116254C.1
tccggctggncaccacttctatccgagagtcttcttttgactcccatagccagctccgcttccccctggttccgcgccgacagccgattgcaaccccaaggctatccgcgtgtgccgcgccgccaggggctcctctgggctgcgtgcgagggcccgctcgcagnntccccggagtgaggggacctgttctgtacgatagggaaggggcgatcgtttgaaggtgggtgggttctcaattgagaagaaagcttcgatc

SEQ ID NO: 17820 - DNA, 709 bp, Zea mays
  Clone ID: MRT4577_116255C.1
ctcgaggccggccgggaaatattagaaggggagtggattggatcgcgggttgaagcttatcaaccgcacccatagccacgcaacgtggccggatcatcggtgtcaccgtggtacgtcgacgatcccaaatatgccacgccatagttctttaccatgcggttgtaatcatggcgcatctggattcaccatttcaagagctattgcaccggcaagcgccacgactgagtaaccagaaactcttccccctctccggccgccgcgcgtcttccccaaattcgccgccaccgctcatgaatcctataaattgagcatgccctcaactccgctaggtattcaagcacccagcgcccccactcgtgtctcaattcatccaccagagagcttcgatttgggatttcccccaaatccatcaagaacaacgtgcgatgtgagctcaccgtggttagctcgttacaggtggggaagcagcaaacttttgttgcttttgctctaaggtggtgccgaaggaagaatctcaagagtgaagcctcgggaggatgttgttctccttttaaaaaactttatatttgtatgcgggaggagtttttgcctcccgagtttgtaataataatacttttgcactcatataaccgctggtctgtaataacaacactctttctatattttaatgtatagtgagttactgaaaaaaaaaaaaaaaaaagcggcc

SEQ ID NO: 17821 - DNA, 234 bp, Zea mays
  Clone ID: MRT4577_116256C.1
atggcaagttcgcgctgctttgagaacccgccggtgctggagccggccagcggaggaggcgaggtggttgacgacttcggcgggcagaaggcctacgtcagcggctccgccgggtccaaggccgccgtcgtcctcatctccgacgccttcggtaaatattccgtgcctcgccctccaaggtcctggttcgaagcgccaaacctgaggtacgctgctagtctcactctgagctaa

SEQ ID NO: 17822 - DNA, 372 bp, Zea mays
  Clone ID: MRT4577_116257C.1
tatttttaaaaaaaaaaacaaaacacctaatagggcgcaattttttaatttgagggagagaaatccttatatagcaacaaattacaatgaaaaacaaggcctggccctcctgctcttcatgaccatcctaggaagcttcccaatttctccatacatctgcgaacattaaaccttttctgcaaattcgacaaactctctctcctaaaaaaaatcaatatccgaacacatttcctactaatatacaggccgcaatcattatttgacaatcctagattgtctaacaacttaccaatacaacaagaattcacattgcccttcatttccaattgcaaggcgattaaaccttatgactcccctctttataccttaatc

SEQ ID NO: 17823 - DNA, 141 bp, Zea mays
  Clone ID: MRT4577_116258C.1
atgcggtctcgccaagttgccgtcttaccctcacgagagccaagcttattcccgtcggttttaggccgacgagaattaagtgttttcctgtagtaataactatgtccaaaaatatgttaaacaaacaataattgcaactgc

SEQ ID NO: 17824 - DNA, 342 bp, Zea mays
  Clone ID: MRT4577_116259C.1
ggccgcgtcgacccaggtcctaggttcgatcccagtcgggggcaaatttctggcttggttaaaaaaattccctcgttgtgcgctgcccgctcccgggttacatcttgcgcgcctccctctggctgaaccgttgcagagtgggcggtgacagcccgctagtgatggggggccagggttcagtgattttctcagccaggagccaggaccatgtttcagtctcttcttaatataataccgggagggcggtctttcccttcacggacgagttttttaaaaaaaaaactacaaaaaaaaaaaaaaaaaaaaaaaaaaaaaaaaaaaaaaaaaaaaaaaaaaaaaaag

SEQ ID NO: 17825 - DNA, 245 bp, Zea mays
  Clone ID: MRT4577_11625C.1
cgttatttttttaaaaatataactgggctaagaagggctttaatctataatatacctgagggcttatgagtccctcaaaaaaaacaataatgactagatgatagattctgaatgctgtcataatagggaattgaagataacacttctcagtgtgcgggggggggggggaagaggaccgtcaatcatcatgtaacccatcacagatgatacagcatgaacccactttaaccttgtaatcaaacatg

SEQ ID NO: 17826 - DNA, 278 bp, Zea mays
  unsure (1)..(278): unsure at all n locations
  Clone ID: MRT4577_116260C.1
ntttctttttttnttatttataatttcttttttacgacactgttgacacatttttttgtgaactattttcattattggggtcataccacaaacacctctttgttaacaacttaaattggcccccaattttattctctcttaaaaggccaataaatatcctccccccatttttataaaccctttcacctccttcagcctttatcccccccacctaactatacttttttctgaggtcaccaacttggatccctcttaatcttctctacgacccccccccc

SEQ ID NO: 17827 - DNA, 816 bp, Zea mays
  Clone ID: MRT4577_116261C.1
atggcgcaccggacactgaacagtgcctgtccggtgcaacactggactgtcccggtgccccagaagacagaagctccaacggcagaacccccactcatctggagagataggctgggttgggtcctattctccagtggcgtgacaccagacattacgacaccaatttcggtgaagttgcgccttgcactgtgggggctcctccccctgcacggtgggctcatcgttggagatggggttgtcgtctacccctatgttcatgaaaaggatgttagggtagtagaggggaggctctacctccactggattcatgatcgcgcccatgggtcgagttaccgaggcatcagtcggtcgcgctccagcagtcctaagaacaacgagcacttgggccctttcttcttgcaactaatccaggtccaaccccgggttggtgaggtggacaatggatcctactgcattggaactgctatgacggtcggccgaggcggaggcattggtgcaaccacgcgtctaggtggtgcagcagcagccggacatgacacacagatgagtcgggcccctaagtgcaggtgtgggccgcacgaggctcaattcgtgactgaaggaggtttagacatgaccgtctccagggccgccctggatctcaacaagggcttcttctctgtcggggcgatggtgtgggacaacggggcctccttccccacactcgctacgtggtgcagggcacccctttggtccatgatgcgtgagaggcatccaaagtggaaaacatctccgatgatgaagctgaagacggtgttgaaaacaatggccatgtag

SEQ ID NO: 17828 - DNA, 320 bp, Zea mays
  Clone ID: MRT4577_116262C.1
atcgacatataaacaacaatcatccatatacaatgtgcagcaatatatacaggtcatgtatgctcatcagcctgtatagctcgcgctatactcggaaccaccaagttactatgctaaaaagtttttattactctcatcattaacaaatacttctattcaaccaactgtttacactgaacactgctaattatttacaactacaacaatcaccatgcaatcagataactactgtctactctataacccttcaacttcttacatccaaccaacttatcacactgaaccgctttgctgcatttgcagaccaaatactactggca

SEQ ID NO: 17829 - DNA, 311 bp, Zea mays
  Clone ID: MRT4577_116263C.1
aggcaacgtggcagccagctgcggagaagcagctgcggtcggtggcgccgcggcaccaacaaaagcagccttgccgccacaggcctttgctgcggcgccaactacatcagccgcggcgccgcaggcctctgccaccgcacctcctaccggtggcggcgctcatacgcacgctcgtcgcgacccaacccaggaggaaatgcgggacatggccgcgcaagagaagatcacggcgccccttcgacttcccacgcttcctcggcctcaatgagcgaccaccctcaggcccaagccctctgaccgccccgccccgc

SEQ ID NO: 17830 - DNA, 311 bp, Zea mays
  Clone ID: MRT4577_116264C.1
gcgccctttttttttggggttcttttgaagagaatgcctgtcaccactacaaagcaaaacacaagtgattgtggctgataatagattcagcaaaagcaaagtaaccgcgctcgatcaaaggaagttcagctaaaacagatctcttacatcacaacttgttgaccatgctcttcttgcaacggcttacacgtgagggaaacatctaaaccttgccgtggcaaactaaaaagctctggaacctcactcttggtgaagtaacgcgtttgcttttcatgctatgaagcgtgcctgaacagatcccccttaaaacc

SEQ ID NO: 17831 - DNA, 796 bp, Zea mays
  Clone ID: MRT4577_116265C.1
acccacgcgtccggcggcggatcgaggaggtggtcgtggcgcagtccgcggtgcaccggtccgcggcgtccgtggacttcagcgccggtgggagcccgctgctgcccccgaccgtgaacgccgcgccgctgcacgcgcacttcgaggccgtcgccgccgacacggtcggcgtgggcgccgtccgtggcgccatggagccctgcatgggcagcgaggacttcgcgtccttctcggcggccgtccccgcctcgcacttctacttcgtcggcatagggaacgaggcgatcggggccgtgcacgccgcgcactcgccgcacttcctcgtcgacgatggtgcgctcccgtacggcgccgcgatgcacgccaacctcgccatcgagtacttgcggaaccacgcgatagccaataggtccgttggcccccacgacgagctttagttagatctactgcagccagccttttgcgagcagccacagcggtggcggcggcgccggcgtcggcttcacgctcatggctcgtgcccaacgaagctcaagacgagctcatgcttgtgatcgtcaagcaatcacgtcgtgatccgatcattttgtggctcagggagggcgttgtaggaatgcagtgcgactgatgttgttgttcaatgcgcggggcgtaattaagctggttgagagataagaatgagatgttgccagtacattacaagcgctcctgtccgagctctgtttcacaattagtttgggaaatgaaagatgagaccgtggactccaatgtttcaaaaaaaaaaagcggccttgat

SEQ ID NO: 17832 - DNA, 151 bp, Zea mays
  Clone ID: MRT4577_116266C.1
cctcctcttcactttttcccaagtgatgctgttaggctctcgcgcagctagatgaatgatactgagcagcagcagcagcaggaattcatagaggacgacgtcataacatctgggagatccaggagaggatgtgggcgcccaccgccgacga

SEQ ID NO: 17833 - DNA, 140 bp, Zea mays
  Clone ID: MRT4577_116267C.1
tgcgctggcacttgcgctggcatgggttccggcgctggaacctgagcaggcaaatgcattgtcgccgggactgggaccagcaccggagcttgcgctggcacctgcaccggcgccgggatcactactcccggtgccctgag

SEQ ID NO: 17834 - DNA, 604 bp, Zea mays
  Clone ID: MRT4577_116268C.1
aatccgcgatgttaaatgtgtggtccttagcaatcaaatctgcgtacaagatggaatctctattattttcagcgaaaccaagggattccgtgagcgcatccgagggaggaaggtgggcgtacctttaggcttctttccgacctccgggaagtgcggcgagggtttcatggcgatgttggcggctgcaaggccggcgcgccggatagaggcgggggcaggggaactgacaagggtttaactacgcgaacgcgcactgcaggaatggacgagctcgctctctcaaatcggccgaatgcgctcgtcccaccgagacgccgtcttgctccgtctccctgtctcgctcacgcggacgctccacgcgagcagggcaggccgaggagggcgacggcgcagccgggcgacggcgcgaggagagcgatggcgcgaagagtgcagaacgcgcggctcggcggcggcgcagctgtgcggcggcgcggttgggccgcggtggcggagaacggtgaacggaagaacgaagaagaaagggaaagaagcctttgtatgacacgtgggtcccgcagttagaagggttaaacctgttgtctcatccatcacgtagtcttaa

SEQ ID NO: 17835 - DNA, 1889 bp, Zea mays
  Clone ID: MRT4577_116269C.1
gcgcccaatgactaaacgtttggttccaatctcaaacttcttgacttaactggaaatctgttctcacagtggcaagatatattctctctttgtcaagcactggcatccctggaagttcttaatttgacaaataataccatggagaatgatgttgtagaaactccaatgctcgagaatatccgaattcttgttctcaataactgtggtgtaacatgggaactggttgaaaagattaaagtttccttttcatgtatcagtgaactccacctgatgtcaaacaggcttaatatgatcatgaccctagatggaaagttcgtacaaggtttcaacacactgcggctcctaaatctagaagataatcatattgattcatgggatgaaattgtgaaactttcttacttaagaagtttggaacaactccatttgaacaaaaacaggttaaagcatgtgaaatatccatctaatctttcaccagatggacctattgatgatgcagctgctgtgccatttgaaaatttgcaagttcttttgttaggatctaatgacatagatgacttttcttcagtggattcacttaacctgttcccaagtttaagggatgtcaggctttctgacaatcctgtagctgatcctgccaagggtggtgctcctcgttttgtgcttgttgctcgacttggaaaagttggaatactaaatggcagtgagataagtccacgtgaacggagggaatctgaaatacgatatgtccgccttgttatgggaaaaatagaatcaaatgaccaagaagagatcagacggcttcaccctagattcgctgaactgaagtcctttcatggtattgaagatgagaagccaacttcaagcatatcagggccacagaagatggcttctggccttataagtattacgttgaaatgtgtgggtccatcaatgggtgagaagcaaccactgacaaagaaactgcctgcgacaacaactgtcgggaagttaaaatctttgtgcgaaagcttcttcaaactgaaggacataaaagtgaaactgttcgtcgaagaagagggatgccctctaccacaaccagtggaggaggacacggcctctctgatggagcttggaattggctcgggcgcaaccattgttgtggacgaagagagctagccagtcgtctttagagaagggccaactgtatggcgcaaactgacgcttcagctgttattaagttttcgaagagaagatagctgatgacgctcttcgttgcccttatatacttctttctgtgggaatatgcacgtgatgaatattggtgcgggtttgggcttcaaaatggactagcatagtaaaaacattgtgaggacggttgtttggttgggaaaaaaaaaaaaaaaacctctctctactgaatctaatagatgactactatctaaattatgcttcagtgcattagtgggtttactcttttgacatccactagttcgccttcgtcgcatggtggacttcaagccgtgggtgttgtgttgccagttggttctgtctgaggtccttgttccaccttaagttctctcggtgcgctcattccgcacatgagtcgagctcgtcgattatctgttcgatcttttcaacctctcgcagaatcctcacctcacgctgtgttgttacccttaatctctgtgtttctccgtcctgtcgtgtttatgaccccgtctccccatctaatcactcttgatactgtttctaaattgtttcctaccgatcctttattctcaatatgcctcccacccgtcgccacttacagactcgctcgagttttccttttttatttttgtcaacgccacgaactacggccaatttttttttgattactgtggtggggcgctgacgttttccccccctgg

SEQ ID NO: 17836 - DNA, 193 bp, Zea mays
  unsure (1)..(193): unsure at all n locations
  Clone ID: MRT4577_11626C.1
aattcnnaattcactttggctccgtcgnnttttacaaaccgtnncgtgacttgggtataaacctctgtgcgttaccccaaaacttaatcgctcttgtcagcactatcccccttttcgccatgctggtcgttatattcgaataggtctccgcaccgatctgcccttcccaattgtttgcttcagcccctgaatg

SEQ ID NO: 17837 - DNA, 709 bp, Zea mays
  Clone ID: MRT4577_116270C.1
cctcgaggccggccgggcctgggtattcaacacttcctctgtcagtcgtacgcacgaacgatcactacgaccgtgctagatgccgtctttcctcccgcctgctcaggccggaatcctcattccctctggtctttccctaacgaaaggacgcgtgcgggcgagaggtcaaggaagtcacctcaggatccgccctacaaggccatgcctaggagctccactggtgaactaccccctccacggtggataaggatcggacatccgtcctacaagaccggcaagaatgcccagagagagtgcttcgtcgccctcgtctacttcactgacctgatggacaatcttgatgctgacgaccttgacttgaacgacaatgcatcacgtgacaacaacaagactctccatccgaccacacaaatccaaatcggcgacggcaacgacgaagcagctctcccgatagctgaagaccgtgaccatcactagcgtcgttgcaatgctccacatccataaccttttgctccctaataaggccggagctagcagcgcctatgctgcagctgaagaccaggactaaatccctgactacgtctggcgatacctccagcatgctggcgaatcaacatgtggatgagtatgacgataggtgttcgatgatactgagtatgtgggatgctgcaacactgctaaactaagtgactcttgtgcttgctaagga

SEQ ID NO: 17838 - DNA, 837 bp, Zea mays
  Clone ID: MRT4577_116271C.1
ctcggcttttgcattgatgaagaacgtagcaaaatgcgatacctggtgtgaattgcactccatagggcttggcgccgcccggggggaacgccgctcctgcgcgccatcactccactcgatcgaccgcctccgtgtccgtgccctacagctggtcatgagcgcccgcccaaccatggcggcggcggcgcccgtgcgcgcctgggtggtggcgctggcgctggtgctggcgtgcgcgctgctccagccgcggccgtccgacgccgcggcgcagcccgccccgcagtcgccggcgacggcggtgtcgtcgggcgccgccaagcccaagtgcgtggccggcgccaggaacgaccacgcgtgccgcgtcggcgccgtgcacgacccggacagccaggaggaggagggctccagcgtcaccatcgacgcgcccgccgccgcgcccgacgacgtcggccacgacgacggcagcgactacaacgaccccgacgtgcccaacaacgaccagctcgtcgtcgtcggccactgaaagctgccgcgcgcgcgcgcgcgccgacccgtggaccatgcgtgcatgaagaagaatgcagggggtgggcctgggcctgtaacctgttaatggatcggattctcggtgccaattcgtgatcttgaccggtctaagaagatggggacttgcgtctttgtttcattggttattatttctactagtgtgtatatggtaaagtcgtgtgctgtgaacctgcgatcatttatcctctgttcattgaattgaagcaatcccctctcccgtcacaaaataggattccgtcaaatttaaaactatacgaacatcaagaattt

SEQ ID NO: 17839 - DNA, 361 bp, Zea mays
  Clone ID: MRT4577_116272C.1
cccccccggggccaacatttttttttaaacagcagcatttttcccaacaaagcttttcagtcaagaaagggaaccagccctcccaaccaagtaaacggcccccctaatccaaatttttttctctttggaaaaaatctaacggccggggggggcaaacttacaaaaagggaaaagcaggaatttcccaaagatttgccccttttcgtttaaggcctgggagggccccccactaaagcccccccattttacgttgtcctgggggggaaaaaagggggccccgacgggcccccggtttcaatagggggggggctaaggagctatccgttttttttccagctccttaagggggggggggaagggg

SEQ ID NO: 17840 - DNA, 299 bp, Zea mays
  Clone ID: MRT4577_116273C.1
cgcacgcgtaggcaacacctttaaaacacagcgaactcctatgtagggggtagcggtcagtgaatttgatgggaggtgctcagacctcatacaaccctggctctggatggataatacaaagctggcgttgcagttaccgctacccctggtgcactgagagggtgtggggactctgcctgagcagtggctgacgaccgccttcttcatccaggcgaggctgccgacctttttttttgtgggcgcaaccgcgctgttcaagtttctcttatacccgcagatatagaccccggtacttttca

SEQ ID NO: 17841 - DNA, 154 bp, Zea mays
  Clone ID: MRT4577_116274C.1
atgcgtcgaggacgagcaggaggatgtctcataagctggcagattcagcgcaagcttaaacagggaagcacttatatatcgaccgacaacgaccaatcgaaccatggaaaagaaggaatcatactaccaacttcagggccccgtcgcacacaaa

SEQ ID NO: 17842 - DNA, 895 bp, Zea mays
  unsure (1)..(895): unsure at all n locations
  Clone ID: MRT4577_116275C.1
ctcgaggccggccgggccggaagtcgcacaattgttcccttcccccggcggcagcaaacatggcgctggaggtgctgccggaggagtccaaccggtgcgtgcgcgggtgctgccgtagcgccaccatcccgctcgaccttcggtccgcctccttctccctcctcgcccccatcgcgcgaggctcggagagcactgtgtacgaggcattgctgggcggcgagcgcgctgcggccaagaagcctgtgctgtccaccgccgaggatttggacaagttccactaccagcttcagcttctctgcaagctggatcaccctgggttggcaaaactgatcgccgcacatgcacaccctccggcttacttgatgttctttgacttcttcgagcctccaaatcttgcagaaaagatacatgtcgaggaatggatcccttctatccagcaagtggttacgatggccagtgatctagcaaaggctctccaatacctacaaatccttggggtagtacacagagatataaaacctgcgaatattttgctagacaaagatctccatccatatctagcagattttggcttagccatgtttcaaaaggatattaagcgtgtctcagttgagaactggaaatcatctggcaagcctactggtggtttccataaaaagaatatggttgggacactaatttacatggcaccagaaattttgagaaaggatatacatacagaaaagtctgatgtgtatagctttgcaatatctatcaatgagcttcttactggtgtggtgccctatacagatctgagagcagaagcacaggttacaaggtcaattggtgatgatgaccctcagncagctgtcacagcacaacctgagggtattgaactgcttatcagctgatgatg

SEQ ID NO: 17843 - DNA, 2369 bp, Zea mays
  Clone ID: MRT4577_116276C.1
gcgccgctcgcggcggccgggaaccgttccgtgtgaatcgatccatccaccggtggcctcctcgtcgccactcgccaccggcgccgcacttcccccgtctccccaactcattccttggcccctcctctccaccgaagcgatagcaaagccgcaggccgcaccaattgttcccttcccccggcggcagcaaacatggcgctggaggtgctgccggaggagtccaaccggtgcgtgcgcgggtgctgccgtagcgccaccatcccgctcgaccttcggtccgcctccttctccctcctcgcccccatcgcgcgaggctcggagagcactgtgtacgaggcattgctgggcggcgagcgcgctgcggccaagaagcctgtgctgtccaccgccgaggatttggacaagttccactaccagcttcagcttctctgcaagctggatcaccctgggttggcaaaactgatcgccgcacatgcacaccctccggcttacttgatgttctttgacttcttcgagcctccaaatcttgcagaaaagatacatgtcgaggaatggatcccttctatccagcaagtggttacgatggccagtgatctagcaaaggctctccaatacctacaaatccttggggtagtacacagagatataaaacctgcgaatattttgctagacaaagatctccatccatatctagcagattttggcttagccatgtttcaaaaggatattaagcgtgtctcagttgagaactggaaatcatctggcaagcctactggtggtttccataaaaagaatatggttgggacactaatttacatggcaccagaaattttgagaaaggatatacatacagaaaagtctgatgtgtatagctttgcaatatctatcaatgagcttcttactggtgtggtgccctatacagatctgagagcagaagcacaggattgcgtccagcacttgcccttcctgaatctggtgccccaccaactcttttgtcacttatccagcgttgctgggatcctgatcctgaaaagagaccatcatttgaagatataattgatgagctaaatatagttcaaaagcatatagtttcaaatgcttctgttccatcatctcctgtcagcaagagtcaaaatggtaccatagaagtgcaccattatcaagaagcattgaactggttcaaccagggggagctttttgttaaaggatcaagtagatcagaccttaagaatctttggtctgattgttttgatcaatcttcagagtaccatccaacattaagttggggctcttttgcaacgtgtggtcgaagggaaaccatggaagacacccattttgtacttccccatgtgagcgaagaaaatgatgtttttgcctttggcatttttgatggccatagaggttcagcagccgctgaattttctgtccgagcagttcctggatttctcaagcaatttggtcagggtgcaagcccaactgacgctctttcagaagcgtttgtaaggactgacatagcatttcgagaagaactaattcttcaccggaagtcaaaaaggataattcaaaaagattggcatcctggttgcacggcaataaccgccctgatagtgagaaacaagctttttgtagcaaatgctggtgattgccgagcaatcctgagccgtaagggcaaaccatttctgttgaccaaggatcatgttgctagttgcccaaatgaaagagaacgagtaacaaaggcggggactgaagtaaaatggcaaatagatacgtggcgagtgggttcagctgctcttcaggttacaaggtcaattggtgatgatgacctcaagccagctgtcacagcacaacctgaggttattgaaactgctttatcagctgatgatgagttcctggtgatggctagtgatggcctatgggatgtggtaagcaaccaggacgtgctgtcaataatcaaggacacggttaaagagcctggaatgtgctcgaagaggttggccacggaggctgcggagcggggcagcaaagacaatatcactgtcattgttgtctttcttcgccccgtctccacagctgagcgaatctactgagtcacctcccaaaacctattctcattaacttcaggtggccataccgcacgccttccgctgttaagtcgcaatttttgtattcgatccacatcggttctcaagaagaaaagaagctatactatacgtccattcttgtatttgtagatagaagaaacagcagcctctgcggcggctctttttttcaatcttttgaaacatttctcgtgtgtaaactatgcaagctgaatggatattgttggcatcgatttgagcgtcaaaaaaaaaaaaaaaaaaggggcggcc

SEQ ID NO: 17844 - DNA, 519 bp, Zea mays
  Clone ID: MRT4577_116277C.1
atacaaatccaccctctgcatatatcttattaagctgtataataaatgaaacaacacagcatcatatacatagaccggatgcatattcgctacccttattgcaacagcagctagccttcatttctcccatagcactgagccaccggctgagatttcaccgcttctgaaagcatcaacctttgcacggcattgtttctgactcacaactgcgttgctgccttggatgctcatttgttcaggctcaggcaggacccttgaactgcatgtttataggtcattagatgaaattacatagttacaagatttcaatccaagttggtgtttacagatcattagaaaataatgctaagcttcacttcagtagtcaagaattaaagcctttggctggaaaaaaaaataatgctacccactaaagtaaattgcatgtgattggtgcatattgaaagtcacatattttgctttgctaaagaatagtattaaggcatgcatatatattaatctattacacgatatattatt

SEQ ID NO: 17845 - DNA, 638 bp, Zea mays
  unsure (1)..(638): unsure at all n locations
  Clone ID: MRT4577_116278C.1
ggagtgttcacagctagcgtgaggatgagggctttaacgatgggcctgctcatggattgtcgccgcgctgtatcgccggggctgccggggacgacgtgcaggaggaagatgaagagcatacatcgcccgggccatgctccgaagtgtgctgagacatcgcgctcatcgggggagccagggtcgccttctacacctaccacgacttctccaggacgacaggaagttccccgtctatcgcaccagcggtcgacgagcacatccgaaaagcggaagctcgccgtcttcttcgggcacacgaacacgaaacgaccgccgtatggctcagtgctacgaatggaccggttgtctggcggatactggacggatgaacgaactgaatctgacgacacccaaccctactataggacgtanggacaccatactgcctaagtcataagtacgactacagggtctacggcagaactgctgaacctgaagctgatgatatactccgatgtggtgtagagagagcccgggatagacattctggaggggcatctgagtctgaatgactcctcagtctccactagacgctctagacgcgccgggatgaccgttcgaatggaggaccttattcagcgaccgcttcgtcgtttgaa

SEQ ID NO: 17846 - DNA, 280 bp, Zea mays
  Clone ID: MRT4577_116279C.1
tgttgtagtactacccaagcctcaaccgttcaaagtgttgctcgaaggggatatgtacaggtaatgcatccatcgtactattgatttagccatcccaacctgcaaataacctttgcatattctgtttgacatttttacatattgttttctttaaatgaaaccgactcatactgctcggcctacacagtgagtatcctttatttcatcttgtcgtaatttcatactgtttggtgatttatacaagccttcttatgaaaaaaaacttgatcactgaaggtgc

SEQ ID NO: 17847 - DNA, 378 bp, Zea mays
  Clone ID: MRT4577_11627C.1
atcgaggcacgcgctggaatgtcgacagattgtccccccgtactcattctcgtgatttagaatatctcttcggggaatatgcaacgcttttcggctactaccctaaggactatggtgacaacggtgcccttggagaaactggtgacacattcggcgaagggagaccttgccgtaatgcaagtgactgttacagtggaaaacaaaagctgcagaagcatttgaatacttgacacatgaaggatcactgactgagggaaacggtttccgcagaacaccagaagtggactggaagcgagactatgcatttatagaattcaaggaacaacttgttgccgatgcaactcagtaccaactaaatgacaggtatgcagatggaag

SEQ ID NO: 17848 - DNA, 2329 bp, Zea mays
  Clone ID: MRT4577_116280C.1
tttggatctctcaagtgggaattttgttgggcttgcgctgtcattatttatgtcatttttttagattagtccatagttaaatattgagcaaatggcatgaaaatagatgtggatgctgcaacaactgaggtgtgcttgataagcagccaaataatatatcgtgtaatagattaatatatatgcatgccttaatactattctttagcaaagcaaaatatgtgactttcaatatgcaccaatcacatgcaatttactttagtgggtagcattatttttttttccagccaaaggctttaattcttgactactgaagtgaagcttagcattattttctaatgatctgtaaacaccaacttggattgaaatcttgtaactctgtaatttcatctaatgacctataaacatgcagcattgcctcgaggccgggctccacccacgcctccactacaccacacagagccgcagcagactcgcaagggaaaggagatggatcgtctgcccgagtcgacccggagcatgaggaagtacgcgtcggaggccggcgggcttcgcgccgctccgccccgtcctcgccaacctgcaggaggtgttcctcggcaccaagctcgccgtgctattccccgccgtgccgctcgccatcgccgcccagtgcgcgcacttcggccaggtgtgggtgtttacgctcagcctactcggcctcatccccctcgccgagcgtgtcagcttcctcaccgagcagatcgcgatatacaccggccccaccgtgggcggcctcctcaacgcgacgtgcggcaacgccacggagctcatcatcgcgctcttcgcgctcatggggggccagatcgaggtcgtcaagtgctccctcctcggctccgtcctctccaacctgctgctcgtgctcggcacgtccctcttctgcggcggcgtcgtcaacctcggctccgaccagccgtacgacaggacgcaagcggacgtcagcacgggcctcctcatcctcggcgtgctgtgccagtcgctgccgctcttgctgcgctacgcggtgggcgccggcgagcactccgtcgccgcgcccaccacggtgctcgacctctcccgcgcctgcagcgtcgtcatgctgctcgcctacgtcgcctacctcttcttccagctcaagacgcacgcgcagctgttcgagccgcaggaggtggacgacggctgcgaggcggaagaggacgagcaggccgtcatcggcttcgccagcggcctcttctggctcgccttcaacaccgtgctcatcgccatcctgtccgagtacgtggtcggcacgatcgagcctacctccaaatcctggggtttgtccgtcagcttcatcagcatcatacttctacccatcgtggggaacgccgcggagcacgccggagcaatcatttttgctctcaagaacaagctggacattaccctcggagtagcgttggggtcggcgacccagatctccatgtttgtggtgccgctgagtgtcattgtagcttggatcgcgggtattcaaatggatcttgacttcaagctcatagagaccggctctctcttcgtctcagtaatagtgacagcattcaccctccaggatggttcgtcacactacctcaaggggatccttctgctgctgtgctacattgtgatcggtgcatgcttctttgttacgaggcaacctgcaagtaacaacaatggcgctgggctgtcgctgccaactggcactttgagtgcacaagctgcatgatggttcaagggtcctgcctgagcctgaacaaatgagcatccaaggcagcaacgcagttgtgagtcagaaacaatgccgtgcaaaggttgatgctttcagaagcggtgaaatctcagccggtggctcagtgctatgggagaaatgaaggctagctgctgttgcaataagggtagcgaatatgcatccggtctatgtatatgatgctgtgttgtttcatttattatacagcttaataagatatatgcagagggtggatttgtatatatttgcggcttgtgcggttctacaagaggattcccagcttgtttcactggggtgtatggtgaaaacatgtcgggtatatccaacggcggccctggcggggtcgaccagggcccgccctcaggttaatggggcctcactctaggagtctagctactaaataacagcacgtatatataggtatatagcctcaaaaaaatatacagggtcctcactccaggagtctgtggaaacttaaggttatctttttataaactatttattagtatgggtaacttatttacaaaaaaaaaaaaaaaaaaactcgaggagggg

SEQ ID NO: 17849 - DNA, 216 bp, Zea mays
  Clone ID: MRT4577_116281C.1
ggggcaaggggcttgttttatctttggccccgaaccgacaaccagagctgcatttcgtgagagaaaataagattaacccgggcaagcccccagggaaatcagactatctgctcgggccgatcatctccaaaggggatggtacctgtgggaccccatcactgtaacccccagtataaggacgctagaccaatatgacacagcccccgcgaactaaag

SEQ ID NO: 17850 - DNA, 2700 bp, Zea mays
  Clone ID: MRT4577_116282C.1
tgcagaaccttgtttttccttgttcatctatccactagtaggttatagtagtttaaaaaaggataataggtgtttggtttcgacctctgatggcagagatgatacgaaagcaactcctgtcgtttcaatcatgcaaaatgcatgccccgttactatagaatcatcctgaccttgggacagctggtgggttcatcatctgatctgatgattagctcatgtgtcgtattcataggttaagtatatataggtcctattatataattttgccgcggcggtcacatgtcctgcatggaactcacttgggccgagtaggctgagcgaaacacccacacctggccgaagtgccccactgggcggtcgctgacgcgcgcacggcgcacagcatgggcaagacggcgctgcgcaccaagtcgacgtcggccgcgtcgctgctgtacagggtgcccttcgcgccgctccgccccgtcctccagagcctccacgaggggtcgctgacggccaagacggcgcaccgattgtccacgacggcgctgcgcaccaagtccaagtcggccgcgtcgctgctgcgcagggtgcctttcgcgccgctccgactactcctcggcaacctggaggaaaaaaattgggtcctccaggccgggcgggactcccgctggccggcgcccggccgggactccgcccacgcctccaccacagagagcagcagcagactcgcaagggggtagggttgtgtactctgcgcctgtgcggacggcggccggcggacggcgaaggagatggatcgtctgcccgagtcgacccggagcatgaggaagtacgcgtcggaggccggcgggcttcgcgcggcgcggcagggcccccacgggcggtcgctgacggcgcgcacggcgcacagcatgtccacgacggcgctgcgcaccaagtccaagtcggccgcgtcgctgctgcgcagggtgcccttcgcgccgctccgccccgtcctcgccaacctgcaggaggtgttcctcggcaccaagctcgccgtgctattccccgccgtgccgctcgccatcgccgcccagtgcgcgcacttcggccaggtgtgggtgtttacactcagcctactcggcctcatccccctcgccgagcgtgtcagcttcctcaccgagcagatcgcgatatacaccggccccaccgtgggcggcctcctcaacgcgacgtgcggcaacgccacggagctcatcatcgcgctcttcgcgctcatggggggccagatcgaggtcgtcaagtgctccctcctcggctccgtcctctccaacctgctgctcgtgctcggcacgtccctcttctgcggcggcgtcgtcaacctcggctccgaccagccgtacgacaggacgcaagcggacgtcagcacgggcctcctcatcctcggcgtgctgtgccagtcgctgccgctcatgctgcgctacgcggtgggcgccggcgagcactccgtcgccgcggccaccacggtgctcgacctctcccgcgcctgcagcgtcgtcatgctgctcgcctacgtcgcctacctcttcttccagctcaagacgcacgcgcagctgttcgagccgcaggaggtggacgacggctgcgaggcggaagaggacgagcaggccgtcatcggcttcgccagcggcttcttctggctcgccttcaacaccgtgctcatcgccatcctgtccgagtacgtggtcggcaccatcgagcctacctccaaatcctggggtttgtccgtcagcttcatcagcatcatacttctacccatcgtggggaacgccgcggagcacgccggagcaatcatttttgctctcaagaacaagctggacattaccctcggagtagcgttggggtcggcgacccagatctccatgtttgtggtgccgctgagtgtcattgtagcttggatcgcgggtattcaaatggatcttgacttcaagctcatagagaccggctctctcttcgtctcagtaatagtgacagcattcaccctccaggatggttcgtcacactacctcaaggggatccttctgctgctgtgctacattgtgatcggtgcatgcttctttgttacgaggcaacctgcaagtaacaacaatggcgctgggctgtcgctgccaactggcactttgagtgcacaagctgcatgatggttcaagggtcctgcctgagcctgaacaaatgagcatccaaggcagcaacgcagttgtgagtcagaaacaatgccgtgcaaaggttgatgctttcagaagcggtgaaatctcagccggtggctcagtgctatgggagaaatgaaggctagctgctgttgcaataagggtagcgaatatgcatccggtctatgtatatgatgctgtgttgtttcatttattatacagcttaataagatatatgcagagggtggatttgtatatatttgtggcttgccggcttgtggtcaagaggattccaaaaaaaaaaaagcttgtgcggttcaacaagagcttgtttttaaaaaaaaaaaaaaaaaaaaaaaaaaaaaaaaaaaaaaaaaaaaaaaaaaaaaaaaaaaaaaaaaaaaaaacaacaatggcgctgggctgtcgctgccaactggcactttgagtgcgcaagctgcatgatgggtgagcctgcagaaccttgtttttcgttgttcatctatccactagtaggttatagtagttt

SEQ ID NO: 17851 - DNA, 207 bp, Zea mays
  Clone ID: MRT4577_116283C.1
cgcgtacggcctcgccgaggtccccgtcgacgtgccgtcctcccagaccgcgctcgactgcagcgtcactttcgaccccggcaacaaggtcagcctctcccactcgctaggctccggcggctgccggctcaagtacacctacgcgcacggtgtcgaccggtctaccaccatcgagacgcctttcgacaccgacaagaacgcatggga

SEQ ID NO: 17852 - DNA, 359 bp, Zea mays
  Clone ID: MRT4577_116284C.1
gtaatagcggatatttggaacaaataaaacgggtagagattaaccaaaaccgaactagaaccgaagcttcatcttatataaggcgaatccgttaataaaacactctggggacaaaaaaaagcaggagataagaaacagaaaaaacttcccaggtcccccaacacaaagagtgcaccaaatgaggacagggggagtgaataaagcaaacgcggcgaagagtgaaaaaagcgcctaaaacggaggaaaagaacccattctcccatggtatacaaaggttggcacacggacaattgcttcataacgagcagagggcttaattacacaggaaattatcatgcattccataggcacgctaactc

SEQ ID NO: 17853 - DNA, 253 bp, Zea mays
  Clone ID: MRT4577_116285C.1
acccagcacggatggtggagcaatctgcattacaatgcccacgaacgtgagccacaaggacccgggctgtggctaaggacgtgcctaggccccttagctgtcgtggagccttggctgtcgatgataccgatagcgaggggatccagcttgtgctctttaggagctgtgcactggatgattacacctccccgaatgaagacgactgttgatcctgagcattgacaccgacacagagacggcatgtgggccacat

SEQ ID NO: 17854 - DNA, 190 bp, Zea mays
  Clone ID: MRT4577_116286C.1
atgcggttcgtgggagactttacaatgccgctttttatttcataaacggttcaatgccagatgcaggggggagagctgtaaccgtggaggggatgacagacacgggagaacaagtgggccacaagccgggatgtgaatgccactggtcaagtggagttgtcaaacaaagggaagcggtggggttcactgc

SEQ ID NO: 17855 - DNA, 318 bp, Zea mays
  Clone ID: MRT4577_116287C.1
tgcttgccttgggtcaaaccctacggagggagttgttctattcgctgcaaccataagtacgggggagtctgagtctgtcaaggatgccatctctcagattgctggggatgcccaggagcataattggactgttactgctactggctgacttgagattgttctggctaatcatgatccacagaaggacaagcgcaacacaggctctgatacgtggccccatatccctagtgccaagatgaaggtgcagcattcttggtgatgcccaccatctaccggatgccgaaaggatgggactagactacactgatgttgcggctc

SEQ ID NO: 17856 - DNA, 416 bp, Zea mays
  Clone ID: MRT4577_116288C.1
gataggtcctcgacacagttcagcagagatgctggctctatgcccaaggtgtggacaggaaaggaggacataaaagccataactaaaactgttcgctcagttgtacgccagatgctaatatttaatactctatatatagaatactgttgaagacgcttctaaagcactagagtattgtagcactgatggaaggccttcgatgaaatgtttccctgaaagttgcatactacatcgctgaagcactacaatattgtaacactgagggaaggcctttgtatcatgacctaaattcatatagggccctctttgatgaggtaattgttgctttggttttcacttttccttacaaccttcgaattatgtggctatgtctaaaaacttatacttctacagttctcgggtcttcataccattcc

SEQ ID NO: 17857 - DNA, 343 bp, Zea mays
  Clone ID: MRT4577_116289C.1
gaattcccggtcgacgacgcatccgatcacgacaaccgctacagacgctcagactatccataatagaaggaaacggaatggctgagcgcctattcctaatctcgtgcgaagaacactacgaaactttttcgccaatactcgagaaaggtgctagcgtactcactgtcgaacttctactgaaccgcatatccatatataaacttgagttcgagatgcaaccccttttcattgaccgagtcaaacagacccgttcgtctcgcttgttgaatgacactgtgcatggccggtttgtacatgtacccaaccgtacatcagcctattcagttcaagaccaatgtatatg

SEQ ID NO: 17858 - DNA, 304 bp, Zea mays
  Clone ID: MRT4577_11628C.1
ccctttcgttcgcccacgcgtccacccacgcgagcggaaacacgtacagactggcctggcatacatctggcacatcacggctagcaacccctttgttgacttgaagaatgaatacaagggtatcttctgcaggaggacatcattctcttcttacagaacgggatcattctctaggactgtgacaccagccagaattgctacatctacctctatggacaaggccaggagaagctgagcacgactgagccctactttgacaagctgggtgacgccatggtctcctggatcgaggcctgggatgagc

SEQ ID NO: 17859 - DNA, 405 bp, Zea mays
  unsure (1)..(405): unsure at all n locations
  Clone ID: MRT4577_116290C.1
cacgccttcccaccacatgcaggcgctggcgcggccatacgccggctcgcgcgcctggcgtgcggcgagtggtggaccgccagatgaccgcgcgccgccgcacaaaagcggccagacaaatgcataagagacagggcggtgaacccccaccgcacacgtgctgcgccggccccggcggcgctcgctgagtgcctgagtcgcttcgcttgccagccgcatgcagcatgtcngattggggaggaattggaatgtgctcgtgtggggggtgagggcctgggccgggccgggtagcacaagcgatcaaaggactggaaagctaggcggccggaggggcggtgccggccctgccgggtgcgcagtcaacgtggaaagcccgcgccgggctcctcagatatcagtagtggg

SEQ ID NO: 17860 - DNA, 535 bp, Zea mays
  Clone ID: MRT4577_116291C.1
attattgtgtgtctttgtgtttttttattattgtttataaacttaagtctacttgttaatcgctgcgtaagagaacggaaggagggggagagggggggccagggagggaaaaaaaaggaaagggacgcggggggcgggggaggcgggctggaccacaggggggcgagacgggaaggaaggggcggggggacccccaagccggacgaaaaaccggacgcgggggggggcgggggaaagggggggcgggaccggcgggcgccccagccccccccagagggagggggaggagagcggggcgggggcagggcccggggggccggcggggggaacgggggagcggggcgcggggccgcacgggggcggggccggaagcggagagggcaaggccggggggcctaaggagggagctaactcacaccaaaggcggggggcccacaggccgaaggccggacgggaaaccgggcgggccgggggcataaaggaaacggccaacccgcggcgagaggggggttgcgaaaggggggccagggggggg

SEQ ID NO: 17861 - DNA, 174 bp, Zea mays
  Clone ID: MRT4577_116292C.1
tgttcaccgccgcatgggctcgcgcggcgagcagggtctttctaactccccgtcccaagtaagccagaaaatggccgcggtggaagcagaccttctccgatcggaacccctcagctgctgatcgacatggagcgagacgccaaccccccggaccagggcccggcgccacgccgc

SEQ ID NO: 17862 - DNA, 172 bp, Zea mays
  Clone ID: MRT4577_116293C.1
gggggagaaaaaaaaaaaaccatctcaagggtgcgggcaatcggtttctagatgaccaaggcgcaataggagaggaagctggcaccaaaatataaaatgttggacgactcagtagagttgattgggccgcttaagacatgcaagaatatttaggggtgaattagggttgtgt

SEQ ID NO: 17863 - DNA, 592 bp, Zea mays
  Clone ID: MRT4577_116294C.1
tttttttttttttttttttttttttttttttttttttttttttttttttttttttttttttttttttttttttttttttttttttaaaacaacaaactttttcaggtttggccatagttggggggggtccgcacacacaaaaaaacgggtccttttttaaaccaaccttgccccgatttatgacacgaacgggggtttttttgccaccctcctttgggggggggccccaaacgacgcgggcccttggggggtttaaacgacccttgattttttgccccccacgggaacggggcaaaggggggggggggctttcttttgggatgttgaagtctgttaaggggcggccttcctccagttgtttgccgggaaaaataaaacccttttggtccggggggatgccctccttggccgggattttcgccttaaaattggggaggggggccgagctttaaacctccagggttttggtttttccagggagggttttaaaaaaaattttgttaccccccctggggggggaaaaaaggggggggggtcttttcttttggatgttgtagcccgggggggggggacctttttccaattgtttgcc

SEQ ID NO: 17864 - DNA, 1244 bp, Zea mays
  Clone ID: MRT4577_116295C.1
cattgggtacctcgaggccggccgggcagataccggcatcattcagaaaactcatgcaccttcaagttttagatctgaggtcacctgcgtggaggagttgccatttgaaataactacgctaactaatttacgccatttacatgttgctgcggtccatgatcttcaagaaagatcactgaattgcttcagtgctacaaaaattcctggcaacatttgtggcctaaagaatcttcaatctttacatacggtttcagctaatgaagatttggtttcacagttgggaaatttgactcttatgagaagcttgactataatgaatgtgcggcaaagctatatcgcagagctatggaactccctgacaaaaatgcctaacctgagtgtcctgattatttttgcatctgatatggatgagattcttgatttgagaatgctgaggcccttacctaaccttaagttgttctggctggcaggaaagatgaagggaggcgtgctcccatcgatattcaacaagtttgagaagctaacacagttaaaaatggactggtctggtctgaataaggaccctataagctccttttcttacatgctaactctagtcgatgtgtggttcttcggggcatattgtggggaatatctatctttttgtgctggatggttccccaatctcaaatctctgcacattgctgatatggaacatctgactcggattgagatagaggatggaacaatgatgggcctgcatcatctggaacttgttggtttaaggaatatgaggctagttcctaagggtatcaagtatattagaacactccgtcagatgatcctgactgatatgccaaaggagttagttgaaagcctgcgaggaagtgacgcgcacattgttcagcatgttcccaacatccatatttttgactccagtgatcctgaagcagtaaataacttcatattctggcctcatcttgccaagaagtacggctctggtgtaactaagtatgaccctagaaaatgaggatcatctggaacctggaaaattattgggaggtttcagcaataaatatgtctctgatttgtaggacaaccacttgagcagtgagaaaatcatcaaaatgtacttgttgatcttggtgccaaaactctagatgagtgtgttttgtgtgtaatatatgttactcatggattttggccctcgctaccgaatggtttcctactgccaataatgattcattcgaacagaattcaccatc

SEQ ID NO: 17865 - DNA, 682 bp, Zea mays
  unsure (1)..(682): unsure at all n locations
  Clone ID: MRT4577_116296C.1
gcggccagaggtatacgtttttctaccctcgacgttctgttttctccccgccttaccacctacctacaacagataaagacccacctcttttccgacattacacaggtgggactggaaatcnatgttcatggcctccattccggagacgaccttcgccgccatcttattcgtcctcttctgtgccccgactgcgaccgccgacaacaacgacctccccgtagtacgtcatcttcctgcgcgcctattacgacacctggcgcgccgaggtcggtgaccactgtcacctagtactatctccgacagccaacatgaggttgtcctgccagcacttctcgaccgcaaagatcaagcgctccatctactcgatgaccgactggaacgccacgtacacgatcgacctcaaggacagccaccaggaggacatctgcgaggtgttcttgtcggagagcccgcgcaaggactgctgaccagatgcaggcgcatagggaccgcgccggcgtcctgctcaccaggaacgtcggtatcagtgacaacctgcgccccgccaacccgctcggctacctcaaggacgtgacgctgcccatctgcgcctcgctgctcaaacagttggactcgnacgacgacgacgatcagtaatagcacatcgacgacgacgatcgatatgtaataacacgtcgtcgac

SEQ ID NO: 17866 - DNA, 216 bp, Zea mays
  Clone ID: MRT4577_116297C.1
aaaaaaaaaaaaaaaaaaaaaaaaaaaaaattattttaaaaaacaaaaaaaaaaaaaaaatagaggggtgttctttttctaaggttcgaagctttctttctcatacatacaacctaataacacaattttattgggccacctatattaacttcactacccgccaaactacaacttcatcactcgtaatacccttcctttacataacttaatcgcctt

SEQ ID NO: 17867 - DNA, 562 bp, Zea mays
  unsure (1)..(562): unsure at all n locations
  Clone ID: MRT4577_116298C.1
tcccaccaaaccatgnccatggggcggtgcgggtgggcaggagcaggggatatttaggctaagactcattccgtctattgctctaccttcctccaacagattgaattgcatcgtttattccccggcaaaactagctgctgactcaacctcccctcgggtctacgccctgtggggggggggtcggcgattgaaagagagtaggagcgcattctctccatctcagttggaaagtctatcgctctcagcagcagttccttggtcataccctcggtgatgactagcagtccttcctgattgagttctcaccctctatggatagatcaagagttccggcccggctatgattccatcaacaaacccgattcggtataaaagcttagcttctattacaagaatctattttgaaaagagctatcctaaagcttgacaggtctccccaactctgtttttcactcgaaaaccgaaagcataaggatgagccttgggccccctttcccaagagcaggaggagcgtttagatactgtacctacctttaggtgcgtacaggagcaaggacaaaag

SEQ ID NO: 17868 - DNA, 2167 bp, Zea mays
  Clone ID: MRT4577_116299C.1
ccgggcttgtcagcaagaatggaaacaatgcagaaattcacttcaaccggcgagtgatgcaatatgagatacttgacattcttgagttacatctgaccggaaaagaatgtctattgttattttggattgtcaaagtggcaagttttttctcttgtccaaaggagctgatgaggcaatgcttccttgtgcttattctggacaaaagacaaagacatttgttgatgcagttgacaaatatgctcagctggggttgcgcacactctgcttgggatggcgtgagctggaaccagaggaatacactaaatggtctcaatcatttaaggaggccaatagctcattgaatgacagggagtggaaagttgctgaggtttgccaaaagctagaacatagcttggagattctaggtgtcagtgcaatagaagatcgcctccaggatggggtaccagaaactatcgaaatactgaggcagtcaggaatcaacttctggatgttaactggtgataaacaaagtactgccattcaaattgctcttttgtgcaacttgatttcttcagaacctaaaggacagctcttgcatatcaatgggaaaactcaagatgaagttgctagaagcttggaaagagttcttcttaccatgaggagttacgtcatcagagcctaaggagctggcttttgtagtggatggctgggcactataagttattcgttcacgctatactgaagcttttactcccgatgcagttctttagaaaactggcacctgcatgttcagttacaccttcccagccagcacatctaagaacgtctcacccaagatgtgactaagccaattatggcattcgatcaacagttaactcgtaacagtatggcataccagaatgacaaaaaaaaaagatgtcagtcgaattagatatgttgcatatttctgttaatgatttagtagatattgcccaaaaagatataacgaaaagtcatacttaatcctttatagctgttagcaaaaatgggtagtgaccatttatgttctctatggggaataaattaatttctccaatccaccagatgcaaaaaaataaacttatgtcccagtcatgccaaaaaaaaaaaaaaaacagttagtttgatggcttataatgttttctacacaagcattcctgttttaacgactgtactggacaaggatttatctgaaaagacagtgatgcaaaatccagagatattactttactgccaagctggaaggcttctcaatccaagtacctttgctggttggtttggtcgatcattgtatcatgcaatcattattttcttaataaccatccatgcatatgctaatgagaaaagcgagatggaggagctctcaatggttgcactctcaggaagcatttggttgcaggcatttgttgtgacgttggagatgaattccttcacatctgtgcaacttctggccatatggggaaacctcattgccttctatgtcctcaatttctttatcagcagtatacccacttctggaatgtacactatcatgttcggcctttgcagacaaccgtcatactggataacgctggtgttgatcagtggagttggaatgggtcctgtattggctctgaaatatttcagatatacatacagacctagcgtgatcaacattcttcagaaggccgagcgttcacgggggccaatgtacaccctgctgaatctagagtctcagttgagatcagacaaagatagtatgatggtagccggttccacagcgccagccaagaataagagctctgtttacgagccgttgctttctgactccccgatggcatccaggagatctcttgcaccagcatcttcatttgatatcttccagccagcacattctagaacatctcacccaagaaacataaaagccaattaattttttggaacaacagttaactcgtaacagtatggcataccagaatgacaaaaaaaaaaagatgtcagtcgaattagatatgttgcatatttctgttaatgatttagtagatattgcccaaaaagatataacgaaaagtcatacttaatcctttatagctgttagcaaaaatgggtagtgaccatttatgttctctatggggaataaattaatttctccaaaaaaaaaaaaaaaaaaaaaaaactcgagggagggccg

SEQ ID NO: 17869 - DNA, 415 bp, Zea mays
  Clone ID: MRT4577_11629C.1
atcctccgtggcgtggtcttgagcacctttgaacttgttctagatatgaatttatgtaatgcttaatatgtctggagcgggttagatggacaaggaacctcaacttttttatgttattacttggagaatctataaaccatttttggttttgcaaaaaaaaaaaaaaaaaaaaaaaaaaaaaaaaaaaaaaaaaaaaaaaaaaaaaaaaaaaaaaaaaaaaaaaaaaaaaaaaaaaaaaaaaaaaaaaaaaaaaaaaaaaaaaaaaaagggggggccccttccaaattaaaattagcaattttttttaaatcgtttaaacccctttttccataaataggtcctccaaaggggtgaaccaaacggccaaaaatggcttttcccgaacccaacccttccaattagttttaaatcggaa

SEQ ID NO: 17870 - DNA, 359 bp, Zea mays
  Clone ID: MRT4577_1162C.1
caaaaacacaacctaataatggtccattaaaaaaacctaatttccaatctacatttgggggttgggaaggcagacatttggcagggaaaggtccagttcccatgggaatgggaggatcaactttttttaatccgaacttttataagctaaaccaagcaaacttccagctttgttctggggcttaacctttgttggttcatctaaccttggggctggggggtcaggattcgcagtcccatgagagggtcccaacggattccgggatgacgacaactcgctgacaaggtctttttccgtatgtttaggcttatggctatctgggggctgggaagggctgctaactttgggccgcttgggtt

SEQ ID NO: 17871 - DNA, 222 bp, Zea mays
  Clone ID: MRT4577_116300C.1
ggggaattctgacatctatagatatcctgatgcctgttatcgcccaaaatattcctcctgattccactacattctataaggtcatgactcagtgtcctgggtgtggctcagtatacaccccaattcttgatgctcgtcacacaatgcattatggaaaatttttacattttcctgttcttgacatggatggaaatcttgtgactgtttttgatgttcttcaca

SEQ ID NO: 17872 - DNA, 214 bp, Zea mays
  Clone ID: MRT4577_116301C.1
gtgtacgagaacagagcacagaattcagctcacgtggattgagaagtaatccaaatccaaaaaaaggctatggaaagattcctgttgtgggccaccagcaacaagcaaccatatcatggacatatgggcgctagcctttaaggaagcgtcagaacggctttgaccagtaagggcagctggtcatgagtgtggatgtctgcctatgttaaccaag

SEQ ID NO: 17873 - DNA, 225 bp, Zea mays
  Clone ID: MRT4577_116303C.1
ccttcaatgcaacttcaaaccccttcaaaattttccccaaatttcatttcactgcccttctttttaaaacttcttaactggaaaaaccctggctttacccaatttaacccccttgcaaaaaatccccttttcccaaattggcttaataccaaaaaggcccccaccttttccctttccaaaaatttgcccaccctaattggcaaatggaaccccccttttaccggc

SEQ ID NO: 17874 - DNA, 225 bp, Zea mays
  Clone ID: MRT4577_116304C.1
atggaggagagagaaggatctgcgcatagcaaccatggaagggagccagtcgtgggagcagggcagaggccggcgccatgggaaggacctcggctgctgggcgagctgggggagcagaggagatggacgcggctggaggaagaggagcagtgcacggaggagaggagagcagggagagacgcggcttgggcgggagataaaatgctggagccgttcaccacgtag

SEQ ID NO: 17875 - DNA, 244 bp, Zea mays
  unsure (1)..(244): unsure at all n locations
  Clone ID: MRT4577_116305C.1
gtttcaaattttatcatatcggacatgtacagtctattacatgtttcttaaaaaaaaaaaaaaaaaaaaaaatagttcctgcccgggtctgtcactattaaagggcgaattttggagatatccctaacactgaattccactacaatttgcgtctatagtacccaattcgacctatgtgccaagcttttacaaatcatgggcatttgtttttctttgnaaaaattgttaaacctttatttttccc

SEQ ID NO: 17876 - DNA, 387 bp, Zea mays
  Clone ID: MRT4577_116306C.1
gggccacaaaacactagatggggtggggtgcatttttcggacaaaaaaaccagaacatgcccccccttgggttggccgagaagaaccccagggccccaggtggggtttacccatccgggggccaatagtggggcccggggagccccagggggacccctacaacataaaaccttaaaaccttccagcttttttcttttaggggacacaggaagcatgcctggatggcctttgcccccctaccttggggctttttttggggggcagcctccggttaaagaactttgcctttttaattagggcccgggaggaccccatttttttctttgcccgcccaaaaagttttgcaaaagcttttaaggtttgggttttttttggacagtttttttt

SEQ ID NO: 17877 - DNA, 468 bp, Zea mays
  unsure (1)..(468): unsure at all n locations
  Clone ID: MRT4577_116307C.1
tccganagnatgnaaatcaacaacttcaccgttggcgggcgctcctcgcgccctcagtacaaccagaccgagaagaccgagtttaacaacttcactgttgacggccgttcttcccgacctcanatacacttctgagaagnactgaaatcaacaacttcactgttgacggccgctcttcccagccccagtaccgcgataccaagacaactcaggtcaacaacttcaccgttgacacacctgttgctcgtccatctaacaagaaggacgtgagattcactgaagaaatcgtcgaaactacaaaggtcgacaacaacaagtccaagatgggttactacgacgacgacgcaggtcaatacaactctttccgcgccggtgctcacaagctcggtgatcgcatcgcccatggaggtcgtcgcgatattgagattgacattcacgagggttcttgtccctctgctgactgccttt

SEQ ID NO: 17878 - DNA, 376 bp, Zea mays
  Clone ID: MRT4577_116308C.1
aaataaaataccatttgatcccattgttattacattaaaaaataatctaaatttttttaaaaaacaaatttttacaaaaaataaactttttatcatctttataaagtggtaccttttaaaattacccggttccttccataacccgcccctttttcctaaaatatttattaaaaatttgcaaaaactttttacaaaaaaaccctttaacccaaccccctttcaaaaaaaaaaaattctgtccccccttatttattgaaaaaacgcggactctttatttctgaaatctttacaatattggaggttggtcccccttttttattaggggctaaaaaatctccattctccttggacctctggcttctttcccctttaaaaa

SEQ ID NO: 17879 - DNA, 283 bp, Zea mays
  Clone ID: MRT4577_116309C.1
gagaaaggaaaatggcgagttttaagaggacggtaattttggctgcatcttcatgaatgagttgttacattgcagtgcttctagtcgtgcccttgtacatcgccgtcgctgcctcgtgcttgcaggtttcacgctgaaacctgctccggctactgctgctggtctgtactgtacagtcgttgattgtttttgcaccaaaatgcaagatcagattctgcacccaaaaaaaaaaaaaaaaaagaaggaaggaagaagagaggaaagagaaaaaaagaaggggggg

SEQ ID NO: 17880 - DNA, 247 bp, Zea mays
  Clone ID: MRT4577_11630C.1
attggggttcctaaaaaatcagggggggtcaaaaacctcacgtattccaaccaaaacaaccaaaaaaaaaatttttttacgcccccaacacaacaaaaccaaccaaaacatttcaacccacaccataccaaaaaaaaactttttcataacacttacattttaaaacatattctcataattccttctaaaaaaaaccatttcttccgcccctataaataaaaggggaggcttcctttcaatagattcc

SEQ ID NO: 17881 - DNA, 454 bp, Zea mays
  Clone ID: MRT4577_116310C.1
tagcacccagggactgcgggtggaatcactaatgttataagggttcctttgcaaactgcgcaagcgaaggggtacgggcgaaactgagccgcccgatcagaaatctagggctcagattaaatcagtagcacatgaaccggtaagcactactggccatcagatcaagatcctacgtctacgatgaaaacaaagtcatacactcccctggccgttgatctgccaccgacggacacgatcagccgattgaatcgttcccgccctaatctaatcgcggccgcccacacaccatccaacggcctgcatggattcccccaacggagcacacccgcacggcggcgccgccccgcacgctcggcggagcacgccggcgaggctaccaatcggccgctcccaagcgccaaaccccgattcacttttcccacgcgcaattgacgactcccagacgacagcaacg

SEQ ID NO: 17882 - DNA, 1888 bp, Zea mays
  Clone ID: MRT4577_116311C.1
ccggccggggtcgcgcggacgcgtgcgcgcccgcgctagcgcgagtgggggcacccacgcacactcttctccccccagtccggaccccggaggagccaagccatggcgtccacctcctgctgcctcctccaccagtcaaccgcccgcctcggcgcgtcgccgcgcctggccgccgccccgccgcgcagcgcccagctgctcgtctgcaaggctcgtaagcaggaagccgccgcggaccagagcgacgtctcgcgccgcgccgcgctcgcgctcctcgccggcgtcacggccgccgccggcgccaaggtgggtcccgccgccgcggcatacggagaagcagccaacgtgttcggcaagcccaaggcgagcacggagtacatcgcgtacagcggcgacggcttcaagctgctgatcccgtccaagtggaaccccagcaaggagcgggagttccccgggcaggtgctccgctacgaggacaacttcgacgccaacagcaacgtgtccgtcatcatccagcccacgtcggcctcgctaacgcgccactaagcgccacccgtggcacccacgcacactcttcttccccacgagtccggaccccggaggagccaagccatggcgtccacctcctgctgcctcctccaccagtcaaccgcccgcctcggcgcgtcgccgcgcctggccgccgccccgccgcgcagcgcccagctgctcgtctgcaaggcccggaagcaggaagccgccgcggaccagagcgacgtctcgcgccgcgccgcgctcgcgcggccgctagcgccactggtggcacccacgcatgccgcttctcccccccagtccggaccccggaggagccaagccatggcgtccacctcctgctgcctcctccaccagtcaaccgcccgcctcggcgcgtcgccgcgcctggccgccgccccgccgcgcagcgcccagctgctcgtctgcaaggcccggaagcaggaagccgccgcggaccagagcgacgtctcgcgccgcgccgcgctcgcgctcctcgccggcgtcacggccgccgccggcgccaaggtgggtcccgccgccgcggcatacggagaagcagccaacgtgttcggcaagcccaaggcgagcacggagtacatcgcgtacagcggcgacggcttcaagctgctgatcccgtccaagtggaaccccagcaaggagcgggagttccccgggcaggtgctgctacgaggacaacttggacgccaacagcacactcttctcccccccagtccggaccccggaggagccaagccacatggcgtccacctcctgctgcctcctccaccagtccaccgcccgcctcggcgcgtcgccgcgcctggccgccgccccgccgcgcagcgcccagctgctcgtctgcaaggcccggaagcaggaagccgccgcggaccagagcgacgtctcgcgccgcgccgcgctcgcgctcctcgccggcgtcacggccgccgccggcgccaaggtgggtcccgccgccgcggcatacggagaagcagtctacgtgttcggcaagcccaaggcgagcacggagtacatcgcgtacagcggcgacggcttcaagctgctgatcccgtccaagtggaaccccagcaaggagcgggagttccccgggcaggtgctccgctacgaggacaacttcgacgccaacagcaacgtgtccgtcatcatccagcccacgtccaagaagaccatcgccgactacggctctcccgaggagttcctctcccaggtcgactacctgctcggcaggcaggcctaccggcggaagaccgacctccgagggcgggttccagaccgacgccgtgggccccgccaacgtcctggagagctcacccccgtgatcgaccgcaagcag

SEQ ID NO: 17883 - DNA, 396 bp, Zea mays
  Clone ID: MRT4577_116312C.1
ctcaactacgaaggtcccttttttttctcggtctggaagcgccgcagtcgctgacatggacgtgagcgtagcatgcagaaaggcgaagaaaggcgcggtcagtcgcaaggccggctggccgacgaagaagtcggtgtcgcggtcctacagggccgggctgcaattccccgttagtcgcgtctggcggtacctgaaaaagggccggtacgcgcagcgtgtacgcacgggtgcgcccgtctacctcgtcgacgttctggagtacctagcggacgaggtgcttgtgctcgacggctactcggcaagggacaacatgaagacgcgcatgataccgcgccacgtgctgctggtgatccgaaacgacgaggagctcagtaagctgctggccggcgtcaccat

SEQ ID NO: 17884 - DNA, 487 bp, Zea mays
  Clone ID: MRT4577_116313C.1
gccggccgggccggggcgctagcgcgagtggtggcacccacgcacactcttctcccccacgagtccggaccccggaggagccaagccatggcgtccacctcctgctgcctcctccaccagtcaaccgcccgcctcggcgcgtcgccgcgcctggccgccgccccgccgcgcagcgcccagctgctcgtccaccgtctccgacggcaagctctacatctgcaaggcgcaggccggcgacaagaggtggttcaagggcgccaggaagggagccgagaaggccgcctcctccttcagcgtcgcatgatgatgtaattttatttcttcgatgggatgggatgcacgcactacgtagagagcttggctaggccaggcctggctgagcacgcttgtgtgttccttcgactgtacatgagaacaaagactaaggagagctccattcccgtacaaggatcgatttcttcaaaaaaaaaaaaaaaaaaggccccta

SEQ ID NO: 17885 - DNA, 501 bp, Zea mays
  Clone ID: MRT4577_116314C.1
ggcccgctcgaaaggccggcccggtccgcggaaaaaaaaaaaaaaaaaaaaaccgccgccccgcctcccatcgttacgttagtcgtccgcccgcgctagtgtcatccacactcttgtcttctccccggccggaccggagtcaggcagccgaagcaagaaaagcaagcggctttggaagttggaatccatggcgtccaccagctcatcaccgccaccgtctccgacggcaagctctacatctgcaaggcgcaggccggcgacaagcggtggttcaagggcgccaggaagggcgtcgagaaggccgccgcctccttcagcgtcgcgtgaccgacgtaaactattttctttgatgcttttcatcagggatgcacatgcacgcaccgtgtgtacgtagagagctaggcatggcctggctcgccatgcttgttgtgtgtttctttgattgtacatgagaggacccgtttctgctgccatccaagttgtttgagaaatcttggtact

SEQ ID NO: 17886 - DNA, 736 bp, Zea mays
  Clone ID: MRT4577_116315C.1
gccggccgggtccggatcccactcttgtcttctccccgtccggaccggagtcaggcagccgaagcaagaaaagcaagcggctttggaagttggaatccatggcgtccacctcgtgcttcctccaccagtccaccgcccgcgtggccgcgccgtcgccgcgcctcgccgccccgccgcgcagcgcgcaactgttcgtctgcaaggcccagaagcagcaggccgccgcggcggagagcgacgtgtcgcgccgcgccgcgctcgcgctcctcgccggcgtcgcggccgtcggcgccaaggcgagccccgccgccgccgcctacggggaagcagccaacgtgttcggcaagaccaagaagaacacggacttcatctcctacgtcggcgacggcttcaagctgctgatcccgtccaagtggaaccccagcaaggagcgggagttccccgggcaggtgctccgctacgaggacaacttcgacgccaacagcaacgtgtccgtcatcatccagcccacctccaagaaggccgccgcctccttcagcgtcgcgtgaccgacgtaaactattgtttctttgatgcttttcatcagggatgcacatgcacgcaccgtgtgtacgtagagagctaggcatggcctggctcgccatgcttgttgtgtgtttctttgattgtacatgagaggacccgtttctgctgccatccaagttgtttgagtaaaaaaaaaaaaaaaaggccccta

SEQ ID NO: 17887 - DNA, 705 bp, Zea mays
  Clone ID: MRT4577_116316C.1
cggacgcgtgggggagaagcagccaacgtgttcggcaagcccaaggcgagcacggagtgcatcgcgtacagcggcgacggcttcaagctgctgatcccgtccaagtggaaccccagcaaggagcgggagttccccgggcaggtgctccgctacgaggacaacttcgacgccaacagcaacgtgtccgtcatcatccagcccacgtccaagaagaccatcgccgactacggctctcccgaggagttcctctcccaggtcgactacctgctcggcaggcaggcctacggatataaataagcggaggagaagaaacttacgaggattcccctagtaacggcgagcgaaccgggagcagcccagcttgagaatcgggcggcctcgccgcccgaattgtagtctggagaggcgtcctcagcgacggaccgggcccaagttctctggaaagggccgccccgccgcgcagcgcccagctgctcgtctgcaaggcccggaagcaggaagccgccgcggaccagagcgacgtctcgcgccgcgccgcgctcgcgctcctcgccggcgtcacggccgccgccggcgccaaggtgggtcccgccgccgcggcatacggagaagcagccaacgtgttcggcaagcccaaggcgagcacggagtacatcgcgtacagcggcgacggcttcagctgttgatcccgtcaagtggaacccc

SEQ ID NO: 17888 - DNA, 472 bp, Zea mays
  Clone ID: MRT4577_116317C.1
aaaggcttacaacgtaaggtggaaaccacacaacggccggttggattaaaaccggccggaaacataacacggttgggaggcacttaagggagataacagggataacagggggacacaagccccacgaccccgggccaggagagagggtaatacttggcacccttggtggcggccttacccttgttaaacttagaaccgaccttcttggagtcctttttaagcgcgggcagatacttacgagagctcggagaacacgccctcctccataccctcaccgacgtaccactgcacgaaggcgcgcttggcgtacatgaggtggaacttgtggtcaatgcgggagaagacctccacaacactggtggagttggagatcatacacacggcacgctgcaccttggccaggacaccgcctgggacgacgctgggaggctggtagttgattccgcacttgaagccagtcgggcaccagtcc

SEQ ID NO: 17889 - DNA, 1126 bp, Zea mays
  unsure (1)..(1126): unsure at all n locations
  Clone ID: MRT4577_116318C.1
gccggccggtacaaagaatggttagaggtgggttggcttctcctccccctccggttcgggttcgggttcgtgaggttctccggggttcggtttcgtgggtgagcggatcgagatggcggcgtcggatgttgagtaccgctgcttcgtcggcggcctcgcctgggccacggacgaccactcctccaccagtcaaccgcccgcctcggcgcgtcgccgcgcctggccgccgccccgccgcgcagcgcccagctgctcgtctgcaaggcccggaagcaggaagccgccgcggaccagagcgacgtctcgcgccgcgccgcgctcgcgctcctcgccggcgtcacggccgccgccggcgccaaggtgggtcccgccgccgcggcatacggagaagcagccaacgtgttcggcaagcccaaggcgagcacggagtacatcgcgtacagcggcgacggcttcaagctgctgatcccgtccaagtggaaccccagcaaggagcgggagttccccgggcaggtgctccgctacgaggacaacttcgacgccaacagcaacgtgtccgtcatcatccagcccacgtccaagaagaccatcgccgactacggctctcccgaggagttcctctnccaggtcgactacctgctcggcaggcaggcctacggcggcaagaccgactccgagccgtggccaccgccaacgtgctggagagctccacccccgtggtggacggcaagcagtactacagcatcaccgtgctgaccaggacggcggacggcgacgagggcggcaagcaccagctcatcaccgccaccgtctccgacggcaagctctacatctgtaaggcgcaggccggcgacaagtggtggttcaagggcgccaggaagggcgtcgaaaaggccgccgcctccttcagcgtcgcgtgaccgacgtaactattgtttctttgatgcttttcatcagggatgcacatgcacgcaccgtgtgtacgtagagagctaggcatggcctggctcgccatgcttgttgtgtgtttctttgattgtacatgagaggacccgtttctgctgccatccaagttgtttgagaaatcttggtactannnnnnnnnnnnnnnnnnnnnnnnnnnnnn

SEQ ID NO: 17890 - DNA, 2073 bp, Zea mays
  Clone ID: MRT4577_116319C.1
ccccccccccccccgccggggtccccgtaactggaacctcgagccggccggaactcttctcttctccccggccggaccggagtcaggcagccgaagcaagaaaagcaagcggccttggaagttggaatccatggcgtccacctcgtgcttcctccaccagtccaccgcccgcgtggccgcgtcgtcgccgcgcctcgccgccccgccgcgcagcgcgcaactgttcgtctgcaaggcccagaagcagcaggccgccgcggcggagagcgacgtgtcgcgccgcgccgcgctcgcgctcctcgccggcgtcgcggccgtcggcgccaaggcgagccccgccgccgccgcctacggggaagcagccaacgtgttcggcaagaccaagaagaacacggacttcatctcctacgtcggcgacggcttcaagctgctgatcccgtccaagtggaaccccagcaaggagcgggagttccccgggcaggtgctccgctacgaggacaacttccacgccgcggccggcccgtcgctagcgcgagtggtggcacccacgcacactcttctcccccacgagtccggaccccggaggagccggagccatgggcgtccacctcctgctgcctcctccaccagtcaaccgcccgcctcggcgcgtcgccgcgcctggccgccgccccgccgcgcagcgcccagctgctcgtctgcaaggcccggaagcaggaagccgccgcggaccagagcgacgtctcgcgccgcgccgcgctcgcgctcctcgccggcgtcacggccgccgccggcgccaaggtgggtcctgccgccgcggcatacggagaagcagccaacgtgttcggcaagcccaaggcgagcacggagtacatcgcgtacagcggcgacggcttcaagctgctgatcccgtccaagtggaaccccagcaaggagcgggagttccccgggcaggtgctccgctacgaggacaacttcgacgccaacagcaatgtgtccgtcatcatccagcccacgtccaagaagaccatcgccgactacggctctcccgaggagttcctctcccaggtcgactacctgctcggcaggcaggcctacggcggcaagaccgactccgagggcgggttcgagaccggcgccgtggccaccgccaacgtcctggagagctccacccccgtgatcgacggcaggcagggctaagcgcgagtggtggcacccacgcatactcttctcccccccagtccggaccccggaggagccaagccatggcgtccaccctcctgctgcctcctccaccagtcaaccgcccgcctcggcgcgtcgccgcgcctggccgccgccccgccgcgcagcgcccagctgctcgtctgcaaggcccggaagcaggaagccgccgcggaccagagcgacgtctcgcgccgcgccgcgctcgcgctcctcgccggcgtcacggccgccgccggcgccaaggtgggtcccgccgccgcggcatacggagaagcagccaacgtgttcggcaagcccaaggcgagcacggagtacatcgcgtacagcggcgacggcttcaagctgctgatcccgtccaagtggaaccccagcaaggagcgggagttccccgggcaggtgctccgctacgaggacaacttcgacgccaacagcaacgtgtccgtcatcatccagcccacgtccaagaagaccatcgccgactacggctctcccgaggagttcctctcccaggtcgactacctgctcggcaggcaggcctacggcggcaagaccgactccgagggcgggttcgagaccggcgccgtggccaccgccaacgtcctggagagctccacccccgtgatcgacggcaagcagtactacgccgtgtccgtgctcaccaggacggcggacggcgacgagggcggcaagcaccagctcatcgcggacaccgtctccgacggcaagctctacatctgcaaggcgcaggccggcgacaagaggtggttcaagggcgccaggaagggagtcgagaaggccgccttcctcctcagcgtcgcatgatgatgtaatgggatgcacgcacta

SEQ ID NO: 17891 - DNA, 604 bp, Zea mays
  Clone ID: MRT4577_11631C.1
gccagagctcaccagtgatgtaatgcgggacccgcgcggggaggggaaacggcagcctcaaccgcctggcagcggcggtttcttctcttcgtgaaaatcgtgatctcatctctccgtccatgggcgaaaaaacagccatcaccaggccattcacgctttgtgcttttgttagcagagcccaggcagccctgcagcccacatctagggtacaaacggaacggcggcgttttccttgtatcatttagaggaaatttttgagctgaacagtattttttttctccctctctctctctctgaaatattgctgagatttaaaggaggacgaagacaacagattcatagctgggtcttgctgttttcctgacgctgaccacagcggatctaggtggctatttcgttggtgcacaggcgttcacagaggcagagaggggagaaagttgtcaaacagattcacagactgtcaaagtgcggcttaaaccgagttcctgggctccctcactggcttcgtccacttaaacttttaacgtacacatgtagagagctgaaactccaggggtaacatgggacaggtcctcttgatttaatgaaaacagaagatcaactg

SEQ ID NO: 17892 - DNA, 2333 bp, Zea mays
  unsure (1)..(2333): unsure at all n locations
  Clone ID: MRT4577_116320C.1
gggtccctcgggccggccgggaccgccgccccgcctcccatcgttacgttagtcgtccgcccgcgctagtgccatccacactcttctcttctccccggccggaccggagtcaggcagccgaagcaagaaaagcaagcggctttggaagttgggatccatggcgtccacctcgtgcttcctccaccagtccaccgcccgcgtggccgcgccgtcgccgcgcctcgccgccccgccgcgcagcgcgcaactgttcgtctgcaaggcccagaagcagcaggccgccccggcggagagcgacgtgtcgcgccgcgccgcgctcgcgctcctcgccggcgtcgcggccgtcggcgccaaggcgagccccgccgccgccgcctacggggaagcagccaacgtgttcggcaagaccaagaagaacacggacttcatctcctacgtcggcgacggcttcaagctgctgatcccgtccaagtggaaccccagcaaggagcgggagttccccgggcaggtgctccgctacgaggacagcttcgacgccgacaggcgctagcccgagtggtggcacccacgcacactcttctccccccagtccggaccccggaggagccaagccatggcgtccacctcctgctgcctcctccaccagtccaccgcccgcctcggcgcgtcgccgcgcctggccgccgccccgccgcgcagcgcccagctgctcgtctgcaaggcccggaagcaggacgccgccgcggaccagagcgacgtctcgcgccgcgccgcgctcgcgctcctcgccggcgtcacggccgccgccggcgccaaggtgggtcccgccgccgcggcatacggagaagcagccaacgtgttcggcaagcccaaggcgagcacggagtacatcgcgtacagcggcgacggcttcaagctgctgatcccgtccaagtggaaccccagcaaggagcgggagttccccgggcaggtgctccgctacgaggacaacttcgacgccaacagcaacgtgtccgtcatcatccagcccacgtccaagaagaccatcgccgactacggctctcccgaggagttcctctcccaggtcgactacctgctcggcaggcaggcctacggcggcaagaccgactccgagggcgggttcgagaccggcgccgtggccaccgccaacgtcctggagagctccacccccgtgatcgacggcaagcagtactacgccgtgtccgtgctcaccaggacggcggacggcgacgagggcggcaagcaccagctcatcgcggccaccgtctccgacggcaagctctacatctgcaaggcgcaggccggcgacaagaggtggttcaagggcgccaggaagggagtcgagaaggccgccgcctccttcagcgtcgcatgatgcagtaatattgtttcttcgatgggatgggatgcacgcactacgtagagagcttggctaggccaggcctggctgagcacgcttgtgtgttccttcgactgtacatgagaacaaagactaagaccttgttcgtttctatcggattacacctggaattgttccagctaaggccttattcggcacaatagtatttaatacacactcggatccaatacacaaccggattcatatgaatccatcccatactccttgggcgggttcgagaccggcgccgtggccaccgccaaagtcctggagagctccacccccgtgatcgacggcaagcagtactacgccgtgtccgtgctcaccaggacggcggacggcgacgagggcggcaagcaccagctcatcgcggccaccgtctccgacggcaagctctacatctgcaaggcgcaggccggcgacaagaggtggttcaagggcgccaggaagggagtcgagaaggccgcctcctccttcagcgtcgcatgatgatgtaattttatttcttcgatgggatgggatgcacgcactacgtagagagcttggctaggccaggcctggctgagcacgcttgtgtgttccttcgactgtacatgagaacaaagactaaggagagctccattcccgtaaaaaaaaaaaaaaaaaaaaaccaaaaaaaaaaaaaaaaaaaaaaggggcggccgccccnnnnnnnnnnnttttttttttttttttttttttttttttttttttttgggaaggggctcgatcctttgaaacaactggtgacgggaatacaaggcccacaccagcgttctggggggggcttctgctgcccaaactcattaataaacgccaacttgtgtttctttgggggtaaaaacttttaacaacatgccgcccttttagggggggcgggtttttttggcccaac

SEQ ID NO: 17893 - DNA, 2155 bp, Zea mays
  Clone ID: MRT4577_116321C.1
tctgtggcgcctccgggccggccggggactcttctcttctccccggccggaccggagtcaggcagccgaagcaagaaaagcaagcggctttggaagttgggatccatggcgtccacctcgtgcttcctccaccagtccaccgcccgcgtggccgcgccgtcgccgcgcctcgccgccccgccgcgcagcgcgcaactgttcgtctgcaaggcccagaagcagcaggccgccgcggcggagagcgacgtgtcgcgccgcgccgcgctcgcgctcctcgccggcgtcgcggccgtcggcgccaaggcgagccccgccgccgccgcctacggggaagcagccaacgtgttcggcaagaccaagaagaacacggacttcatctcctacgtcggcgacggcttcaagctgctgatcccgtccaagtggaaccccagcaaggagcgggagttccccgggcaggtgctccgctacgaggacaacttcgacgccaacagcaacgtgtccgtcatcatccagcccacctccaagaaggccatcaccgagtacggctcccccgaggagttcctctcgcaggtcgactacctgctcggcaagcaggcctacggcggcaagaccgactccgagggcgggttcgagaccgacgccgtggccaccgccaacgtgctggagagctccacccccgtggtggacggcaagcagtactacagcatcaccgtgctgaccaggacggcggacggcgacgagggcggcaagcaccagctcatcaccgccaccgtctccgacggcaagctctacatctgtaaggcgcaggccggcgacaagcggtggttcaagggcgccaggaagggcgtcgagacggccgcggcctccttcagcgtcgcacgaccgacgtaactattggcggcgtgggcttcaagctgctgatcccgtccaagtggaaccccagcaaggagcgggagttccccgggcaggtgctccgctacgaggacaacttcgacgccaacagcaacgtgtccgtcatcatccagcccacgtccaagaagaccatcgccgactacggctctcccgaggagttcctctcccaggtcgactacctgctcggcaggcaggcctacggcggcaagaccgactccgagggcgggttcgagaccggcgccgtggccaccgccaacgtcctggagagctccacccccgtgatcgacggcaagcagtactacgccgtgtccgtgctcaccaggacggcggacggcgacgagggcggcaagcaccagctcatcgcggccaccgtctccgacggcaagctctacatctgcaaggcgcaggccggcgacaagaggtggttcaagggcgccaggaagggagtcgagaaggccgcctcctccttcagcgtcgcatgatgatgtaattttatttcttcgatgggatgggatgcacgcactacgtagagagcttggctaggccaggcctggctgagcacgcttgtgtgttccttcgactgtacatgagaacaaagactaaggagagctccattcccgtacaaggaacacacaagcgtgctcagccaggcctggcctagccaagcacgcttgtgtgttccttcgactgtacatgagaacaaagactaaggagagctccattcccgtacaaggatcgatttcttcagtctccaagggcgggtttaagaccggccccgtgcccaccgccaacgtcttggagagctccacccccgtgatcgacgccaaacagtactaccccgtgtccgtgctcaccaggacggcggacggcgacaagggcggcaagcaccagctcattgcggcccccgtttccgacggcaagctttacatttgcaaggcgcaggccggcgacaaaaggtggttcaagggccccaggaagggagtcgaaaaggccccctcctccttcagcgtcgcatgataatgtaattttatttcttcgatgggatgggatgcaccccctacgtaaaaagcttggctaggccaggcccccctcagcacgcttgtgtgttccttcgcctgtacatgagaacaaagactaaggagagctccattcccgtacaaggatcgattttttcagtcaaaaaaaaaaaaaaaaaaaaaaaaaaaaaaaaaaaaaaaaaaaaaaaaaaaaaaaccccccaccc

SEQ ID NO: 17894 - DNA, 407 bp, Zea mays
  Clone ID: MRT4577_116322C.1
gcgaaatgctcgcaagctagtatagcttctcttatttcaccgcacctgtcaccatcgggggcttgggcatgtgaatacttgagcttgtagcgctaccggatccagcaggcaataacacgcggcatcttatctgtatcaccgtcgttactccaacaatcatcagccctattacttcattgaccttaggtgcatttattggcacagcagatctgggcccaccaacgacatcagcttgtgctagaaaacgtcgctgcctactatcagcaacagaagccttttcaattctaccaattagctgcattgaactatgcttactatttgcgacagcaccaactatgattcagccagctatatgctggctacccccatcaatgactgacattcaaccaactgtcatcattgaactc

SEQ ID NO: 17895 - DNA, 547 bp, Zea mays
  Clone ID: MRT4577_116323C.1
cacggccaaaaacaaaccgaaaaatgaactaaaacagccacaatatttcctcccctcccctacccaccgccgccgccgccgccaccttcgctgggaatggtgccaccgcccaccatccagccaccatgcatcatcatcatcatcataccgtcaccaagaagcccaccagcgcgagcacgaggagtgcgggcgcggacacgccagccgcgggcacagcagcgttaggcgacttggagggcgacatggacgacgccgcgccgctgtcgctgcctgcgccggacgcggacgggccgccggcctcgggcgcgggggaggcaggcgagggggcctcggccgcggcggccttgccggcgaggacgagcttgctcttggcgctgaggttatccgcctggaacgcgtgcttgtcgggtgcgccgccggtggatgacgcgccgacctgccacacctggttcacggccttcatccccttgcgcagctgcagcttgccgtacacccggatctttcccccactcccggcggcgtccgcggcgaggtcggtggccgggaa

SEQ ID NO: 17896 - DNA, 354 bp, Zea mays
  Clone ID: MRT4577_116324C.1
ccgggcgaaacgggccgttgccaaaaaaaaaagtagattgggggcatccaacgggcaaggttggccataaaaaaggggtggtttcccgggtttttcatcagcccaaataaaaacgggcggcaccccccctaaaaaccgggatcccaaaaccctgggccccctctttaaactttttaaaacagggggcttttttaagctagggctaccccccaaaatgacctttgctggaagggctccctggcccctagaaaataactttgccggggcgggttccccacagcctttactttggaatcattggctcatgggcagcatcgccctaagtttcaattgggggttgctttggagctgggg

SEQ ID NO: 17897 - DNA, 500 bp, Zea mays
  unsure (1)..(500): unsure at all n locations
  Clone ID: MRT4577_116325C.1
nattccgtcgtcgtcgtagcagcttctgcttgctctggggggaaggagagatagagagcgagagagatctactagagaggctagctaggtggtcctcgaacgacagatgttggcggtgttcatcggacaggtggtggaggtgccgccggagctggtggcggaggacacccggacgccgctgtccaatacgaatgcgtggctagctggtggcgcgcttcctgtactactccgatccgggcgctgtctcgcacttttgtcagaccaccgcttactggcctacttgcacgccgtccaagagctgcttcgacccatgtctgtcgcggtgaacgacaaggagttgcttctgtgccggggtcatctgcccacccttgggcggctgatgcatgattgccggttggccactaaggtggccatcttggctcttacggtgttctatgcctacttgaccctgagctgcctcccgccctacccggccaggttcgtgcttggcccgctcaccg

SEQ ID NO: 17898 - DNA, 318 bp, Zea mays
  Clone ID: MRT4577_116326C.1
ggggcattgacagcatactgggcattgacaaaaaagggttgttccaaaatacacaaaatttttttttgggggccaaaaaatcacacctttttttggctcccaaacaaataatacatcaactcccgggctggcattttttaccccggggtttaacaaagggaatgggaataataataagtcccaaatttataattggcgagcgattgggccatcataaaagcaggcattttgtacatacatatatagggggggggggttctcaaaatatgaaaaccacactttcttggaccccggacttttggtttttggccacccatt

SEQ ID NO: 17899 - DNA, 290 bp, Zea mays
  unsure (1)..(290): unsure at all n locations
  Clone ID: MRT4577_116327C.1
agttatcgagccacgagtatttcgtccatccctagtggtaggccggcaaggtcggctggtggagacctcgagtcgagtcgaccatggtggcgcgcgggcagggcgggacagggcggaggaggaggccgtggctcgttgggagagctagaaggatgcgtagatcgtcttcgtgttcaaggnttttgtttttttttttttttctctgatctaatttatttttttattttatcttatcttttatttttttttaatatgttactttcttttttatttttattattatctatttt

SEQ ID NO: 17900 - DNA, 411 bp, Zea mays
  Clone ID: MRT4577_116328C.1
gggagggcgcgtccgcggacgcgtgggcggacgcgtgggctctgacgaggactaattccagcatctctcgccgaggcggagcggccggtacgtgctggccgcgcgcctctcgagcgacaaggacgggctatgccgcgcggtctcgcgcgcgccgatcaggcccaacgtaacgtaccgggtggccgggtgggtcggcctgggcgccgccgtggagggctcccacgccgttcacgtcgaggtccgcgtcgacggtggtggccgcccggtcggtggcggcgtggctgtggtcgagtcggggaagtggggccagatcaagggctcgttccgtgtcgacggcgatgagccaccgcgccacgccaaggtctaccttcacgggccggcggcaggggtggacctcaagggcacgggcat

SEQ ID NO: 17901 - DNA, 160 bp, Zea mays
  Clone ID: MRT4577_116329C.1
tggaccgtagtacaagctgtttttttttttttgtattcttttagaggttcctttttgctctataatgagttgttttacaattgattggtggttgttttacatcagcatgactgggaaagtccttaaggggggggggggggtatccttgtgaaacagtgtt

SEQ ID NO: 17902 - DNA, 411 bp, Zea mays
  Clone ID: MRT4577_11632C.1
gcgagggggaagttccgaaaagggcagtaaacgctgccacaatactgtccataaaagagaaaccgtgtaacagaaacttcatgatgggccacagggcaaacactaccgactgtattgataccgggccttacacaagcatgcaggaactgagctcggatcaaactatacatggcctatttggggcgctacatgccatcgctcttgacctgagatgacgctacgaggaggaagcataatgctctattcttatgaggcatggcaggctatcaccctcgaacataaggtgaaacgcccaacctagctcttagaagggcacgctatgctgagattaactttgctactcaaaacaccttcttcatgtgcatacggaccacacaggtcaggtcatgtactgatctagtggctgaccaa

SEQ ID NO: 17903 - DNA, 875 bp, Zea mays
  unsure (1)..(875): unsure at all n locations
  Clone ID: MRT4577_116330C.1
ggcgtacctgcccgggacgccgaccgggaccacccggcgtgcaacccgttcgggcccaacggacggcgcctcgcggggctgcccttccccaggagcctgatcatcgtgtcgggcctggacctcacctgcgaccggcagctggcctacgccgacggcctccgggaggacggacaccatgtgaagctcgtgtaccgcgagaaggccaccgtgggcttctacctgctgcccaacacgaaccactaccacgaggtcatggaggagatagccgacttcctcagggctaacctctagtacatacacagctagccgctgatcgttggtggtggtggtgatggtcgtcgtcgtcgtctccacggaaaacttcactcgtttttatagcaagacaagaagatggtaagcctgactttacagtcgttgtaccgatctgcttgctctcttccttgtgctgctgtccatggcaaggcaagtggtgcgctcaaaaaggacaggcaggcagctgcctccccccatgttgtgatgacaaaactctagtagctaggaaaggaatcacggtgaccttttgtttcattcgtcgtggtcgggtcaagtctcacgttccgctgatcacaaagctcgatggtctgcggcggcctgcggcgcccccccccccccccccccccttggttgatggagagaagcctatttatttatttcgccttcaatcgcgcgcccccctttgggccgggctccggagggggaattcatcgtctaacattctacagtgtgttgtacagtacagtggtgggtggactggcactggcctttttttgttgctgtgttcgatgtactattactggtagtttcgcacactctatgaatcgtgttattgttattna

SEQ ID NO: 17904 - DNA, 292 bp, Zea mays
  Clone ID: MRT4577_116331C.1
caaataaaatatgggccatacggattttatatttaacggggacttgtcaaatttacaaattccggggaagtatcaaccggggatgcattatttctgtgaagacgtataagacctaccaaatgctttaaagggccacgaaaaatgaacattgtaccagaaagagacatccggtcctgatgggtcttagggacattgggcgttgctccccgggcctccgtaacagaagtagcttccccagatacatgtattgcctgcctggatatagtagcacccaggatggtccgctaggagt

SEQ ID NO: 17905 - DNA, 733 bp, Zea mays
  unsure (1)..(733): unsure at all n locations
  Clone ID: MRT4577_116332C.1
ggccggccgggaggtncggtacattaccgaaggcccctgcaagtgcaagttacacgctcacagcatccgtgtcggttccggcctccgagggactcgctcccgtcggggacggatatatatccatcatggaggcggcggcggcatcttctctgtggggcggcctcaactccggcatcatgctgagcctcctggccgtggtgtgggccatgctgtggcaggcgctgcagggcctccagctgcagcagtacttcggacgccactcccgccgcctgtcgcgccgcctcgcggccatcctggacccggacctcaccgtcaccgtctccgagtaccacagtggtggcatgccccgaagctatacattcaaggaaagcaaggtgaacctgaatcgtgccgcgcgggacgacagcacagaagagctgcacccatacgtgcacaatgacaacgacaacgatcaaaatcctgatgatgaagaacggagacaacaaagagtatcatcccattgaaggtttacccgcgtttaacaaagcaacagcagagctattgcttggagctgataaccctgttattaatcaaggactggttgctacacttcagtctctctcgggcactggatcactgcgtctcgccgcagcattcatacaaagatactttcctgaagctaaagtgctgatatcgtcgcctacctggggtaaccacaagaatatcttcaataatgctagggtaccttgcccag

SEQ ID NO: 17906 - DNA, 364 bp, Zea mays
  Clone ID: MRT4577_116333C.1
acccacgcttcgcccactcattcgtcacaacatcttcaacaacttgtgctaggaaaccttgctagcgactttcaacatcattaataactttcattcaaccaactggctgtattgaactctgctgcttatttgtaacaaccactaccattctttcagcttgctgctgcctacccccagtaattttttccattcaaccaacttgcagtattgaactttgctgtttatttacaacaggaacaactaccaccattcaatcaactagcttatttgagccctattgccttattgacacagcaacagttggtgccgttcctaccctgcacacatcacccaaagcagatcccccttttacaactgcaacaat

SEQ ID NO: 17907 - DNA, 354 bp, Zea mays
  Clone ID: MRT4577_116334C.1
agcgtacgcatgcgccgagacatcagcacacgcgtccacgtacacagtcaactggacacgacaagcttgcataagtaccagtgatgactgcgctcgtcaaggttgctgatctagccgtgatgatcaccggcgccgccgtcaccgtgatctccgtggggataatcggtctcgccaggaggtccatctgctgaatgaagatggccgtcgcaacggcgttggtgggcacgatccgcaagcacagcgtagacgttgtggtggacaactacggcaacacgagcgtctagtttgacctcgacgagatcggaacgaccatcggatagtgggagctctagagctcggacgtccacacgttct

SEQ ID NO: 17908 - DNA, 379 bp, Zea mays
  Clone ID: MRT4577_116336C.1
aagaccgtcctcaagacgctgcgcaactccaagggaaagctgatcatcatcgcaaacaactgccctccacttaggaagtctgagattgagtactacgccatgctggccaaagttagtgtgcaccatttccacggaaacaatgttgatcttggcactgcctgcggcaagtactacagggtgtgctgccttagtatcatcgacccattgcagctgcttcgcctttctcaagatgagatgagatgtagcgctccggccctatgtccgtttcctttttttatcttttagctatgtaattttgctaccatgtgtccatctaccatactgatagtacctcttattatggctgctatgcaaggcatatccatggttttgtttgagg

SEQ ID NO: 17909 - DNA, 681 bp, Zea mays
  unsure (1)..(681): unsure at all n locations
  Clone ID: MRT4577_116337C.1
aagtaaaattttcatgagtttttggcttcttctattttttttgtctgtcctattttttgcagactctggtcttcccataaatgtccaagttattgagtccagcaattagtgccacacttaagtataatgataaaaatacaagaaaataaatataaaccaaatgtcatgacttggctatacatacttgatgtacttcaaaaaggaccactcttctttgatttctccatcaaagtacagaatcaagtgtagtgcttaaaaagaggggctacggtattagattgatcaagaatctggatttacagttgaagcctatggaggattagtgagtagaagcatcaacctgtaaaaatggactaaacacctgttaccagcagctgatcaagctcggtttctagctccgttaactcaacctgattttcatttctgcattgtagcaactgcctccttagatctcggaccagctcgtttaacttctgaattttcttttcttgaaatagaattttctttacttgtacagattctttgccttgagggatatgttgttgctctttatctgaaagaatcagaggacgactactagtctcactttcattctcaacttgttcattccactcaaactgagaagtcacacantgaacataagaacaaacanaagcacccacgatctcgtcattttgcagg

SEQ ID NO: 17910 - DNA, 596 bp, Zea mays
  Clone ID: MRT4577_116338C.1
gagccgcccatttgcgccgccgcagcccgcagtcgcttgcgcgcagcagcacttcgcaccgccgccccatcccatcgccgccagtgtctgctcgatccgatggctcccacgaagaagtcgaagaagagcacagagagcatcaacaacaagctgcagctggtgatgaagagcggcaagtacaccctgggctacaagaccgtcctcaagacgctgcgcaactccaaacggaaacaatgttgatcttggcactgcctgcggcaagtactacagggtgtgctgcctcagtatcatcgacccaggtgactcggacatcatcagtaccacccctggcacccagtgagccagccccggcacccattgcagctgcttcgcctttctcaaaatgagatgagatgtagcgctccggccctatgtccgtttccttttttatcttttagctatgtaattttgctaccatgtgtccatctaccatactgatagtacctcttattatggctgctatgcaaggcatatccatggttttgtttgatgagatgattgtacttgttctcttgttgatgttgatcggatcaggtcaatcgatgggctgcttggtt

SEQ ID NO: 17911 - DNA, 285 bp, Zea mays
  unsure (1)..(285): unsure at all n locations
  Clone ID: MRT4577_116339C.1
acacactcacctacttactctaccatttgatttctctcctagaggacccaacaatcacggccgtcctttttacacattatctacccctacctcctccacctccaactaccctnttcctccttcatcctcacccaaacctcccatcatccatacccccacttcctctccttctctacctattccctcactccctacagatccataacctaacctacatcatctaaaccctcatatttccaacttcattcacatctctacatttctaaaccacaccctctcatttta

SEQ ID NO: 17912 - DNA, 4771 bp, Zea mays
  Clone ID: MRT4577_11633C.1
atgtttctctgaaacgaaccaaacagacaccgtagatccgagcgctcctccgtcctcccgggccacggcgatcatcaccgccgctgcgccacccatatccacagcagagccgctcgccctatagcttcacctcggccgcgcgtggggcggccatggaggactacccggaggagctgcggacgccgccggtgtcgctagtgtccatcgtggggtgcccagagcttcacccctcgatctcgacggcactcagctcccagcagcctcccatgaacacactggccctcccggacttcgccaaggcctctattctggcccgcagcgttaagccccgcgaccctctcgcaccgccgcaaccccctgcgggaatcctcaagaaggactggctacttaagcaccgcacccgcgtcccggccgccgtcgccgcgctgttccgtgccgaccaggtctccggcgaccccgcccagtggctccaggcctgctccgatctcgaaaacctcaagtctgcaattcaggggaaaaacactaaatcagtggtggtccttgtgcaggctcaagctaatgatgagctgagtgaggatgtaattgttgccctgagaaaacgtgctgaaatcgattccaagcacttggttgtgctagttgagcacgatgaagcagaatggaacagatctctgaacaaattgaagaatgtctttgtggagttatgtgcagcattctataaagaggaagggcgaaggataaaggctcgcattgagaaaaagaactttgcttctgttgagctgagcatccggtactgtttcaaggttgctatttatgcggagttcagaagggattggccagaagcattgaagttctatgaggaaggtgttcgtgttttgcgtgagatgattggaacttcgacaaggttgcctccaacccaacgcctggttgagataaaagcagttgccgagcaatttcactttaagatatcgaccttgctacttcatgctgggaaagcggtagaagcaatcacatggttccgtaagcatatcagaagctatgcacgggttcttggaacaccagaagttgcttttcttcactgggaatggtttagccggcagttcctcgtctttggtgagctgatagaaacaacatctacaactattccagatacattatctcctagatttggcactgcagactacacattgactgagtgggaatttcagccagcatactactatcagttagcggcaacttacttgagggagaagaggtatgccatcgaatgctcgtcatcaatggctaaccttacaacagaagttaatggagtacctgagtcagtaatgccttctgtgtatgttggccaatatgtgcgcttgtttgagcaaggagatacagttagtctactacccctttctgatactgaatacaccagctatgctttgtcagaagctgaaaggtttcaagattcttatgagataatagcattgttcagaaaagcttatgaatcatttcagagcctaggtgctacaagaatggcttctgcctgtagcagtggaatggccatagaatattacgcagctggtgattttagcaacgcaaaacagctttttgatagtgttgctggtctataccgtcaagagggttggaccagtttgctctgggagaacctaggatacttgagagagtgctcaatgaaacttaattctcccaaggattttatcagctattccctagagatggctgcattaccattattttctggtagtggagaggaaaatcgagtaaaacaaaattaagagtgggcctgcaggttcccctaccatttccaggagagataatattcagcaggaagttattaatgttttggaaagaaatcagtcatcaaagggaacatatgatggatttaataatgcgatagaagaagttactcaccttgatattgatcagataagtccgctaagaatggtgcttactgcatctgttgcttttcatgatcaatctgtaaaacctggctcacctctgcttgtcagtgtgtcactcttatctcatcttccttctccagttgtggttgatcagttggaggttcagttcaatcaatctgactctaacttttcgatgcatagtgcacaggaagactcactcccttcatattcaaatttgcatggccaagttattcaagatacttcttctcttactctcttcaccaatagatggatgcggttgacacatgaagtaaaatcaggaaagagtggaaagctagaatgtttgtctgtgaaggcgacaataagcaaacaccttgtgatttgctgccatgctgaaagccctgcttccatggaagacttcccattatggaaatttgagaaccaagtggagacactgcccacaaaggacaccactcttgccttttctggacagaaacttattcaagttgacgagccagatgctcaagttgaccttgtcttaaattctgctggccctgctttagttggagagttatttactttaccagtgatcatagagtcaaaaggacatgcagtccattctggtgaactgaaaattaacctcattgatgctagaggtggtggtctgttgttgagtccgagggaagcagaagattctgaaagtcatcatgttgaacttcttggtgtctcaactgtgtctgaggataaagagtcaaaggaagaggctgatagcataagaaagatccagtattcatttggggttgtatctgttcccacattgagtgtgggtgattcctggtcatgcaaattagaaatcaaatggcatcgagcaaaatcagtcatgctttatgtttcacttggttactccctaggctcaagtgaagaagaagcattgcaccggcttaacgtccatagaagcttgcaaattgaagggcagatccccttattagttagtcatcagtttttgagatcatttaggcgagaaccgttgttgctatcagggatcaggtccttaggaagtgatgataaaaaatgttctcttgctatgaatgagtctaacatgctaattgtgactgcaagaaactgcactgaagtgcctttgtgtttgcattcaatgaccattcaacctgatggtgattcagagcagctgtgttcagtgcaacagatcagtggaatttccaatcgtcatgcaattgttgctcctagggaggaatataaaggaatattttcggtcaatccacgggctatcagtacaaacttcagactaggtgaaatttgcctgaattggtcaagagattcaagcctcggtgaggatcaagataggcttattatcatgaaagtacagttacctgaggtcaacattgaggagccgccgcttgttgtgggcatggagtgccctccctatgcaatcctcggcatccctttcactatctatgtgaagattcacaattcaacgtctttgcttcaggaaatcaagtactcccttgttgattctcagaatttcgttttttctggtgctcacaatcatgctgctttcattctaccgaaatcagagcacactgttagtcataagtttgtaccgcttggttctggctctcagcagttgccaaggatcacagtaacttcagtgcggtattctgctgcattgactccttcagcctcagcagcgactgtctttgtgtatcccagtgagcctaaattcaacttggaaactagccattcaacatccgatgagatcgtgagttgagacctaagcagcctgaagtctcccctctcctgacacttagctcgacccgggctgcatgtgaggtaaggtatgctactggaaagaccaccagcttgacatttcatgttgattgttgaagaaacgaatcagattcctgtcggcgagaaggtcgctgtgcaaaagttttggcattatatttcgaggtttcgattttgtagcgcttctcgattaaccacatatgtgtaacttatgattacttcattgtttttggttcaatggtgcaacatacacaggaagataggctcttgtaaattaccatcccaccagtaaagtgggggaacaaaccagccccatgtcagtttttactctttgatacttgccaaaccaatagatggatgcggttgacacatgaagcaaaatcaggacagagtggaaaactagaatgtttgtctgtgaaggcgacaataaaaaaaatgccttgtgatttgctgccacgctgaaagccctgcttccatggaagacttcccattatggaaatttgagaaccaagtggagacattgcccacaagggaccctctgctcttgccttttctggacagaaacttattcaagttgaagagccagatgctcaagttgaccttgtcttaaattctgctggcccagctttagttggagaattatttactgtaccggtgagcatagagtcaaaagagcatgcagtccattctggtgagctgaaaattaacctcgttgatgccagaggtggtggtatgttgttgagtccaagggaagcggaagattctgaaagtcaccatgttgaacttcttggtgtctcaactgtgtccgaggacaaaaagtcgaaggaagaggccgatagcataagaaatatccagtattcatttggggttatatctgttcccacattgggtgtgggtgattcctggtcgtgcaaactagaaatcaaacggcatcgaggcaaaatcagtcatgctttatgtttcacttatagtgtgtttggtttgaggaataaagtgattcatcttcttctcacccctcacttttttatttggtttgtggaaaataatgggttgatccctccccc

SEQ ID NO: 17913 - DNA, 655 bp, Zea mays
  Clone ID: MRT4577_116340C.1
cgttccttgaccgagtaaatcctctctcctcctcccgactctcaattgcttcaaggtttcaagcttcatgctttgtcggccccggcccgcccccctatggctcagccaactgctggagtggtagtggttgcttcctctctcttctcacgtcaccatgatcgataagactagctagaatataggtggctggcagtggcagtggcagtggcagcgctatcctatatagtgccccccggccggtgtgctcgcctcgggagctagccttggaagaagaagcagagagcagagacgccgttgcgtagagggaggaggagtgcttcttcgttcgtcgttgcccaaagcagcagcagtcacttggaattggaccagagcggcgccgagcgctgccggccggccggccgacctctgtttgtagcggcggcagcaccagctctcaactgctcaagcaaaccaattaaagcagccagcagtctgtcacactcacacacacaggcggaaccgaaccggccaatgtattcttcgtcgccggcctgggagaagcgcgtgagcagccaagagcaggagccactcttttgcaattgcagctgcggcaggaggtttcacaggccggcggtcatctgcaggacgccgcactgatggcgacggcggtctcctg

SEQ ID NO: 17914 - DNA, 735 bp, Zea mays
  Clone ID: MRT4577_116341C.1
cttccacttcggggtgaattttcctgtgatgttgattggtctcccgttggtttcgatctatgcagaagaagagcacagagagcatcaacaacaagctgcagctggtgatgaagagcggcaagtacaccctgggctacaagaccgtcctcaagacgctgcgcaactccaagggaaagctgatcatcatcgcaaacaactgccctccacttaggaagtctgagattgagtactacgccatgctggccaaagttagtgtgcaccatttccacggaaacaatgttgatcttggcactgcctgcggcaagtactacagggtgtgctgccccagtatcatcgacccaggtgactcggacatcatcagtaccacccctggcccccagtgagccagccccggcacccattgcagctgctttgcctttttcaaaatgagatgagatgtagcgctccggccctatgtccgtttcccttttttatcttttagcaaagtaattttgctcccccgtgtccatctcccaaactgatagtacctcttattatggctgctatgcaaggcatatccatggttttgttttataaaaaggttgtacttgttctcttgttgatgttgatcggatcaggtccatccatgcgctgatgggctgcttggttaaaaaaaaaaaaaaaaaaaaaaaaaaaaaaaaaaaaaaaaaaaaaaaaaaaaaaaaaaaaaaaaaactcgagaagggggcccggtac

SEQ ID NO: 17915 - DNA, 825 bp, Zea mays
  Clone ID: MRT4577_116342C.1
aggatggaatatttgctaactgattccttgatgtggttatgttaatacaccaaaaatgtccttttgtttgagtgacggggtcttctcagcatgaataatactggcaaaatgtattactagtttcacattttccagaacctttaatgctgttgagtccttaagattagcttgctaatttttatgtggctttctgtaagcgttgtgttaacattgtgcaaacgctgttgttttggcacctgggaacgcttgagaaaaatgcagtgttggctttcgagcacacttgattttgagctcttacaacctaatgtctctgttcaggaaagctgatcatcatcgcaaacaactgtccctccacttaggaagtttgagattgagtactacgccatgccggccgggtagtgtgcaccattgcatttccacggaaacaatgttgatcttggcactgcctgcggcaagtactacagggtgtgctgcctcagtatcatcgacccaggtgactcggacatcatcagtaccacccctggcacccagtgagccagccccggcacccattgcagctgcttcgcctttctcaagatgagatgagatgtagcgctccggccctatgtccgtttcctttttttatcttttagctatgtaattttgctaccatgtgtccatctaccatactgatagtacctcttattatggctgctatgcaaggcatatccatggttttgtttgatgagatggttgtacttgttctcttgttgatgttgatcggatcaggtcaatcgatgcgctgatgggctgcttggtaaaaaaaaaaaaaaaaaatttgcggcc

SEQ ID NO: 17916 - DNA, 274 bp, Zea mays
  Clone ID: MRT4577_116343C.1
atctgaaagggccaatcacctcatccttgacccaacgggggggtattggaagaaagtcctggggaaccacccaagcagacttgccctcctccaaaagagattacgagcaacccaggttataatgctcgagggtcctgaggagtcggcgagataatcgaagcataatgtgctccttcgctcttgatgattgaaagagcctagatttcggacatctagatgggcgacaagacaggggaaaccgttgccccttaccctcagacgctgctggtaattg

SEQ ID NO: 17917 - DNA, 719 bp, Zea mays
  Clone ID: MRT4577_116344C.1
gcagacccactcactccttctacagctgcctaactgcaccagaccgccacaccacctcaccccgactgctagacacaatggccaccgacctaggaagcccccgtccgccgcccttcttcttctcgccgacatagctccgaagtcgaggcaggagcccaagctcgtggccttgtctgcgcgaaaggatgtgcatcatagggccgtagcgacaccatgagggaagagctgcaacgcgcatgccacctacatcgtgaaggtgattgcacacaagcaagggtacgcgaagatgcaaggaccctacaattcggacatcgtgcatcatctcgacgataacggcatccaccggtcctacgcctatcgcacgggtactggctcctgcagcaccaacaatgtcggctccggcttcgtgaaccaataccaacatagcaacctctacgacatccagaacaccgccgagagtgatgctcaccggccacacttaccctgacaatgcacaggatgatcgagacccacaaggactacgagatcaccaagctcgtacataccttatcgaggatgcatgatgtatctctagtacgtcgaacgcatacgcgcaagacattcactaccaagaacggcacagaatgtcagctcaggcacactactatccaacggatatgtgacacccttgacccctccgaggatacgtcgtacaatcactgacaagaaggagaggataa

SEQ ID NO: 17918 - DNA, 1377 bp, Zea mays
  unsure (1)..(1377): unsure at all n locations
  Clone ID: MRT4577_116345C.1
cctcgaggccggccgggtcattgggtacctcgaggccggccgggggagccgcccatttgcgccgccgcagcccgcagtcgcttgcgcgcagcagcacttcgcaccgccgccccatcccatcgccgccagtgtctgctcgatccgatggctcccacgaagaagtcgaagaagagcacagagagcatcaacaacaagctgcagctggtgatgaagagcggcaagtacaccctgggctacaagaccgtcctcaagacgctgcgcaactccaagggaaagctgatcatcatcgcaaacaactgccctccacttaggaagtctgagattgagtactacgccatgctggccaaagttagcgtgcaccatttccacggaaacaatgttgatcttggcactgcctgcggcaagtactacagggtgtgctgcctcagtatcatcgacccaggtgactcggacatcatcagtaccacccctggcacccagtgagccagccccggcacccattgcagctgcttcgcctttctcaaaatgagatgagatgtagcgctccggccctatgtccgtttccttttttatcttttagctatgtaattttgctaccatgtgtccatctaccatactgatagtacctcttattatggctgctatgcaaggcatatccatggttttgtttgatgagatggttgtacttgttctcttgttgatgttgatcggatcaggtcaatcgatgcgctgatgggctgcttggttacgctgtttgtctttgttacgaatcgaaaaaaaaaaaatcgattccatttctttttctaagcgttgcccttccctttccctctgatagaatcgaatgacattgagccgtatgctcgtatggatttgtacgagtgagggtatataatttatatctgtcgttatgaaatgtatgggcttatgttttcgtggattgcggtacttatcgatgtatgatgatctttgatccttttacgatatttgaaagtcatttgatgtatgatgatcttatggtcctttgcgatttgtgaaggccatgcgttctttggttagtggcaaatgttagtttcttccagctaaatatgttaagaaatatgctatatttttggtcggtgtagaaattaacttgtagagtgtacccgcagtttcgttttaagtccactgtgaggctttagaatttgaacatcgttttgtctaatgggactgaagtttgcctctctggcttctttttatccctgctttagagatgaatacagtaccctagaacgatgccagcttttcatgatgaagtcctctttcatttcttcatttatggaggacagatggaggtggcaacaatgtcgttttcacgtttttagtanggttattttcttt

SEQ ID NO: 17919 - DNA, 593 bp, Zea mays
  unsure (1)..(593): unsure at all n locations
  Clone ID: MRT4577_116346C.1
naannaaaaaaaaaaaaaaaaaaaaaaaaaaaaaaaaaaaaaaaaaaaaaaaaaaaaaaaaaaaaaaaaaaaaaaaaaaaaaaaaaaaaaaaaaaaaaccccggcccacccgaaaaaaaacaaaaggtttcaccctcctcctccagggaaggccgtcgggggtggggggggtaatttcccctccttccttgggccggcccggcccggcccagggaaaaacaatttctcgaaactccttttggaactcctcgtctcaaaggcgggaaaaaataaaagagtttcagtttccaaagggggaaaaaggggggggaaaacacaaaggggggagaagggaagggccacaagggaatggccaagttggaaggaacccaaaaaaacatgaaaggggggggccttggggttccgccgccagaaaaaaccggaagaaggagcacgggggggaggttccgggacaaaatccctgaaaaaaaacggggttctcgacccctctcggaattatccagggccactcgaggttgatcccggggttccgggaggaggtctctctgaaaatcctcgcgaggatgccgcgaaggggtaacctcaaggccaaa

SEQ ID NO: 17920 - DNA, 769 bp, Zea mays
  Clone ID: MRT4577_116347C.1
cattgggaccgtcgacgccgtccaggagtctgcatatttaactttgatatccatttcctgcatctcgcggtatccactacctctagagcggccgtcgtcctacggggcttttttttttttttttttaactaaaacacagatacatttcattctgctaccattgttgcaatacacacaaaatcggacagataactttgatcaaaacagccttatagcacagatcccatacgacctcaaaccctatcagctgctatacatagcaccaccgacgcgcacggagaccagtaaccaaagatgccgccgtcagcggagattgttggcggatcgatcttagccgccgaaaccaaaaaggaagcactcctgacgcttgaatgcatatacgacagccatggcgcagacggtcttgttccctgcgtgctctcggtgtaggtgactgccttgaggatgacgttctctaggaagatcttgtatcacgccgcgggtctcctcgtagatgaacccggagatgtccttcatgccgcccctgcgcgtcagcctccggatagccggattcatgatgccctgaatgttgtggcggagcacctatgaggtgggggttcgctccaaccttgactacagccttgccttgcttgccgatcctcgacatgaatgacatggaatagctcgaagctaataggatattgacaagatcttctcttccggattgaagacccatgctctgaccgaggatgctctggcacatgctctgatggacataagcttcaactga

SEQ ID NO: 17921 - DNA, 778 bp, Zea mays
  Clone ID: MRT4577_116348C.1
gggactattcctacgatgaccctccctcactggtcttggagcggcacgcatgtccgccctgctgacttacaggagccgcgactcattcgaatcgaggtttggacggaacactcctgatctgtctaagaaacagaatatcaataatgtagcacgcccgactactccgtcaaacccctcgtacgagcactgggcgatacataatgacggacataagaatgctggttcaccaaggtccttgtccagaacaaatagcagtaccgccatacttggcactgcacaagcacacaccgaccttgagtttcacgatgcctcaaatgccgctgcacagtcaccccagagaccagactcaacaaacagtaatcagcgatttccgcgttcttcgaaatctgtagcgccacactacttttctgcacagtcttatctgcgctaccagggtgaaaagttcatcaaacgatttgatgccaactgttacatcgccatcaccaggaaactggatacacacgatatttcccgctaccggtaccctgatggagagacacccgaaaccatggaccccgcgtcggccctccatcatgcgctgtctttgattgagcaacccacacttgtgctcggtatccagtcagacggtctttttacctttgctgaacaacaagaattagctgcgtatatccccaatgcatcgctgaaaaccatcgattcaccggatgggcatgacgctttcctattagaattcgagcaggtcaacaatcatctgcttgggttcctgaatgccgagctg

SEQ ID NO: 17922 - DNA, 455 bp, Zea mays
  Clone ID: MRT4577_116349C.1
gcgcccagcatacggccacacttctccgacgtttttatccggttctcataagactgactaagggcactgctggggaaagactacggactggtacggttgtgagacgaccgaacggtcggtccatgtggagccataggcgcctaacagagggagcaaaacccttgagcatccatcacaagcatagtaacaagatggtcaagttcctgaagcctaacaaggcagctatcgtactgtacggccgctacgcccggcgcaaagcggttatcctaaggaccttccaccatggaaccagggagcgcccctacggacactgccttatcgccggaataaagaagtacccaagcaaggtcatcatgaaggactccgctaagaataccgccaagaaatctagggttaaggccttcgtgaagctcgtgaactaccagcacctcatgcccacgcgctacacgctcgac

SEQ ID NO: 17923 - DNA, 2007 bp, Zea mays
  Clone ID: MRT4577_11634C.1
ctcgcattgagaaattttttttgcttctgtcgagctgagcatccggtactgcttcaaggttgctatttatgcggagtttagaagggattggccagaagcattgaagttctatgaggaaggtgttcgtgttttgcgtgagatgattggaacttcgacaaggttgcctccaacccaacgcctagttgagataaaagcagttgccgagcaatttcactttaagatatcgaccttgctacttcatgctgggaaagcggtagaagcaatcacatggttccgtaagcatatcagaagctatgcacgggttcttggaacaccagaagttgcttttcttcactgggaatggtttagccggcagttcctcgtctttggtgagttgatagaaacaacatctacaactattccagatacattatctcctagatttggcactgcagactatggattgactgagtgggaatttcagccagcatactactatcagttagcggcaacttacttgagagagaagaggtatgccatcgaatgttcatcatcaatggctaatcttacaacagaagttaatggagtacctgagtcagtaatgccttctgtatatgttggccaatatgtgcgcttgtttgagcaaggagatacagttagtatactacccctttctgatactgaatacaccagctatgctttgtcagaagctgaaagatttcaagattcttatgagataatagcactgttcagaaaagcttatgaatcatttcagagcctaggtgctacaagaatcgcttctgtctgtagcggtggaatggccatggaatattatgcagctggggattttagcaatgcaaaacagctttttgataatgttgctggtctgtaccgcaaagagggttggaccactttgctctgggagaacctaggatacttgagagagtgctcaatgaaacttaattccccaaaggattttatcagttattccctagagatggctgcattaccattattttctcgtagtgaagaggaaaatcgagaaaacaaaattaagagtgggcctgcaggttcccctaccatttccaggagagagaatatacagcaggaagttattaatgttttggaaagaaatcagtcatcagagggaaccgatgatggatttaataatgcgatggaagaagttactcaccttgatattgatcagataagttcgctaagaatgttgtggttgatcagttggagggcacgagtggaggttcaattcaatcaatctgactgtaactttgtgatacatagtagacagggaagattctcctcctttctattcaaatttgcatgaccaagttgttcaagatacttctcttacactcttcaccaatagatggatgcggttgacacatgaagcaaaatcagggcagagtggaaaactagaatgtttgtctgtgaaggcgacaataaaaaaaatgccttgtgatttgctgccacgctgaaagccctgcttccatggaagacttcccattatggaaatttgagaaccaagtggagacattgcccacaagggaccctctgctcttgccttttctggacagaaacttattcaagttgaagagccagatgctcaagttgaccttgtcttaaattctgctggcccagctttagttggagaattatttactgtaccggtgagcatagagtcaaaagagcatgcagtccattctggtgagctgaaaattaacctcgttgatgccagaggtggtggtatgttgttgagtccaagggaagcggaagattctgaaagtcaccatgttgaacttcttggtgtctcaactgtgtccgaggacaaagagtcgaaggaagaggccgatagcataagaaatatccagtattcatttggggttatatctgttcccactttgggtgtgggtgaattcctgggtcgtgcaaactaggaatcaaacggcatcgaggcaaaatcagtcatcctttatgtttcacttatagtgtgtttggtttgaggaattcccc

SEQ ID NO: 17924 - DNA, 578 bp, Zea mays
  Clone ID: MRT4577_116350C.1
aaccatataaagttcatagcttactaaattaaagatattaaacaactctagcatcatttaaccacataaactctaaatataacaacaatataaagtcgatatcttactaaattaaagaaattaaacagattgggcttaattgggccgtgccggcccaagcccagcccatctatgcgggccgtgccgggggcccgacgggttggaatttgaggcccggtctagagcccgccttcgggccgtgacagcccggcccatattatttcgtgtcgggccgtgctttgggctcttattttcgggccgtgctcgtgccagcccaaaaagcccggcccagattcctagcactagcgccgacgacgtacgaggaggccgtgcaagatgcacggcagccatgacgatgtttgctgcagcgagtactgccctctggcctctgccatgtcgttcccagcttcttgtcattgctggacaacagcctgcacagaagcaatgcaaacattccggtgacgcttcctccgagcatgagccaagaggcacaccgtgactttgacgtgcggaagtgctgcgccgaggctatctgcctt

SEQ ID NO: 17925 - DNA, 226 bp, Zea mays
  Clone ID: MRT4577_116351C.1
aaaaatcaccgggactgtttcggaaccctagccctacccctaccgccattcatgcattctctgagctcaactctatctcttcaagctctgtatcatccctatcctgattaagattatctccatactacatcaacagaagggggacaaggtctacaccaccaaaagagtacctcttgggtccaacgcatctgctcacccactcgttctacctgatgacaagtactct

SEQ ID NO: 17926 - DNA, 2736 bp, Zea mays
  Clone ID: MRT4577_116352C.1
gtagaatcatccatacagaacaatgttgaagactcaagcagtcatcacaaggttgaagatgaaaagctttcaatgtctgagaaaaatgatgtagatactgaagctatgcaagaaataaatgatgaatctggcgcggatataaaccaaacagaacaatgtcaagaagaaatactgcagatgatgttctgcaacttgaaacagaaggaaattcatttgacaagattgaagagacggcttcaaatgaggaaacagagactagtacagcagccactgaagcagtaacgttcaatgaagatattactgacaaggttagcggagctgatggagcaccgtctaacggaagtctcaagacctttactgacactggaagggatattgatgttccattggtaattacaacatcaaaggaagaaagtgtgaacgacactatggaaaacctcaatcttgaccttcctggacatcaggcacaggatggcaacaccgctgaaaaggtgctcagcttagaggaaagagaaagagagatgccttcatcagagaagctccttcaaactgaaccaggagagaatcaaattcccaatgaacaggatgaaaaggacatacgagatgagaatcaaactctaaaagaaaaggatgaagatgacatgcaagatacagaatttggagaggctaagaaagaagttcaacaagaattacctgtctcccattttctgatgaatctaatattgggaaaagagagcagtgatgcaaatgaagattcagaatctgaggctgcaaggaagcaaggtgaagcgacagaagatgacagctgcacgttcatttctgaacaagaagaaagtctggggtcacttcctacagaaaataaggtggatgacaatcccacctttgttgaacaagaaaaacatgaagttaaatgctctgaagaaacacaggaaatggtcgaagaacaaagtgatgatcagctgcacacagaaagatcaattgaaattgatgaggatatcaaaaagaacactcgtgctttagaaataccagcataccaagacaatccccaggatggaatttctggtgaattgcagacagaagaagcagctggtgtttctacaaaaatggtaactagagatattgatatttcgagtgttgtgctggacaacagaacagttggtactgtgtgtcaggaaaaaatggaggtatcaacaaaaaatgaaaatggaagcttgaggagcagcctgaatgactcaacaaacacaatggctccccaagacgatactctaggagaaggacaatcaaggctcgtgcttgaacctttacctgaagacaaaagtgttgatgtagtttctgagcaagcacctttgttgacagaatcaggaatgactgacgcgaatgacttatctagcgatactacaagtgctcaaaaccctgtgtctacaaaacccactgaatctgccagagttgaggccacatattctactgatattcaactggagaatgaagaagtagataagaaagaagaggaccagcatgcaaacacaaccaaagatgaagtttctaaagagattgtagaaagttcacatataaatctgcagaaaataacaaggcctgaagaaaaatctaatgagctagaaactcaaattaccgaaccagtttgtgacagtcaggcaattttggcccatgaaaaggaaatatctgaagaaaactttccaacagcagtcgaaattcaggctgatggtccaaacatgcagatcaaccaagataagcaagatgaagctgctgacatcgaaactgaaatgaagccagaaaaattaggggaatctaattttcaggaacaccaggacaatggtactgagcaaaagtctcctaaagagactgatgaaggagaccagcaacttgtggccaagaaagagattctgacccaagaaatggatgtgcatgagacagttgaaagacctcagcaagcagttgaaagtcctcagcaaacagtgagcataacatccaatgaagaccaggaactgtttgattcaaaggtccaggaacgtgatctcaatgtagtttcacccagagaagcttctgaggctgaagaaaactttgtggacgtaaccaagccagaattcagcacagatgaagaacaaagtccaaaggctgatgcagaagagaagatttatgacgagaagataaaggacatagagggaactaagaatttaactgatgaagcagcaataaaaactgaagcaccaggagcagcccagaagacacgtaaaaaatatagcctattgtctggcgtgggatcgaaggtaaaacaccaactcgcaaaagtgaagaaagccattgtaggcaaacctgggcacacaaaaccagtatctccgacggcataaaactccagtcaccttagaacatgtacattattgtattgtttgtagtcttgtgagccatttatttcggtggtagtgtttgcgatgggctaggagaaggtcctcttcacaaccatagcattggaattctatgatgttgcacatgaaacaccccccccccccctcgagagtatgttgaagatgtttgtaaatatgtctagtgtgtaaattcaagtttccctgaaactttgaggtagaatcaaggacatgtaattggtcaattgtttgtattcttcgttgaaatgcacaagcagtttgtggtccaaaaaaaaaaaaaaaaaaaaaaaaaaaaaaaaaaaaaaaaaacccccaaaaacaagggcggccgttagag

SEQ ID NO: 17927 - DNA, 900 bp, Zea mays
  Clone ID: MRT4577_116353C.1
ggggagtcacttgtttgtcccttcgaaaaatgggctcttacgtgaacatggatgccggtgttttcattgacacgcatctagcagagatgttaccgtaagcaggctccacgtcactatgtgttgcccgaggatgcgggtggcagcacttgggcgcctacgtcaacctgggctcgttctacctcgtcgggattccaacagcactcgtcctcggcttcgttctgaagatggaagggaaagggctttggatgggcatttcctgcggctccatagtgcagttcttgcttcttgccgtcataacgttcttcagcaactgggagaagatgtctgagaaggcaagggagagagttttcagcgatgatgagccgtcggataagggaacttcggattccaatggaccgaggtttgttctagttttggcacgagccatctgaatctgaccccccttgtgaagacgcagcggacaagatcttgtagacaaagaagcccctcttggaatgggttttatgatgccttgctttctggtctctgaactgaatgtacagggaacttgttgaactctgaccactgttctgtgctccgtgctcgtgcttgctgttgtttgttaaaacaacgggacaattgtagcagatacatgactacatgaggcttctgatgctatggtagaaatagtaaccacacttttgcaacttggcatgtctgtaccctgccttatttgtgtgaccttggggttgctccattattttctgcaccaacagctcatcatcgacttacccccatgcgcatgacattgtaggtgtcgattattaactgaagcaccagcagaataaaaacgacatttaggcagatttgtagattaaagaaaaacaaagctaaaagggcggcggctagagaggatccaag

SEQ ID NO: 17928 - DNA, 848 bp, Zea mays
  unsure (1)..(848): unsure at all n locations
  Clone ID: MRT4577_116354C.1
ggccctaggggcctttttttttttttttntctttcaaaaaatagaccctagaaggatcgaacncaacacaccaaacaccttaccactgacacaatccactgcgccatatgtaagtgacatatgttctgacaaagaaaatttatttgaccaatcacatgtgtgcggattcaaggagcaagcaacagcgcgagacggccggagctcaggacgccgagcagcagaggcatggatccgctggagacacagagcagcagaggcagcggagtcgctgggccgcggatccgtccgcccggagctcaggccgcggagcagcagaggcacggagcagctggagatcgaccggatccgtccgcccggtaggccgccgcgccggtgaagatccacccgcctggagaagaccggcacgcctgcctgctccagctcgaggagcgctggagatccacccgcctggagaagacgctgccgcgtctgcccggctggacaacccggagggcaccaggcagcggagatccgtccacaaccggtaggccgcgcgccgaagatctgccaggcgccggagatccgttcgtccgtggacccgtccgctcggtaggccgccgtaggcctccgcgtcgtcgaagaagcaggccgccgcgccggtgaagaagcaggctgccgcgccgccgaggatgtgccaggcgaaggagagagggagagttggagtcgggatcggagaaggagaggctgcgcaagcgcaagagagcggcccggccgaagcagccaccccggtgaagaagcaggctgccgtgccgccgaggcgaaggagagagggagagttggagtcgggatcggggaagaagagctcgtgc

SEQ ID NO: 17929 - DNA, 653 bp, Zea mays
  Clone ID: MRT4577_116355C.1
aggtacaccacacgctcaggaccaacggcagccaagcattgttgcgctctctctagccttcttggtatgcgaccctggggtgatacagatactatgagtactacaacagctgacatcgccattcgggtatcaatggaccgatccatacattagtgtactgatgcaacacaatctagacagttcgatagggcatcacagcatgcagcttacggaagtgaggatcgtacggccaacaaccatatgccctatggtgccacccatgcttacggataacgtgatgtcaaaatagatgatgacaaccacgacgacaccagtggctttgaacagcatagaaaggaataggaggaagccttgctgtttatgttaagccgcatcaaatattatgatgcaacaaactatactgattgcgagaccctagctgatgactcggacgcacaacagcctagtaccatacaaccaacttgtggggagctctgctgtcatattattgcagcgacaggtgctgacatttgagctaccatgtgatgcaaacatagctgttatttagcatcaacaacaattgctgtcattttacccacaggttgtgggaaacattaacgccttcttgcaacaacaacaattgctgccattctacccacaggatgtggcaaaca

SEQ ID NO: 17930 - DNA, 623 bp, Zea mays
  Clone ID: MRT4577_116356C.1
ggccgcttttttttttttttttttctttttttttttttttttttagtttaatcggatctctgattcggtgaatatagtttaattggacaaattgcaaaaaatagaccctagaaggatcgaacccagcaccctaaacaccttaccactgacacaatccacaacgctatatgtaagtgacatatgttctaacaaagaaaatttatttgaccaatcacatgtgtgcggattcaaggagcaagcaacagcgcgagatgaccggagctcaggacgccgagcagcagaggcacggatccgctggagacacggagcagcagaagcagcggagtcgctggaccgcggatccgtccgaaaaaactcaggccgcgccccccctggagatcgaccgcggatccgtccgcccggtaggccgccacgccggtgaagaagaggctaccgggccggtgaagatccacccgcctggagaagaccggcacgcctgcctgctccagctcgaggagcgctggagatccacgccggtgaagaagcaggccgccgcgccggtgaagaagcaggctgccgcgccgccgaggatgtgccaggcgaaggcgagagggagagttggagtcgggatcggagaagaagag

SEQ ID NO: 17931 - DNA, 151 bp, Zea mays
  Clone ID: MRT4577_116357C.1
gcgggcgctggggcgctctcggcccctcgccgtggtgtggccttggccggtgtttgccgtccggtttgggctgcgttcccgtgcatcccggctcgctcgcggcgcctcgtggtgccgcggggtccgccccgggcggcgctctccccctccc

SEQ ID NO: 17932 - DNA, 630 bp, Zea mays
  Clone ID: MRT4577_116358C.1
atggacccactcaaactttcactctctcctgcgcttgcgcagcctcttcttctccgatcccgactccaactctccctctctccttcgcctggcacatcctcggcggcgcggcagcctgcttcttcgacgacgcggagacctgcggcggcctaccaagcggacggatccgcggacgaacggatctccggcgcctggcagatcttcggcgcgcggcctaccggttgtggacggatctccgctgcctggtgccctggtatatcctcggcgtcgcagcttgcttcttcactggcgccgcggcctgattcttcgaaagcacggcggcctgattcttcgacggcacggcggcctgccggttttgttcaatcaggcagacgcggcagcctaccggtcttccccaggcgggtggatctccagcgctcctcgagctggagcaggcaggcgtgccggtctttctccaggcgggtggatcttcaccggcgcggcggcctaccgggcggacggatccggtcgatctccagctgctccgcggcctgagctccgggcggacggatccgcggtccagcgactccgctgcctctgctgctccatgtctccagcggatccgtgcctccgctgctcggcgtcctgagc

SEQ ID NO: 17933 - DNA, 877 bp, Zea mays
  Clone ID: MRT4577_116359C.1
ggccgctttttttttttttttttcctagcgttttttcacaaagaaaatgtatttgaccaatcacatgtgtgcggattcaaggagcaagcaacagcgcgagacggccagagctcaggacgccgagcagcagaggcacggatccgctggagacacggagcagcagaggcagcggagtcgctggaccgcggatccgtccgcccggagctcagcccgcggagcagctggagatcgaccgcggatccgtccgcccggtaggccgccgcgccggtgaagaagagcctaccgggccggtgaagatccacccgcctggagaaagaccggcacgcctgcctgctccagctcgaggagcgctggagatccacccgcctggagaagaccggtaggctgccgcgtctgcctgcctgaacaaaaccggcaggccgcggtgctgtcgaagaatcaggccgccgtgctttcgaagaatcaggccgcggcgccagtgaagaagcaagccgcgacgccgaggatataccagggcaccaggcagcggagatccgtccacaaccggtaggccgcgcgccgaagatctgccaggcgccggagatccgttcgtccgcggatccgtccgctcggtaggccgccgcaggcctccgcgtcgtcgaagaagcaggccgccgcgccggtgaagaagcaggctgccgcgccgccgaggattgtgccaggcgaaggagagagggagagttggagtcgggatcggagaagaagaggctgcgcaagcgcaggagagaccgaaagtttgtagtgggtccatcatgtaagtaacgttaaagtgggcggagatgacgttccggcgcatttctgagcaaacggaatgggcgtgggtaaaactcccggccag

SEQ ID NO: 17934 - DNA, 384 bp, Zea mays
  Clone ID: MRT4577_11635C.1
ctaaaatactcctatatgcaattactggtcatattcatcctcacctactagaatagttttatagttcataaggtattggagaaaaacaaatcatgtcactattatattgtcatggagaatcagatgatagccaattgtctgtcaacacatgagaagtgccaagacttcgtatgtagctcgagatcaccatatctccaacaaggaagacaacctcaccatcggatgtcgacggtctcccatggagctcgctccacttgtccaacttcgacattggccacaatcctcaaatttttcaaccttcctcacatcccctgcaacttgctctacctctccaactttaacattggctttgatccccaaatttgtcacttactcatataagct

SEQ ID NO: 17935 - DNA, 845 bp, Zea mays
  Clone ID: MRT4577_116360C.1
ttaattttttttatgcatttataggtgaatatagtttaattggacaaaatgcaaaaaatagaccctagaaggatcgaacccaacaccctaaacaccttaccactgacacaatccactgcgccatatgtaagtgacatatgttttgacaaagaaaatttatttgaccaatcacatgtgtgcggattcaaggagcaagcaacagcgcgagacggccggagctcaggacgccgagcagcagaggcacggatccgctggagacacagagcagcagaggcagcggagtcgctgggccgcggatccgtccgcccggagctcaggccgcggagcagcagaggcacggagcagctggagatcgaccggatccgtccgcccggtaggccgccgcgccggtgaagatccacccgcctggagaagaccggcacgcctgcctgctccagctcgaggagcgctggagatccacccgcctggagaagacgctgccgcgtctgcctgcctggacaaaaccggcaggccgccgtgctttcgaagaatcagaccgcggcgccagtgaagaagcaagccgcgacgtcgaggatataccagggcaccaggcagcggagatccgtccacaaccggtaggccgcgcgccgaagatctgccaggcgccggagatccgttcgtccgtggacccgtccgctcggtaggccgccgtaggcctccgcgtcgtcgaagaagcaggccgccgcgccggtgaagaagcaggctgccgcgccgccgaggatgtgccaggcgaaggagagagggagagttggagtcgggatcggagaagaagaggctgcgcaagcgcaagcccgagtcccggccgg

SEQ ID NO: 17936 - DNA, 1009 bp, Zea mays
  Clone ID: MRT4577_116361C.1
cccacgcgttcgcccacgcgtccgcgctgatctcgtttggcccgacgatgggaacgccgctttctgtcagacgataggagcgtttgccaagggcatgctggagctggaccacgcggtgcagaagatggtgctggagagcctgggcgtccggaaggagcgcgtcgactcgcacctcgcgtcgctcgtctacgacgtccggctgtcccgctacggggccctggcgcctgtgaccgccggcgacgacgacgaagcgacgacgtacatggtcgcgcacagggactgcagcatggtgaccaccatcacgcagcacgaggtggagggtctgcaggtgcgtggcagggacggcgcctggatcagcgtggcccctgagcccggcacgttcgctgttgtcgccggcgagatgctcacggtggtgacgaacgggagggtgcctgcctgcgtccaccgcgtgaggacgccgagcaaccgcgagaggctgtcggtgctgttcgggtcgtcgctgaagcacggcgccgtggtgagcgcgctggaggagctcgtggaccacggccgccaccccttgcgtttcaggccctgcgacttcgacgagtacgtcaagttccggttcgggcaggagaggcccggattgaacagcgcgctccaggagttctgcggaattggcaccggcaccaagtgaattacgctcagctatctgcctatctgtactactactgctcctatctgtgttgtcgtcattcgtgcacgtactctgtacatcgtgaatgtctgagtgaccgagtcaggcagtccgtaggctcggtcgttctgttgtgctagggtcttgttggtacacctgtctgtgtgacgctcgactattggtttgaacatgtttttttcttttaaaaaaaaaaaaaaaaaaaaagggcgggttttgcattgaagatatgtagccaaaattaaaaacctgtgtcgaacagttatgtagtcttggctccattaatcaaacggacaccgtaatttcttggagcct

SEQ ID NO: 17937 - DNA, 728 bp, Zea mays
  Clone ID: MRT4577_116362C.1
aatccaatgcgccatatgtaagtgacatatgttctggcaaagaaaatttattttgaccaatcacatgtgtgcggattcaaggaacaagcaccagcgcgagacggccggagctcaggatgccgagcagcagaggcacggatccgctggagacacggagcagcagaggcagcggagtcgctggaccgcggatccgttcgcccggagctcaggccgcggagcagcagaggcacagagcagctggagatcgaccgcagatccgtccgcccggtaggccgccgcgccggtgaagaggaggctatcgagccggtgaagatccacccgcctggagaagaccggcacgcctgcctgctccagctcgaggagcgctggagatccactcgcctggagaagactggtaggctgccacgtctgcctgcctggacaaaaccggcaggccgccgtgccgtcgaagaaccaggccgccgtgctttcgaagaatcaggtcacggcgccggtgaagaagcaagccgcgacgccgaggatataccagggcaccaggcagcggagatccgtccacaaccggtaggccgcgcgccgaagatctgccaggcgccggagatccgttcgtccgcggatctgtccgctcggtaggccgccgcaggcctccacgtcgtcgaagaagcaggccgccgcgccggtgaagaagcaggctgccgcgccgtcgaggatgtgccaggcgaaggagagag

SEQ ID NO: 17938 - DNA, 316 bp, Zea mays
  Clone ID: MRT4577_116363C.1
gcaaccgggggccactgggtgctgcaaggaccgtcgctcaggctcggatcgggaccagcatgaggcgtgtgcctcctggagcgcggcggcgaggcgctccgcacgggcggcacctgccagcagatgaggtccaccaaggtggaccataacaacaggaaccgcgagaagtaggacgcagaggcgagccaccagcagcaggtgttgaacccggcggcggtggtctccagagagaaccagttccgcgacacctagcactgggaggtggagatgcagaccatccaggccgccatcataccgaagaacaaccacgcctgcg

SEQ ID NO: 17939 - DNA, 740 bp, Zea mays
  Clone ID: MRT4577_116364C.1
aggtcggccgggcttcttctccgatcccgactcaactctccctctctccttcgcctggcacactcctcggcagcgtggcagcctgcttcttcaccggcgcggcggcctgcttcttcgacgacgcggaggcctgcagcggcctaccgagcggacggatccgcggacgaacggatctccggcgcctggcagatcttcggcgcgcggcctaccggttgtggacggatctccgctgcctggtgccctggtatatcctcggtgtcgcggcttgcttcttcaccggcgccgcggcctgattcttcgaaggcacagcgacctgattcttcgacggagcggcctgcccggttttgtccaggcaggcagacgcggcagcctaccggtcttctccaggcgggtggatctccagcgctcctcgagctagagcaggcaggcgtgccggtcttccccaggcgggtggatcttcaccggcgtggcggcctaccgggcggacggtcccgcgggtcgatctccggctgctccgtgcctctgctgctccgtggcctgagctccgggcggacggatccgcggtccagtgactctgctgcctctgctgctccgtgtctacagcgggatccgtgcctctgctgctcgacatcctgagctccggccgtctcgcgcctggtgcttgctccttgaatccgcacacatgtggattggtcaaataaattttctttgtcaaaacatatgtcacttacaatgggcgc

SEQ ID NO: 17940 - DNA, 213 bp, Zea mays
  Clone ID: MRT4577_116365C.1
ggcgtaaccagtgctttccctggaggaaaatgtttacttggcgaagctcgccgcgcaggcaaagaggttcgaggaaaagctcgagtttatggtgaatgctacgaaacctgtggactcgaaggacctcactgtgcaggaacgcaacctcttgtatgatgcatacacgaacgttattggggcccgccctgcctaatggcgcataatctcctccat

SEQ ID NO: 17941 - DNA, 156 bp, Zea mays
  Clone ID: MRT4577_116366C.1
accttctaaaaggcccggaccgatcgtccttcccaaccgctgctcaccctgaatggcaaatgtcacactccctgtaactgatcactaactgctcgccggggtggcggttacccgcagcgcgaccgctacattttccagtaccctaacagccggtcc

SEQ ID NO: 17942 - DNA, 658 bp, Zea mays
  unsure (1)..(658): unsure at all n locations
  Clone ID: MRT4577_116367C.1
gtccaaaaaccccggtcgacccagcgtcctttgncgcgtgggcaagcccctggtcgatgcccccaatgctcagcgaaggcctgaacaggatcatcgtcatttttgcgaagttctagtactatggagagattccaagaattgtggattgaggagaaagtgaagctcagttcaatactcttctggtgtttgatcgaagacttcaatcggagactgtcgtcgttctcgcaaatattgagtcaagttaattatggtgagccgattcagtatttttactattgattttatgatcgggaaataagacgcttagtttgcgtatgaagtttaagttagaaataccagtgatgcgaggtgtgcttcgatgagtttagttgccgagtatattcgaactagttctattttgcaaagtgtagtgtctcggtgacgcgtaggttaagtttagtattttaagcaattatcgataagtctgtcgatgctaattgtgttcagtgcgcgtatgatgaaatcgatgtcctgtgctagtagttagtatcatctatgtttgtgatcgaaaatgttggagtcggatattgattagttagattgaaagctatgaataaaaagttgttatctgattggctctctacttgtaaccattcttacaggtggagtttctttttgt

SEQ ID NO: 17943 - DNA, 330 bp, Zea mays
  Clone ID: MRT4577_116368C.1
tttggtggcatcggtcaacaccggccacctgcggtatatgcaatgggcgacagatcccagggtctcggcggacggacgggtgccaaggcactagtacaaaactgatgacttcgaacgctaccctgaaccgctggtttctctaagatgattcaacagaccatgtgagtgatgtgggagatggcgctaccaatcaagaaagggatctgagaaacatggataacaggcatggggctgttatagagaattctcagattgattctttgcccgaaccaaaatgccaaacggcctggatgaaatccgagctgggccgactcattcaggagagaggat

SEQ ID NO: 17944 - DNA, 433 bp, Zea mays
  Clone ID: MRT4577_116369C.1
ggtctggacctttgggctgatttatgtgcttgtggatgtgcgggtggcctttgggctggatctttgggttggggccggtcctcttctttttcttggcctgggcctgggcctgcgaggcctcttggggcctgggcctgcgggcgagtggactgagacggtggtgctggacgccgagcattgtcgtcctgctggtggttctgttcgggttatggatgattatctttcttataatgttcctagtattcatggtgaggcttctgagcttaagactacttctgactgggagatgtagaggctttgtggtcctggtcctgctattcctcttatggaggaggtgacgtggaatgttactgagggtacgaatggtaaggagtcggatggttgtaatactattgctaatgaggtttagctttgtggtggttgcggaggtggt

SEQ ID NO: 17945 - DNA, 272 bp, Zea mays
  Clone ID: MRT4577_11636C.1
agctaatgtcgacagcgacgtgctccaaggaagcggcagcccggagcgcactgcgggatctgcggggagccgacgactccttaaactgcgcggacaagaggcgttcggccctagtaataagagcggtggtccttctaggcgctgctctatgagctattgcggaagtcgatgctctcgtgcatgaccgtgagcggcggcgaaggcgcacacggcggatgcgggatgcagattaggttgcccacggacgatcagcatgtagctcacgtcacgtt

SEQ ID NO: 17946 - DNA, 386 bp, Zea mays
  Clone ID: MRT4577_116370C.1
gcggccagtgaattccgttgctgtcgaggaactaagttggtgtgatactcatcatgtagctccttttttgttcaagttttataattgacttaaaatatagatgctgtgtttacatgaaaggtcaaacaatatgacatgggaattgttgcatacacaagttgcagccatcagacaccactcagaagtttggaagaacaataaagccgaagtaatttcgtccaagatgatttctgatgtatctaacacacttttaccgatttctaatagaaccaaactgaaatacatgtgtcggatgcttcagatatgtcttgtatagttttagaacatgtatagtcatgcaaagcacataaataaacgtacctgacgacagcaacggaattcgagct

SEQ ID NO: 17947 - DNA, 471 bp, Zea mays
  Clone ID: MRT4577_116371C.1
cttcgttcaacagcacacttgtcatagagaaataagccctcgttggaaccacaggaggcaatacctgagccatgtgccctgccgaccaatcaccaggagtatcaaccctcacagaaatgggatcaaccaatgtgcgagggacaatggatccatcctgcccaacaacaagaggttcctgaacatgtagatcttataccgctggcaggctatccggagagaaacaccacactctgagcttgagaacagacatatccatactgtatattgaatctgggtgaagtctctgaaccatgcacagaccatacaacaggagctcagcagttgcaaccccccagaggtgagcagggaccccttccaactcgatatgcataagcagaggcaggctgcccctacagaggccaaggcttgacgagaccaacgcctgatgtgcagtcggacggggggaacgaaaagcgactgctcaacactgat

SEQ ID NO: 17948 - DNA, 269 bp, Zea mays
  unsure (1)..(269): unsure at all n locations
  Clone ID: MRT4577_116372C.1
ccgcccgcgcgcgtacacaaactcgcaatacgcctcgagagcgncaatttttcagcagcaaaatcaaaaccacattgtttatcttacaagttttttggaaccanctcangctcacgttccatcctatgaactaccaaggcccatgtaactgcgccaccaaccatactaagtacatctaccaaacattctgcaaaggattcgagaacgaatgaatcaagatgtccactttaatattttatgctcaacggctggcaattacttaaagacac

SEQ ID NO: 17949 - DNA, 475 bp, Zea mays
  Clone ID: MRT4577_116373C.1
gggtggggttttttttttttttttatatttatttttgtttattttttttttttttttttttttttttttttttgttttttttttttttttttttttttgtttttttttttttttttttttcagggtactaacaacggaaggggattttttggggggggggggggaaacatggggggggttttttttaaaggaacactggaattcttttggtctagggaaaactcaagggtgggtttttttttaaaaggtagagggggtttgggtgatgatttaattcactttgcgaatttaatgacaaaacgggttcgaggggttgttccgtaaggggcttcttaattggagcgggggtggggggggcatttttagcttggggggatgttgggtttcaacaaaaatcctggtgtttcctggccacgggaagatggggcccaagtaaaaaagtgcagggggattttgtggagagtttggggggggt

SEQ ID NO: 17950 - DNA, 389 bp, Zea mays
  Clone ID: MRT4577_116374C.1
gcattttgtttaaaaaaaaaaaaaaaaaaaaaaaaaaaaaaaaaaaaaaaaaaaaaaaaagaaaaaagaaaaaaaaaaaaaaaaaaaaaaagagggggggggggtcatgaagggaaaccaatctttctttccgcgtgccttgcaatgcgatgcactgtttttttgttgtcccgctatgttaaattcgggtggcggggggggttttctccgcccgtgtgggggaaaaaaccctgttcgggccctctcgttaatttgcctggatgggcaatccctctttcgcttgtctggctttttagccaagggggccaggccggatgggcctctccttccggcgggctgccggactggaaggggggaggcgccctgcgctgcgccattaatcacggcgg

SEQ ID NO: 17951 - DNA, 437 bp, Zea mays
  Clone ID: MRT4577_116375C.1
gcaaactgaaaatatattacattgtgtaaacatatgggcaacaacaagcatccccgaaaagtcccaaacctatccttttgggggcataaacaaaacaacagccagcatcacaaagggggggagggaacatttttgagttcggaggctattaaatacgcccttatacaaatgagacacggggaaactgggcactgaaacctctggcgtttgacaaaccgggctgtttcaacaatacgaaattaccgccgaggaccacctgaaactgaaaaaagcgggggccatgacaatactgaagccgctccagggccctgcaggcatactgacgccaagataccaaataaggtctcgcacgctgctcccacttactgatctgcaccgggcagggaattaacaataagggtcacaaagcttttccacggggtacactaggggtccta

SEQ ID NO: 17952 - DNA, 109 bp, Zea mays
  Clone ID: MRT4577_116376C.1
gagaggtttattatgtacacaagtagcactatagcagacgttggtgccgaacacagttttggagcaggttaccagagctcaccgagatctcaaacaacggaggccattg

SEQ ID NO: 17953 - DNA, 522 bp, Zea mays
  Clone ID: MRT4577_116377C.1
actactatagtggaagctggtacccctgccgggaccgggcccgagatttccggggtgagaccacagcgcgcgctttacaagggggctcacgtaccctagaagaggaggtgaacaataaaccatggctgtgagctacaacccaaattcgtacaccggccactcctcaaagatcagcgaatgcaccacatcaacctacacccctgagagtgagagctccaccatattcacctgaagtcgtcgacaacagaaggcccatatctaaaccaaggtcatcaatggcatgccaaaggattgatgcaacctactacacaaatacggcctacaaagaatagaacagaaatgaagcgattcagatagccctggaaggagaacaattcctagtaacgaagaatgtaccatgagaaatgaactatggccatcagagaccaaaacagatgttattgatgcgaaagagaacaatgtgccatggccagagttcaaggcgcgtccaaatgcttcacatgcacaaggccatgttgacac

SEQ ID NO: 17954 - DNA, 410 bp, Zea mays
  Clone ID: MRT4577_116378C.1
tggacacgatggtcgattagatcatgagatcatgcttgctttagctgcggaacaaaggcggaggaaccatgggcggacgctgtaaaggatacaacgtgacggatcaggaccagcgacaacgataggtggcagtatggggtgacgtaagtggaattgactgggcgaagctttacaagatctacactgacaaagccgtgtggtacatcaacttaatgaactggaacgagatgcgcgtttagaaagatggcgtagtaatgaacaggcttgtacagctggtcactaacaacatttaggcagtctaaatggataagggcacgcgcgacatagcggcccattaagcgtggagatgaggagcttacgaccaagacgatggttatactggacagggacgtagtgcgcgctgatttggt

SEQ ID NO: 17955 - DNA, 367 bp, Zea mays
  Clone ID: MRT4577_116379C.1
tatttccttagtgttacattttgttaaataaacatgaaaagtctgactcagattacctattgtttagttggaacttggaacatgttcagtacctgttctatacacaatttggtatggagtagtctgtatagaagcagtggtcgtagcagaacctactagttgaatgtccatgcatttggatccgaacaaataaaaggatcatattagcctcacatgtctaggtactgctgttgggctgagcctaatgccacagcattagtcttagatgttttgggcatttaatcaagatctgtcccagtcaatattgtgcttggctggcatgcttggccttcacggcagtgacctgcgatctcaagtgtggcataag

SEQ ID NO: 17956 - DNA, 161 bp, Zea mays
  Clone ID: MRT4577_11637C.1
cggcggcacagacaggaggggcagactctgttgtatggttttcgcttagatttttttggtagcagttgtatgttctatatacaaactaccccttcttcttgagaggagagagtgcacaccccttcatcaaattgaatagcacgtatgtgtaccgctaaaaa

SEQ ID NO: 17957 - DNA, 148 bp, Zea mays
  Clone ID: MRT4577_116380C.1
ggaaacaccaagatgcagggttttttacataggatgaacttaaaacaaactctgacaggggtaacagtttccatggatctaaaattcatgctggttgatacatgggtatgcgggagcagatgatgaacacatgagtaacaatggatac

SEQ ID NO: 17958 - DNA, 401 bp, Zea mays
  Clone ID: MRT4577_116381C.1
gctttttagaccaaatgggcaccgcatcaccggactacggcgaccttatgcaggcggggcccagaaggccggactctgcggcagcacaggggaccattaaccgtgctgcgctcgcataactctgctgactaagccaatgatgatctccatgagggctgcgttacagcaggtggtacgcctacgacgccgtggcatcttgaggtgctcaccggccggaggcgcgcgtgctggtcctgagaggacctgaccgttgtccatgaggtgatcaagggcgcagacacagacatggacgcggaccccaagatgcatagggagttgttgccgacgcccatcacaagggccatcatcgagtttgccgtcactgtctgtgtcgagagcagcctagcctgcaacatcctatg

SEQ ID NO: 17959 - DNA, 425 bp, Zea mays
  Clone ID: MRT4577_116382C.1
cgcaactgcgaagctccccccagttcccacggtttcccccacgacgccggcgatgggcaagcggggacagcgcggcggcggcgacggagaacccgccgcggaaggcggtgctggcggaggacacagcccctccaccgtgttcgtttccaacctcccctacaccttcaagtcctccgatctcgaggcggtgtttagcgaggtcggcccagtgcggcgctgctttatggtcgcggagaaagggtcggagaagagtcgaggcttcgggttcgtgcaatttgcaactgttcaagatgctgatcgagctcttcaacaaaagaatggatctcctgttgctggtaggaaaatcagagttaagctagcaatgaatcgtgctccactgaaggaacgtttgcaaaaggtgaacatgcaagtgaaggactctgatg

SEQ ID NO: 17960 - DNA, 253 bp, Zea mays
  Clone ID: MRT4577_116383C.1
cggctcgaggcaagggctcgccgcggttgtttgcatccttctccacctcctctcctccctcctcctctctcctcaaagatgtctggtctcgctgcgaaggtgtggtcgacgattgtgcactggcagacgggacgcgatgccacggacggctacacgcgcagcaactacgagaaccacatcaacaaggtcaactcgcacttcgaccgcaacctgaccaagtcgaagggtgacaagtacgacgagcagcgtgatg

SEQ ID NO: 17961 - DNA, 658 bp, Zea mays
  Clone ID: MRT4577_116384C.1
gttgtgatttgcactaaactgcttgttgattagaacaagttgtgatttgctcgcacaggcttgataatttgcatggatgctgattcacctttcaagtactgatgcattttgaaccctttcatatagcagttttagttaagtacttattcaaatgaaatgcagtgcttatgcatgaatattttcactccctttacctaaacttatggccctttatgttgtatcaggaattttcttcatgatgttgggcattgtaatgttcatccctgggttctactacacaaggattgcctactatgcatacaaaggttacaagggcttatctttttcgaacatcccaccgatctgaaggagtgtgttgcctgcctgctggttatgaagtggtgtcgctggtttaatgcaaatctgccattccatcctccccagcgctttgatgcaaacttgcgcggacggcgtgggcacgtggaatccgacttgtaactgggtgcgtgcactgatcagtgaaactataacgtttacaaaaggaattacctcagcactgattccttccttggacagtatctctgcaccctgcaaagtatgcccaccacgttgaggtcctcctccctgcgagcacctcctttagcaatatcttgtccacgcgagcagaggtatataaggt

SEQ ID NO: 17962 - DNA, 350 bp, Zea mays
  Clone ID: MRT4577_116385C.1
cctctcgtggtggtcttgtagagggtaaccgttcaatctgagcattcgtagctcccgtaggggaaaatttgaagtgataccgtattctatatctcccgtatatttggaaccttgatccgtcaagataccaacatcatgacctgacgctcaacacagatgtccttagctctcatggcactgtttttgcagctgtcaacagctgaaacggtccatgccggtgatgcaatcgacctctatgaacgggtggtcctcattgttacaagtattagagcctgaccgggggtatctgccctgataataaatggacacttgtcactttatgctgcctagtgttcaaacctcaccctgaa

SEQ ID NO: 17963 - DNA, 785 bp, Zea mays
  Clone ID: MRT4577_116386C.1
tctctgctacgccgctcgcgcatcctatagccctcgcgctagcgacgccggcgatgtagagagccaccgccctgacggcgactgaggtaatccctcgccaccgccatgtggcgtatgcaccccgcgggaagggatctcttcatggacgctgccgtactagaggagtcctccgatgtggatcaagaccgctaccaccgacgcggaggacatgattaccaacgggtgcgtacgaatactgagatgtacgactcagattgctgctctgctccgtgaccagcacgggatgccgcttgtcaagagcgtggatgtgtagatcatgctccgcatcctctgggtccgtggggtgcggccggacatcccggaggatttctacttccgcattattaaccgcttgctcatcacgtggcatttgtacatcatcaggaaggacaaggactctcgaaattcatcactcattcttgttgagagcacgatccaccggcttgtccgctactacaaacgcaccctcaagctcccacccacctgaaagcaccatccaactatcggtgcagcactctgctgctctacgtgatatccgccgatggcgtgctactctagcatctatgagcttgctctagatatgcattgatgcaacccatgttatgtctggagctggttagatgcactaggaacctctactgtttctatgcttacttggagaatcccatagaccatttttggttgcgcaattctgcctgacatacgtaacatgcatccatgatttgtcgagcgattcctccgaccac

SEQ ID NO: 17964 - DNA, 240 bp, Zea mays
  unsure (1)..(240): unsure at all n locations
  Clone ID: MRT4577_116387C.1
gcaaagaactgacaagacagtctacttnnagtgtntggtaaccataatgtgttttcgaccacaangcccaacacctatgacaaaagagctccaggagtcatctgcgatgctcaattaagaatcaaccaagaaccaatcatccacaagcttcaaaagagaacaaattaagggaaagacgcaatgaggcccataagcgctaagctgaggaagaggagctgcacaactgatacaaaaccaagc

SEQ ID NO: 17965 - DNA, 1002 bp, Zea mays
  Clone ID: MRT4577_116388C.1
cctcgccggggccccgctgcccacgcgccaggttgcacttaactgctgccaaacaactatgcgcgtccagcgtctgctgaggctgaggatggcgtcccgctcgtgctcccgctgcgctgccttggcgccgcacgctgcgctcccgctctcctctctcctcgccccctcgccctctgccgcgcgccctcgatccgcgcccctctcgtgcgcagctcggccgtgcaggggccacgcggcggcgtcagcgttgcacggcgcggcagggcggaggcccccgagcgtggcggcgatgtcgtcgtcgacgccgccgccgggatccgtgcagaagtcggaagaggagtgggaggccatcctcacgccggagcagttcaacatcctacgcctcaagggcaccgagtaccctggaacgggtgagtacgacaagttctttgaggagggcatttataaatgtgctggatgtggaactcccttatacaaatcatcgacaaagttcaactcagggtgtggctggccggcattctatgaaggacttcctggggccataaggcagacgccggaccctgatgggaggcggacagagatcacatgtactgcttgtggaggacacttggggcacatattcaaaggggaggggtttaagacgcctaccaacgagcgacactgtgttaacagcatctcgcttaagttcaatccgtcccccgaggaagcctgacggcagatgaactcccaatctgtaactcaacaacagaataaatttggactttgtttgttgctttcacattgtgtagagagctatgagatcgagtttgtcattcctcggatcatttcgaatatgatgtaaaaaatccaatcacaagtgctggtctttgttgataaatcaatgtacctcagttttagatgaataggccatgtatatgctcatgctcatacaacaaatcaactatcttcatgaagtcatcgtatccgcaggtacaggttatcaaacatactaattctatggtc

SEQ ID NO: 17966 - DNA, 316 bp, Zea mays
  Clone ID: MRT4577_116389C.1
ctcgtaacagcgcgaagacgtactgcaagaacaaagactgtgagcagtacacactccagagggtgactcagtatagagaggggagcggtacctggctggccacggagagcgccgtgatgaccgcaagcattcaggatatggtggtcagaccaagcgtgtcttccacaagaaggccaagaccaccaagaagattgttctgaagctgcagtgccagagctgcaagcactactcacagcacgccatcagtagatgcaagcattttgagattggtggagagcagaagggcaagggcacatctcttgtctaagcttctcgt

SEQ ID NO: 17967 - DNA, 425 bp, Zea mays
  Clone ID: MRT4577_11638C.1
cctttaaagcggacaaaccggacaggtaagcttttttttttttttttttttttttttattaaaaaaaattttattttttctggtggccgttttttagggttaattctggggctttccctcacattgggggactttcaagcctgcgtggggggggcccaattggccctatagggggtcctattttggttgactggcggtctttttacaaccctgggggaaataaaactttggttttacttccctaaatcgtttggcgcgggatccttttttgtgaagtttgggggttttctagggggggctttctgattttttttggcttccgttctcttgcctgtttgccgcttggaaacccgttgtggcggctcttttttctggttggtttacgcgggttgggggggggtttccgtttttgtggcttttgccct

SEQ ID NO: 17968 - DNA, 2413 bp, Zea mays
  Clone ID: MRT4577_116390C.1
ggttaaaaatagcttgtgatatgaagcttgcgcagttccaagggcaagcaagagtctgttttcttatttttttttttttattagggtagcgaaagctttgacattttgcaggctctggagatcacagaagccagagtgtagctacaaaaaaaaactgatcgattttacacgcatccgcgcatacagtgtcgagccagcgacaggtttggcgtatgccaagggcagcgtcaggttcattatttgctaacccagacagcttcggcgcgacgacgacaatcctactcctatgaacagcaaaatctcctcctaacgctggacgtttggtgctgcagagattctaccgtctccaccagttccatctgcttttccaccgcagcctgcagcgcgtttttcgtcgcctccagttcagcctcgagggattttatccgatcgaaggactgcatcaatacaagttctttctccttcggcatatccggaggtttgctcatgaggtgatcacacagtgactcgagcttcttgaggcgtcgtaaacaagcactcatgtcctcttccctttgaggttctggttcctgtgctgcggcacagggttggacggtttctagatatctttcttgccggtagacggaaaggtggaagaaagatgatatcctgatcaagagcgtgatcagtccagtagcaaggttttccagagtccttccagcggatgtaccatgcaaactaatgtaagcattccctaaattatttagccacccaaaggtaggaaaatatttacggcaagtcaactgaatgggcatctccatttgaggggtggcctgaggagatccaggagttgtatctaggagatgcttactgctagaactacaaaatatcgaagtatctgaccccttgacttcttcatgaactggggttagtaaactgtggtccgtactcttttggacaactgttaaaccaacgtcatcaacatccgactcagattcagcatttgatatgtcactaagcatgcccttcaggttttctgcccttagggaagagccacttctttcgtccccgtcagaaacttgctttatttctctagtactaccaccttccatactgtgtattagcttcataatgacagggtcattccatggacccctgttagacctgaggcaaccacccttctcactgcatgtgcatgatccgccaagaaattttggcaattcacttgagtcaataacttcgataagtctgctctggtagttggaaccaagaaccatggatcttggaagaagtttttgggtctaggaatcccttaacactgttccagatcaacttaaacccactgcctgcattcacaacatacatctgatgtagcgtctcgggatagtagtcactgtctattctctgcatacgttggacaagctcccttgcggtctttgagaaattcttgaaccccacaccatggacgtccagtatggtggtagtggagtcaatatgtctcttggctgacagtgtgcaggcagggaacctctccctgaatgccctctcgaactcctgcacatggtacttgatgtagcgatccaccgaggtgatctgcatgagcttgttcggatcaactttgccgagcctctcaatgtacacgggccggccttaacggtcgacgccatggtagccctgaggatagtagtggagtacatcgttgagctcgtcgaactcaaagtcctccaagattgtgtcggtaccaaactctttcctccacctcagcatctctgaccacatttgcattgccttgtcggaatcaaacttcctggctttcagaaacctcagcatcatgtggtagtcgtcgtgcttgtcggggaggaggcggtgcgcggcgagacggtcgcggaaggcggcgacggcgcgctcctcctcggcgtcgcggacgtcctcgatggagatggccgcggggaaccggaagtcagtgacgcgacgccgggcgcgcttcttccgtagcgcgtggatggccttgagcggcagggacccgatcttccggcgccgccggtcgtcctcggagctggggtcgcacagagatatctcgtgctcgtcggcatggctcactgacattgctgtgactctgtgtcaaatttgggattgcgcgcagtatcggagctcccgagatcgatcgaacaggagcttcttgcactcgctcgctggtcgattttcccccctaatgaagcccgcgagatcccgattgtagggtaggcagagcagtggaggactaggttcctgccgtccgctgcaggtaaccgctgcggtgttgcgttccggctggcggcggcggcctatctccggcgacggcgagactggaaggggcagtggcctggccgccgatcacgcaacacttgtttatatgcaccagggccgagggcggggcgcggcggggatgcgtgcg

SEQ ID NO: 17969 - DNA, 1719 bp, Zea mays
  Clone ID: MRT4577_116391C.1
aggctggcgtacacgacggcgctgaccacgctcttcagctacgggctgctcttcgccttcggccagctcagggatctcttccgccacctgctcggctgcttcagacccaacaaggacgacgacgtcaagcaggggtacgcgccgatctgcgtcggcctggaggatttcttcgtgcgacgactctacctgcgggttcaggattgcttcggcaggccaatcgctagcgcaccggactcatggttcgatgtggtggagcgtacctcagacgacaacaacaagacattgcagcgcacctcaaagaccactagatgcctgaacctgacgtcctacaactacctcgggttcgccgcggccgatgagtactgcgtcccacgcgttgtcgactccctcaagaaatactcggcgagcacctgcagtgctcgtgttgatggcggcacgaccaagcttcacaccgagctggaggagctggttgcgcgttttgtcgggaagcctgctgctgtcgtcttcggcatgggttacgttacaaactctgccaccattccctgcctaatcggaaagggtgggctgattatcagtgactcactgaaccacaactcgatcgtcaatggcgcaagaggatccgatgcgactgtcagggttttccggcacaactgccctgcccatctggagaaggtcctgagagagcaggtagctggtggccagccgcggacgcacagagcgtggaagaagatcgtcgtcgtcgtcgaggggatctacagcatggaaggggagctgtgcaaactccccgagatcatagccgtctgcaagaagtacaaggcctacacgtacctggacgaggctcacagcatcggcgccgtcggacggtcgggccgcggcgtctgcgagctcctcggcgtcgacccggccgacgtcgacgtaatgatgggcactttcaccaagtctttcggatcatgcggtggatatatcgctgcatccgaggagatagtccagcacttgaagcacacctgtccgggccatctgtacgctacctccatgtcgccgcctgcagtgcagcaggtcatctcggctattagagttgtccttggggaggatggctccagcagaggtgcccagaaactggcgcgcatccgtgagaacagcaacttcttcaggtcagagctcaagaagatgggctttgaggttcttggtgacaacgactctcctgtcatgcccataatgctctacaatccggccaagattcctgcgttttctcgggagtgctttagacaaaaggttgccgttatcactgtggcgtttcctgtgactcctctccttctcgcaagagcacgtttctgcatttcagcttcgcacactagggaggacctgacgaaagccctcgatgttatcagcagagttggtgacctcgtgggcatcaagtacttccctgcacaacgaccaaagattgctgaagctggtcacggcaattgaggcggtagagaggaatgagccctgaaattaccccatgagtggctgaagttgttaagagtccttttaataagttatcaaataaatagattatcatggaaacaagcacgcgcgcattgatcagtttcgtcgggattctgtcgtattagctgaatattttgttcctgatcttacaattacctctccaactccgaatttgtataactggttaagttcaatctgggttgtggtaaacatcgaggtcgtcttttattt

SEQ ID NO: 17970 - DNA, 382 bp, Zea mays
  Clone ID: MRT4577_116392C.1
aagaacaagagggaacgctaaagcacgcctgatacccctccggaatacccccgatctcaacttctcttttcgaacctcgcatctggtatgcgggtcctccatattgacaatggggggggctcatccggacgctgaccacaactacacctcaaggctgttcatcggcttcagtgcctgcaccacgttgctgcctgatgtgcacctgctggcactcatgaacaccacctgcgtgctcctcaacatcaaggctgacagcaacatgcacaagctcaacgtcggcaacgaggccacccacgatcatatgcacaaccacatccagctgttctgcgacttctgcaccgacacacccaccctggtttgactagacattagctagctgcta

SEQ ID NO: 17971 - DNA, 243 bp, Zea mays
  unsure (1)..(243): unsure at all n locations
  Clone ID: MRT4577_116393C.1
agaagatactacaaggggacattaaccacataatgggatcttcaaagctcagggcaaagacacacagggttcacaataaatgtgtccaaaacttttatccagggcacagaaacagattttaaaaaaacataaaaacnctcttatacacataaaattcatttgggggggnngggggggcaaaaaaaaacctttaaaaaaaaaaaaaattgaggggggnaanaaaaanagggggggggggggggg

SEQ ID NO: 17972 - DNA, 110 bp, Zea mays
  Clone ID: MRT4577_116394C.1
atctctctaacgcacgagccaccaattacaacaggggtctttttatatccatatgcgctcacacccctcattaattaataacgcccaactaaaataaagccacaatacaa

SEQ ID NO: 17973 - DNA, 512 bp, Zea mays
  Clone ID: MRT4577_116395C.1
ggaactcagaacatcgcgagctagcaatgcattagtaccgtcatctagctgatctgataaaattcaacttttgcaataacatactacagctgttataaggaaaactttaaacataataggcatgcacagagcatgccgttacaccattccactgctttggcaaagtggtatgaaagataaaaatatgaaggcactagcttcagcgtggacatgaaaggtgggtacaacaaggcatgagcctcacttccagagcttgcgcagggacatgttcttctccgagtctttcttcatcaccttggccaccgccatctcgaagtcctcctgggtaacgtgcaccctcctctcgcggagagcaaacattccagcctctgtgcagacagccttaagctcagctcctgaggccccattcatcttttcagcgatctttttcagatcaataccacgcatcaagttcatttttcttgaatgaatcttcaagatatcgaaacgtgaatcctcattaagatttggaa

SEQ ID NO: 17974 - DNA, 726 bp, Zea mays
  Clone ID: MRT4577_116396C.1
atctacctccgccagacactccaaacacttgttgctcgacactgtctcacaggtaatgacgccatgctctccgtatcaggcgagagatctaaacgcatcgtggagaacgcgcgcgcacacgtgctagtccgtctctcctcgatcatagacaacgaactgctcaatggacaaaacgtggtcgacccccgctgcgaggagatctgcatgtgcgaggaggactcctccgtcataagatgaagtacctccgcttcctccgcaagcggatgaacaccaagacgtcccacggatccatcgacttccgcgaccccgccaagattctgtggcgcaccatccgtacgatgattccgcacaagaccaagaggtggtaggcgtctctggctaggctcacagacttacgagggcggcccgccgacgtaccacaagaccaagcggatggtcttccctgacgctcgttaaggttctgatgctgcagtctgcacacgagtactgcctcctcggtgagatctctaaggaggtgctccgcaactaccatgtacacctatcaggcaacttgaggagaagaggaacgagaagcgcaaggttgcctacgacaggaagaagtaatgtggtcaagctgcgtgacaaggccgacaaggcagcctacgacaaattgtagtatcacttggagattcttgcccctatcagtactgaggagctgtgctatgtcaatcacgtttggggaaatct

SEQ ID NO: 17975 - DNA, 1333 bp, Zea mays
  Clone ID: MRT4577_116397C.1
caggtcttacaactaggatatcttctggtggtttgctgaaaaaaactttattcaacattgcttataagatgaaactgggcaacatgaggaaaggaattaaacatgagaaggcagccccattctttgacaaattagttttcagcaaggtgaaagaaaggcttggtgggaaattaagagttattgtatctggaggtgcccctctagctgtaccagtggaagagtttttaagggttgtgacatgtgcttatgttgttcaaggctatggactgacggaaacttgtgcgggatctatagtttcgataccaaatgaacactccatgcttgggactgttggtccacctgtccaacatatagacgtacgtctcgagtcagttccagagatgggttatgatgctttgtctagcgtcccgcgtggagagatatgcataaggggaagtgttctgttctctggatactacaaaagagaggaccttgagcaggaagtcatgattgatggctggtttcacactggagatattggcgagtggcagccagatggatccttaaaagtgattgatagaaagaagaatattttcaagctttcgcagggggaatacgttgcagtggaaaatctagagaatgtgtatggtgttcttcaagatatagattcgatatgggtatacgggaacagcttcgaatcttctctcgtcgccgtcgccaacccgaaccagcaagctctcgagcgctgggcggaacagaacggcgtcaccggaagcttcgctgagctgtgcgagcatccaagggccagagaacatattctcgcagagctcaccaagatcgccaaggacaagaagctgaaaggctttgaggtcataaaggctgtccatctcgaccctctgccgtttgacatcgagcgcgacctcatcaccccgacgtacaagaagaaacggccgcagatgctcaaacactaccagggagtaatcgacgcgctctacaagggcatgaagtgagacggcacgtttgcagagtcgcaaggggtactgttgtgaattgtgatgcacatatttgtctatatgttgtttcagtatactgtggtgtgtggagtcactcggagggttgtgtattgttgtattgagataaggggaatataaataaaataaaaattagtttgggtacgcaacgcgcggtggagagcgtgcgcacaggctttttgagctggacagtttgtattgaaattacataagcgatcagacaacgttaagcgctaggcactgggctgaccaagattaactcagctgagggtattaaattctcctctagtcaaaattgaatagaagacgatttaatccctatc

SEQ ID NO: 17976 - DNA, 288 bp, Zea mays
  Clone ID: MRT4577_116398C.1
atcctgtggatgttaaacctcgtttttttccccacacgatattaaaacttaaagcaccagaaccagtcatggagaccagccagtttagatggtaagtcatatttctggtggtacacagtagaggaatcccttcactctatctttaggtagaaatatttggaggatgtgacagcctctgagaaacataatgttactatgtggattttaaaaaatataatacttgcatgtaattgctataatgttcatatttgaggcagttgtgaaactggtttatgattgttggtgtac

SEQ ID NO: 17977 - DNA, 418 bp, Zea mays
  Clone ID: MRT4577_116399C.1
cctaaattgtgaaacgcgaaatgttaaaggcggaactttaggaaggaaaagaacttttttaaaggaacttgatggaaaaaaactttatgaaaaggggcgcaaataaaagtaattgaaaatacatttttggaagagatctttttggatagggtagtttcgtccttaccattggagggggaacactggacgggaaataaaatttgggtaaaaaaagtaaggctggccatttaaagctccccacttggaatccggcaccttaaacctgggagggcgggcatttggtgggaggaacttttgggggaagaaactatttttttaacacaagattttttacccaagggttttttgccgagggggtatttttcaaggcaaacgtttggaaacccctgcttccaaatccctttggtccggttgattt

SEQ ID NO: 17978 - DNA, 263 bp, Zea mays
  Clone ID: MRT4577_11639C.1
agatcgctgtcatggaaacgacgtcatgcttcctgacctccaaagcatcgtccgccagcaggagcacggcggtgctgccgcccaccgcccccggcttcgcaaagcctaaaccttgtctgcaactccttggcaacaaccgccgccgtgcctgctgcgggagcatcagcgcgcggggggcgcccgaggacagcgccgcgccaacgcccatcggtcccgaatggggctcgtttcgcgcgcaactctaattcaaggagcaactgccg

SEQ ID NO: 17979 - DNA, 162 bp, Zea mays
  Clone ID: MRT4577_1163C.1
aggggattctggaacatgacctgattagtgccacgaggcctcagtgagacttcagcctttgaggtaaagatcacggttataggttactaatctaagactctaatggccgactgtaaggttagctcaagctatttcatgttcgagggtatcaaaaggaggata

SEQ ID NO: 17980 - DNA, 351 bp, Zea mays
  unsure (1)..(351): unsure at all n locations
  Clone ID: MRT4577_116400C.1
cccggcctgggcggggttccttttcccccgctggttccgctgggaaaaaaaatttgggttttgtttttcgaccttttgttccnntgtttctttttctccattttttctggtgggggggttccccctccctgggtcgagatgcttttggggcgttgccccacctttttccgttttccttcccggggggcttgtcttttttttggggccggtttcttttccgcgctttggtgggcctcccccnatcttttgcggggtgcgctcccaatcccgaggtgtgtgggtttttttccttccccccccttggtggccctttcgttcgtgtggggggcctggtttctcgggcccaaaacc

SEQ ID NO: 17981 - DNA, 269 bp, Zea mays
  Clone ID: MRT4577_116401C.1
aaatagtgttattattatattttttgtttgtttttttttttttaagaaacaaaaaagtgaaaatattcgcaaaaggaggggcggggaatccaaaaaaacatgggacaaaagagagcccagaggactggaagggacagaggccgaagaaaggcatataaaaaattgccgccaagcctcacaagacaggacataactgacatataaaaaaaaggcacagggcatggaaaaaaaaaacaggaaaaacgaacaaatgggaacggaaaactacc

SEQ ID NO: 17982 - DNA, 370 bp, Zea mays
  Clone ID: MRT4577_116402C.1
cccacgcgtccgcaaaaatcaccaatcttggaaacccctgctacacttgtattcccaaactacattcatggttggaggcaacgagggaggcaggcattggtgctgatgatgctgataggccaagcccaacggaaaaaaatttggtgcagcactgctgcaaaccagagtgtttgcagcccctcacataaaggagtatagaccccactcgcagcagcaataattcaactaaaacgttatctggtggacctgcaagtggggtctatcccctttttgtgaggagctgcaaaacgtcggatcaccggttggcctagtaagcaaacatatgggccggattgaggatgcattatttttatcattattcattcaaaaa

SEQ ID NO: 17983 - DNA, 286 bp, Zea mays
  Clone ID: MRT4577_116403C.1
aataagaatttctactctcttaaagaaaaacaataataaatggggatggcagaattaaatatgctataatacctaacgaaagtagccatgagcggagagaggtaaaggcgatcggctcaagcgcccgtcaagaaggccacgtacaggaactccaaagctggcctccagttccctgtgggaaggatcgtcaggtttctcaaagccggcaagtatgccgagagaagcggcgcccgcgcccctggttacctcgatgccgtgctcgagtatcttgccgctgaggttcttg

SEQ ID NO: 17984 - DNA, 598 bp, Zea mays
  unsure (1)..(598): unsure at all n locations
  Clone ID: MRT4577_116404C.1
cacccttccccactagcctggcgaccgcgccgcggnggctgctccccgcgctcctcaagccctagctccagccggcgcgcgcggcctctccaccgagaaggctgtcggcgccgccgccgtcgccgtcgtcggcagccataccgctaagtggatgcaggtattatgacgacttcacatcaagcactatcttgaatcctgaatgttcctgaaatgctttgttgaggggagtacagaccaatgttccttgttagtagaaacaaaatgactaccggagatgatctattatttctgtagtttccaataaatatccttgaaatctggaatcacttcaggatttgtatctatatctgctggatatcatcagttggtccttttgtattggaaagtaaaaccaggttttgaaccctgggataggccataggcacacataagacaagagcattgccaccttgaccaccttattcctcattcagtttatcattgtgagaccatgataaagttttacgctctgtttggatgttgtagttttaaggaactgtagcattagcaaactttagttttagaacaatgatgtgcaaaaaccatggtttagaagaaa

SEQ ID NO: 17985 - DNA, 253 bp, Zea mays
  Clone ID: MRT4577_116405C.1
ccgccctttttttttttttatttatttaccctttgggggagagggagccaaccaaaaacatgtcatatttttcaaaaacgaaccatctcattgctcactctggggcaacacgtcacaccatttccgggcgctaactaatttactattggcatccatttcatacaggatggctcaccaatcttattttcacgcattggatccagggctaccatcatttttgcttattaccttatcaaggcttttcttcttttgg

SEQ ID NO: 17986 - DNA, 435 bp, Zea mays
  unsure (1)..(435): unsure at all n locations
  Clone ID: MRT4577_116406C.1
gggagggcacagtcaggttgtttatacacaaaagtgaggcagggttagccatacatgtgatttacaatacatagcgacacattagataggttatttgcattatttggaagggtttcctaggcctttaaatcacaacatcatacaaggggggaaatcagcaaccacctaaaaaagtaaaccacatggggtcgagtcaggcccaaaaaccgcaacagcttccaatagttgcagcggtgttaaacaactttcgtggctgcaaaggccaccttgggctggggccgttttgcaacgacaactgcagcttggcaatggcgttggatgaatactcaaagctgcattgagccaacatgacagtttatgcgggaactggaccttgaaggataacatttcctttagctnaccattcctttaaaccatattggcccacatgtcttt

SEQ ID NO: 17987 - DNA, 691 bp, Zea mays
  Clone ID: MRT4577_116407C.1
ccattgggtccctcgaggccggccgggtcctcctcatctcactcactcccttttcctcacgccccctccccgcctcgagcccctcgctggctcgctcccattcccatctcgcactaccaaccttccggatccagtgccgcacgcctcactccccgtccccgacacccatgacacgcaagaggcggaagcacgccgccgccgccgccgccgccgcctagggttccgatcccttcctcatggattcgctgccgcggaagcgcaagggcgcgcgcgccgcgtgctccctggccggatcccgccacgatgcgcctgccgcccgcaagcgcacctgccgcgagcccaagccgcggcccgagaagaagaagccctcttccgccgatgagggctccgcctccgcccgcggcggcgtggttatgacggcgccacaccatcctccgcgcgcacgccaggttcggcaacaagtgggccaccatcgcgcgcctcctctccggccgcaccgacaacgccatcaagaaccactggaactccacgctaaagcgcaaactacgccgccagcgacgctgttgctgacgctgacgacgagcgccctggaagcggaggaggagcgaggctcacccagctcgtgaaatcactaatctcttcgtagttcggcccagtgctgacgatcatgacggagacaacagccaacgag

SEQ ID NO: 17988 - DNA, 149 bp, Zea mays
  Clone ID: MRT4577_116408C.1
gccctctttcctttttttttactaaaaccaaggagttgcatgcaagacaaaagaccgactgacaaaagagaggcagagtgtataaccataacagtgattggggaccgatgctgccacccacaggggataggatgagacgccaggagaac

SEQ ID NO: 17989 - DNA, 530 bp, Zea mays
  Clone ID: MRT4577_116409C.1
tctatgtttgccaggcgcttaccgcgctgaaggggcttgttgcagctgcagattgtgctggtgcactcgatgtcatcgataacttgcaaaatctgctagatactgatgaacttgctgggctttattgctttcggcatattcgagatcagctgggaacatcactatattccgtgaacaggggggtttcagcagaatttgtgcatgctgctgttcctgatggaaaagctgtagatgctatgattttatcaactgtgaaaagaaaggcttcgagcccattgaatgggacagaccatgagggtaacatagacgaggaggaaagttttattctcagggaccggctcctccccctcattatttgcctactgagaacggacaaatttcctgcagttctcagaatttaccgggatacacttataactggtatgaaagcttcaatcaaagcaacagtagcggaattaatccctgttttaactgccagaccaatagattctgattcagtaactggaggcagagctaccgatgctgacgct

SEQ ID NO: 17990 - DNA, 447 bp, Zea mays
  Clone ID: MRT4577_11640C.1
atgccgcggcctgctgaccgctcgggctccgttgggttgggatcacccaagccaccgtggagatataaatcctcccctgcgtccttggctcctggttttgcgtcgtacccgaacgccgagaggcacacaaccgtagagcatacccgccgccgtgagaagttggtaggagcaactgggtgcatgggccagcgcaatccgcctgctttccccaccgctccgggtactcggttggtcattgcggaagtgcgggaggtcttcgggggagcagaagggcaccacgactccggcaattgctcgtcggagtacttcaaccacaccggaccgccaagcgctatggtcgacctccttcgaccccatctccgaacctgggcgccgccgccgcgcttcgtcattggcgtggggtgcgcagtctcaggcgttgattccccgatggacggctgggattag

SEQ ID NO: 17991 - DNA, 210 bp, Zea mays
  Clone ID: MRT4577_116410C.1
tggcgggcgttgctgggggatgcgagctggggaccaggcttggcgtagtgatgggcataggtgtgggctgtgggaggtgggtgtgcggtggcggttgcacgcggcgtacgagccgtaagcgtaaagggtggagtctggggtgcctagtgagggaggtggctgacgttggtgggggtgggctgactgagccgtgtgcgggcgggaaacctg

SEQ ID NO: 17992 - DNA, 421 bp, Zea mays
  Clone ID: MRT4577_116411C.1
ccccctcggatttttctctttttttttttttttttttttttttttttttttttttttttttttttttttttttttttgtttttttgttttttcctttttgttgtgtgcgagctaaggtttataaccacaagaatccaggcatccactgtggctaagcctgtccccacagtaacaggggggggggactggatcttaacctgaccccgcttaaccctggccggtaccaggataacaaacacacctggcaaagccagggtaggagggacaacaacgaacctagcatctaatgggggcctggacaccctgtggagaattaccgtccacgaacaacaagctccaaccgccggcaatcctacaggggcacagcttgccaccctcttaagcttgcgggaggcagccccaaagttgattgccacgatga

SEQ ID NO: 17993 - DNA, 204 bp, Zea mays
  Clone ID: MRT4577_116412C.1
tgttcggctgcaccaagagtatctccttcctgaaggccttgtataggcacccacaccaaggcattatcaagcactcagctcacttgacagaacactggcccaaaactaatcgtgctcctggcctgcttgctcaaaggagcctaacactggcttctcgaaggcatcatggaccgatgtatggtccttgattctacaagggactcc

SEQ ID NO: 17994 - DNA, 730 bp, Zea mays
  Clone ID: MRT4577_116413C.1
agaggaagcgagagccgccgcgatgcagcaagcgatgcccatgccgccggcggcggcggcgccggggatgcctccgtctgctggcctcagcaccgagcagatccaaaagtacctggatgaaaataagcaactaattttggctatcttggaaaatcagaacctgggaaagttggcggaatgtgctcagtatcaagctcagcttcagaagaatcttttgtatttggctgcaatcgctgatactcagccacagaccactgtaagccgtcctcagatggcaccacctagtgcatccccaggggcagggcattacatgtcacaggtgccaatgttccctccgaggacccctctaacgcctcagcagatgcaggagcagcaactacagcagcaacaggctcagatgcttccgtttgctggtcaaatggttgcgagacctggggctgtcaatggcatgcctcaggcccctcaagttgaaccagcctatgcagcaggtggggccagttctgagccttctggcactgagagccacaggagcactggtgccgataatgacggtgggagcggcttggctgatcagtcctaagaaagctacgagcttgcgttttaggccgcagaatgcatgtatactaccacccggacaaacagaggatcgtccctgtgcccttgaatgataagtggccgtgatcttcgcgtggatgatgatgagtagttgttatgtttgccttggcttttc

SEQ ID NO: 17995 - DNA, 303 bp, Zea mays
  Clone ID: MRT4577_116414C.1
cgttatataaaaaaaaaaaaaaaaaaaaaaaaaaaaaaaaaaaaaaaaaaaaaaaggaaaaaaaaaaaaataaaaaaaaaaaaaaaaaaaaaaaaaaccaaaaaaaaaaaaaagggggcggccgttttaggggtccaaagtttccttccccttccttgcaacgtattagtttttttttggggcccccaaatttaatttcattgcccgtgttttaacaacgtcgggcctggaaaacccttggctttcccaaattaattcgctttgaagcaaatccccttttcgccagttggcttaataccaaaa

SEQ ID NO: 17996 - DNA, 233 bp, Zea mays
  Clone ID: MRT4577_116415C.1
tttgggggattaattaaccgacccatggcatgcatagaagatattggtcaattaactgcaggccggcatccatctccacagatacaaacgtatgaaagaaggacatgcattggtcatgcataggctaacaattgcacacaactaggacctgacacagaggtaagctggaccaaaatctcaatgcgtacgctttcgatcgtggcaactgaatgcaaaccgtcagacataatctt

SEQ ID NO: 17997 - DNA, 807 bp, Zea mays
  unsure (1)..(807): unsure at all n locations
  Clone ID: MRT4577_116416C.1
cactctcaccctcgtcagcctccggcagatcctcctcctcctccataccgctcgaagctccgtcctcctcctcccgacacctcgagatctccgccccggacccgtttctccgccgccaaggcccagcgccgccgccgcccggccctccctgtcgcaggcgacgccgccgccgccatgtccaagtctggagccctggatctcgcgtcgggccttggcgggaagatcgacaaggaacaagtcaaatcggcggtcgacgagtatgagaaatatcatggatactacggagggaaggaggaatcgaggaaatccaactacaccgatatggttaataaatattatgatcttgctactagcttctatgagtatggctggggtgaatccttccactttgctcacaggtggaatggggaatctttaagggaaagcatcaaaaggcacgagcactttctggctttacagcttgagttgaaaccagggatgaaggttttggatgtcggctgtggaataggcgggccattaagagaaattgcgagatttagctccacctcagttactggattgaacaacaacgactaccagataactaggggaaaggcgcttaatcggtcggtaggacttggcgctacttgtgattttgtcaaggcagacttcatgaagatgccattctctgataacactttcgatgctgtttatgccattgaggcaacatgccacgcaccctgatccggttggctgctacaaggagatctaccgtgtattanaacccgggcagtgttttgctgtatatgagtggtgcattaccgatca

SEQ ID NO: 17998 - DNA, 421 bp, Zea mays
  Clone ID: MRT4577_116417C.1
tcggaattcggctcgagcaaatagaagcctgtatgggacctttgatttaagtgcgcgctctgaaagaagagtacgggcctttcttttccacggcatcttccacactcttgaaaaggaatggaaaaaatactatcgagcttaacatggaaaaggtgcacaagaaataccttggtcttcaaaagaaaggagcaacatccagcgcgaggcgtaacgcctacgcgagtcagatctacacctagatagactactctcaaatccgaagactgaaacaaacggggacgccccccactactgcatcttaccccgccggattaactgatcccgcggaccccctacctttcccagttgacgcaattgcttcccccgtaacgcatggagaccacatggaccttattttaagcggatcaaaacattgtcacct

SEQ ID NO: 17999 - DNA, 671 bp, Zea mays
  Clone ID: MRT4577_116418C.1
tacccggaaaaaaagatacgagagagctctaggacggaacgagcgagggagcgagcgagagaggacagaagcgaatagcaggcgaggagaggaggcgaggggaagcaaggatgaggggcggcggtggcggggtgatggacgacggcggggttgagcacgcgcagatcccgaacagcttcggccacgagctccgcgcatgcctccgctgccgcctcgtcaagacctacgaccagttcagggagaatggctgcgagaattgccccttcctggacatggacaaagatcgcgacaatgttgtcagctgcaccaccgccaacttcactggaataatatcgctgatggatcccaataggagttgggctgctcgttggttgagaattgggaggttcattccagggtgctatactctggctgtctcagaggaacttcccgaggagtatcaggggatgtgccaagacaacaacgtgcagtatttccctccgaagcgcccctgagcaggctcgaagttgatgcagtcgtgatcctggagccgtacttttacatatagttgcacctgtaatgtctgctgattaaactgccaccagtgttatgcatcctggagcgattcgttgaacgcttctgtacaacctggaggcattttaagctgaactagttcatcgcacatttctact

SEQ ID NO: 18000 - DNA, 589 bp, Zea mays
  unsure (1)..(589): unsure at all n locations
  Clone ID: MRT4577_116419C.1
tccgtataataaccacttgnattatgtctttatgtgccatttcttcccaatttcacttcataaggggttgcatcatgtttgtctcatctctttaagcaaacacaccttgagcatgtgacttgaaccatttcaccacatatgagttcgatccattgcttcaagtcacttctagtaatgatttgatcttcaacacaacatgactcctcatagcttgattagtacctcaactcaatgcaagtactctcttcttcaccttagccatgatacctctatcctcaagccttcacttgacactaatgcactcttgattcattcttcaatatctgatcaaatccaatcctctatcatactcttttgttcttgtaaaacaaaccacttatatgagacctttgcataatcatcaactcatgtctcattagctatttgccaaacatgccctctttcatataattctatgatatcccataatataaaaaccattttatcgattccctttgcattgttgtctttgtattgatgttgattgtttccaatcagaagatccaccataatatcctcaaagactagccatagcagaaaggtacccatt

SEQ ID NO: 18001 - DNA, 797 bp, Zea mays
  Clone ID: MRT4577_11641C.1
cattgggtacctcgaggccggccggccccctcgccctcgcccgcctgtttaaacctgactgtctataacttaccgccggtccgcacccgcccaccgtccctgtccccttccccgtctaagcactcggatcctctgccgccgcgatgagctactacggccagcagcagccgcccgtcagcgcgccgccggcgcaaggttatcccgggaaggacgcgtacccgccgccgggctacccgcccgcgggatatcctccgccggcgcagggctacccaccgcagggctacccgccgcagggctaccctccgcagcaggggtatccgcagcagggatacccgccgcagtactcgcagccgccgccgccgccccgccagcagcagagcagcgggccctctttcatggagggatgcttggccgccctttgttgctgctgcctattggaagcctgcttctgagatctaagctgcgcacaacttgttctagaaacaccacttcaatttgcacggttgatataactggggattggcttgttagcgaagaaccgaagataccatgggttcttatgcaaatcacagttctcctagttctttctatcgttctgattgtccgttgcgatgtttggtgtacctagtagtatcttaattatataccttacactgtttacctatccaatggaattcttggtctagctaacattgtgagattatgtcacttttctcgttctctgtaaaaaaaaaaaaaaaagtcattgcattttgctcgcacttttggagcctttgaggagggggagttggaggctt

SEQ ID NO: 18002 - DNA, 122 bp, Zea mays
  Clone ID: MRT4577_116420C.1
atcatctgtgaggaggatattttaaatactgtaaatgataacagttaatgatatacacatttagactgagttgcacactggcagggagaaccaaaaacattacttccatacttgtgtcatga

SEQ ID NO: 18003 - DNA, 329 bp, Zea mays
  Clone ID: MRT4577_116421C.1
agagagaggcccttctcttttaggtaaacgccaccatctagagctcggccgttccgcatgatcatcaggacatcgaccacctgaccagctaagcaaggtacaccggaccgagagaaagctccgccgcggagcaccagcaccagcaccaccttgacgtgccgcgcttactcggctgcttccgcgtctgacgacacagaccgaacgaccgtacggcgacgcgggctctggtgcttgtttcactacttgatgaaccattctttggttggggaaaaaataaaaaaaaaatgcgccccgcgagctccagctatcggtccactatacgaggcaac

SEQ ID NO: 18004 - DNA, 419 bp, Zea mays
  Clone ID: MRT4577_116422C.1
agagtatctaaagtgatggaagtggtcggaggagtaatccatccatccgatggaggcatgcagcctataggggagtgcttcttcactcactcttgctcttgctcgtcgtgccgcttccgctaccgtgccagcacgaagagcaggagcccgtaccgcggattatccttgccaggcacttgaccacctaccttctagcaagccgacaccgccagctaggagcgcatctagcagagggtcagcggattggacacgctatcgcctggacataaggagcgcgagacctgcgacggcagctgcagcgaggaatgcgggcgtgctccagctattcgacgttgaaggtatactaacagcggcgcgcaaggaggagactccagatgagctagaggttatgaaggacctgcgccagcatatgacagggc

SEQ ID NO: 18005 - DNA, 501 bp, Zea mays
  Clone ID: MRT4577_116423C.1
cccctcctcgaggttttttttttttttttttttttttttttttttttttttttttttttttttttttttttctgatgagttttatttctcaatacccggtgggaaccggctggccttgaagcatccatgggcttttccccacaaacaaaaaaagcggaccttttaaaatcaggggggaaagcatccttgcccaccagtcaatttgaagggccctgtggcattgtgggggagggccaataacaaccccctccctacccctaggggatgcgctttataaggaggagggcgctctccacactcccgcggaacccgcgaacccaaaccggccggtgccaaagccaaacccggggggggaggcccccatgaggacggcccaaggaacccgggggggaccccccggggcgggcactttttacgcaagaaacccagtgaggcaaccgggtggacccccttgctccaggttccaaaagtcctgctcgggggtccggggaaaggctttgt

SEQ ID NO: 18006 - DNA, 1001 bp, Zea mays
  Clone ID: MRT4577_116424C.1
ccaccactctcatagcaaagaccatatccttccacttgctatggcggcggcggcgacggcgaccacgacctctccggcgagggcttcgtggcggcctacggttcccccggcctctagcaaagaccaagaccatatccttccacttgctatggcggcggcggcggcgacggcgaccacgacctctccggcgagggcttcgtggcggcctacggttcccgcgacctcggcatcggcagcaggagtctgcttccgtgttggagcgaagcgcttcagtccagggctccgaacggcaagcacctgtcggcaccgacaccgaggcagaacaaggctcacaacagctcacgtcaagagcggggaagccgaggggcgtccaagcacggaggagagcgcaactggcatcggcggcccggacgaggactccttgcggcgcgagctcgaaaccgcgatcgaggaggaggactacgcgcgcgccgcggcgctccgggacgagctgcgcgtgctccaggaggactgccgggccgcggtgctggcggcgaacgcgcggttctacgccgcgttcaaggacggcgacctggcggcgatgcgccgggcctgggccaggggcgaccacgtctacgtggtgcacccgtcggcggggaggatctccgggtacgagatggtgatgcagagctgggagatggtgtgcgacgccggctacgagttcccgctgcaggtggacctgcaggacgtggaggtgcgcgtgcggggcggcgtcggctacgtcacctgcctggagatggtcaggaccaaggggagcagcagctggggcaagcagctggccaccaatgtgttcgaggaggtggacggcgagtggctcatgtgcgtccaccatgcctcgcacttcgatgagtgaaatcgctttgcaattcgatcgatcgatgagcggaaataattttggtcggccgtcagtacagaaacatatggattcagatttcggaaatgtgacctcaaaaaaagttatt

SEQ ID NO: 18007 - DNA, 343 bp, Zea mays
  Clone ID: MRT4577_116425C.1
aataattttttttttttttttttttttttttgttttttttttttttttttttccacagttccatgactgggggtatataagaaaaggccgcctcacattgtcttgggatcaaagcaaattttttgggaacggggaacattccatttgagcctcaccaacaggcaagggccgggttcaagcttttctcggggggttactactaaacaaaatcctaaacgttcccagttttccagaaaaaacaggttttgttccaccacatgaaacgcctattttttcttaaggatctgaacgacgtcctcatcggcaagctcatgctccttgccaactctttgaggcttttgtt

SEQ ID NO: 18008 - DNA, 587 bp, Zea mays
  unsure (1)..(587): unsure at all n locations
  Clone ID: MRT4577_116426C.1
gatctaaccagtaatcatcggtggaattgctgaattgattattccatcataggaagagctgttacaagaatttagactagacagaaccaaaagaacacatagtactggacaccagattctagtgtttctctttccctttcccgctgcagtgagcaaagcaatttcacctccctggaattttcttgtacaccacacattttcagaaagtgttttccaaaacaaaaaagtttcagaaacattccttgttctaaagcttccttcatttcccagctctcttctgttactcccagatgtctgctagttgcatccaaaaaacctctcttcccagtcattttttcttgctcctatgctgaaggttagttccacaacatttgtcaatcagaaggctgaaaattggctttgggaatggttgtgctgcaatgcttatctcctcacaatttccttcatcgttcaccagtatctctcgaggtcgagaagcccagagggagcttaaggcacganaggcggttgtggtactcgccaattgctaggaaacatcgagctgcctgccgaactgtcagaatacggtgcatctgatgaagagtctg

SEQ ID NO: 18009 - DNA, 374 bp, Zea mays
  Clone ID: MRT4577_116427C.1
ggggcacccacagcccgttggaaactttaaaaaaaaacgcccccccccgggtccggtgtacaaaaggaaaaacaacccctaaaccgggggcccaagtgcaaaaaggaccccccccggtttatttttgcaccccccaggatatagcacctgggccggggaaccaaggggacccccaccaaaagggcccggggcaaaacaacggtattgggggccacggggggggggctaaaaaaaacccccctttttttaacaattcccaacaccaaaatattttttgggggcacaaaaaccccaaacccccccatagttcgggcccttaaaccccccacccttatacttggggggaacctgtccaaaacccccggaaacccggg

SEQ ID NO: 18010 - DNA, 234 bp, Zea mays
  Clone ID: MRT4577_116428C.1
cccacgcgtgcgcctacttttgaggatcagaaggatactagaacgcgagtcgttctgcattcagacgttgactgaaaagacacggagaagaccgtagctgcgatggccttattactgcaagatgaaagcagtctggacaagagcaggaataatcgttactagcaaagcttgatagaaaaagatgtgaggataggcaatgttctagctgagatccgagctggatgcgcatttgac

SEQ ID NO: 18011 - DNA, 105 bp, Zea mays
  unsure (1)..(105): unsure at all n locations
  Clone ID: MRT4577_116429C.1
ccgggactcctcccctggcccgaccgcggaaccctcgcgctctcccgtcacgccggaacggacggacgtggaacctcctccccacnnaangnaggaagagaggag

SEQ ID NO: 18012 - DNA, 445 bp, Zea mays
  unsure (1)..(445): unsure at all n locations
  Clone ID: MRT4577_11642C.1
ggagtcctctgagcggcgcgccctctttttntctttttttgttttttttttttttttttttggggtttctagacacatgagggggttggaaactaacacaagctccatacatagaatgggacgaaatatttttaacaaaaaggctgggaaagcaaggtttttcccacagatatacctgggacaagggggaaaaaccaacagcggttgcattttgggagggacagattacattaatacaccgatctcctcaagggccgccctttctgacaaccatgggaggggcagcactggtcctagtggggggctcataatcggggcagggctctcggagctcgggctctggctggatgcacgggcaagggccgaatcgcggacactctgagtttggccgagaacaagatcggggcagacttttgctcctggcaggacttcgggtggcagactt

SEQ ID NO: 18013 - DNA, 419 bp, Zea mays
  Clone ID: MRT4577_116430C.1
cttttggattatgttttccggtatacaactgggccaaaagtaatcggtttcagttcagtttactggattggagttcactggtacttgcagcacatggtcctcacctggaagtgttcaaactggccaatgtcatttgtggtcacatactcacatgcttgattattcagttctgagttctgatctttggctgtcccgctatagtaatctttaatgttctttaccagtggatggtcaaagcagttttttgatttgcatgcaatatttgagctgtggcataagaattgactgttaactcttgtagaggtgggacaatttcactggttttgcagaatgttcataagctgtttgatttcatatatcaccctactgcatgtgaacttcctattgatagaatttttggttgctcactattatatagt

SEQ ID NO: 18014 - DNA, 297 bp, Zea mays
  unsure (1)..(297): unsure at all n locations
  Clone ID: MRT4577_116431C.1
ataaaggctatgattaaaactgggtgcttccggtataacaattacatgctttgagagaacaatcgctagatgctctagnaattttttttgaaaggctcgcattgtgaagaaatcaattctacatagaactggggccattcattcattcttttatttatttcattcattcatttcacccatgacaaatattattttgttttatttcccacaacatttactggacattgtcatgatgttcaaattagaagaatggctcacgttagggaatgcctttgtgtttgtgtcgtgcaacccttt

SEQ ID NO: 18015 - DNA, 303 bp, Zea mays
  Clone ID: MRT4577_116432C.1
gttacaatactattttattttacaccgaatatccaatactggggaaattgaacaccggccaaaccagtcatggggaggttgggcccgttatgaaaaaattactgcctaacactgaaccagtttgtgtgttcgccggccggaattctacagctcaacacttttaaactcggggacttctgaggtggaagatgtacaccaatacagtgaactgctatttgctcatcggcgagatgtgatcctgtgcactccgaaaactgtgtgaatccattatttggccttttttccatattttctacaggaagt

SEQ ID NO: 18016 - DNA, 443 bp, Zea mays
  Clone ID: MRT4577_116433C.1
aaagggaaaggaaaaagcgccccggttttattaaatatatataaaccaaacagggggggccttttgctaacaaataacagttgaaaaaggggggggaaaaaccacttgttatttttaagggacaaaggacggggacagtaaaaaaaaaaaaaaaaaaaaacccataaaaaaatgacccccccggggagccaaaaactttaaaaaattgcccccgaacaaagaacagccgttttacggtttttaaataaaccggggggttttaagttccgaaaaagggggggctttttccatttcaccaaggaattgaggaaccccatcacttaaaacgggtttttaaaaaagaaaaaggcttaagggtccttgggcacctgcaaaacaggattccgtatccacagtttcgttttcgaagaaccttaaaggggtttttgtttgttcaaacgcct

SEQ ID NO: 18017 - DNA, 287 bp, Zea mays
  Clone ID: MRT4577_116434C.1
cggactctctaccttagaggtatgatcgccggatggaagaggatctcttacatactaacaaaatgtaaaaactgatgaaaggataccacattgaatgtagcaagacatcaacaagaaagatttctctaacttcatgtaaaaacactgcaaatacaagaaatgaacagatgccggctaaattacactaaggctaagggtaaaaaaaaaaagcagccccaatcacagtggcaaaattgtgatttttttggcaatttaaagaagtaaaataatcttgtatgtgtatgaga

SEQ ID NO: 18018 - DNA, 574 bp, Zea mays
  unsure (1)..(574): unsure at all n locations
  Clone ID: MRT4577_116435C.1
ggggggggggggggggcaaaaactatacngtcactcttccnnaacaacccatttattacattgcacaaatcaataaaacttcaactgctancgtcacaaaaccgtggattattcaagcgcgcgcagctctaccggcgacctccacggggggggggggggagctttctcttttcttttttatttttctgttcgttcagaacaagcaaaatcccgctcccgcccccagagacaccacagaagtcacgtctgactgatttccgcgcgcgaaccggggcacgggggcgctcccgctccatctccagttctccgccacaatgcacaaggaaggaagcatcagcgcatcaggtcgtagtgggacgaggagccgccgtacgatggcggcggcctggggagctggaggagctcctgcgccgtcgccatggcggcgtcgagagcctggagccgcgcgtgcgcgtggtggcccagggccgcgccgccgctgccgccgccgtcctgccacagccccggcgacgaggccttctgcagcacgggaaacggaaccggcggcgaggcagctgctcggggcagcgcgggg

SEQ ID NO: 18019 - DNA, 226 bp, Zea mays
  Clone ID: MRT4577_116436C.1
aggtcttagaccatagcttatctactccagagccagaagacccgatcgacaccatgagggtgttgctcgtgccctcgctctctgctctcgtgaagcgccactcaccatacaagcgcggtgcagtgcaccccgcgcggtattccgcgcggcattgcactcggtactgcactcggcattcaccggtcacgcgcgcgcactgacgcgcatggcgccgtattgcgcgaca

SEQ ID NO: 18020 - DNA, 860 bp, Zea mays
  Clone ID: MRT4577_116437C.1
gatctcggccccctcatccctcctccactccaatgctctccactcttctccgccaccgcctcaccgccgccgcctcctcctcgtcgccgacccacagcacgcctctccgtctgcgccccctcgccgcagccatgtcgtcgtccgcgtccgcgcctcacggcggccggaagccgaaccgcctcgccgccgagcacagcccctacctgctgcagcacgcgcacaacccggttgattggtacccttggggggaagaggctttccagaaggcgcgcgccaaggacgtccccatcttcctctcgattggctatagcacatgccattggtgtcatgtgatggaggtggagtcctttgagaatgaggaagtggcaaagttgctgaatgattggtttgttagcatcaaggttgaccgtgaagagcgccctgatgttgataaggtttatatgacatatgtatcggcactgcatggtggtggtggttggcctctaagcgtctttttgtcacctgacttgaaacctctgatgggtggtacatactttccaccggatgataattatggaagaccagggttcaagactgtattgaggaaggtcaaggaagcctgggaaactaaacgtgaagcgcttgagcggacgggaaatcctgttatcgaacaattaagggacgcattatctgctaaggctagctctcaagatgtgccaaatgacctagcagttgtctctgttgatcaatgtgtcgaaaaggtttgacaagtactctattgtacatttttgttgggggtactgtaataagatattcttctgaactaagtactactgtactagtattatttcagaaaataataatgccctttcagagaaaaa

SEQ ID NO: 18021 - DNA, 325 bp, Zea mays
  unsure (1)..(325): unsure at all n locations
  Clone ID: MRT4577_116438C.1
agggaaagagccccgccagcaggcaccgggccggaaaacccgggacgacccacgnatttcgccacccgaacgggccgccgcaaaggggcacctcaagggggaaaaccccccaccccccccaggcggggaagccaaccactgcgaccaagacgacagctacgacccccaaggggaaaagcaggacgcgaacgcgccagacagcaagaaagcgaacgacaagcggactcacaaacaccacccggacaagaaacccgaaccggagacgcggaagccccccggcaagaacgccaaaggccacgagaaaccgaaggaagaaaccaccagg

SEQ ID NO: 18022 - DNA, 738 bp, Zea mays
  Clone ID: MRT4577_116439C.1
tttttttttttttttttggccaggatcgaatgtcacatctttactacataacaggagttttgtacaaaataaataaataattacattatatggagacaacggtccagcaacccgaagttgactgggagacgacggcctagacctctcacgaacacatcgcagcatcctccatgcgcctcatcctgtggtacctgttcttgacctgggacttgagattccaggtaccaggatgatcttcaggtggctcgtgtcctcacgccgagttagcgacgaagatggtgatctccctgcactgtcttcatggctcgacggtggtcatagcgcatctccatgggctacccgcagacggtcgtggcggtagtagaggcctcattcggttggtagagcggacgagctagaggctcacggagaagatcctgaaccgcatctggacctccgtcgtgcctttgcgaagatcaccagagcacgacgcgacggggatttgaggcagcagccgggcaccgatgacgattccggccgaccccgcagcacccagaggcgttccaatgctccctctcctgcgctcacgatgctgcccatggcggcagtaatttccttgtgatagattcagctcggagcgcaggatcttcagccagctcgggatccctggcggtgctctatatcgctctcctccgtgtgggatgcagtagcagcatcgaagctctctctctacgccgcaaggagcgaccatccggccgg

SEQ ID NO: 18023 - DNA, 241 bp, Zea mays
  Clone ID: MRT4577_11643C.1
ggctcaccacacggtctcccggaactgtttgcaattgtgactaatgggcagctctagctactactaagaaaaccgtcaatcatcctctaccaccgtaaataaaactgggcttttcatgcacagctatctaccggatctgattcacgactgatgtgaaatttcgatctgggccaataacaccgcattatttgggataacactgcacttttgtcgtattatcgcttgactcatcacttgttgc

SEQ ID NO: 18024 - DNA, 880 bp, Zea mays
  Clone ID: MRT4577_116440C.1
tgcagtttggagttcgcagcggcgagattcgcacgaggagaggagagaagtgtaaggagtgtgttgctatctacaactctggtacagcatggaacaatggtgaagagctctgggacggtccagattcagcaaggtgcagattcatgttcagaagattagttgcctctgcattagatcccttgcaccatgtggtggggctggtcacaagaaagcattgctatcagcagaggatgtgcgaatctaccatgatgtgacctccagtcagtggatcaagacgctttcatggtgggtgattataggctcatgatgtcaggttgaagaaaggctgctgtagccctcagtgttatggagttcgcaggagtttctttctcagaacaaggctgtctgatgtgttttgacattgctatccttgctttagccagctccatctttcggtagatacatacatgcatgggcatatccattttgaaacatgccaggagaaagctcactggctctagagcagggtaggtctcaagcgttgttgcctgattgctgctgcgatcgttgcatgcttgacatgtctagtaggatcagtatgctaacataggcagggcttctgtaccatatgacataagttccttctgtatacagggtcgagatctagagaaaaaaagttcattatttcattcaaaaaaaaaaaaaaacccgtgttcgcgtcaacatgttgtgtgcatattgttgaaagaggttgccatgtccacagtagagatatttattttcatgattatcagtggcataagtctgtgcttgtatgttaatctatggattagttttggcactcggtgccagtgcctgctgatgtttgatacatcatatttaatgaactcagtttttctgc

SEQ ID NO: 18025 - DNA, 441 bp, Zea mays
  Clone ID: MRT4577_116441C.1
attcggctcgagcgagggcgatgagtggagttttcccaacaagggctaatggacgtgcacacgtgacaccaccttgctgttgaatggaatagatgccggtgtgcgtcgaggtgaatgtggtgtacgcgaaaggacgttaagattcgacatggagcgcgaagtcatactgaatgagtctggattggacgatgatattttctggaaaacccaggatgccttcgtctacgacacgggtcccttgtgcaacgatgataccacaacgagatggcaggacgcagaaaataacaaattctggggcgaggagcgcaaaaggaaggtggctttcaagaactatctggagaacgactgatacaccatgcacgacagaaactagggcgatatgatagcgtgcaaggtagcaggctacctccagtggtaaattgttgtctccattagctcgaa

SEQ ID NO: 18026 - DNA, 449 bp, Zea mays
  Clone ID: MRT4577_116442C.1
attgtggatatctttaggcgggcgagggggaggccttgggggcttgcccctaaagagtgaccaaacaccgcagaaaccgccccacgccggcggggcccaagggggggggggaaaaaaccaaggccacccccaaaggggcccggggggcccccaagccagggcggagggccagcggcggggaaaccaacaggcagggggcccccccccgaacgagggcgggggggccggggggaaaaaagggggcagcggggcccacaacacccgccgcccacccaccagaaccccccccccggccacccagacgaccaagccacccgacacgacgacaaacccgcacgcccccgaaggggaaaaaaagccaagcccagcgcccccacaggagacacaagccgaccacggctacccacgccaggaaccctgactgaggcaaagccagggcccgagtcgcc

SEQ ID NO: 18027 - DNA, 275 bp, Zea mays
  Clone ID: MRT4577_116443C.1
atatattcaatatttccaatacataaggctcacgatgtgccatatataaatggagatccatatgatgtgttattaggcactataaggaaaccaacagaatttaaaatgggatttctatggagaattgtgaatgagataatcaaccgaaatacggtggctaaagtgtgcatttatgaattccaattatgtgttttgttgttaattatatcctcaatccaaaaggaatgacatcagaatgagttgtggaattccgatctcacattgataagcaattg

SEQ ID NO: 18028 - DNA, 304 bp, Zea mays
  Clone ID: MRT4577_116444C.1
aacacgcatagggccacctacatcctccgctaacgcctgcacctacatcgatgtccctcgtcatcgagtgttgcatactgatgtctgatcgatgccgtcgtacagtgagggagctcgtcttcccaaggcggcgtcgaatgtcgtgggagtctcatcgaaagagtagtggagtgccgaaggcgcagcatcccagcacacctcttacgctacactcacgtgcattgcgcctcaccaagtctcctcatcaagtctcacaacccaagctactccagatgactactgcgtgacacagatggaattcgcg

SEQ ID NO: 18029 - DNA, 245 bp, Zea mays
  Clone ID: MRT4577_116445C.1
cggacgcgtgggcggacgcgtgggttccaagccatttgcaaagctacacactcacagtacacacagacatgtgcagaactgacagagacatggaggactcgagcttattcatgcagtgggcgatggacacgctgcagcacgagaacaaccctgcgcctgccagcgccgccgccgtccacggcgcttcagcgaggctactttcccctcgctcaaagcgctccgcgaggcctcgcatgcagccgaaa

SEQ ID NO: 18030 - DNA, 712 bp, Zea mays
  Clone ID: MRT4577_116446C.1
ctaaatgaaggaaaaggtttcgacttcgaactctgttctatgagcaacgagaggtgagcaaaccagagtgatcataaaggtatatcaaatggcattgcacacccttaggatctaaggtaaaataaaagcatgaaaaaactgcacaatgctctgcatcgccttaagactttcatagtaatctacctgtcaataagccgatgtgtgcacaaccaccacgtacaatgcaagtcgctcgtagccctcacggtcccgcatggccaacaacaggaaaaaaaacactaagcatgcaggcatcacagccccgtagcccagtggtatacctaagtcacgattacattagggaagaaggaagagccttcttccgttttcatcaagcgaggatacatttgacatccttagtgtgacagcatggagagaagcatagacaacttttcgcgagggctgctagaactgacatgattgactaccctctgaagcaatcaggtaccttctagagaccttaactagcttatgccaacaggtatgcacccatatatctcacggaagaaactcattcactaaatgttatgccctgacaaagctgtgctgaaacacttgatgacaaaagagtccctctaaagccttcctcaacctgcagtatatcacccttctgctctgaaatctcatctgctatgtcacggttctcaaagatttcagagtctctgacccaaag

SEQ ID NO: 18031 - DNA, 464 bp, Zea mays
  unsure (1)..(464): unsure at all n locations
  Clone ID: MRT4577_116447C.1
ctctactttccaccgccatcacgcgattgcttctgtcccttcgcccaaacctttgctcctagcatcacaaccccgactcttcaactctctcaccatggctaagaaagctgccgccgccgacgtttccaagaagagctgcgcttgcggcagacactccatgggcgacaaggagccctgccgcttttgccctcgcgtcgtctgtgacagctgcagagaagagtactgctgtggcccgatctgtgaaccttgcaacgcggaccgcgagcatctgatgcagtgtgacaagtgcgaggcccccgtctgtgaaaagtgcattgtcatcaccaagggcgctcgcgagggaaactcgtgcaagagctgcaagaagaacgcccatgctgccgcggccgatgcccagcctgctgccatcagcgtctannatagaggacacganaggaatgttcatcatgtcaggcaacccgacg

SEQ ID NO: 18032 - DNA, 687 bp, Zea mays
  Clone ID: MRT4577_116448C.1
attatttttttttttttttttttttttttttttttttttttttttttggggcaaaccagagtgatcataaagggatatcaaatggcattgcacacccttaggatctaaggtaaaataaaagcatgaaaaaactgcacaaagcactaataacatggcataccatacgagtaattaacgacacaaggaagagagtgatcaacatgcctactgagacctgcaagctaattaagcgacacgcgtatcgggcggataggccggcacatgattaacaaccttggcgtggcgtaggtagaccacgtatcggagtgctagagactgaggttgaggtcgagctccccggcgtcatcgccgtcgtcgttgctgcttccgccggcggacgtggcagattatgcgggcggcactatggggataggcatagccacttgggctgagtgctggtagaactgacatgatagactaccctctaaagcaatcaggtaccttctagagaccttaactagcttatgccaacaggtatgcacccatatatctcacggaagaaactcatgcactaaatgttatgccctgacaaagctgtgctgaaacacttgatgacaaaagagtccctctaaagccttcctcaacctgcagtatatcacccttctgctctgaaatctcatctgctatgtcacggttctcaaagatttc

SEQ ID NO: 18033 - DNA, 505 bp, Zea mays
  Clone ID: MRT4577_116449C.1
ggcgcatatactctgcaggtgcggaggagagactgaggtctagatggtgaaccacaacaccgtgatacccaacgacacacttcaagaaggactggccgatctatgtcaagacatgggtcacccagcccggccgcgagcagaggcaccctatcgcacgtcaaaacaaggctgtagaagatatgcccacgaccaactgctgtccctgttcgcgccattgctgaatgccatactctcaagtgcaacatgaagccaagggctgtgagaggctctaccctcgaggaggggaaggctgcctgcatcccacagaggctagctccaacgcattggcatccatagtggatctaccctcggatgaacagattgccttgtttgggctgcaggcacgatgatcagagcgcgttaattacatatcaaggatctaagctaggttatctctcccaaggctgtgctgcgcagaggccacaaggctggtgcactgctactcatgtgaggcagacttacgcac

SEQ ID NO: 18034 - DNA, 591 bp, Zea mays
  Clone ID: MRT4577_11644C.1
ccggcctgccgaaccggctggtggagagctccgacgactgtgagacggcgagtgtcaccgggcagtacgtcgggccggtccaccggatcgggtcgtcggctacggtgaaggacggggacgtgtacgtcaaccatattgtcgggttcgggctcggcaggaagaagacgcacgtccttgcaagggcggtgttctcgccgttggcagtgacgagttgacgggccggcgcctccgcgcgcgctccgtcgtgggatcaacagttgctttttgctaagcggcagttcatacttatggactagaactaataattagttgctaaaattagttgagatatttaaacaatctaggtaataattcaactactagctacttttagcaaattagctatttgttaggtaactaattcgactaacaattttagtcaattaattattagatctagttcattcaaacaccccatagatgctcgtagtacttttgttcctacacttgacacgttgcccaaagatacaaaattgtattgtttggtacatgcatggcggaggacccaataaaataccaatagtaaatatataaatataaaaagggcggccg

SEQ ID NO: 18035 - DNA, 303 bp, Zea mays
  Clone ID: MRT4577_116450C.1
ttgaaacaaccaagctttttgtaacagtaatgaaattgtttgggcaatagcagactggcctgactgccagaacctctttttaggtgtcttgttttcatctggtgcagagctctcccaagcttgcaccattgctacgagggctgtgaaaccctgttcaacaacctacatggcagatatattaaatagtgtggttgggatttcctcaaggaataaaatacaccaggaataatgggatatgatgaaaggtgatcgtccaagcatgactggggaaacatgcatttctgtataaaaaagtaaacagtc

SEQ ID NO: 18036 - DNA, 209 bp, Zea mays
  Clone ID: MRT4577_116451C.1
gcgaaaggaaaagatccaaggaaccttgtggtagcttgaacaagggatgcttgctagcaatggctcatcagccagttctgacgtcaaaacatggcaggctgttcctgatacacagactcaggcccgaccaaaggtccatcatggaactaacggaagccaaaacataaccaagaacacaaccataagtgctttccccgaaccgtgggggt

SEQ ID NO: 18037 - DNA, 617 bp, Zea mays
  unsure (1)..(617): unsure at all n locations
  Clone ID: MRT4577_116452C.1
gaaaaacccccttctcaccgtcgctcccggcgctgcctcggcgcgtggcctccggccggccgtcgggcccggacggctccgncttttcttaccgcntggtcgtcgcttcccggtccctgtgggtctccttttttttttcccgcctcgcgcgcctctttttttttcgtcngggttttttttgtccggnggcttgcttcttttgctgtcgttgtcctcgggggcggccgctgccatgttcnccgttctgtccctggccgcgggtttcctgtcttttgtggtgggggttttagggcgnctgcctcccctgcccctgctgcttcggctctcnctggcttgtctttccttgcngttgctttctctgtgtcgtgccttctccgcccttgctgttctttctggcttgttgcttttctctctgccttcccccgcttcttgttgctccttgcttcttctgtttctctttgtctcctgcttttcttttccttttttcttcccttccctccccccgcccctttgtctccttccttcctccctcctctcttcttcccttttttttctcccctctccctccccttgcttccccgcctctctttctccttttccccccccttttttctgct

SEQ ID NO: 18038 - DNA, 434 bp, Zea mays
  Clone ID: MRT4577_116453C.1
tcgcgggtcgatacacgcctctaaatagattcgtatgatattgggatttaattaagcattgccgcaaaggatgttggtgcctttttggtttctctgttctattgcccacacttgataatttatctcatcaaccttgtgagaaggcttctcttttgaagaataatgaacaaccatgaggtgggcaattgaactcttgtatagctggtgaaaaagtcatgtcacgtcggtaggctatagtattaggcatgcggacaaaaatggtttctcatttaaggatctagacaatggtaccttgtgctcaaaagatgaaatccaagaccatggtgacatccattctaatgatgatgttaagaagaatgtgtgtggcaaacaagatttagatcaagattgttcaatggatatatccaatgccagaaagatgaatatacaatatg

SEQ ID NO: 18039 - DNA, 1706 bp, Zea mays
  Clone ID: MRT4577_116454C.1
gaggattcgattattctgttcgctctcgcccaagtcatcgtctggtcgtcgcccgcagaggcgcagacgcccaaagccggaaggggcgccatggccgcgtcggatctggagagcaaggccaaggaggccttcgtcgacgacgacttcgagctggccaccgagctctacagccaggccatcgacgccgggcccgccaccgccgacctctatgccgaccgcgcccaggcgcacatcaagctcggcaactacactgaggctgtggcggatgctaacaaagcaattgagcttgatcctatgatgcataaagcttactaccggaaaggtgctgcatgcattaagcttgaagaataccaaactgcaaaggctgctcttgagttgggttcttcttatgcatcaggcgattcaaggtttgctcgtctattgaaggaatgtgatgagcgcatcgctggtgagaaaaattaacttcagcagtgtgtgtgtatctggtggtggtgttggggtcttgggtatgcaatgtggtgcatgctattttctgacgatatgagtccacttagctgcctttcctgagaaatgtttgtagcagccttgtagactgggggatgattatgtttcagcttaatcatctcatactacctgtcatgttattttgtttatgtttccagaggaatctagccaggcaccagtaaagaatgttgaggctactgtggctgctactattgaggacaaggaggatttcacaaatatggagaatacaccaccagtgatagaacccccaagcaaaccaaaatacaggcatgactactacaacagtgccacagaagtggtactgacaatatttgctaagggtgttcctgctgatagtgtagtcattgattttggtgaacagatgttgagtgtatccattgaagttcctggtgaagaaccataccattttcagccccgtctgttttctaagattatccctgagaaatgcaaatatcaagtcttatccaccaaggttgaaatacgccttgcaaaagctgagcaggtgacatggacaaccctggattatagtggaagaccaaagactgttccccagaagataagcacgccagctgaaacagccccaagaccttcatacccatcttcaaaggcgaaaaaagactgggataaactggaagctgaagtcaaaaaggaggagaaggaagaaaaacttgatggtgatgctgcattgaacaaattcttccgtgacatctacaaggatgctgatgaagatatgcggagggccatgatgaagtcattcgtggaatcaaatggcactgttctctcaaccaattggaaagatgttggagcaaagaaggtagaagggagcccccctgatggtatggagctcaagaagtgggaatactaaagtttggactgcccgtcttttgtaaatccaggtcttggaaactatgacctaattctgcccacccatagtgccatgagcttgcttggttaagtctctgcttttgtaagctttctgtatgacagtctagcgtgtgtctgagtgctacttgccgtagcttttgatggacataggtatgctattatgtggtatcgaccccgaaccatctgtggtatcaaagacagcaaactataatgtatggaatgcctattctttttggtcaaaaaaaaaaaaaaaaaaagcggccaaaaaaaagaaaaaaaaaaaaaaaaaagcggcc

SEQ ID NO: 18040 - DNA, 1755 bp, Zea mays
  Clone ID: MRT4577_116455C.1
gccattcaaaagctgcgccgttaaccccatcccttcgcctgccctgcccacgtggccacgtacgagtgacctcgtcgctctcgctttgtttgtattcgtcttttctgggcgcccacgcccaacctcggtcccgtcggggcgggcgggagatctcccggcctgaggattcgattattctgttcgctctcgcccaagtcatcgtctggtcgtcgcccgcagaggcgcagacgcccaaagccggaaggggcgccatggccgcgtcggatctggagagcaaggccaaggaggccttcgtcgacgacgacttcgagctggccaccgagctctacagccaggccatcgacgccgggcccgccaccgccgacctctatgccgaccgcgcccaggcgcacatcaagctcggcaactacactgaggctgtggcggatgctaacaaagcaattgagcttgatcctatgatgcataaagcttactaccggaaaggtgctgcatgcattaagcttgaagaataccaaactgcaaaggctgctcttgagttgggttcttcttatgcatcaggcgattcaaggtttgctcgtctattgaaggaatgtgatgagcgcatcgctgaggaatctagccaggcaccagtaaagaatgttgaggctactgtggctgctactattgaggacaaggaggatttcacaaatatggagaatacaccaccagtgatagaacccccaagcaaaccaaaatacaggcatgactactacaacagtgccacagaagtggtactgacaatatttgctaagggtgttcctgctgatagtgtagtcattgattttggtgaacagatgttgagtgtatccattgaagttcctggtgaagaaccataccattttcagccccgtctgttttctaagattatccctgagaaatgcaaatatcaagtcttatccaccaaggtcgaaatacgccttgcaaaagctgagcaggtgacatggacaaccctggattatagtggaagaccaaagactgttccccagaagataagcacgccagctgaaacagccccaagaccttcatacccatcttcaaaggcgaaaaaagactgggataaactggaagctgaagtcaaaaaggaggagaaggaagaaaaacttgatggtgatgctgcattgaacaaattcttccgtgacatctacaaggatgctgatgaagatatgcggagggccatgatgaagtcattcgtggaatcaaatggcactgttctctcaaccaattggaaagatgttggagcaaagaaggtagaagggagcccccctgatggtatggagctcaagaagtgggaatactaaagtttggactgcccatcttttgtaaatccaggtcttggaaactatgacctaattccgtccacccatagtgccatgagcttgcttggttaagtctctgcttttgtaagctttctgtatgacagtctagcgtgtgtctgagtgctacttgccgtagcttttgatggacataggtatgctattatgtggtatcgaccgggaaccatctgtggtatcaaagacagcaaactataatgtatggaatgcctattctttttggtctaagatgtttttcttgtcaaaaaaaaaaaaaaaaaaaaaaaaaaaaaaaaaaaaaaaaaaaaagcggccaggtatgctattatgtggtatcgaccccgaaccatctgtggtatcaaagacagcaaactataatgtatggaatgcctattctttttggtct

SEQ ID NO: 18041 - DNA, 1519 bp, Zea mays
  Clone ID: MRT4577_116456C.1
ctctagaacctcgcgggccattcaaaaggctgcgccgttaaccccatcccttcgcctgccctgcgggagtggccacgtacgagtgacctcgattattctgtttgctctcgttcaagtcatcgtctggtcgcgtcggcagcagacgcccagagccggagggagcgccatggccgcgtcggatctggagagcaaagccaaggaggccttcgtcgacgacgacttcgagctggccgccgaactctacacgcaggccatcgacgccgggcccgccactgccgatctctacgccgaccgcgcccaggcgcacatcaagctcggcaactacactgaggctgtggcagatgctaacaaagcaattggtcttgatcctacaatgcataaagcctactaccggaaaggtgctgcatgcattaagcttgaagaataccaaactgcaaaggctgctcttgagttaggttcttcctatgcaccaggcgattcaaggtttacccgtctattgaaggaatgtgatgagtgcattgctgaggaatctagccaggcaccagcaaagaatgtcgaggctcctgtagctgctactgttgaggacaaggaggatgtcgcaaatatggataatacaccgccagtggtagaacccccaagcaaacctaaatataggcatgactactacaacagtgccacagaagtggtcctcacaatatatgctaagggtgttcctgctgatagtgtagtcattgattttggtgatcagatgttgagtgtatccattgaagtacctggtgaagaaccgtaccattttcagccccgtctgttttctaagattatccctgagaaatgcaagtatcaagttttatccaccaaggtcgaaatacgccttgcaaaagctgagcaggtgacatggacaaccctggattatagtggaagaccaaaggctattccccagaagataagcacgccagctgaaacagccccaagaccttcatacccatcttcaaagtcaaaaaaggactgggataaactggaagctgaagtaaaaaaggaggagaaggaagaaaaacttgaaggtgatgctgcattgaacaagttcttccgtgatatctacaaggatgctgatgaagatatgcggagggccatggacaagtcattcagggaatctaatggtaccgttctctcaaccaattggaaagatgttggatcaaagacggtggaagcgagccctcctgatggtatggagctcaagaagtgggaaatttgaagtttggactgcccctcttgtaaatccaggtcttggaagttatgacctagttctgtccacccatttggtgtcgtaagtttggttaagtgtgtgtgtgttttttggttcagctgtcgttcgaggaaaagctattgtaagttgtggactgtgtaaaagctgcaatagattgtgggttgtgaaaaaggtgtatgctgtttaatttaaacaagcataaaacttacacgtgtctctattttttcatttaaaaaaaaaaaaaaaaaagcggcc

SEQ ID NO: 18042 - DNA, 349 bp, Zea mays
  Clone ID: MRT4577_116457C.1
agaagacggacttgactgctggctcctctgcactctacctgttgttgtatgcaacgtcgtagttgtacacataggcggtgatcaccaatgttacatcaagtgccatgaacatcaatgccatgctaatgtgcctcacacgcctccatctccttctccgggacaaactggtgctatgctcgcttcctgtgcacaaggctgatatccttatggatgatgatcgggtcttgtgaactgcactactagctatttctttgacgccacgaacaaagatggttctatggatagagagattctaaaggactgctgaattgagctcaacgtgggctcgaatggagaattcaacgctggc

SEQ ID NO: 18043 - DNA, 152 bp, Zea mays
  Clone ID: MRT4577_116458C.1
gcaaacagaaaacaatttttttacatttatgacaggcaaacatttacaaagagaatttttttacacgggacgatttatatataaaagtcaatatcattcttattcaaatcaaatccttgttcatttctcatacattacttctccattaaata

SEQ ID NO: 18044 - DNA, 347 bp, Zea mays
  Clone ID: MRT4577_116459C.1
ctcaagcagtaatgctgggctgctactgtacgtgaagttgcacgatggagaccgactgtgcgcatgcactgggcacggccagattctatctgatggccttaaagttcactacactacatatactccatcacctgtagtagctgcgcaacgctagtgacctgattaagactaaggagcactgaaacgatcttgaagatgacctaatctagaccgtggatattgtggtctacgctaagcacattagatggtgactcgaaccgaatccaattaagcctggctccctacagtaagcttttcacacatacagagatcacgctgtgcgtatctgaggatgcagcagctattac

SEQ ID NO: 18045 - DNA, 290 bp, Zea mays
  Clone ID: MRT4577_11645C.1
tgggacctcgagccggccgggatacctctctgtgtggactcgtgtgttacttgcggccgctaggtgccgactgccgaggccctcacgaggcccccattatcgacctcctccatctggattccaagtgcacgtagcgctttcctcgccatccttgtccgcctatggacccctctctcttcatagatgcaacaagagactcgctccatgccatgccatcggacgcccacaccactatgcatctgctcttatagcgcctgctgcgaaactgcctccatgaacatgagctccca

SEQ ID NO: 18046 - DNA, 186 bp, Zea mays
  unsure (1)..(186): unsure at all n locations
  Clone ID: MRT4577_116460C.1
caaggntctngcgangnaccccgtggatgggttctaccgaccgggacttgtngacgaacagcncacatacttacgagtggcagtcaccatcatacggaaccgacctgancaccctatatgntggaggctacttcaatgcaataatgaaccttacccccagaantatacccaacagcccgccatcag

SEQ ID NO: 18047 - DNA, 285 bp, Zea mays
  Clone ID: MRT4577_116461C.1
cattcaaatcgggcggaagggtcatgaacagcatattagattggaattttcaatgaccaaaggacataaggccaccagggcaaaaagctaaagcttgatattgaatactggatgcacaaagggcatgactacagagtcccggcggtagaactagtggaacatggcatgggccttccataaaggaaacacattgctctggtaagggcaaaaaacccatgggtgagacaacgagttataatccagacctctggttcctcgtccctgacaccacttttaatgatttgg

SEQ ID NO: 18048 - DNA, 574 bp, Zea mays
  unsure (1)..(574): unsure at all n locations
  Clone ID: MRT4577_116462C.1
tttttttttttttttttgcattaccaatattcccattttttttcttaggattaacttataacatatcttgcaggagtaacagctattcatcgatccacagtccatgcttggttgatgcatgggaaagagggtaacccgggttgttcacgtgcgcaacaccagaaatgggcggcgccccaatcaaaaccccnggggaaaaaaaaaaaacgcgccgtacgaacataaaccctcgtggaatagaaaaaacatgtggggccggggggaaaataacttgtccttgcgaaaaaaagaaaaaattccctcctgttttctaaaaaaaaggttgccccaaaaaaaaaaaaagattcgggggggcccggggttataacaaactttttaccggcccctccgttttttttgtcaaccccgggggaggggtccccaaccttttggaaaaaaaattccctaaccccccttttttttaagagaaggttgggaaccgcgaggaaagctttttcaaacttggggccctttttttggaaaatttaaaaaaaaggggtttttcctttaaaaacccacctctcctttttttttt

SEQ ID NO: 18049 - DNA, 324 bp, Zea mays
  Clone ID: MRT4577_116463C.1
ccagcccgcgcagatcctgccatttgcggctctgcccgaacgagccccaggagagccgcggaatggagccatcaaaagccccggccgaggggagcaggcaaggtaagacatggagacaaccgagaccttcagtctaataagcacccacagctgggtcggtccttaaggccaaggagccttggagccacacgctacgctgccttaaaggggccgagctttggctctgaactatcattcctgggtaggaacgcttcccttcgggcggcctggactaagaggagtgcccccagggcaaagtctggatatcagatatcgccacaagca

SEQ ID NO: 18050 - DNA, 527 bp, Zea mays
  Clone ID: MRT4577_116464C.1
catgcctaaataagctggtccccacaataacaagggtctgacatgccccggccccgtaaaacccctgtcgctcaaaattcatgttgctcagctcaaacaaagaggggggaagggaaatccaacggtttatcgttccaacggaacggcggcctggaaagcctgcccaggggcaagcctttcaaggagcccgcggttacagacctccttggggtccgcaccgtttggagcagtccccccctgaaacaagtcctccatgaatttggcactgcaggacttggggaaggccgactttggggaatccccaatttttgggctgacaaggattttgaacttcgggcaacttaaacttggcccggcatgtaccttaactgggatcttccgtattgcagaactgggttccaacacaaaggacaccctaaccaatgtgccccctagcttagcaaacgtaaggcttgttaaaggcaccaccctttccaccccggagcctaaaagccccttgtcactaaaaaagatttggaatacgaaaa

SEQ ID NO: 18051 - DNA, 190 bp, Zea mays
  unsure (1)..(190): unsure at all n locations
  Clone ID: MRT4577_116465C.1
aagacaggcgaattgtgacagaaggagaaaaacgcggaaaacccccancagggggaaccgacgacgaagcaagcaacaccccaaaccgacgacaccaagagggagagcaaaacgaaccacaacggccaagccggaaaccaggacggaaacgcgagcagggagcaaaactgcccagagcaaggcaaccagg

SEQ ID NO: 18052 - DNA, 280 bp, Zea mays
  Clone ID: MRT4577_116466C.1
tgcttacaggatgggtccactacaaactttcactctctcctaaacaacagcgtcttcgggcccgattccagcttcaactctccctctctctttcgcctggcagatcctcggcggcgcggcagcctgcttcttcaccggcgcggcggcctgcttcttcgaccaccccgaggccttcggcggacgccacacggcaacctaccgggcgaaccgatccgcggaccaaccgatctccggcgcctgatagatcttctgcgcgcggcctacccggtggaccgatctc

SEQ ID NO: 18053 - DNA, 186 bp, Zea mays
  unsure (1)..(186): unsure at all n locations
  Clone ID: MRT4577_116467C.1
ccacacaaacaaaacaggtgacaacaggaataccaaccatgatcatccaatacataaacatcacaacgcagggcagtaaaacattnatcaaccatggtcattacatacttataactgatacaaccattattaaccctatactatagatccatttaccctttaagtttgctaataatacaaaatatt

SEQ ID NO: 18054 - DNA, 643 bp, Zea mays
  Clone ID: MRT4577_116468C.1
aagcttaaacaaactgttttgaaatgggaatttgggtttgggtcctggtgctctttctttccgaggaatcaaaaaaacatttaaaaacccttttggattgcattttggccctgaaacactccattgttacaaacaaggggatgggggtccctgtccctcttcacttagccacaaattctaaaaaaaaaccaagacccaaaaacaaaaggtaaattcacttcttggactgctgctgaaaaagacgggcaaagccttggaccttgccataaaatcaaaacctgattcaaaacccccttgtaactgcggctccctacccggaacgccagcaccttcaatggccaccccctgccaccttcaatgcctggccccaggaaacacacaacggaaagggcgaaccaaaggccggtgaatatagcgaaagggaagcccacgatgaaggggcaaaccttccattgccaactcaaccttccatagacgacgtgggggtggaccttcccttgacggggcgaggaggacgttccaaaagcaaaatttcctggggctactcatcgccggcgcgagcgtgggtttgcgggcagattgcttgcggggagagtggaaaagaggaacagagatctgggattgcgggcggaggaaacccgcg

SEQ ID NO: 18055 - DNA, 167 bp, Zea mays
  Clone ID: MRT4577_116469C.1
gtcggacgtcagcgtcgtcctgccctactgcggtcgcgcgtcgtagtgctcttagcgcacgaacgtcgagagtagcgaggtgagctgccggtagtgccgggatgggctggcagctgatgggacgttcgacgtaagccgggcacgcgaggagagggcaacgcgtcaga

SEQ ID NO: 18056 - DNA, 317 bp, Zea mays
  unsure (1)..(317): unsure at all n locations
  Clone ID: MRT4577_11646C.1
anacgcnncgggacngcggacctacccggccagcttcatgctcgancagctcaccggcttctangcttcganacttcgatagtcnacccatctccctgctcgtngcatntgatcncgagncatggtnccncttntntgggggtcaccgcganggntgnntntnttcttcgacgacatcgacatgctcaaaggcanatgctgaaagtcgctgcncgttccgcaaggntncttctactcnnacgcatnnganggtcagtgctacgagaancccaagcacaggtcacgcngtcccgcngagagaaganantgggtgcatt

SEQ ID NO: 18057 - DNA, 151 bp, Zea mays
  unsure (1)..(151): unsure at all n locations
  Clone ID: MRT4577_116470C.1
gccgcccactgcgtccgctcaagggacacgatgnatgggggagctgcacgcgcggggcaggcacgctggcgctgaggtgaccgaggcgctctagggcggcgcccaatcgacccgcgcgtgcctcgcncgccgtcaggggccgtgcacgcgc

SEQ ID NO: 18058 - DNA, 145 bp, Zea mays
  Clone ID: MRT4577_116471C.1
acagctcgagcccgccagcacaacacatacgcatacctcaccttcctttcctcctcccgtccaccatcaaaagaaggcagggaaagatctgatctggggggtgagagatcaggacgagaaatccaagccattgccctcccctctt

SEQ ID NO: 18059 - DNA, 272 bp, Zea mays
  Clone ID: MRT4577_116472C.1
tgcagacagtgagatcgagttgtgtcactgcacgagcacatcgtccggcgaccaccggcctcgctctccgtcctctagcgaccgaccaacgcgtcgagcgaagatgtcgtggcagacgtacgtggacgagcacctgatgtgcgagatcgaggagcagctacttacgtccgcagcaatcgtcggcaacgacggcgccacctgggctcagagctacgcattcatcgagttcaagcacgaggagatggctgccatcatgaaggatctcgacgagc

SEQ ID NO: 18060 - DNA, 800 bp, Zea mays
  Clone ID: MRT4577_116473C.1
cattggggtacctcgaggccggccgggatctttgtgtctgcgactccctctccactccttgacgagtgacgactcacgagcacagcaaggctcgctcgctcgcacacaccaagcaagcaggccgcagcccgcaggcgtctcacaggctctccgccgttccccaacgcgctttccccggcgccatggccaggctggcgctggtgctcctcctgctgctggccgtggcggcgtccgcgtgggccggcgccggcgcgagccacctcgatctgggcctgggcttcctctcctccggggaccgccggcgggagtgccgcggcacggtggccgagtgcctggacgaggaggagggcctggacctgggggcggggcccgcgtccgtggagtcccaccgccgcgcgctctacggcggcggcggcgggtacatcagctacggcgcgctgcggcgggacaacgtgccctgctcccgccgcggcgccagctactacaactgccgccccgggggccaggccaacccctaccaccgcggctgctcccgcatcacccgctgccgcggctgagcggatccggcattccacccgccgccgagaataagttcttttgccctgttcaccccacccgagtgctaccgctaccgccgccgctgttcacaagtagtactagagctatggattttcattgttgtatggggggtttgtttgccagatccttgtgctgatcctatgtcgccttaatactcttattattctttccattccattgctttggttgctgcttggttcctgcaagtgccctgttcagac

SEQ ID NO: 18061 - DNA, 352 bp, Zea mays
  Clone ID: MRT4577_116474C.1
cccacgcatcaactgctgccttatacgaggcatagctactcctactacacaaatccaaccgtattcagcttagtgtgtgctacatggactcggaaagactaccaccccaagtggtgagatctgactttcagtctcacaatccatgaagcaggtgaaactacagcagggagtcctgatctgcagagtctgagtgacaagtcgtaggtgcatgcactaccgatgcagttgcgtttaatgtaggaactcattctggacagtcgatcatcatggagatggatactctactctaccttgagaacgcaatgaaatacatgattcgtgggtcacgatcttgttgagtagcccatacgtg

SEQ ID NO: 18062 - DNA, 117 bp, Zea mays
  Clone ID: MRT4577_116475C.1
gtcgcccagcgtcgccactgcactagaagccatatgtccacatggcgccaaaattttgcctctagctcttgtcttctgcagtgctgctcggcgaccatttcccacatgctcacagct

SEQ ID NO: 18063 - DNA, 403 bp, Zea mays
  Clone ID: MRT4577_116476C.1
ccttatattttttttatccctccactattatgtctcctatatctttaaccctccggtggctgtacttttttcttcccggtgacttccccttctacccgatagggcttgacaaggacccggcgttcctcaagtggtacccgcaagcagagctcatccacgggcgttaggcaataactggccgtgctgggcatcttcacgcagcatgcgttgagcggcatcccttggatccaggccggctcggaccctatcgccatcccgcccttcttcttcaaaacgctgctaggcactcatcttgcttctgatcctatacctaaagtcgaagcggggggtggacttcttcaacccaaacttctaggccgtggaaagggccacgccatggtcccgcaccgaccaaaactacttt

SEQ ID NO: 18064 - DNA, 466 bp, Zea mays
  Clone ID: MRT4577_116477C.1
ccagggtcctaaggggagggaccccaaaaccgaaaccttgtaccaggacctaaaaaagaaggcccgataactcaattctccacacatggtgatcttcctgataagtgagcacattctcacccaaggtgtcccaaagcgtaaaatattgctgtttccctacaagggaaagggttggtttgatgtccttaacccacaacataccctccaaagctggatccattgtcctgataggctgataaagaccacttttttatccaccttggaaagcacttcaggtgcaataaaccacccattcaaccatttttccatccaaaaagggtgtttttgccattgcccacatgggtgatgggtgtacatcgaactggcaactaccttccttacttgtgactaaacagggagatccaatccactccaaggcctattcgggtcattcttaattagccaaagccttttaccttgcggcgcc

SEQ ID NO: 18065 - DNA, 370 bp, Zea mays
  Clone ID: MRT4577_116478C.1
gcgaatcgcactatcatcaacctaacaacaatggctaccaagatattatccctacttgcgcgtcttgcactctttgcgagcgcaacaaatgcgctcattattccacaatgctcactcgctgctaattccattatttcacagttcctcccaccagatacttcaatggccttggaacaccaatctgtgcaagcctatatgctacaacatgcgattgccgccagcgtcttacaacaaccaattgaccaatttcaacatcaatccttggcacatctaacaatacataacatcatatcgcatcagcaactacagttgctaccaacactgagccacctaaccatggtgaaccctgtctcctactcgcaacagcata

SEQ ID NO: 18066 - DNA, 407 bp, Zea mays
  unsure (1)..(407): unsure at all n locations
  Clone ID: MRT4577_116479C.1
ccagcacaaacaagccttattttctccaaacacgtaatatttattttaccgttcaacagagatatacatgccaagaccagcttttcgagtagacgtgaaangggacaaaaagttttgtcggggggagaataatatattctttaccagatctgttctgggccgggggggggggggcaaattgttaaccaaggacctcacaccttaggaactggctggggcgggcttgggatatctggataccgggggcaggaccagatggggtagaggggacgggcaaggttgactccctggggagagggggtggcggactgggggtgccgcttgggttgggacgggggacgtgtgtgctggggccacctgggtttgtggtggcggatggggggggggggggggggaggagggggggg

SEQ ID NO: 18067 - DNA, 422 bp, Zea mays
  unsure (1)..(422): unsure at all n locations
  Clone ID: MRT4577_11647C.1
ggggtttttatttttttttttttttttttttgggttttnggactcaaaaccattgcaaacttattaactttaaaaaaaaaaacattaatacccggtttttttaaaataaattttttttgaaaaaaactgggcccccttaacaattaacttagaccaagattttttttattaacttaacttccaaaaaaatttttttaattgacttaaaggggttaaattggattccaacacaaaatttaacagcttaaccccttccctttcccaattttaaaaaattaacttttaattttttttaaagccacaattttgcaacttttgacgtactcatttatgggctttttcgtaaagggggcctcaattaaagggtggatggacacaaaatcttcgacaattgtcaacatgatagtcatttttttgatgcc

SEQ ID NO: 18068 - DNA, 304 bp, Zea mays
  Clone ID: MRT4577_116480C.1
gggaatgcttctcagcttctatgataaactgtcgttttctggaaatgtcatttaactgtgtaggttgtggtaccagatgaatgaacagttacaagttgtgcttaactggatgttatctgatcctctcagtctgagtacccttttcatccctttattcttctgttgatagtgaaagggcctttatctgagttggtttctgttgataataataagctactcattttctaattttcatgctgtgcttctaattgagaaataattacttgcatctctgctatggatcctcataaaaactgctaatttg

SEQ ID NO: 18069 - DNA, 188 bp, Zea mays
  Clone ID: MRT4577_116481C.1
tcgctctcgcgtaagggaccgcgcccagattggggacgcttttacctactgaccccacacgatgattgaccttgagattcctggctcctagaggcttgcactgtgagagctctgctcttagagctggagactcaaactgcccgggaaattacccgacgctcacaacagggaggctgcccgggccatcg

SEQ ID NO: 18070 - DNA, 274 bp, Zea mays
  Clone ID: MRT4577_116482C.1
gtaccgctgcggcgtggtggggcaccaggacgcgctgtacgcgcgctcgtttcggcagttctaccgcgagtgcgccgtgtcgggcaccgtcgacgtggtcttcggcgacgcggcggccgtgctgcagggctgcgcgctcctggccagggcgcccgtgcccggccagtccgtcgtgctaacggggcacggccgtgccgaccccaacgaggacacgggcatggcgctgcaccattgcaccggttccagtttcgtttccgccgccgaccccgagccc

SEQ ID NO: 18071 - DNA, 677 bp, Zea mays
  Clone ID: MRT4577_116483C.1
ttggggtaccggcgccctctctcgagtttttttttttttttttttttttttttttttttttttttttccttaaaatccgtctttttaaacttcatgcctaaatttcttgaaaataacagcaaaatctatttcattctaggttcacaaatccacaacctttacgcccaatttatagtccactccccccttttcccatgctcaaaccatgaagagttgaagactaaaaccatgttgggttcctctaactaaattttagcccctcacataacaaaggggaaaacctgataaaggctgctctagtagttatggagggcagcagcatgacacctgatgttaaagaggaagtaaaagccggccccgcatttcctacgagcatccaccagcttttgccatgacagctgcaagtttgggatcaagcattcctgtaaaaaggggtagcagtactgctctaagcctgaattcatcactgaaagcatcacttgaaaaaagcacctgatcattctgaaagcaatccccacgtgcaaaattcgtcagctgaagcatctgaacttggggctggaactccgccaattgatgcaaaaggctgccattagctatccaggacattgatgaatctgacgaacacattgaagaggataccactgcgcctgctgacagtccatgcaaagttgaggaac

SEQ ID NO: 18072 - DNA, 225 bp, Zea mays
  Clone ID: MRT4577_116484C.1
ctcgagagctgtttcacacattcggagcccgaagcctacccacatcgcctgcaccacacgtttatctactgacccacatgaattttcataaccggatcttgctctctcacttctctaatcttgccaagaaaatcaacttaaattatctagcctcatccccaatgagaccaggttacacaattcttcacctgcacccactgcttatcagatatgtttactgatact

SEQ ID NO: 18073 - DNA, 476 bp, Zea mays
  Clone ID: MRT4577_116485C.1
gggatgtgactagactgaaactcttccttcccctaatgcgctagctaggaccctacttatgatggcggtggagcaggagatgatcctaacatcaccataaaagtgcccctggcaattgagcatctttcggttctccctgtgtcaagtgatattaggcgagccagctgcccagacatgacaaagatcacaggacatgaggcttctttgaaatgctaatagcgggaggtcgacccacttgtgccttgactagcattatcaacccatgatgagcgggaatctcatggcatgaagtgcatggtgcctgcagtgtgcattcggaaagcctaacagcagaggggaatggacacatgattagactggttcagcggatgatcattatacgatcgatgttaagactgtataatcttatctgctgctgatgctctagccgttagcacttctgcatataagcgaatcatggtacgatcttctgatga

SEQ ID NO: 18074 - DNA, 880 bp, Zea mays
  Clone ID: MRT4577_116486C.1
atgaagagtggcctcgcaggttgccatgggcaatggtcctcgagtacacacagaatttgatggagaggaggatgaaagtgtgcttggcattgtggatagggtccatgtgaatccagccaagagtagggctctgggtgatggcaactcttcaactgtgagccaggtaacaaaggattcagactctgtggcagtgccttggaggagtatgaagtcacttgtagagattgttaaggagattgacgagtacttcttgaaagcagcagcaagtggtaatgacgttgtgattcttttggactctgctggtgggcggcctgatgccttagagatggaggcaaacaaaggcgcaggaaagaaatccaaatcagcgaaggttttctccacgctttcttggagctggtcttttaaatctcagcaggctaacagtgaatccacagttctgaattctagtgcttctggatatggttaccatggcaagacactagagaagctttatgaagaggagcaaaaactctacaagttaatcaaggatgaagaatttgcaaggctccagtataagaaacatgtctcagtgctacaaaagctagaatcaggggagcatgatagactgcatgcagaaagagttcgggatgctattgaagaactgcaaactcggataatctcattggaggaagctgtgagtttagcatgtttttccatatcaaatctcagagacgaggaattatatcctcagattattgaattatctgcagggcttgtgcatatgtgggaaaacatgcacgagtgccatcaggtccagaaccacattgcccagcaacttagtctcattggcaacagacctgggagtgaaccaacaggtgacattcattaccaggcaacatct

SEQ ID NO: 18075 - DNA, 3252 bp, Zea mays
  Clone ID: MRT4577_116487C.1
cttcgttctctccctgctgctctgctcctgccgcctggctgccgtgccgccgctgatccctctctcccccctcaaagccccaattgccgggtgctcctcttccacccccattgccgactgcttcccgccagagagtggggaagggaaggggggggaagggagatggcttcttggatagggagtgggtaagaatcacacgatgcagttacctccacctttctctcttctccttttgcgggcatattcttcacctccgcctgcctagatccttctttcttcggcccggcttagcttccagtctcaccaacagttctgacctcggagcatctatcaatcgggccactctctggtaaggcaaccagccacgccacggcacccctttttgttcgagaatctgcttgcccgcgtcgccgtcgtggctttgttcctcctcgcgactgattcgtcggcctgagtcatctctttttgtctaatcggtctcagcgcccgttccatcgggttttgatgcaagagtggaggagttggtaggttgttgtgactggttgttggagagctggagccagattgaggagaatttcagccaattttagcggaaccgtaaaacccatcccgagaatttttcctgcgcctcctacggttaggagctgtggctggacagtgcctgcctacgctctggagttttagtgcagttttacaagttttcagtcaattttgatcaagctcaggggaagtaccaatttgggagtgctagctgctgctgcagcagcagctgcgggttccttggtggcagatgggttgctccaactctaaagtggacaatgaggagcctgtgaggcgctccaaggacaggaggcagctcatgaagcagctggtgcgccgccgccctgagcttgcagctgtgcacattgcgtacctgcacgccctccgtaacacaggagccactctccggcaatttgtggagctggagtctgcattgtcacagcagcctcccgtagaccttgtggtgccgccctcgcctactccacagcctcctcctcctcctcctcctgaactctcggtgacatcctcattgccaccctcgccatgccccccgccgcctgtcccttttagtccagtaacaaccataagaaagatggagaagagggatggtgagctcccaccaccaccaccacctctggttttgagtccgataagattaaggaagatggaggatgagatccatgtgggtgattttactgatgatgacgagacactgacagctgctcgactcctctaccaccacccctgccacccggcatagattgggaggacttggatccctacaacgtgtgccccttgagtttcccatctccatttgctgataggaatgataaagaagtggcctcgcatgtggccatggacaatgatcctgaagtagacacagaattttatggagaggaggatgaaagtatgcttggcaataatgatgtcattgtggatagggtccatgtgaatccagccaagggtagggctctgggtgatggcaactcttcaacggtgagctgggtgacaaaggattcagactctatggcggtgccttggaggagtaagaagtcgcttgtagagattgttaaggagattgatgagtacttcttgaaagcagcagcaagtgggaatgacgttgtgatttttttggactctgctggtggacggcctgatgccttagaggtagaggcaaagaaaggtgcaagaaaaaattctaaatctgcggatgctttctcgacgctgttattcagtcggtctcttcattctcctgctatttgctcgtgacattgctacgatggctgtgattattcattgtaagtaggcgaagtataaactggttccacgtgaatacccttttcttctaattttcagaactttgaatagttttcggaggattttatgaagtcaatataggcataatagtcttgaatagatcacaatgtctcaactctcaatttgagaagagatgtgaagtatcataaaacatatgtggctttaaattaactcggataatctcattggaagaagctgtgagtttggcatgtttttccatatcaaatctcagagacgaggaattatatcctcagatcattgaattatctgcagggcttgtgcatatgtggaaaaacatgcacgagtgccatcaggtccagaaccacattgcccagcaacttagtctcattggcaacagacctgggagtgaaccaacaagtgacattcatcgccaggcaacatctcagctggaaattgaggtgtctggatggcacactgccttctgcaatcttatcacatcgcagcgtgaatacgttagcatccttagccaatggattggtctcacagactgccttccggatgatggtggcttaatgagaagttcatctggaatccttagcctctctgaggaactccagcgtgctcttgacaggctaccagagaaggtagcagctgaagcgataaagacctttatgtcagtcatacactctatagttgtacagcaaagtgaagagcgccaactaaagaagaagtcagataacatggatagcaagttccagacccagttagagaaacacagtgaaaattcaatgcaaaactcggcccagcctccaaataagaataactattcagtatcaaagaatggaacgaaactggatgcatttagaaagcaggtcgaggaggagaaagccagatacctaacctctgtgagggtaagccgagccatgacactgaacagtctgcagacaagccttcgaaatgtgttccatgctctggagggattctcaggagtgtgcgtacaggcatttgaaggtatcagcagatgcagtgaagttgctgttattcactcgggagcagcttcacctgctatttcctcgtgaccttgcttcaatggctgtgattattcattgtaagtaggcaaaggataaactggttccacgtgaatacccttcgcttctaattttcagaactttgaatagctttcgggggattatgtgaagtcaatataggcataatagtcttgaatacatcacaatgtctcaacttacattttggttcttattgcatgggatgtactgctctgtacataatcatttacattttgaccgaaccagtatttttctcccttcacattatatctatacataattgttttgattcaaaaaaaaaaaaaaaaaaaaaaaaaaaaaaaaaaaaaaaaaaaaaaaaaaactcgagagggggggcgtgtacccc

SEQ ID NO: 18076 - DNA, 762 bp, Zea mays
  Clone ID: MRT4577_116488C.1
gaaaagccaaaaggagaaagtcactgataagtctggtggcatcacaggtaacatgaatgttcagaagtatgcgactctgcaattactttgaagatgcgagatgatacagtatgttacacattgcaattcatttctgagctccatgagcattttatgcttggagatcgatgtgctgagtacgaaatggacattcaaacaatcttgacagaaacagagatgacacctaaagtaatgtcaatcttaaagaaatatgagaatagttggaaggcgatgaaagttgccaatccaattagctctggagaaggatgccaaaccatgaacataaagaggaagaaactgaaagaagccatacttctacgcaacagatgccaggaactggatgacatatgtcgtgagagcaactggattcttccaagatacagagtacttccttcagttaccggtgatatgtaccaggccagtgtccaccttatgggcccagacttcaacttgagtgtggatggtgatgtgaaggttacccctcacgaggcacgagactcagcagcgtccaacatgctgtctcagcttcagcagaaggcaagggaaggctaggagagcggcatgtctccacagaacccttaatgctgcatccttgtgggtatcgacttgcatgcgacaggaaagaacagccatcacagctcagaaatgaacatgctggttgtcaaaacaaaattctatctatctatttgaacttacgaaaaaaaaaaaaaaaaaaggccccta

SEQ ID NO: 18077 - DNA, 550 bp, Zea mays
  Clone ID: MRT4577_116489C.1
aaaggcttacaagccagtgtccaaatggacaagagcagaacagagaagaacactaaaagtagaaatgtgccccaaaatatctttctgacaccagatgttggtcctgtaaataatgaccatgccttgaaaagccaaaaggagaaagtcactgataagtctggtggcatcacaggtaacatgaatgttcagaagtatgcgactctgcaattactttggaagatgcgagatgatacactccatgagcattttatgcttggagatcgatgtgctgagtacgaaatggacattcaaacaatcttgacagaaacagagatgacacctaaagtaatgtcaatcctaaagaaatatgagaatagttggaaggcgatgaaagttgccaatccaattagctctggagaaggatgccaaaccatgaacataaagaggaagaaactgaaagaagccatacttctacgcaacagatgccaggaactggatgacatatgtcgtgagagcaactggatttttccaagatacagagtactttcttcagttacccgtgatatgtacc

SEQ ID NO: 18078 - DNA, 466 bp, Zea mays
  unsure (1)..(466): unsure at all n locations
  Clone ID: MRT4577_11648C.1
tttaagcagtggtaacaacgcagagtagcggggatttgtaaaattgcaactgttctgatgacccttaaaaatgttttttcgtttgtagtttagttcttcccattgtatgtgaatagctggatgaatttgcttgaggataaaaaaaaaaaaaaaaaaaaaaaaataatagttaaattgggggggggggaaaaaggtgttttttttattatgnaataaatagnattattatagataattaatatttgaataatntttaaattattaaagaatgagtttgatcctttgtgtattgggcaatattaattgatagaaagaaattaccgtcccaacaagacaggaatttatagggagtatagctctcttatatactaccacattcgttagataatataggaatagtgaccgagcgacctataaaaaaggcttganttctttttaaatcatacatttgataaccttttaacta

SEQ ID NO: 18079 - DNA, 301 bp, Zea mays
  Clone ID: MRT4577_116490C.1
gcatcttgcctgcttatatgtgataatatgggggctattttttcatcattggggaatagaatgcccacatgagctgaagtgtacaattaatctagctaaggagttatatctttcttccttttggatttgtacttgctaaatattagttaatctagatggctcgtgtatgatctttccccctcttgtagttgtggagtccaaggacggaacgatctcagttgcttcagcatttgctggtcatcaggaagctgtgcaagacagggaccacaaatttttatcaaaggcaatggaagaagcatac

SEQ ID NO: 18080 - DNA, 545 bp, Zea mays
  Clone ID: MRT4577_116491C.1
atttctaaaaaaaaaaaaaaaaaaaaaaaaaaaaaaaaaaaaaaaaaaaaaaaaaaaaaaaaaaaaaaaaaaaaaaaaaaaaaaaaaaaaaaaaaaaaaaaaaaaaaaaaaaaaaaaaaaatttttgacctccccggggggccgttttaaaaggggaaattttccaaatttccttcacattgggggccgtttaacctttcttttaaggggcccaattccccttttagggaggggttttaaaattaattggccgggtttttaaaacgtgggaattggaaaaaccttggggttccccaatttaatccctttgaaaaaaatcccctttttcccagttgggttaataccaaaaaggccccccccaatcccctttccaaaaatttgcccaacctaaatggcaaatggaccccccctttaccggcccattaaccccggggggtgtggggtttacccccaggggaaccgttacatttgccagccccttaacccccgctcttttggtttttttcctttcttttttggcaacttttgccggttttccccctaaa

SEQ ID NO: 18081 - DNA, 359 bp, Zea mays
  unsure (1)..(359): unsure at all n locations
  Clone ID: MRT4577_116492C.1
gttctagccctactggtggtcgatgctgccatggttggcaccaccagcgccggcagcatcgcagcgtactgcggccagaacggcaacgaaggcaatctggccgacgcctgcaactgcgggctctacacctacgtcaacatcgtgtacatcacaaccttaggcaacggacagaccgcagttctcaacctaggcggacactgcgaccccggctacggctgctgcaccggtcagagcagggacatccagacctgccagtcgctgcgcatcaaggtgctcctctccatcggtggcgccagcagtagctacggcctntnctgcaccgacgacgccaacagcgtggccgactacctgtgggacaa

SEQ ID NO: 18082 - DNA, 862 bp, Zea mays
  Clone ID: MRT4577_116493C.1
actcagatctgccggggcatcatttttcctactcatacgagagagaagttgtccgcagccctatggttgaagcacagtgctttgtacaactagcatttcctgttgttcttaagaacacaatgatgactgaagagattcactatgttgggtttcttagtaaacttctggaaacaaaaatcatgcaagtacttcgcttcaaatatgggcagatctattcagttaatgtagctgtcttcttggggggcaacaaaccctcaagaactggagatgttcgtggagatataagcgtgaatttctcatgtgatccagacatatcatctaaactggttgattttgttctggaggagatatcatgcctacaaacagaaggtccttctgaagaagatgtattgtccatcctcgaaattgaacaaagagctcatgaaaatggattacaggagaattacttctggttggatcgtattctacggagctatcaatcaaggcttttttctggagatattggatccacctttgcgttccaagaggaggggcgtataaaggttagggatgctttgacaccacagagcatgcaatcagccttgcaacgagttatacctttcccttgcagaaagcagtacactgtggttattcttatgccaaagtcatcctgttgggcgtcagtgaagtcaatgcttagctggagttctaatggggtcagcagagatgctaagatcctcgctggcatggctggtgcactggtgttggcagtgagtttgtggaggaactctcgtagttcgttaaatccttagtgtttgatacaactgaccgctttttgggggacttccagtcagatctgaaaatggatcagggtaggaactga

SEQ ID NO: 18083 - DNA, 785 bp, Zea mays
  Clone ID: MRT4577_116494C.1
atctccgacctgctccgcctccgcctccggcatcggcacggtgtcccaaggcgacgagatcaccgtgagatccagagccgccgccgccgccgcatctgctagcgcctcactcccttccggcctcccttcccgctgcaaatatggggaggataccgtctctgaagaacttcaatgcgtttccgcacgccgaagaccacctgctgaagaagacttactcgggtgctatagtgacgattctcgggctaattgttatggttacacttttcgcgcatgagctcacgttttaccttacaacctatacgatgcatcagatgtctgtagatctgaaacgaggagaaactctaccaattcatataaatgtatcatttccatctttaccatgtgaagtcttgagtgtggatgcaatcgacatgtccggcaaacatgaggttgacttgcatacaaatatctggaagctccgtttggataagtatggccacatcattggtactgagtacttgtctgatcttgttgaaaaggagcatggaactcatgatcatgaccatggccatgagcatgatgtagaaaagaagcctgagcacaccttcaacgaagatgcagataaaatgattaagagtgtcaaacttgcaatggaaaatggcgaaggatgccgggtgtatggtgctttggacgtgcagagggttgctggcaacttccatatatcggtgcatggtttaaatatttttgttgcaaatcagatttttgatgggtcaagccatgtcaacgtaagccatgttatccatcga

SEQ ID NO: 18084 - DNA, 258 bp, Zea mays
  Clone ID: MRT4577_116495C.1
aaatcatttatgcatgcatctctattttgtctcattcatgtttagtcgcattaagctgtagtgctaatgccaccgaaagtaaactagatctagctaaagaggtaaactgttgacgagttgtcattttagaagtctatgtatttgcacagaaaaatacttggatacttaaaatgcaccaaacgcagtaaacttaacatgctaatcattgaggtgctccatatttttttaaagtgttattaactcagcgttgaactacaa

SEQ ID NO: 18085 - DNA, 523 bp, Zea mays
  unsure (1)..(523): unsure at all n locations
  Clone ID: MRT4577_116496C.1
ccaatcacaatcattccttatacttaaatcctatccctttcaatggtaaaggcaggttaaggccaacactgacacccacagcgatgggggacgctaccactccgggagtgggtgaaggagaaaactaacacgctagggctatggtcctcggctccatttccttaacactacaacacaaagacatatcagccgtagacaccgacaccagctgcagctcaagggcaaggacctggaccttgcagctgcaggccgaagacgcacatcagctgcagctgttcctgtaccggcatcagcatcaggagctcgagctgcggctgctgctgcaggaaggagtgggacaccacacccactccggacggggaccggtaccggggcaccacctgcccgatccggaggcagcaccagcactgcagctccaggcactgggactagccctaggccganggcgtcgggctggacctgtacctgaggaacacgacacactggcacaggaccaggatggggacgctgacgccgccgaagg

SEQ ID NO: 18086 - DNA, 182 bp, Zea mays
  Clone ID: MRT4577_116497C.1
tagccctgcagttctaccaacagccttttcccagcatcctgtgtccacagttgtgccagtctagacatgctctgttgtgccctgtgacttatctgcttggtatttctattgctttcactgttttaggtattgtggaaggatataaaaccaaacagaaacaaaggagtgaaagaacgtaatga

SEQ ID NO: 18087 - DNA, 154 bp, Zea mays
  Clone ID: MRT4577_116498C.1
gggttggggtttttttttctttttttttttccccaaacgtggagtgaacaagagatagccaccaaatttggctacaacacatgggcaccggacagcaccaccaccgatcagtttcccgaggggtccaaatttcaaccacactttcacaacccac

SEQ ID NO: 18088 - DNA, 801 bp, Zea mays
  unsure (1)..(801): unsure at all n locations
  Clone ID: MRT4577_116499C.1
tggtacccgtcgagctcggccgggcagctataacgcaacgccgccgcccgtccctagcccaagctcccagccgtaacgccaccgctcgtccctaggccctggctagcggctagctcgcgcgtcctgctctgtgctctctcggtctctcccagccccaagctcccagcgccagccgcctgctcgccagaagccacggctccaccgcagattggcctcaccgcggcacgccggcaccggtgacacgccgtgacgccgtgccagccgcccagcctcaacagctcctccaccacacgccgtcgtgacgtgccgtccctccactgctgactgctccacaggccacggctccctctgtccctcgcagtcgcagcaccagcacgacacggcagccgacaggaactctcttcagcggctacggctccattcctgagatgacgcctccggttggaaataatactccctcaagctcaaccataaaattagccaagttgatgtctaccacaagagcgccttctacacacaaaacaaattcggtattcatatacatgctaagtgatccagatgtaagcaagtgattatgaatatatgttttaaactttatattgtgtcatgtgtgctagtagacttatatggcttcttatgttagccaagagtccaagacttatcacttatgtgctacattaaactatgtgtgcttcacatttatatggattttatctatgtttaattaaaaaaaatttaaaaaaagcggccatttggtgttaagttttgaatatatgggttcatggtgtgattttaccganc

SEQ ID NO: 18089 - DNA, 415 bp, Zea mays
  Clone ID: MRT4577_11649C.1
ctaaatttaaaatgttatattttccaacaattatctctgttcttgaagtattggctgttactgtacctgttttattaacagtagcttttgtaactatagctgagagaaaaacaatggctagcatgcaaagaagactgggacctaatgcagtgggttgatatggtctacttcaagcatttgctgatgctcttaaacttttattaaaagagtatgtttctcctacacaagccaatatagtattatttttcctgggtccgattataactttaatcttttcattattaggatatgctgtaataccttatggtcctggtttagtgctactagactataatctgggtatattatatatgttagctatgtcttcattagctacatatggaattctgctggctggatggtcagctaattctaa

SEQ ID NO: 18090 - DNA, 630 bp, Zea mays
  Clone ID: MRT4577_1164C.1
gtacccgggcccccccctcgagtttttttttttttttttttttttttttttttttttttttttttttttttttttttttttttttttttttttttttttttttttttttttgaaggggcccctttttttttaaaccgtttaaaaaaaccgggaaaagggttccccatatcggggaaatttaccggaattcccaattgggaaggggcaccggaaaaaaaaagatttgggaatccgggggggcccggaaaatttcccccaacctaagccttttttttttagggggggggccccgggaaaaaaaagggcaactaaaaaaaaccggttaaaaggcgtccccaaaaaaacccccccattttgggaagggttttaaagggttcggttggcccccccccttttttttgacctcgaaaaaaaaagggaaaaaaaccccccccgggtaaaggaaagggccccccggaattttaaaaaacccggaaacaaaaggggaagggcctttgttttttttccaaaattggagggttcaaacgagggcaccctaaatttttgggggaaagcaaagaatttaaaattggaaaaaaacttttcccctggggaaaatcccttttgcccccccaaaaatgggggcatttt

SEQ ID NO: 18091 - DNA, 393 bp, Zea mays
  Clone ID: MRT4577_116500C.1
ggggtactaccaacgggcagaaccgaaaggcagagggtaaaaaaaaaaaccaagacaaaaaaacttcaaaagccactgttttaaaacacagacgacccaaatggaaaaagaaagaggggaaaaaaagaacgagtttcaatggaaaatccccaagaggcctaaggggggggctaaggggagggaaaccccttttaaaaacacagcctctgacaaaatgggccggcccggcaagcggggccagctactggggcccaaggcacagccaagggccaaagaaggggatatccccgaggccaaggggccaaaccgcgggggtaaaaaaccggccgccggtacatctccagaagaaaaatgcagctgggataacagcttcggtatccgggcgatcctccc

SEQ ID NO: 18092 - DNA, 345 bp, Zea mays
  Clone ID: MRT4577_116501C.1
tgagaccaaaaggccattcaattaaccggaatgattattttcggccacaccatgtgaaaacctacgccccttgatacgtaatgtcatttccgatcaatgtatatgtcgatcttttcttttaatagtaaactacacttaaaatgaataacccttgcaaggtccatgtttgccatgcatatcttcaaccctgaaggctgtgccttattgtctttgagaatgaaccatggacacttcattctcagaccctgaattgcctgcaccaccgtgtatggctagacccactgttgccgatatctacttggcctgggtcgtggtctatccgggagggcgactcctccttctttg

SEQ ID NO: 18093 - DNA, 223 bp, Zea mays
  Clone ID: MRT4577_116502C.1
tacaagactctagagtgagtcgtatgtatggccgcccctatgctgattctttagcatgcaccgcacatgcgtgccataacgaaatcgacaacttgacactggaggtcagcattgaagtggaagcagagaccaaaggcgactctggcagttcggagcaagaatatgtatctcgcatttatgtaggcatgcgacgagtagagccctccactcaaaccagccatag

SEQ ID NO: 18094 - DNA, 441 bp, Zea mays
  unsure (1)..(441): unsure at all n locations
  Clone ID: MRT4577_116503C.1
gtccggaattcccgggtcgacccacgcgtccgactagttcatatcgcgagggccgcccttttttttttttttttttaactgatcaagtcctttttattaagatacacaactttataagaaaaatacatttgcctctccaatgtaaaagcctcccaccccgtacattaaaatctctcggtgcagtaacaggtacaacagctgctggctcaacagacgaatggatttctgcttggatgctctgcaaataggctcagcgaactatgaggactccagctactctaacgccacatcatagcaaagacgatactgctccggggcttccaccatgttcggcttgctgttcctcagcgtctttactgcatggaacacatgcaccacatttcgccgcttcaccatntgcacaacaatgccgatggcacagagcatgccactgcgcccacc

SEQ ID NO: 18095 - DNA, 316 bp, Zea mays
  Clone ID: MRT4577_116504C.1
catataggaaagggacgcggcgccggcggaatcggcgacccacgcgcccacatggcacagggggacatcgcacgtggctcgtccctggggcgtgccttgtcgtgtgtcatgctccatggttcatgggaccagggggcgaggacgtgacgcgacctgggcccgccagttgcgccggatcgctagggacgccaggcctccggacagcagtcccgccggaacccccacgaggacgctgggaggcaggcgctatacaaggccctcgacgaggggtgcctcgttaggcgcctcgccaggcccggccatttgctccgagact

SEQ ID NO: 18096 - DNA, 330 bp, Zea mays
  unsure (1)..(330): unsure at all n locations
  Clone ID: MRT4577_116505C.1
cccaagcttgttttttttcttttttctttatcttttctttctgttttgtgataacaagtaacacgtttgtgggcaccgaacaacttcctacgacgtatgataaataaaacatgctaagaaacaggaaggtgcccaaaacggatcctggctgaggggaaaagggaggaaggctagatacctacatcgagaaccgccggggggcggcttacgcccagacactggattgctccagccggcacctgaccggccggtcgttcgcctggcctacttctgtggatagccatnatactggcgtgcgcccgtccatccctgtatcgggcgctcccttcc

SEQ ID NO: 18097 - DNA, 411 bp, Zea mays
  Clone ID: MRT4577_116506C.1
cgggtcgactttttcgtcctcccactcgtccggcgaccgtctccgcgtttctactcacccttggccgtctacgaggatctgcaccacgtcaggatgacgactctgatgaacctcaagatcatgacttcaacgtgcaagaggatcgtgaaggagctgctctcgtacgataaggatgtgtacaaggacgctttcaagaccgacgacatgaaggacaacggctctgatccctacgacctcaaacatcacgagaatgttttgcctgagtcaaggatgattgtcccagactgtcacaaacgacttgaaactgcactttcttactcgaaagcaacactggcttaactgaaggagtcaaatgatcaaggtacctatattgtacaaactgatagtacaatcgcacaagtttgaatcatt

SEQ ID NO: 18098 - DNA, 280 bp, Zea mays
  Clone ID: MRT4577_116507C.1
cacgcgtacgctgaactactcatttactggactatttttttcaacacggcagcagctataataacagtggtgtttattaggggactcaaggtggctattgggatactacctcacttttacaactttgttcacattggctgattcgcgacgtatttcctctcgggttttgctctgttgacatggcctcaatttagctgcttggcaaggcattcattgacacatactaactaacctaccaagtgcaaagcatacacaaatactatgcaggatttcccactct

SEQ ID NO: 18099 - DNA, 143 bp, Zea mays
  Clone ID: MRT4577_116508C.1
tttgggggattattagagttttttgggggtatttcacggacagccccgcaacccctacgcatttcccgggtccagacaggggcaaaagcataccagtgacaaaacagggcgcgcgttagccaccactatctgacggacacact

SEQ ID NO: 18100 - DNA, 940 bp, Zea mays
  Clone ID: MRT4577_116509C.1
attgggtacctcgaggccggccgggactgcccgctcgatacggctggtgacgcgttgttttcttcgccctcttctcccgcggtgcggtgtggaaagcgagcgagcgggagattagtaggatctatcggtcgcgttggcgcgccgatacgtacaccgcgggtaccttccttccgtccatggcgtgttgggctcggacggtgggttagccgccgggcgtgtcgcgcggggcgtatggccgccggtccagccatggacgccggagcgggcgtgaactcccccaccgccgcagcggacggcgcgtacggactcgcccgcatcgtggccgggtgttcgtcctcgcccctcttcttctggctcctcaccgtcgtgctcgtcgccgccatccacatcgcctccgggtccaggccctccggctccaggacctatgggaaggagagggagaagcaggaggaggaggagaaggcacgccgcgataggttcgcggctgccgaggagagggaggtgtcgggcaggcgagacgaccgggttctggagatgatgcgcagttttagcttcatgaaggcgaccgaggaggatttcatggagggcatgacggcgtacgagtgcaacggccgcggcgtcgacgccgactccgcgcacgggcttgttgcgcttccgagccgtttgcgccgtcaccggcgttggcggcgacgagcctcagcttcaagtttcaccaccagatacccgaaattccaacggagacgacggtggtttcgagaggattcacagcagcaagagaagagcacggacaagaacgagaggaagagaaggaaccacatgttcccttggaatcattggtttcggtgcaatctgcagaccagcaagaacaccgactagaagcagaggaaacagagttcttggcgatgagcagtagaaagcagagccggaggcagcgccaccg

SEQ ID NO: 18101 - DNA, 237 bp, Zea mays
  Clone ID: MRT4577_11650C.1
atggccggtggtcacgaaaattccaccccggtgcccgaacttcgacgcacagggaacaaatacgaagggtgcgactgggtgcacgagtttacggcatcagcgccgcagcccaagtccagatatgcaccgacgacggcgcaaggcagtgatgcgcaagagccaaccccgacgaggaattctggcctcccccgtgactcaatcccgattctaatagctaattctcagtgctaccattaa

SEQ ID NO: 18102 - DNA, 217 bp, Zea mays
  Clone ID: MRT4577_116510C.1
gtccaggaggttgttgttttcttcttattaaaaagcagaggttgtgccattactatggaaaaaaatcgaagaaagaaatcaagctctacacaatttgacactagaagaggattctgggcctagtacgtgaggggaattcatgcactaaattcactgcaagtattcacttttttctacttattttatttcatattctatatttttcttgttattttca

SEQ ID NO: 18103 - DNA, 442 bp, Zea mays
  Clone ID: MRT4577_116511C.1
aaataaaacaaaagcccacggcgttttttttatttcattataatcgggggggtccctttattaaaaatatcccaggcggcccatcggtgggggggcaccaccaaaccccaaaactaacaaaaagaggcaggccttttggccaacgacgaccaccctcattggggaattctagaaacaaggaaaagtttttgggcccgggaaaccgtcatcccaaacggggcggacatggccaccttggccccggggccccccatttgggggggcatcccccaatcaaaatgggaaaagaggttcgcgagcttgatccccacgggggcaaagggaaacggggcccccccgcaaatcccgccccccgccccgaacgggacaaaccggaggtccttgccgtacatggcgacccggggggggggcccttgttccaggaagcgccccgggaaaaacc

SEQ ID NO: 18104 - DNA, 382 bp, Zea mays
  Clone ID: MRT4577_116512C.1
cacgcgtcaatccaaatcagcagagcggcagtgcgtagagaggatcgtccaacagaacagcatgaaaatggtcaacgttcacgtcgtgtgcctggctctgtcagctgccaacgcctctgcaatgcaaatgctctgcccctgcgcggagctgcaaggcttgtacggagctggcgccagtctgacgaccattattggcgccctgggcctgtaacccgaagctgagtaactgaggcaccctcagtgcaccccgctggcagaggtgccctactacgcagggtgtgtggcatcctagcgcaatgttccatccgctccggcaacagtgctgccagcagcagatgaggatcacggacgtatagtccgtcacgtagcagttgcagataat

SEQ ID NO: 18105 - DNA, 391 bp, Zea mays
  Clone ID: MRT4577_116513C.1
accaagagtgtcatactaaacatatcttcagatcatttaattgcatgcactaaataggttcaaactggatcaatatcacgaaaggacgcatcatctttgccctgtcattatgcattctaattaggcacatgtgcactctgaattccttaggctatgctgcgaggtacagctactagactggacatacgctctagttatggacctgtaactgagctcagcacaatcagagcgttagcagctgaatgaaactgaacaggccgtcagcgatctgtccttaaagctgatgctcatataatgatgctgatgcgaccttaacactgacacaggataaagcacttaagctgaaacctgtaccagacactcacaatgtatgctgcatagatagctagct

SEQ ID NO: 18106 - DNA, 292 bp, Zea mays
  Clone ID: MRT4577_116514C.1
tctgagaagtgtatatggggctcaagctactggtgccaggcaacagagacagcagcccagtgcaatgctgtcgagcattgcaaacgccatgtgtggaactaggaggaggaatattccatcttggcagaaaccacagcattggtctttttctacttgtggtctgggggaatgaacgcacagatctgtttgactttgttataaaaatagggctcccccacctcccccatttctgtgtcctttattgtagcattgctgtctgcaatggagcccctagcccctggcagacatagct

SEQ ID NO: 18107 - DNA, 323 bp, Zea mays
  Clone ID: MRT4577_116515C.1
gggcccgggaacacatattcattgtagaccaactagtcaacataggaaagcacaatagtgtaccaacaatggcaggcaaaaattttgcttccttatgctccttgggctttctgcaagtgctgctaccgcaaccatttgtaccacaatgctgacaagctgctataactaactttcttgccccatacctctgaccagcggagtttttagtatgtgaaaacccaattcttgaaccctacaggatccaacaggcggtggcagtagggattttaccttgatgaccctaggaactacaacaaccgaaggacgtattacaggaggaacct

SEQ ID NO: 18108 - DNA, 357 bp, Zea mays
  Clone ID: MRT4577_116516C.1
gcgggcacgcattcaaatgtttacagatctaattgcactagctttccatctaaccactttcagagactatcagtggttatcaggtcctacctaaatgctgaaatactttctacagatgacactcatacaattctagaccatgatctactatacatgaatgatgacttgacaaacatgctttaaggcacttctcaaatctcgccatcttaaaagctgcttgacaatatatcaaaagctccagaacaaacttctgctgactgatatttcaggactcaacactctctacataaagatgactaggatcttgctccagaatcactttaacagcctaaatcatattctgactatgcaagctcc

SEQ ID NO: 18109 - DNA, 471 bp, Zea mays
  Clone ID: MRT4577_116517C.1
gcgatcaggggttcatgaaactagggcagtccaaggaagataagcttaggagagtaacacttcagattgatagttcagatatcacatttgcttttaagggaaatcgcttctttcaaaaatgtctggagcagccaagatgctaactagacccatagcagagagtagatcaatacacttactgttgtaatacattacagtattagtttattgacattatcaagtaccagcaatttcaacccctggatgtgctgctcaggtggtttcattcaacatggtcaaacgtaccttggttacatcatgaagctctttcttgcagtgcagggataagtacgtgggacgagttatgatagtattatgtgacacaattctcccaaagatggctgagtgttgttatgatttctcaatttttggttcttccagaactgattgatcatgtagctaaacatttaacatacaagaacatttgtttac

SEQ ID NO: 18110 - DNA, 291 bp, Zea mays
  Clone ID: MRT4577_116518C.1
gccggccgggtcgggctctcgaaaccctagtcctgtgttacttctcccgccggcgacaatctcctcgcgttctccgccaccgccaatcccctcccgtcctccggcacctctggtgagagcgagaatagatggccgtcaagggtgatgggacggtaatcggcatcgatctcggcacgacctactcttgagtctgtgtgaggcagcacgaacgtgtcgagatcatcgccaacgaccattgtaaccgcaccacaccctcgtacgtcatcttcaccgaatccgagtgcctcttcg

SEQ ID NO: 18111 - DNA, 512 bp, Zea mays
  Clone ID: MRT4577_116519C.1
ccggccgggaacacgtactactatttgtgttgcttcgtcctacttttttatgccttggcatatgttggctatttctggaggcatgctggcaagattggggaaggagctagcgagtgtttggagtgccccagccagggtggtacagggtttattacatcattaataatattcaagagttagtaaccgctctgacccaagagcatccggtggtgctgatgttctgggcggactggaaccagccaagcaaggccacgtactgggatctggccatcgctaaaaaggatgaggccgtattctgccagctggactttgataagtttaaagatgtcgtagagaagttcagagtgaaggctctgccgacgttcctcctgatcaaggagggcgaggagcagcgcagggtcgtcggtgccaaggtcgaggagctcaacatggcattatcagatatcggataatctaggcagctatagcgctcacattctaacttcatcaaattattctaataaattaataag

SEQ ID NO: 18112 - DNA, 223 bp, Zea mays
  unsure (1)..(223): unsure at all n locations
  Clone ID: MRT4577_11651C.1
gtactgctccgagtccgaaccttatacaatcgtctcgtttccgatttccccaaattaggcacaggcgctacaggacccaggcaccactcggtcggcggcaccgcgtcgccccgcctgctcgattggggtcgcgtgtgcgataggaaagaatggtgtggacaacgcggtaaatttggtgcagatggatggtgtgttggggggggggggacnttttttttttttt

SEQ ID NO: 18113 - DNA, 961 bp, Zea mays
  Clone ID: MRT4577_116520C.1
ccgccagtgaaagcaaggcagcatgcatgtcgtcgttgccacaaaagtaacacgtactactatttgtgttgcttcgtcctacttttttatgccttggcatatgttggctatttctggaggcatgctggcaagattggggaaggagctagcgaggttgtttggggcggtgacgctagctcttgccgacatggattaatatttaacggcggcggtgtactcaatttctttctgtctgatgtctcacgcggtaatttttgtgctgcggtgtagtgtttggagtgccccagccagggtggtacagggtttattacatcattaataatattcaagagttagtaaccgctctgacccaagagcatccggtggtgctgatgttctgggcggactggaaccagccaagcaaggccacgtactgggatctggccatcgctaaaaaggatgaggccgtattctgccagctggactttgataagtttaaagatgtcgtagagaagttcagagtgaaggctctgccgacgttcctcctgatcaaggagggcgaggagcagcgcagggtcgtcggtgccaaggtcgaggagctcaacatggcattatcagatatcggataatctaggcagctatagcgctcacattctaacttcatcaaattattctaataaattaataagctggaaataagtcttaaaaatacaaatggctaattaatgcattttcgatttacaaagattgaaattcaagaaaaggtgtattaattatatcatatacaactactacacatgcatgcaagccatggttggattttgttacaaaatattgtgtacaaagtgatcaacccctatctgacagttttctcccaaaggacacaccccttgggagacactgcatccattgtatataagagatcctatttgcaataaagttgacaactgtcattccctctgtacaaaaaacaaaaacggga

SEQ ID NO: 18114 - DNA, 710 bp, Zea mays
  unsure (1)..(710): unsure at all n locations
  Clone ID: MRT4577_116521C.1
ggccgcttttttttttttttttttggacattacgagttagtctctctgtatgtataggagaggacatcgtgtgatcattagtccgtgcaaaaatttatgacatcaacttgccaaatttagttctccctcatctttgaaggaaacaaaatcgaactctttatcgtcctcttcctcgtaatcctcatcctcctccccatcatcatcatcgtcgttgtcgaaagtataattaccagctctgatcctaccatttacacggttccttttgcatgtataacttcatgcccatcatcgccatccacctcttcagtatcaggtttcggttccagctgaactgcaccattccctaccagaccattcgcttcttgctattcttctggtgtctcggcaagcgaaagtaggatatttttcgctttctggtcgggtgggtacccacgagcttccatttcttcgaaccaaatgacggcgtctccgaaacccgagttcctgccatgtgcgtccatgcgatagtagtatagatagtctggttgggttcgacaccctgggatccgcattctctcgtacacacgcataactttctcgacgctatctatctttgaatagcctttcgtcagagtaccatanaccacagcgttaggcttcagaccgtcctctttaatcctacggaagaatttctcgggctcattcatgtcatgaagcatttacgtaggcta

SEQ ID NO: 18115 - DNA, 386 bp, Zea mays
  Clone ID: MRT4577_116522C.1
cccacgcgtccgcgtccccgtcccccgcgtctaccatgctcctcgcccctccgaacgtggtcctctccatctagcgccacaaccaatgcacgcctccgggctcacgccgcgccaagcccgtggggaggcggatctcgcccacaggccgcagatctccttccaaactaggaggcaacagcctggcaaggggcgaccttgcatggtaggcggcccctttccacaaaggacacaatttcacccccttccatatttggcggtcatggcatgcactacgcccccttcctcgccctcattccaaattcagccctcaactgtgcatgcacccacctcaatcgactgctattgtctgaatcgacagtgctattggtctggttggttgggacttg

SEQ ID NO: 18116 - DNA, 403 bp, Zea mays
  Clone ID: MRT4577_116523C.1
gccccccctttttcaaaaccctcagaagcaaaacaaattccttttttaagggcataaaggggtgggcaatctgggctagggttccccctggggttggggccgggggatgatttcacgggcccccctggggcagggtgataaaaaaggaaggggccgatgtaaataaaaactatgactgggggggttcacaaagttttaaacgttttgttccaagcaacttcaaccctaaaatcaccagccccatttttggccccggaaccccccccttttgggtttacagagagagacatccccccgatccgaggagggtttatttccaactttgccgggatcacatttcctcttcttgggggaaaatagcgatcaaaggggattttaaagatttcccctttgtctggggggg

SEQ ID NO: 18117 - DNA, 334 bp, Zea mays
  Clone ID: MRT4577_116524C.1
acggacgcatccactcgttccatgcctgacgttcgttttcaactcgattactatactaccgtcgcgcactggatgagctcaagacgaatccactaaacggtgcagcatacgatgtaggtactagacgggccgaaggcattggttaaaagggtccccatcttgatcaacggactcctgagcgtcaagctgtagaaggtattgcaagacatgcacagccgaaaggtcaaagaacaggcccttcattgctaaacctagctctcatgggaggtttaacaagctatacgactggctgcggcactaacgcttgtatttgcgaacccttttgtttaatcct

SEQ ID NO: 18118 - DNA, 389 bp, Zea mays
  Clone ID: MRT4577_116525C.1
aaaataaatggagactggtttcacgataattgggggatcatattggcgattggctaaagggtggaacgacaaagggccaacaggaagatggtgaaaacccctccaggtggtggggcggggtctataaataagggtatacaagaaactcatatatccagaaaatctttggaggagaaacaccgggggggtggtgggcaaaaccatatgaccggatgggtaaagggtcaggaaggtcgaagcatcatggaaggaggattcctggttctcattggtaaaggggcaggatcaagaaaaggctttggaggttcaggatcattttctggaggctctggaactcttggtggttcctcaggttctggtattggtacttctggctcaggaactggctt

SEQ ID NO: 18119 - DNA, 289 bp, Zea mays
  Clone ID: MRT4577_116526C.1
cgcacatatgaggactacttggaggggtttcgtgtgtttgataacgaggggaacggcaaagtcatgggagcagagctcagacatgttctcaccacccatggagagaagatgactgaggaggaggtggagaccgttctggcaggacacgaggacagcaacggctgcatcaactacgaggccttcttgaaacacatcctaagcgtctgagtgctgcagatccagtggggtccggacactgggccccgcaggcgaaagcacgttccagccacgaggaggccacctattgttt

SEQ ID NO: 18120 - DNA, 921 bp, Zea mays
  Clone ID: MRT4577_116527C.1
cattgggtacctcgaggccggcccggccgggacaggcatcgcccaagagcaaaacatctctaatacacccaaagcaaatacgcacgcagtgatagccatggctcgtggcggatctggttgccgtcttctcgccctgctcctagtcttgactgccttcaatggcagctttgcagctcgacatctcttggacacagcagctgcgccagaggccacgcctgctcagccgtccattccagcggttccaaccaaactgcctccagtgccgaccataccagcggttccaaccacgctgacgctgcctccaatgccttccattccggcggtccccaagatgacaatcccaccaatcccgtccattcctatcccaaagctagccctgccaccaacagctgctggcgcgatcccatctctcccaaacccggtgattccaaccaccgtaccagctatttctgcagtcccagttaccctgccaccaatgccctcgattcccactaccatgccatccattccaactacgattccaacaacaatccctaccattcccggactccaggtgcctccattcactgccccatccccacaaaccaccagcccttgaagttcgatgtagcaggagacttttctttacatgctgttagtcaggagtttggctcatcgtatatggtcgttttcagtgtgtgtgccatgtttgttctgctattttgatgatactggctagcatgtggtgtgcttgtgattgcagccagtctattgtaccactttgttttgctgttattgaagtattacttggtctttataaaaaaaaaaaaaaaatgagattcccacattattcttgtccagtgccccacgcgtgttccctacaatataccaagagacacttcccttaggtgctggatagacatggtcgcaagtattctacct

SEQ ID NO: 18121 - DNA, 365 bp, Zea mays
  Clone ID: MRT4577_116528C.1
ctggagggcagttacaacactgttggccggatgcgccaatgacttgacaaccgcttcgggcctagaaaaggccacatgcccaaactaaccgacaaccaccagatcgcgcccgaaccaacacgggctaacataaaccccgggcaagcccggctagtcaaagacccccgccccgggaacttacttttagtacactacagtggccacggaacgcgcccgccaaacgaaacatggccggccgacgaccaccagtaaggccagcgccgtggtgccctgcaacacgaacctcatgacagatgatgatttcaagcaacacgtgcagaaggacccggtaggttgcctattcaccatcgtcactgactcatgcc

SEQ ID NO: 18122 - DNA, 589 bp, Zea mays
  unsure (1)..(589): unsure at all n locations
  Clone ID: MRT4577_116529C.1
gagacctcaagcccgattccctttttttgtcacggggggggggggggggggaaagagcatgcgaaagcagaggccctgccgaagctgcaacatagaaaggcaataggtagtagcggtacgaccaatgatacacattaaagtaggtcaacggtatatcnntataagagaattgcacacttttacnncatgaagtagtcagcagacctgggagccatagagatcaataacactataggcctggnnccacacgcgtttagattacacataattcatgccttatatagggtccacatcatttcattagatgactaacatctcacatggcccgaacactaatataatgtagcggtaggctctcccntgagcgaatatgtcgcttggtcactcatctcgttgcgccttcactgtggcattgcgtccatgcattagagatgagccatcgtccctgcccacaacatctcagtcacctatatgcttcctncccttaatcagggtggcgaggcgttgatgcgtttacgccgcagatcgtccgcgccccctagctacctgccacagcaaacaagcagtcgacttgagcnagcgatagcgt

SEQ ID NO: 18123 - DNA, 271 bp, Zea mays
  Clone ID: MRT4577_11652C.1
ccgctcgatatctacagcgcctgctgcgccacgatcgtgtccatcgcctcattccacaactagcggatgtggtcattcctcggcctcctcatgaccacttacaccgcatggtacctcaacattgcaggcatcgagcgctgccagttggaaggtgtcacgcactcgggcgcaagcaagatacgtgctctacttcatcggtgccaccatcatcctctacactcttggaggccatgctgtcactgtggacatcatgcacgcgatgtcgaaaccg

SEQ ID NO: 18124 - DNA, 282 bp, Zea mays
  Clone ID: MRT4577_116530C.1
ctatgagctatgacgcacgactgccctcatgcgtaagactcggatccagatgggggtccactcggcgcaagaccaccacgccgggtggggtggagcacattcgacacgtgccttcacgacccaagagcaacttcagatgaagcacactatgctcgccgcttatgatccggcgatccagagacatctaattctcatgtgcgcgcaaaacataagagactcaataagggagcatggcttaagctgaacccacggactgacgttaccccaaagaacagtgccaac

SEQ ID NO: 18125 - DNA, 422 bp, Zea mays
  Clone ID: MRT4577_116531C.1
accacgcgtccggtagcctccaccaacagtctgccccgggtcgatcgaggtagcacgacgcccgaaatcacttgactctccgggaccgttgacgtgatcatcgccgggaggaccgagggacgtgtggagtcttcgcccttaccccctaactccaagcgatccaatgactgccaaacttcaaggtgtccaacgtcgacaattatgaacccaagcaagacccgggcggctggctagctgtctacacgaccgctgcccgggccgctacggcgatggaagatgtcttgatagcgtacatacccattgtcctatggcaggacacgctgcaatggctccgacatctacctcgacattgcatcgacgactaggacgacatcagccgctggtttgtcgctaactttcaatccctttctgataaaccgacg

SEQ ID NO: 18126 - DNA, 530 bp, Zea mays
  Clone ID: MRT4577_116532C.1
cgcggtctcgagtctcgggccccactacaagcggtctcgggccccacttactatggtcgtaggtttttgcctgcgcctgtaatcctcctatccacacagcaaccagcccactacgacaggactttcaccacagggaccggcagccagactctacttacagcagctgagcactacgagacccctcactcactaggaactcatagcattctactaccctaaattggcttaaaccatcatcgtctcgggaaagtagtcagtacctacaggtttactaaactctgggacaaatgacgaacgacagacgacaaagattcaggttcaggtgactccgacaactcaccgtttttgaagaagaactcagtaggtggtggcgcttatgaacgaggagggtgtgcagaccaaggactaggagattaaggctcgcatgctttctaaggagattacgactcaccttcaggaacacgtgacaacaactaaggtaaccgacagtctcaggagatgtaatccggatcgagagggggggtttgggt

SEQ ID NO: 18127 - DNA, 551 bp, Zea mays
  unsure (1)..(551): unsure at all n locations
  Clone ID: MRT4577_116533C.1
tttccgggcacgctgaagctactcatctcacgagccctaaacccctccagctccaggctggcccctcctgtcacagaccccgcacactgatactgccccacggcgtcctggatcctcggccccagcgcctccctctccacgagccccaggcacgcgccgtagcctgcgtcgcggaagcagctcgccagggactccagcacggcgccgaagtgctgcagcgcctcccggaagaagcccgcgaaggtgatggcggcggcgccgggatgatttcggcccgccctgagcagctcctcttctgccgtgaccaccagcttcggccggaggatcctgacgacgccggcgagcagcttggtcagcgagctgtaggaccggatatcggtcgtgtcgcacgagaccaccaccgagcacgagcagcaactcgtggcgaagccgtgcaggtcctcgtcgctgcgcacgcggagggagccgtactggaaggggaggccgagcgagtcggcgaactccgagagccgccgcgcggnggccgccatgcggngcgcgtcggcgncggc

SEQ ID NO: 18128 - DNA, 188 bp, Zea mays
  unsure (1)..(188): unsure at all n locations
  Clone ID: MRT4577_116534C.1
tcattcataccaggttggcctaaaataaatcntattataacttgtcttaatcatgtttatagctgatacctttttcaaattgatatcctctcacaatttctcacaacatactatcctttatcataaagtttaaagctctatttgcctaattatatagcattcttacttaaatttactttttttaattt

SEQ ID NO: 18129 - DNA, 544 bp, Zea mays
  Clone ID: MRT4577_116535C.1
tgtgctcatcatcatcccctataccaaagcccatcttcttctccttgaaatctttttgggttccagatttggaggatgtcttgcaactgtggatccggttgcagctgcggctcagactgcaagtgcgggaagatgtaccctgatctgacagagcagggcagcgccgccgcccaggtcgccgccgtggtcgtgctcggcgtggctcctgagaacaaggcggggcagttcgaggtggccgccgggcagtccggcgagggctgcagctgcggcgacaactgcaagtgcaacccctgcaactgttaagctgcatgcactcgtacgtacgtacgtgtgatggtgtgagagtatacttgaataacgagcgtctgatctgatggagtcgagcaagggtgcgtgtgcgtgtgatttgcttgctcgctctccgcctatgctctgcccatggtgtccttgtgtgtatgtgtgtgcgcatgtctccctgtaattgcttcatctatctccactatggatggagtgatgaatatgtaagaatgaaagatttacctaa

SEQ ID NO: 18130 - DNA, 394 bp, Zea mays
  unsure (1)..(394): unsure at all n locations
  Clone ID: MRT4577_116536C.1
ccgactccctcgctcaccagatgtaacttgcggaccaggcaaagccgagccggagcncgaccactaagatcttgcgtgggctccttaacccagctcgtcactgtaccgctcgtgccctacactctcggtccgactaaccaataattcatccatccatctatttatcatctctctttttttatttatttacttactctcttattttttttttttattttttattttcttttatttaatttttttttttattttatttttttatttatttttctttttttattttatttttttttttttatttcttttttatttttttttttattttttttatttttttattttttttttttatttttttttttattttatttttttctttttatattttttttat

SEQ ID NO: 18131 - DNA, 387 bp, Zea mays
  Clone ID: MRT4577_116537C.1
ggcttcatgctcccgctcttaccaggtcctcctcggattagggtaccgcagggtatggtggaggggcgatggctgatgctgatgcggattaccgccgctgtgtcgagcgtcttgcctgcgccaccagcgacaagtccgcatggagaatagcgttaaactactacggcgagatccttgacttcaaagacatcagcgaccgcaagacggagaggtatagcgactccaggttaattaccttctccttcgagaactgcctgctcgtcgctttcgctaacatgtacggaaaggacctggaccgtcgtgacctcaccgctaaccacgcgcagatccggggcgaggacgagatccacgcaggctacggcaagagccaactgcagcagatgctat

SEQ ID NO: 18132 - DNA, 358 bp, Zea mays
  Clone ID: MRT4577_116538C.1
gactcgtccgttgtgtctttggggtgaccagaatgctatttacggctctccaagtgaccaacaccaagggctcaacggtcgacacaacccgtgaagttggctgaaccatgcatttccccatgttgaacatccaccagtggtcacgcctcatgcatcggttgctccatttgatctgcacaagactagacaaggaattgcctttaagatcttctgggtccctagtggatacaaccagtccatctcctgtgcaattgagctttccattgcccgctatccatgagcatgtgttacaaactcgaccatcgtctccggttaatgaattgctacctgtgcatatagagtgcttgctagagggatc

SEQ ID NO: 18133 - DNA, 477 bp, Zea mays
  Clone ID: MRT4577_116539C.1
cccacgcgatgggccacacgtaccgcggtgctaatgggcgcgactgagggtggctcaagtgcatgggagaagagcgtgtctgtgcgctgtgacctgaacgtgcctgtcgacgggcaccttcggagcactgtccacaccctcctttgggtcatcatcacggatatccagatcctactccgcgtgggtgccgaaatggtatgcagcgcctgataagcgatcattgccaggacctggggagtgagtgatactgggtgatggggctcaagctaggcttatggcttggctgccacctgataataaaggatgggtgagaatggagattaactgtgcgggaagtatggactttaatgatgcaagcgtttcccactgtgagcctacaaacgctgctactgaggtgcctgctaaaaaaattatgaatgctttgggtgataaaactaggcgttctagcgggcatactaccacagggtgaagcgcgca

SEQ ID NO: 18134 - DNA, 210 bp, Zea mays
  Clone ID: MRT4577_11653C.1
cctcagcggcgggagattttcaagagaatttacatttcagtcccttccaagagaaaaccgtcgcgtcctcgccgcgccgctcgcgtcgggatcccgccgccgccctactcggtcgaccatgggtgacggagacaatgatgactgcgatgaccgcgatcatgctgctctacttcgtgctgagccggcggctggcggtcgtagcacgtctca

SEQ ID NO: 18135 - DNA, 721 bp, Zea mays
  unsure (1)..(721): unsure at all n locations
  Clone ID: MRT4577_116540C.1
gccggccgggctgcgaaacatcagaaaggtgcagcttcagtaggagctctcgtggcgtcatagtctctggaaggtccaaattaagattagaagatggacgaggacgcgctaacggagatccttgcgaggctgccgtgcaggtcgctggcgcggttccagtgcgtctccacgtcgtggcgccgcatcatctcgagcgactacccccgccgccggctgccgctcatcacgtcgggggtgctctaccacgacgacacgcgccgcggcggcgcggacggcggcaggaggcagcaggtgtacacgtacgcgtgcgcgttcgcgtcaggcggcggcgccaccgccaccgccacggcggaggcccccgacatgggcttcttcccgcgccacgacacgtccaccatcatcgacggctgcaacgggctgctgctctactacgcgtcccgcccgacggcggcgttccacgtcgtgaacccgaccacgcggcggtgggcggagctgccggcgccgcgcgcgaggacgctgctctccgtgctggcgttcgacccctgcgcgtccccgcgctaccgggtggtgtgcttcaccgggtggctcccccggggcgcgaccctcgaggtgttcgactcggagcgcggcgcgtggaccgaccacgaggtcgacttcggcctcgacaccgacgccatgtccgccaccatgcactacctccggcggcgcgcntccacgtgct

SEQ ID NO: 18136 - DNA, 184 bp, Zea mays
  Clone ID: MRT4577_116541C.1
acgccaccggaatcaccattcggttcaccaataacaccttcgtgaacgccaccaacgagtacatggtcatgatcctgatcaccatatgattgttttaaaagcagcagcagtctagtgaaagtaatgtttcgttttaagattctagctgatagacgtcctatcatagctagtcaaattagatttg

SEQ ID NO: 18137 - DNA, 291 bp, Zea mays
  unsure (1)..(291): unsure at all n locations
  Clone ID: MRT4577_116542C.1
ctttccccacctactctcgcggctctcgncagncagtctagggtttcngtcccggcgtgcttatccgnccccgccggccatgtcgnancaaggagggaanggcaagccgctgaaggcgcccaaggccgacnagaaggaatacgacgacacggatcttncatatctgcagnanaagaaagatgcggnnnaancacttanggatcntaaggncaangcncagaanggcgcgattgggggctcgggtctnnagannngtggacnganatgagactggtcanccgtctccnatat

SEQ ID NO: 18138 - DNA, 284 bp, Zea mays
  Clone ID: MRT4577_116543C.1
aaaaaggggaaaagggaggtccattgaaaaaaaaaggggccctcgccctgggatgtccaaaagggaggttttttggagggacctccaattaagggggggaggaaaaaccggaaatcggggggatctacttgccggtggcaaagccggtctttaacagttttaaaaagcgacgaaaccaactgctgctcagggggctaatttaccccccccaaggacccttttaatttgaaagatcctaggcccgacagaggcggggggatcttcccaggaacaaaacccacttt

SEQ ID NO: 18139 - DNA, 154 bp, Zea mays
  unsure (1)..(154): unsure at all n locations
  Clone ID: MRT4577_116544C.1
cgcgagacgcgtggtgctcgctctgctagctctaccataggctgatcaccatccggggcagcgacgtggagagtggcgagggagctacnagcgatcctccaagcgcggggagcggctatgcacgagcgaagagcgcagcaagcatgcagaaagc

SEQ ID NO: 18140 - DNA, 427 bp, Zea mays
  Clone ID: MRT4577_116545C.1
agcctttcttttcggtaactggaatatatgcttttctttactttatgtttaatggaaagacaataatcccaggggtaaacttgaattccaccataaacacggtgccttctcagaatacacaccatccctaatcttatccaatcgacatcaaaagagttccagtggttttatcaccttaagggagagatggaactaaaacagaatagggggccattacgccggacaaagctagaatagcacgggccaatttcaattttttcctaaggtggttagtttacttgcaacccggttagacccagtacagaagggttccgtaaaaacaggctttcaagaaggcctcatattaataggggaaccaattttttaagcaagaattccggcagcccttttaccttaaagaaaaaaaaacttttttttccctttcccg

SEQ ID NO: 18141 - DNA, 244 bp, Zea mays
  Clone ID: MRT4577_116546C.1
caggtgtggagactggtccctcctcctctccggtccgaatgggccgaaggaagcacagggggtgccagccccccggcggtaagggccctcgtgaacaactggacaacaaggtggccccccaatccgacccggccacagcgcagggtgaagaagcctcaccggttcctccccgagagcctaccgctccacacaacaagcccccgtaccattagttgacgtttaccgagccttcaacacctcccgc

SEQ ID NO: 18142 - DNA, 166 bp, Zea mays
  Clone ID: MRT4577_116547C.1
acgagcgcgcaagttcgcaatggaatgacgaagatcgagactctattatatcctgacatcagtagcgccgcttacgacggcgcgagtgaaggcgctcgtggtcagatgctgtagatgaacgattgcccaatctgggcaagtgtagtccagtgcccaggcgcagagg

SEQ ID NO: 18143 - DNA, 110 bp, Zea mays
  Clone ID: MRT4577_116548C.1
attcggctcgagcacatccgcgactttatctcgcaaccacaggtcggctgtaagccgcgggcatgatactgctacacggccactaccaccctggggacccgcaatgcaac

SEQ ID NO: 18144 - DNA, 739 bp, Zea mays
  unsure (1)..(739): unsure at all n locations
  Clone ID: MRT4577_116549C.1
ttgggtacctcgaggccggccgggaccctttctttattctcttcactcaaaagcggctaggcgacggggcttgccctttccccgcgctccgtctgccgcccctctccggagaaatgtctgagcatctctttgaggacaccttcgtcgtcactagactcgaccctgatggcaaaaagtttgatagagtttctcgtgttgaagctcgcagcgagcagttagatatgtatatgcagctagatgttgccacagatgtttatcctacgcatgctggcgagaaatttaacatggttatagcgcctactctgaatttggatggcacccctgacactggctactatactcaggctggcagaaaaactctggcagacaattatgagtacgtcatgcaagggaagctttacaaaatctcagaagacacatcatccagccaaaacgctaaagtggagatgtatgcatcgttcggcgggcttcttatgctgctcaggggtgacccttccactgccgctagctttgagcttgatcagaggctctttctgctcatccgcaaggtgtaaaactgtggttgctgaccacttaggtgtttgccttgctcgccacttatttaatttccatccgtgnggtgaagctgttatatactgttgtaagtactgttttctgtatcgccatggatttatggtaacgagttcatgtttcttgctaaaaagattgctccaacaaaaaaaaaaaaaaaaaagcggcc

SEQ ID NO: 18145 - DNA, 1026 bp, Zea mays
  Clone ID: MRT4577_11654C.1
atgagtggaagatactttcgcgacatgtctattgtgagggttggaggagacagcactgcccctgctcctgaggaaaatgaagttgtcgtataccgaagctttttgaaggatatgccgaaggagactactgctgaatccaatgaaggtagcctagttcgattgaaatataccttcagatacagagagaaatttgatgaaccaaatgatgactggttgaaatgcattgaagctaccagcgacgagctgcttgggacatattccaaggccgaagacgatgccttgtccgcagcctttaggggtcggggcaagaaaagattaaacagggtttttgatgcaattggcttcatatatgctaattattgctaccccttgaggaaaggaaaaaagaggaaaactgccgcttcggccaccaccgctgtgccgaagggcaagaaaatgaaggttttgacgcaccggcctcgatatattgaaacggtcgtagtacctgaatttgatgagagcacctcctccactgccgaagcagaacaagccgctcccgccgctcggagcgctgaagggtctattgtagtgtcgaaggtgcctacagtcgggccaaccgaagccaaaggtgatgcggccaaagagccaaaattggaaaaaacagtgataatgccagaaattatgagcccaccagtagagacagaattgtcgaaagtgctaaaggctcctgccgcaactcccaagagaaggaggatggccagcgtgctagatgctgtcatggagaccacaaaagccttgacccctgctcctactaagaaagttgtcgaagctgtcaaagtccaggccgaagtcgaagctgggccttcaatgcccattgagacgaaggctaccgtgtgtgcggataaagctgagcaacaaactccagataccgccatggcagcggggcaagatatgatagaaaaagctaaatctcctgcccccgaagctccgactgaagatgttgattacattattcgacatgcttcggggaaattatccaaagaataa

SEQ ID NO: 18146 - DNA, 369 bp, Zea mays
  Clone ID: MRT4577_116550C.1
caccatcgcttctgcatttgcaagagcagctagtcgctagtagagaggcctcgcgggatcatcgacggtctgacaggggctaacatgcatgcgcgtctaacgggcacggcatggcttatgcgcaagaacgtgctggacctcaacgacttcggcgccaccgtcgtcgacagcatcagcgagttcctcggcaagggggtcacctgccagcttatcagctgcaccctcgtcgacgccaacatcgggaaccgcggacagctccgtgcggaggcgaacctgagcagcggctgacgagcctgccgtcgcttacgaccgtcgagtccaagctcggcgtcacgttcgacgggaggtggagaaaccgtaccgagacga

SEQ ID NO: 18147 - DNA, 812 bp, Zea mays
  unsure (1)..(812): unsure at all n locations
  Clone ID: MRT4577_116551C.1
ctttctttattctcttcactcaaaagcggctaggcgacggggcttgccctttccccgccccaagggtacacggtcgccgccacctgccctaggccgcaggagggagcgttcgccgccccgccctccgtctcccgtcgcctcgcccccgcgctctgtctgccgcccctctccgctgcgggtttatctactttttatctaggagaaatgtctgagcatctctttgaggacaccttcgtcgtcactagactcgaccctgatggcaaaaagtttgatagagtttctcgtgttgaagctcgcagcgagcagttagatatgtatatgcagctagatgttgccacagatgtttatcctatgcatgctggcgagaaatttaacatggttatagcgcctactctgaatttggatggcacccctgacactggctactatactcaggctggcagaaaaactctggcagacaattatgagtacgtcatgcaagggaagctttacaaaatctcagaagacacatcatccagccaaaacgctaaagtggagatgtatgcatcgttcggcgggcttcttatgctgctcaggggtgacccttccactgccgctagctttgagcttgatcagaggctctttctgctcatccgcaaggtgtaaaactgtggttgctgaccacttaggtgtttgccttgctcgccacttatttaatttccatccgtgggtgaagctgttatatactgttgtaagtactgttttctgtatcgccatggatttatggtaacgagttcatgtttcttgctaanaagattgctccagcagattcc

SEQ ID NO: 18148 - DNA, 1384 bp, Zea mays
  unsure (1)..(1384): unsure at all n locations
  Clone ID: MRT4577_116552C.1
cgcactaacctcactaaagggaaaaaagctgcgcctcaccgggggggcggccgctctaaaactagtgggtcccccgggatgcaggaaggccgccgggctttctttattctcttcactcaaaagcggctaggcgacggggcttgccctttccccgccccaagggtacacggtcgccgccacctgccctaggccgcaggagggagcgttcgccgccccgccccgccctccgtctcccgtcgcctcgccccccgcgctccgtctgccgcccctctccggagaaatgtctgagcatctctttgaggacaccttcgtcgtcactagactcgaccctgatggcaaaaagtttgatagagtttctcgtgttgaagctcgcagtgagcagttagatatgtatatgcagctagatgttgccacagatgtttatcctatgcatgctggcgagaaatttaacatggttatagcgcctactctgaatttggatggcaccccagatactggctactatactcaggctggcagaaaaactctggcagacaattatgagtacgtcatgcaagggaagctttacaaaatctcagaagacacatcatccagccaaaacgctaaagtggagatgtatgcatcgttcggcgggcttcttatgctgctcaggggtgacccttccactgccgctagctttgagcttgatcagaggctctttctgctcatccgcaaggtgtaaaactgtggttgctgaccacttaggtgtttgccttgctcgccacttatttaatttccatccgtgggtgaagctgttatatactgttgtaagtactgttttctgtatcgccatggatttatggtaacgagttcatgtttcttgctaaaaagataaaaaaaaaaaaaaaaaaaaagggcgggcaaaaaaaaaaaaatgtaaagtatttgcaagtcaggtgaaggcatccaaagcncttctcnttgggagaaggaaggtgctgtgtttgggtggaggaaccctgagaagaccccgtgggggtctttttttttttgctatgctgtcgagcctactggtggtttcactgaccaggagaaggctgcagctcacttgaagggtggtgccaagaaggttgtcatctctgctcctagcaaggatgccnccatgtttgtcgttggtgtcgacgagaaggagtacaagtctgacattaacattgtctccaatgcttagctgcacaaacaactgccttgctcctcttgctaaggtcatcaatgaaaagttccggtatcgnttgagggtctgatgaccactgtccatgccatcactgctacccagaaanactgttgatgngccctcattaaagatgnaaaggggtggaaagggcttgctagtttcaacatcattccc

SEQ ID NO: 18149 - DNA, 882 bp, Zea mays
  Clone ID: MRT4577_116553C.1
cattgggtacctcgaggccggccgggtatgggtacctcgcaccttaccccttcctttttctcttcactcaaaagcggctaggcgacggggcttgccctttccccgccccaagggtacacggtcgccgccacctgccctaggccgcaggagggagcgttcgccgccccgccctccgtctcccgtcgcctcgccccgcgctccgtctgccgcccctctccgtttattgactgccaagtcagctgcgggtttatctactttttatctaggagaaatgtctgagcatctctttgaggacaccttcgtcgtcactagactcgaccctgatggcaaaaagtttgatagagtttctcgtgttgaagctcgcagtgagcagttagatatgtatatgcagctagatgttgccacagatgtttatcctatgcatgctggcgagaaatttaacatggttatagcgcctactctgaatttggatggcaccccagatactggctactatactcaggctggcagaaaaactctggcagacaattatgagtacgtcatgcaagggaagctttacaaaatctcagaagacacatcatccagccaaaacgctaaagtggagatgtatgcatcgttcggcgggcttcttatgctgctcaggggtgacccttccactgccgctagctttgagcttgatcagaggctctttctgctcatccgcaaggtgtaaaactgtggttgctgaccacttaggtgtttgccttgctcgccacttatttaatttccatccgtgggtgaagctgttatatactgttgtaagtactgttttctgtatcgccatggatttatggtaacgagttcatgtttcttgcgaaaaggttgctccagccagttcccctc

SEQ ID NO: 18150 - DNA, 1165 bp, Zea mays
  Clone ID: MRT4577_116554C.1
ggtctggaaggagattggcgagctcgaggacggccgggacggccgcggcaacacatagccttatctgctctctctctctctccccagtccccacccgacgcgacgactccagttccaatccgtgctccgctaggtcaatcgaagagtccaaagatcccagctttcccatcccatggcgggcggcgacctcacgcctcctcctcctcctcctcctcctcccgaagagacgccgccggcagcggcggccgaggacctgatcgagatcgtggaggaagggtcggggcggctggacatcgcgcggtacgtggaccacgtgcgcgacctgtcggcgggcgccatcgcgacgttcgagggcacgacgcgggaccacttcgcggggcggcgcgtggtggagctccggtacgaggcgtacgcggccatggcgcggcgccgcctggcggccatactgcgggaggcccggtcgcggcacgcgctgcggcggctggccgtggcgcaccgcctgggcgccgtccccgccggcgaggccagcgtgttcgtcgccgcctccgccacgcaccgcgccgacgccatggaggcctgccgctacgtcatcgacgagctcaaggcgtccgtgcccatctggaagaaggaggtgtacgacgacggcgaggtctggaaggagaaccgcgagttcctggaccgccactccgccgacggcgatgcgacggcgggcgggtgctgcgggagcaaggtcagggtccaggaggcttgacgctgatggatggcggcgcccggatccctctctcgctccatcgcggtcgcgactcgcgacccattggagcagggggtttcatgaaattctatgtactacttactcgatctccgttgattttgttctccatctattttttctttctgagagagactgcagcttgtacttgcacaccatgaagatgaaaggcaaatagatgcgctgatcataactcataatgggacagtagttcagttttaacaagagagatgagatgtaacctggggtgtttgctttcgaatgacatcgaatgtttaaaaaaaaaaaaaaaaaaaaaaaaaaaaaaaaaaaaaaaaaaaaaaaaaaaaaaaaaaaaaaaaaaaaaaaaaaaaaaaaaaaaaaaaaaaaaaaaaaaaaaaaaaggggcggcccttt

SEQ ID NO: 18151 - DNA, 475 bp, Zea mays
  Clone ID: MRT4577_116555C.1
gggaaaccaaacaacggagcacattttcatatttccaatcgggaaagggggaacattattcggatactttttattcatgcctaacgacaatgcccttttttttactaacaatttataggaacgatcgaagcacacccccccctccttttttgggggacggacagggccccatgggatggccgagttattcattttggaaatttaaaccccacccgatggggggggcccccgcgacgggggcaacaaaaatgcggacccgggtggggcggaaatccatgggcaccggggggccgacgggcaaaacaaaaatgtcggggtcgggcttggcccacaagatcaccctcttggctttttccaaggtgagcccgaccacttccggccaaaattttttggcgccatcggcgccccctggggaactcatgctggtcggctgccgatggcaaactgaaagggcaataattcctcgggccgaatt

SEQ ID NO: 18152 - DNA, 740 bp, Zea mays
  Clone ID: MRT4577_116556C.1
gtccgctcctccctcactgatccgctgccaagtccttccttcctgtccgactccgacccaccgcccctccgactccgatcccgggtgcgccccccgcttcgcctccaccgcctctgcctcggcggcacgcgtaccttgccgtttcgtcaggcggttcacgcccaaggaggtggaggccgccacgcgcggcttcaccgcggtgctcgacgccgccggcatggcctacagggcgcttcgtcggcggccttgtcgccaccgtcgtcaggctccgccgcgacgacgaccaccgccacggagagggaggagggcccacggacgcctttctacctggagctgcagctgctggcccgcctcaaccaccgccacgtcgtcaggctgcgcggcttcgcgctagcccaccacgtgctcgcgatctatccgaatcgctgggctgcatgcacatgggcacgagcaatcagcaccgggaaacagaatcattctgataacatatttggctggctgcacgctgggcgctatcatcgacatgaagacgtgccgcctccagatcatgggatgaggcgcaagatctggcacccgaatccactgcccatatcaccggagcggagctgcagaggaagtggagggggctacgaacggagaccggacagatggcagggaggaggctttggcggtgttgggtcactcctaagtcgccctttggagagcttggggggaagacggaagaggatatcatgtcatat

SEQ ID NO: 18153 - DNA, 302 bp, Zea mays
  Clone ID: MRT4577_116557C.1
tgcactactaaggagctatgacgacgcctgcgcgcgctcggaagcttggaagcgggccggcggtcgtcctttttttttttttttaaccaaccggaacccgggggtaaagcggatttttttaggccaccagaagcaaggcagggctccaaaggggaaggaccagttttttgaaccagccccgggtggattaccagacccgggaggtcctttaagacctccctttaacccaatttggagtccagaacatgtttccggttttcccgccaaccgccggggcggggctattcaatttgaatgggaat

SEQ ID NO: 18154 - DNA, 384 bp, Zea mays
  Clone ID: MRT4577_116558C.1
atggatcctaaggtaaaggggatggtggtcaatgacaaagagaaggagtccctcttcaatgagccaagggatgacaaacccactgactcaggattgagtcacaagaagagggacgggaaaaagaagaggcacatcaagaagatcatttactacgacagcgatgcctcctcttcttcaccaagagacaacgacgatgatgactcgtcgaaaaagagaacagttaatcaaaactactcttttgactattctcgcatgccttacaattctaatgctcatttgctatcaattccacttgggaaacctccccactttgatggagaagattattctttctggagtcataaaatgcgtagtcatttattttctctccatcctagtatttag

SEQ ID NO: 18155 - DNA, 445 bp, Zea mays
  Clone ID: MRT4577_116559C.1
attcggctcgagggttctacatagttgttttagctactatgctgtacagcacatgcatctgcacaaaaactggagagcctctccaagcagcgctgatcgagacatgcaggacgatacgcctgattaaggcatttgactaggacaggaaacatgcattcttgcacggtagctagggaagctgctgacacacggtgtaaggctctatcgcctgatctctagccactgatgctgactatacaagcatctcgccagtcttattagatattgcctaatagtctatgactagatcccatacgagagtctgatgcactacaagttcacaacatggcttttcaccaaatgctacagctttgaaatgaagctgtgctgacaacatgtacagaacaagatacttccgcagcagcaaaaaattgctgccctgaggcaggaggtttgatcttttttg

SEQ ID NO: 18156 - DNA, 441 bp, Zea mays
  Clone ID: MRT4577_11655C.1
agggcgagaagaaagtgaggagcttcttagaggccctttgcgagcagtggtaacaacgcagagtacgcggggaagatgacgtggcagttgctggtctgggaggtgaatcagaggtccatccttacgtctcattcaccataaactttgtttgagcattactggtgttacgccgtcaagtaaatcgaaacgatggaatggttctgtacattgctagtgttacggcaattccttgttgatctgtcagcttttatctgatcatgtaatttatatattggatatataagccgatcaataatgtagcttttgaggagactggaagtagatggatcacgatcaccatgtaatttgtaaaatggggctactgttactgtaataaaggcacatgtcaaaaaaaaaaaaaaaaaaaaaaaaaaaaaagtactctgcgttgttaccactgct

SEQ ID NO: 18157 - DNA, 325 bp, Zea mays
  Clone ID: MRT4577_116560C.1
gatgatcatgtacattccaaactctaggtaaagtacatagccataaccatgccactcatggaagggaagatgaaaccaccgcgttttcatattaacttttaaagggctagcacattctatggagtaacacagaacgaacttttcaagcgaaggctgtatgtgagcatttctagagaggaacgcagggtagccggctgattctttcttttctttatagatactcgacgagaagccaaacaatgactgcctgaatcacaatgtgaactacacatatgagcaggcacattcatgatcaaccacctttggtgcgctttgttataattgc

SEQ ID NO: 18158 - DNA, 746 bp, Zea mays
  Clone ID: MRT4577_116561C.1
aattcccttcccatggcaaaattcaggttccggccgactcctatacataggcagccagccttttcacccttttcccttccccctccccaaccccccacacagactagcaagccgcgcgcggaggcgaggcgttcgcacacctcgccgcgcgtccttggcctctccccgcgccaccaccgttccgttgcgcccgctaacgatcacgcgtttccggtgggagagagagtaggtagggagaggacgggacaggatgctcgggttcaggcagatgtcgtggtcgtcggcggaggcgcaggcgccgtcggagcagcgacacctgtgccctcgtctccgtgctcttcagcagcctcgggatggccttcaggttcgccgagatggagtacgtcaccaaggtgaacgatctcatcggtgccggcaagtcgtaccgcacgctgagcgacatcctcgacaaggacatccagaacgactgcgtgaagaagcagggaagccactcccggaacctgcgcagggtccgtctcggcctcggcctcatcaaggccctcttcgagcaattcctcgccaccgagggttcattgtatgatgctgctacgacagcttacgggcaggtgtgcgcgccgtttcatagctgggcgatcaggaaggctgttggcgctggcatgtacacccttccaaccagggagcagttggtagtgcggctgaacgaaactgatctctcgggggagaagcagatgaggagatacattgac

SEQ ID NO: 18159 - DNA, 298 bp, Zea mays
  Clone ID: MRT4577_116562C.1
agctgccgttctcactacagcgtccgaaaaagctacgcaagacaggcactcagtcgacgagacccttgcgcgccctctccaacgaccagagagagggaccttttggtcgccaaaatattgtacgcgtccttcatgtgaaggatgctcatcgtcagagacttcctcctctcctgcagcagaagtgacacgactcctcagcgtgtggtgctgctcctctagagcctatcatcccgaactgcacgggtatatctctagatgatctggtcatgtgtgaacttgtgtgtcacacattgaacct

SEQ ID NO: 18160 - DNA, 632 bp, Zea mays
  Clone ID: MRT4577_116563C.1
gggcacccgtcaccgaaaaaaaagaactttgcaattgcaatcttctccttaaggaagctccaggaaaggaagttgccgcgttgatatgactcgcggtcgattgcgtgcagactctttcagcatttcaatggtgaacgatctcatcggtgccggcaagtcgtaccgcacgctgagcgacatcctcgacaaggacatccagaacgactgcgtgaagaagcagggaagccactcccggaacctgcgcagggtccgtctcggcctcggcctcatcaaggccctcttcgagcaattcctcgccaccgagggttcattgtatgatgctgctacgacagcttacgggcaggtgtgcgcgccgtttcatagctgggcgatcaggaaggctgttggcgctggcatgtacacccttccaaccagggagcagttggtagtgcggctgaacgaaactgatctctcggtgcagaagcagatgaggagatacattgacgcttctagtcctatcatagagtacatcgataaccttttcctctcgaggaacattagtctagattggtgaactagtctttctgaactgtactgaaagtcaagtttgtaacttgttcacaagctgttgttggtaccatcgatttattttc

SEQ ID NO: 18161 - DNA, 1277 bp, Zea mays
  unsure (1)..(1277): unsure at all n locations
  Clone ID: MRT4577_116564C.1
ggccggaacttctccccccacggcagaattccgattccggccgcctcctatacatagccagccttccaccctctcccctcccccaacacagagcagcgagccgcgcgcggaggcgaggcgttcgcacacctcgcccgcgccaccaccaccgctccgttgcgcccgccagccgtcacgcgtgacgtttcccggggggccgggggagagagaggcagaaggaggaggcacggagaggacgagacaggatgctcgggttcaggcagatgccgtggtcgtcggcgcaggagcaggagcaggcgccgtcggagcagctgtgcgagggggtgtcggccgtcgtggcggcgcgccaggggatggagaagccgctgacggctgtggcggaggcgttcgaggagctggcgcgcggcatggaggccgatggcggggagctccgcctcgctcccttcagcgactcctgcgctctcgtctccgtgctcttcagcagcctcgggatggccttcaggttcgccgagatcgagtacgtcaccaaggtgaacgatctcatcggtgccggcaagtcgtaccgcacgttgagcgacatcctcgacaaggacatccagaatgactgcgtgaagaagcagggaagccactcccggaacttacgcagggtccgtctcggcctcggcctcattaaagccctcttcgagcaattcctcgataccgaggggacattgtatgatgctgctacgatagcttacgggcaggtctgcgcgccgtttcatagctgggcgatcaggaaggctgttggtgctggcatgtacactcttccaactagggagcagttgatagtgcggctgaatgaaactgatttctccgtgcagaaggagatgaggagatacattgatgcttctagtcctatcatagagtacatcgacaaccttttcctctcgaggaacattagcctagattggtgagctgatctgaactggactggactgaagatcaagtctgcagcttgttcacaaagccgttgttggtaccatcgatttattgttcatagttatttattcagccttgttgggtggtggatggatgctcccttttcttcctttgttgcacgcacgggtctcgtgcatgtgttgtacaactgcatgataattctagcatggacattgatgttcttgccgactgtccatatagaaactgatggataatgcaaacgactattcagataaaaaaaaaaaaaaaaaaactcgggggggggcccggtccccaattccccctatagaggnnaattt

SEQ ID NO: 18162 - DNA, 1055 bp, Zea mays
  Clone ID: MRT4577_116565C.1
cattcccttccgcctggcaaccccccacacagactagcaagccgcgcgcggaggcgaggcgttcgcacacctcgccgcgcgtccttggcctctccccgcgccaccaccgttccgttgcgcccgctaacgatcacgcgtttccggtgggagagagagtaggtagggagaggacgggacaggatgctcgggttcaggcagatgtcgtggtcgtcggcggaggcgcaggcgccgtcggagcagctgtgcgaaggggtggcggccgtcgtggcggcgcgccaggggatggagacgccgctgacggcggtggccgaggcgttcgaggagctggtgcgcgggatggacgccgacggcggcgagctccgcgtcgcgcccttcagcgacacctgtgccctcgtctccgtgctcttcagcagcctcgggatggccttcaggttcgccgagatggagtacgtcaccaaggtgaacgatctcatcggtgccggcaagtcgtaccgcacgctgagcgacatcctcgacaaggacatccagaacgactgcgtgaagaagcagggaagccactcccggaacctgcgcagggtccgtctcggcctcggcctcatcaaggccctcttcgagcaattcctcgccaccgagggttcattgtatgatgctgctacgacagcttacgggcaggtgtgcgcgccgtttcatagctgggcgatcaggaaggctgttggcgctggcatgtacacccttccaaccagggagcagttggtagtgcggctgaacgaaactgatctctcggtgcagaagcagatgaggagatacattgacgcttctagtcctatcatagagtacatcgataaccttttcctctcgaggaacattagtctagattggtgaactagtctttctgaactgtactgaaagtcaagtttgtaacttgttcacaagctgttgttggtaccacgatttttttcttcaagttgtttactaggtatgtgctcgtgcgttgcgaaataagtaaaaaatttatattaaacatataacgaaacgaaaacatcactatgatatgc

SEQ ID NO: 18163 - DNA, 2370 bp, Zea mays
  Clone ID: MRT4577_116566C.1
cgtgtttctcgagcccggccggggggtctgtctgcgcagggacgcggacgcggcggcagcggcaagcaattgtctcatctgctccactccatctccatttaacgcactctccactccttcgcggcgggggtttaggcgcacggcggcaggccaattaacgccgctgcggcgagcaccgggggggaaatgggcggcgacggcacgagggcgctggaccagacgccgacgtgggccgtggccgccgtctgcgctgtcatcgtcgcggcgtccatactcctcgagggcttcctccaccacctcggtcagttgctcaacaagaagcggaagaaggcgctgtttgacgctctggagaaggttaaatcggagctgatgactctggggttcatatcgctgctgctgaccgtgacgggaaggtacatcgcgcgcatctgcatcccggagggagccgcaaacaccatgctgccctgccgcctgtccggtcactcggtggcggaagagcccaagggccatggccgacggcacctatctgaagatccaaccaaccttttttcctgccgcaaaggcatggtgtcgcttgtttcagccgacggcatgcatcagctgcacattttcgtgttcttcttggccgtcttccatgttaccttcagtttcttcacaatgtccttgggtagagcaaagactcgtatatggaaggtgtgggaaaaggaaacttgctcccctcagtataattatttaaatgacccctcaaagttcaggcttacgcaccaaacatcttttgtgaggcaacatgcaagttgttggagcaaaagcacaatcacgctctattttgtgagcttctttaggcagttcttcagatccgtccgtaagacagactactttactttgcgacatggattcatttcagctcatttatctccggggactaggttcaattttcgaaagtacattaaaaggtccttggaggatgatttcaagacagttgttggcattagtccaccactatgggcttctgctttggctgtcatgctgttcaatgttcatggatggcacaacttattctggttctctgcaattccccttgtagttattctagcagttggaacaaagctgcaggctataattgctatgatggctattgaaattgcagagaggcatacagttatccaaggcatgccggtggtaaaactaagtgatgatcatttctggttcgggaagcctcgtttggttctccacctcattcatttcgcatcatttcagaacgcatttgaaattacatatttcttttggatctggtacgaatttggcctgaggtcctgcttccatgacaactttgagtttatcattgcaagagtctgccttggggctatcgtccagtttatgtgcagctacatcacccttccactctatgcccttgtttctcagatgggttcagaaatgaagcgaacaattttcgacgagcagacagcgaaggccctgaagaaatggcacaaggccgtggtgaagaagaaacaccacaaggattcctcacacaattcttccgagactcctagcactgacacaacaggacctgcaggggaagcgggtgagtggcagcggctgcacgaggtgccggtccggcacctccaccggtacaagaccatcgcgcacgtcggcggcgtgaggagcccgttgtcggatgggttcagaaatgaagcgaacaattttcgacgagcagacagcgaaggccctgaagaaatggcacaaggccgtggtgaagaagaaacaccacaaggattcctcacacaattcttccgagactcctagcactgacacaacaggacctgcaggggaagcgggtgagtggcagcggctgcacgaggtgccggtccggcacctccaccggtacaagaccatcgcgcacgtcggcggcgtgaggagcccgttgtcggacccggactacagcgacacggacgacaccgagccgctgtcgttgcagactaggcacctgataccgccggcgaagcagcggagcctcgacaccgagcgcgcggaggtgcgcgtggacgtcgtaaagacagcggcggcgccaagcgacgtcctccaagcagcttctcgttcccaaggctgcttcctcctcgccatgtgccggacaagtaaagtggccagcagtctgtcctatatagagatagtagaatagtagtttcaagttataagtcgatttggctagttatacagcttttgttatttatttaggtaaaggctatgtctatatagcaaaagttgtaaaactagaaaaatcaaaatgatttataatttgaattgtagtagtatagtagtcgaatctaacatgcatgagagcatttccttaattagtacagctgcctgtaagtg

SEQ ID NO: 18164 - DNA, 340 bp, Zea mays
  unsure (1)..(340): unsure at all n locations
  Clone ID: MRT4577_116567C.1
gggagccgccgcggcggaaccgggnctactcacgcccccggtaaaaccacccaccaaagggccgccccggggggccagaagcgggggaaggccctaggcgcggacgaagggacgggagggagaccacagaacggggagcgacgagacctccagaccaacgaaggagcagcgcgggcgcgaaccggcacacagggccgacactcaatcacaggggcaccacgccccggcgcccggaggcgcccgagggacacagggagctgtgcaagcaagacacgcattccagaccccgcacgatgggggccccagcatagggcacgggaacgaggcccaacctcaagcg

SEQ ID NO: 18165 - DNA, 285 bp, Zea mays
  Clone ID: MRT4577_116568C.1
ctactgtgtgtttcgtctgacattcgtttctaaagggcttgatttcttgagccggccaggccggcgacctctttctcatccgtgtgtgagtccacaaccacaaaccttttacgatgccggcaccctttcaacttcgtcccagcgtcgagcgggacgacgccgacgtgacccatctcgacatcacccagatggacgatgaccccatcacctacttcctcacccctgcacagccgtcgtacggctacgccgacgacggcatggactttgagatggactttgatgccg

SEQ ID NO: 18166 - DNA, 219 bp, Zea mays
  Clone ID: MRT4577_116569C.1
ccttaccgaccctgcgtccgttccaaaacctggtggcctattggcgatcggcgtccggagcatctaaatctaccggccgggcggttgaatcgatcggcgcagttgaccaaatctactgccgtcggtcgggaggtggtcccttggaggccgtatcggtatgtgtggacttgggggcgtcggtctgttggtggtgtttcgcttggaggctgatgttttgga

SEQ ID NO: 18167 - DNA, 504 bp, Zea mays
  unsure (1)..(504): unsure at all n locations
  Clone ID: MRT4577_11656C.1
gttcttgctccgtctacaaagggcgagaagaaagtaaggagcatcttagaggacctttgcggcaatgtccataggtgattcttcagtgcttggactgtatttattggaaaggcgaagatgacgtggcagttgctggtctgggaggtgaatcagaggtccatccttacgtctcattcaccataaactttgtctgagcattactagtgttacgccctcaagtaaatcgaaacgactacgacctcaagtaaatcgaaacgatcgaatggttctgtacattactagtgttacgccaattctttcttgatcagtcagcttttatctgatcatgtaatttatattggatatataagcccatcaataatgtagcttttgtggagactggaagtagatcgatcacgatcaccatgtaataaatatcgggctactgttaatgtaataaagccacatgtcaaataaatgaacaatccagcgaaaaaaaaaaaaaaaaaaaaaaaaaannccana

SEQ ID NO: 18168 - DNA, 204 bp, Zea mays
  Clone ID: MRT4577_116570C.1
ttatcgtttacgcgtgatgcccactccacgagggtcgtgaggatgctcgaagacgttgagcctgtcaaacttgacgacagggcttattatgctttaccgttagggcctctagctggaagaggaacacaaacagagatcatgttctctatttggctctgcaatagctactgcttagctgtggggtgcggtatttacagtattgtg

SEQ ID NO: 18169 - DNA, 619 bp, Zea mays
  Clone ID: MRT4577_116571C.1
attgggtacctcgaggccggccggaacttttttctctctccgaattcccagtctacgctcctcacctaggcaggcatgaagaccaaagacagagccatcgagggggctcggaacgatcaacgggacacgagcccaaaatctcacatgctacctgaccggccgacctcgcccgccgacacgacccctttgtcgcccgcgactacactcgacctactcgtcctcctcacagacaccacggatacgccacggaatgacagatgcatgctgcgtcactactcctacaggttcctcatctgaaaacaaggcgttcgactgtcgatcacaaaatccaccccttaataaatgcctagaagcgcaagctgtagtcttcagctatgcacttgacacacacacggacgccgtcactgtaccaggaagaagctgctcgatagaaaacgacgacgaggacaaatgctggtatacatcggatattgcgacaaggcagccacggaagaagagcgtaagagcaaggcgatacttgaacacaaaagagtgcgatgactaccatgatatatcgcattgatttctaccatgaatgacattgctatgaaacacatctgagaactgtgtcataatggac

SEQ ID NO: 18170 - DNA, 429 bp, Zea mays
  unsure (1)..(429): unsure at all n locations
  Clone ID: MRT4577_116572C.1
ccgggcccacgtactgttccgtcgacgacaaggcggaggagcccggccggcatggaggggcgcgcgagctcacgtcgcggcgtgctgctgttcttgctcgtcggcgtggcttcggccaatcctgacgggctactaccaaacggcaacttcgagcaaggtccagacaagtaccagatgaacgggaccagggtgatcggccgcaaatccataccctgctgggagatctcagggttcgtggagtacatcgtgtccgggcagcagcaggacaacggcatggtcgtggcggtgcccgagggcgcacgggccgtgcggctgggcaacgacgcgagcatccggcagcggcttacagccatgacccggggcacgtnctactccgtcaccttcagcgcgtcgcgcacctgcgcccaggccgagcagctgaacgtgtcg

SEQ ID NO: 18171 - DNA, 115 bp, Zea mays
  Clone ID: MRT4577_116573C.1
gacggggggggaccccagctctctcctgacttcccgctgagtctaagcatatcacataagacggaggactaagataacttacgcaggacttccctctagtaaccggcgcagcgaa

SEQ ID NO: 18172 - DNA, 618 bp, Zea mays
  Clone ID: MRT4577_116574C.1
cgggctagaacgccgacgacagtcctcacttctcaccatttcccaaactcctacccatacccccgccgccgccggcatgccgcccacagctcgacccgagacaagcggtggaggtgtttgtcccccagactggcggagaggtcggcgcggcgtccgccctgctgcccaatatcggcccgctcgacctcttcccaagcaagattgaccaggacataggcaaggtgacggacaaggactgtgatgtcctgcgcgcgaccgacaagctcaccgcccatgaaccgccatgccaaagtgtccgatgtaccctcacgacccgcgctagacatcaaggcgctaaaggagcccgatagggaccgctaagaaagtcaagaacatgaagcacaggggctacatggggctaaacgacgtagtatagatcgccaggaccatgaggaacaggtccataggcctaaggagctggccgcgaccgtcaaggagatactaaaacctagatcagcgtcgggagcaccgtcgtcagcaatgaccccaacgtcccgcagcaggagattgatgactgggaggtcgagatcccgatcgtttgaatactagacatccaaggggacttacattgctgcgtgc

SEQ ID NO: 18173 - DNA, 455 bp, Zea mays
  unsure (1)..(455): unsure at all n locations
  Clone ID: MRT4577_116575C.1
tgccgtcggtgcgcgcgcacccggcaaggatcggctgcgaccaggggttcgcgtacctgcactcggcggcgcccgacgccaatgtgctggtgggcgccgtcgtgggcgggcccgacgcgcgcgacggattcgtcgacgaccgcgacagctacggccagaccgagcccgccacctacatcaacgcgccgctcgtcggcgtgctcgcttacttcgccggcaccgccaagtattgacgcagatgctgctgtttgccgtgcgttgtatcgtgtcactgtcgcgtactcctcctagtctagtcgtgttgtgttgacagtgtgggagcgccggagcaaaaggcttggacgagctnnnnngtcagtagtgccggcggcgatagtgcctgcgctcgtacgcatttatttcaaattgcaccgtaagctccattgatatttgaattatcgtacaatttgctcaac

SEQ ID NO: 18174 - DNA, 489 bp, Zea mays
  Clone ID: MRT4577_116576C.1
ccgggcctggattaccgggtcggccccacccttccggccggagaaaaaaaactgaagccgcggggttattcttaagccgccgggacgggaccagaaaaggatggccgacggaagggcttccgcttaaccgctttcggtttttccgaaccagtccaaccgggacgccttaaagtcctaagggcgcattccagttgttaatagggggggggaccatgctttggcattagggagggaaggaagggaggcctggatgcgtgcaaggggggtttgccaggctcctttttttggcagggttgaggctgcaccaaaagagggggccatggttgtggttgaggagaaggcaaatctggagactggaacgactaaggctgtggaggagctgaaatctgtttttgaaagccagggaaaaggggcccagaataggaggacagaagggcttcgggctttaaggcgttggtggtcccagtctgaagtacctccagttgatgc

SEQ ID NO: 18175 - DNA, 801 bp, Zea mays
  unsure (1)..(801): unsure at all n locations
  Clone ID: MRT4577_116577C.1
gatgctggcgcgcgccgccgccgcgtngtcgccctccatgtgcgccaccttggagagcgcgcggtggagcttcgcgttcagggtcgccatggacagctccatctcggccagcctcctcttgagccgcgccacctcctgcctcgtcctggccgcctcgtcctccagcctcctgatggagctcatcacgacgaggtcggctgccttgcgctcttgctcctcgtcgtcgccgtcgtcgttggccagcgaaggcgacgacgcgaagaacggcggtgaggaggggaccaggtacatcggcacgtcttctgcaaccggcggccttggcacgggcaccggcggtaggcttggagcagcaggcttgctgctgctactactctgctcttccttggcattgcaggtgacattgacaacacttggcttggagtggctgtggctttccatgacgccgtcgctccggttaggcagcttcacgtcagaggcggcaatggcgacagcattcaccctggagttgacctccttgccaacacgacggccgccatacgcaccaccgtttgccctcaactgggcttccctgacaaggatgcgctctccgaacacagcgaccgcctccttgacggaccggaaggcacgggaggtgtcgacctctccacggtccgacgccatgccgctgctgctgaaggccacgacagaggcggcaagaacaagagctgctggaggggttttattattgtggcttgcttcgctatccactacaatggcggacaggatatgaaatggcccctggccggccctcgagggtcccaa

SEQ ID NO: 18176 - DNA, 312 bp, Zea mays
  unsure (1)..(312): unsure at all n locations
  Clone ID: MRT4577_116578C.1
gcgtgcgatctaattcattgagtgagcacaagcagagcattattttttcggagcctctccatctcgctttcgggggctggtgtgtcgacctcggtgctagccatggccgtgctgaggagaggttcggccgtggccttggcggctgcggcgatgtttgccgggatggcttctgcggtcgtgtacgaggtggacgacaaggtcgggtggaccattatgggcaaccccaactacggagcctgggccgtctccaagaaggtcgnatggggaaacacccttgtgttcacctacatcaagcagttccacaacgtgatc

SEQ ID NO: 18177 - DNA, 279 bp, Zea mays
  unsure (1)..(279): unsure at all n locations
  Clone ID: MRT4577_116579C.1
cgggaagcgttgtgaattgatatgcaaacgcttattagaaagaatattgcaggttgaggaangagctgctaatgagatggaaatccacacactaccttatattgttgccttgcaagcattctgtattgttgatcccacactctgcattccagtaactgatccttctaagtttgttgtgacactgcaaccataccttaatattcagggtgaccataaatcactgcccagttgcttgaaaggaataattttgtgattgaagccggtcctcccacccanaag

SEQ ID NO: 18178 - DNA, 2387 bp, Zea mays
  Clone ID: MRT4577_11657C.1
gccggccggttcgggggagaggagcagatgcagatgacatagcgcaacgaaacgactggctgtgaggtgtgggcctcagcacgacgggattgcgcccacacgcgacgccaaacgaaacagctagccagcccccattcttctccggctccggtgcattccgtgtcctgtcctgtcctgtcctgatggaagcagcaatggctgccacgtcctccctactccttgcctccggctccaggaggtggccagcaaccttgcctccttccccctggccccagcagcagcgtctggttattttctgcctcgctgcaagaacgaggccgctggacagcaagaggggtagctggaggcgctcttccagtgccaccggcggccggtcgaccgccgtctcgtcgtcgtcggaaagatgggttctcgaccctgcaggagacggtgactggcgccacatcggctacaaagtcgcgcgccctggggcgatcgagatagtctcggaggacacggcggtgaccgtgggccgggtcgccgacaaggcggacatcgtgctccccatcgccacagtttcaggcgctcacgcccggctggagaagaagggtggcagcctgctggtgacggacctggacagcaccaacggcacctacatcaacgagcgccggctcaacccgggcttccccgcgtccgtcgaccccggcagcctactcatcttcggtgacatccacttggccatgttccgtgtaaggaagacggtggtggttgaggcgcccagtacagtcgtagtaccgaggaggccgagggagctcagcaagagaccaccgcagctgaagatatttgacatgtgcctttattacagtaacagtagccccattttacaaattacatggtgatcgtgatccatctacttccagtctcctcaaaagccttatatatccaatataaattacatgatcagataaaagctgacagatcaacaaagaattgccgtaacactagtaatgtacagaaccattccatcgtttcgatttacttgagggcgtaacaccagtaatgctcagacaaagtttatggtgaatgagacgtaaggatggacctctgattcacctcccagaccagcaactgccacgtcatcttcgcctttccaataaatactatggacattgccgcaaaggtcctctaagatgctccttactttcttctcgccctttgtagacggagcaagaacggcagacaggaacgatggtggcagaccgtatctaagaatgctctctacaaatatgcgcacggcacagaagtgcatccaggaactgaaaacctcactgtagctggcatagcaccattgcagaagcgaggtcctcataacttcctgctctagcagtaacttctccatctcctgctttctactttcttgtgcttcaggactatactcaaaatcacgaatctggaaacccttctcgcgagcacggaccttaaagttgtcaacaaccttagcaaaaagtgttatggtgtagagtgcgtactcattgtcttcatagagctgtttagatgacctgggtaccacaaatgtgtcgagtgattcatagcttgacaaccagtctttttgggagtactttggaacaatagcaagaagtgttactagatgctctgagcagaccatatcctctggttttaccagattggaaagatcacgaactgctaagctcccactttgctttctgttgattgcagtaagctggctccttacattgttatattccgctgctcgaaccttcatgtcatcctcgatcttggcgacctgcgactggatgctgccgacgatctccttgagcgacgacattgtggggtacttgccctcatcccacacgaacctggtgaggtaggtgtcgacgggaacgccatcgacggtgagggccccgctgtcgacgcctccggcgcgctcgaggtcttcgatctgcctccggatcttgtgcgaaacgccctcgacgaacacgtttgacttgacgaggtcatcgctgagcgcgaggagggagtcgagggtgccgacgcggaggtccgggacgttgaaccggtacagcggggtgtcgaaggagtggcgggagatgccatcctgcaggcgcgaccaaagcgaggtcgcggtggcgccgggagactgcacggggagagagacgatccagtagcgggttgccatcgccggcaccgccgtggggcacctggtctgggtgggctaggattctctgatggcgatggatctcgtcgtctcggcgaggagggagagaggatcagatcgctcggtctgggccttgttggagtaacgacgccgggccggatcaggccgggctgtcccggccggccgaggtacggtgatcgtgatccatctaaaaaaaaaaaaaaaaaagcgg

SEQ ID NO: 18179 - DNA, 390 bp, Zea mays
  Clone ID: MRT4577_116580C.1
gggaaagggaactttttattttgggggggccccattccttacccaaaaaactttttttttggattccacccaaaaagcaatctaaaagggggcccccccacagatttgttgttgggaggggggtgctgggtttttcaaagcgaggtggccaaagggcaacaattggtgtaattgaaaaaggggtggggggttacccccaacctgctggtaaaaaggcagcaactgttgttgtgtcaaaaaagaagccccgtttgctgcacctagctggctaaagggaggaaaattttgttggtgcaaatacacagcggggttcaaggcggccaaatggttaaaaggaaaaaatttttttttaagaaagaaggcaaaaactatccgggtaaaaggaaaaag

SEQ ID NO: 18180 - DNA, 416 bp, Zea mays
  Clone ID: MRT4577_116581C.1
cgaaactaaatcgaaattaatttgggggggagggaaaacaagcgtacaaaaaaaaaaaagcttgtacttttgcatgtccccacccgggaaaacttaccccccgaatggaactttttttttttttgaaaacccacaaaaacaaacctgacaaaaaaaaataccataccataaatactttaaaggttgttttaaataaaaaagtttgccggcccaacccattattataaaacttcggggtcgggggcccacttgggcggaacgggggccccaaaacggtcgaaatcggggaaaaattttaaaatggtgaaagggcccctaaccttggcaaggggggggtactggccggggtaaaggcccctaaactccggttggtccaacaaaggcgccccttggggggccaaaaaacccccctccgg

SEQ ID NO: 18181 - DNA, 454 bp, Zea mays
  Clone ID: MRT4577_116582C.1
cgagccggccgggcgagagtttcctactaggctgaccgcggcctgtgtcttggcggcttgagcggtcgtgcaaatctctggggaggctgcaccccgaaggccataccaaaacagccgtctcatgaatctcctaatccaggaattcacgataggcctatccttgaagaaaatgggagtacgaggagaccagaacagcgatacggacctgggctgcatcctcgccagaagacctcgagcttgaataacaacataaagtgtgccgtcaactacaagggaaagtgggtggtggtgaagcttttaaacgagccccctgtactgatcctgcccctggcacatatcaacaagctggtcgacaacaatgctgcgcttgacaatgacctccagctcccggccaataataacgatgccctgctaaacctgctgcaagcgctcacctcaaccatattctcccagg

SEQ ID NO: 18182 - DNA, 569 bp, Zea mays
  Clone ID: MRT4577_116583C.1
gggccggggacccctggtacaaatttttatttttaccaaatggcttttggtatgggggctgggccaggggcaccaggttacctttaaaaccttaggtcccaaaaaaccttttcaatttttccagaaccgcggggggcgaggcttacttaacatttggcacccggtcagggggggggaggaccttcggaccgtttggggtccggccttaatggttgggggtggcaccgggcctaaaaccaggtatggcaaccggaacggttggttcaaccatttttttccaaaggggggccccaaaaggtaacccttggggaatattagggccacccttcacaagttggatttctaaccccctttttaagtcacaaacttcttccaatttttaaggtttggccattgattcccacccaaggcccttaaaagaacaattgggccttgccagaccaggtaatttcttgtcttggccggagacacctttggcaacccttacttttgtgggccaagcccaagttttaaattaattggttgaaaaacctgtatccaccaaaggtggttttcttaacttggggcct

SEQ ID NO: 18183 - DNA, 1280 bp, Zea mays
  Clone ID: MRT4577_116584C.1
ggccgcttttttttttttttttttccaggaagaacagaaaatgtatttgctttgtagatcatggccgttgttttaccacttggcccgatgtttggccagaattctccgcgctcagctctattttcatgtctcgccctcgatagtgcgcaccttgatgcttccgtcttgcataccaaagtagacggcgacgggcttctggcccccgcggacagtcttcatgctttggtcctgttcacgtagcgcctgtgcatcgatgccattcaggcccgagaaaatgccaacctcaaggacaccggtaaggcccttgatggccctgctcagggtgttaacctcccatgttccgtccgtgccgtcaccctttcctttacccgctgctacatccgcggatgtaagcaatgggggaaaaggcgcatcgatgatgtaaaaatcctggtccgtcttcaggggccctgacttctccagtagcgtcgtccttagtttagggcctgttgatcccagcatcctcagcgcaccggcgaccttgagctgagacaggggcgcgacctcgatagggatggtgggccagtttgtcagagacggttctgtctttttctgtagtctgcgacgcaaacaaattttctggcgcgctcagcaactagcttctcctggaacagacacgcgcctcctccttttatgcagttgagctctgcgtcgacttcgtcggcgccgtcaaatgctacgtcggcatatgacgtggtcggggagactgtcaaaggagatggcagtgaggccggcattgacgaccaattggcgcgattggaagccagtagggacgaagagaatgttgggattggtcgatcgctgcttgatggcctcgacaacgtagacaattgtagtgccggatccaattccaacgtgggttgccgccggatcaaagtggtccgcaacggcctgttgtgcagccgcacgtttggcagcctcgacatttgtgtcggtcatggtttttgcggtttggagtgatgtagtgttgtggaagtgccttgaaaatggcggaccgggttgaccgagggatttttgtagaagagatttgccggtggtgtagatacgggatggatgtatagccaatctagggatcgataaattttggaggggcagtggaggcgtgagatgactgatgctgcgggcttgctgatttatactggcagtgcagacgggcagaggtctcaagggcatgggccggcgcgcttcgctagccttcctctgggcttatatgtcaacgtatctagagtcttcccggccgg

SEQ ID NO: 18184 - DNA, 327 bp, Zea mays
  unsure (1)..(327): unsure at all n locations
  Clone ID: MRT4577_116585C.1
acacccancngngcaagccnanaggcgacaacaagcaanngcggcgagcgncnnacaacaaccaannncccaggngcaacaacaanccnnggcacancnaacaanacaaaccancgcaacgcaacagcaacaacaannccnaccagcacggagccaccnagccanggggaacccngccgccnacccgcaacagcaggngcnngcancaaacccacnngcncnggcaaacgnagnngcaaaccagccacaacaacagcngcaacagnnncngccagcgcncagncaacnagccaaggngaacccngccgccnaccnacaacagcaaca

SEQ ID NO: 18185 - DNA, 548 bp, Zea mays
  Clone ID: MRT4577_116586C.1
attcctgctccgcctccatcaccttctgcttgctctgttgggaaggagagagagagagtgagagagagatctactatagatgctagctacgaggacctcgaacaaatatgttgacgatgttcagcgtgcaggtggagcaagtgcctcatcatctgcgtcgctggcggacagccggacgccgtcgcccaagacgaatgcgtcgcacttgctgcgacgcttactggccgcctccgatccggtcgagtccgtgcaactcgtcgaccacagtcacctcgcctactcccacagcaaacagtcgatcctccgccccaggacgttcgggtgcaaagacaaggtgttctgcctggtcaaggcggtgatggacaacctgtgtagattgactcagcagcacgctctgtcaagatagggcgccacacgaggtgctcatcatcatcgaggcctacaatacgctgagcaacagctcgctctacacggccagcttcatgctcgcccagtattgcggctactacgacttcttcctcttcaacaagtacaccaactccctgcta

SEQ ID NO: 18186 - DNA, 340 bp, Zea mays
  Clone ID: MRT4577_116587C.1
atgagttatattcttttaatttattcttgtcattgttcatgggaataaatggcataacattgcacaccgtaacatacgcactcgggcgtgagatcattgtgaataaaaccttacccattgcaacgcaaaagggtttccaagttataacctaggccaacacagaactcctgccataaaagcccgagaccaatggatcactcaccagttatgctcggtgcccaaataaacacgattttcactacctgggaaaaatgagattagtacccatggggacccaagctaggcatcgtcaggaaagcatgcctgacctaagtgacatgtgaggaaccgtcagcactgg

SEQ ID NO: 18187 - DNA, 1032 bp, Zea mays
  Clone ID: MRT4577_116588C.1
tcgaggccggccgggccgggattccactctccaacgcgcaccgggcggtttttcgttcctttcttttttttcccctcttccccttccccttctccttccagcggcgctcagggcaccgccggccaatcccatcacccgccggatagggatcgacccgttcgttgattggcgcgcgcctgcgatcgatcgatcgattgattggattgcaggggtagggcggccgccgtcgagatagatcgatccatccatcgatcgaattggttttgttggtggatcggagatattcattcgggtccatgggtcggctgctgctggtgagcctcccggcgacgggcgccgtcatctaccgctgcaagcactgcgacacccacctcgcctacgacaccgacatcatcgcaaggattggatgcatggaaatcgaccagacgttccgctgcaagaacggcaaggcctacctcttcaacaggatcgtgaatgtgaatgttggtacgaaggaggaggaccggatgatgacgacgggcctgcacaccgtgtgcgacatcttctgcgtcgcctgcggagccatactcggctggaaatacctcgtcgccttcgacaagagccagaggtacaaggaaggcaagttcatcctcgacaggtccaccgccttggcagccgctcctggtgatgccgctgctgaccaccaccaccaccacgctcgcgtagcaagctccgatgacgaagatgaccatatgtgaatgatgatgatgatgaatgtcatctgcattgcattcaccataatcccttgctatctgtaaatactctactccgcttgttgtagtcgttcgtcgtaaagcacctatatgtttccatttgttcaacctatcagactatgatatgatcagcaagtaaggtccatttgtttggatgcagcgacagttacaaacaaaaaaaaaaaaaaaagtgcacccggccgcgctttcgtaggatcagcaagtaaggtccatttgtttggatgcagcgccagttacaaacaaaaaaaaaaaaaaaaaa

SEQ ID NO: 18188 - DNA, 266 bp, Zea mays
  unsure (1)..(266): unsure at all n locations
  Clone ID: MRT4577_116589C.1
aaaaaccggtgggcgggttcctggaagtaaacccgggtgggttttcttttcatgctggaaaatacggacaacaaattgcatgacttgtgatgctaatgcccccacttgggctgcaagtgggggggcctgttttacatgcccccccccaccataagggcgaccgggggggctgatcaaaaaagacccccccttcagcctgtgaggcaggccggcngtgggagagagagagagagagagagagagagagagttttttccacacggctg

SEQ ID NO: 18189 - DNA, 323 bp, Zea mays
  Clone ID: MRT4577_11658C.1
gcaactttttggttcattggtcgctgcaagtattgcatggcttggaccatgtatgtatcattgtctttagaatttgtattgattgaaatcatgctttggcttaattacgtcaaacatgggcaggacaagctcctaataccatggctgatgattaaatttcttcacttgttacttcacctttacaacctgtccaatctcaagaatccaaacctttactctttattatgtttgaaagtttttgtcctatttttctatcactcctccatatattcattttttcgtttcttcttttaattctttttatttattctttttttattttt

SEQ ID NO: 18190 - DNA, 244 bp, Zea mays
  Clone ID: MRT4577_116590C.1
cccactcgtacgtgcacgcatgcgaaggttaagtaccgctccatttgcatgcgatcctgctaaccagcctggctgccctacacaggggcgtgggatgcatctggaaagacatagcactaggactagctacttgagctcgtgccacgaagaatggacgcaaacggtacgagcatggcggggccggtgctggggctccacctcatcatgtacatattctaccaaaaggtctagggcgctgtaagct

SEQ ID NO: 18191 - DNA, 308 bp, Zea mays
  Clone ID: MRT4577_116591C.1
cacacacgtgtgctctctctcgtccggtgttcagctggaccacgcttggcgatcattagggcgacatcctgaggtccttgggcgaccacctactcatcagacgttacacactattcgtctatcactatcttgttcgtttaaaggtgatcacattaactgtcaaacttcacactaatgattaagtcgtgatcctagtatagcctggacagcatacatttgccaatctaatgactgtctatactatcttacaaggagacaagatctcctcctccatcactacttcgacaccgacaatatagaccaactac

SEQ ID NO: 18192 - DNA, 376 bp, Zea mays
  Clone ID: MRT4577_116592C.1
attcggctcgaggagcgctgcgcgtttttctgggggttcatgcgcgcactttacggcgggtctgccaaccacaacctcgattggccatccctatgctggcggggggggccacacgaggagagagctacctacaagaagtcgagagcgcctgtacctatctgaacagacgggtgggagactgactaacactgtgaacatggcaagttgctaagaggtgaaacctacggttgcaggtgcttaacatatattacaggtcaatgaggaagcacgcctacctagtgataagaactacacaagtataggacatcctggtgagggtaacagagtcacgagactttcacagagcactacgatcgtagacactcacactgacaga

SEQ ID NO: 18193 - DNA, 307 bp, Zea mays
  Clone ID: MRT4577_116593C.1
gttcgcctatcccatttgtcatctctgcggctcgcacgtatttttcctcactccccacatgcctctcctctgcgcgatccagatccaatacgctcaacatggtgctcgagaaccatgcgtccactggacggggatccactagagtcggtctgctacacagcactgtatctgatgagaccgctgctctggctatattggatgacgcttacggctccaaagacatacaagaatgtgtagacatcactactagtgagatgctgaccacctccaccggtgtccccagttgcttgtaagattggagtggcag

SEQ ID NO: 18194 - DNA, 350 bp, Zea mays
  Clone ID: MRT4577_116594C.1
attctgatccgcgaccgccgaaccggaatgtaaaccctagtacccggagactaccttgcgggctgaggtggactgtgactggtgcacgtttagacgaggagctaggatcatcaaaaccaatcgggcatgggtacctgtatgcagtgtgagaacagctgcgaaactggtgcttgctccaagcttgccaatgcttactgtctggtagcaacggaagggtcatataactgacacagtgcctttgaagcgagacttgcagatgccatacctgtgggcaagacctcttttggaagcactaggataatatgccgtctctgtggtggtaacaagaatggtgttatattgccacattc

SEQ ID NO: 18195 - DNA, 1153 bp, Zea mays
  Clone ID: MRT4577_116595C.1
gatcgcgagcagccgtccttttttttttttttttttttttttttacacccctttttttttttttcttccccatatctttcttcaatttctgatggtacacaaacatacatacgccatacttgggtgtgtatatacatacatacatacactctgtttacatcagattaagctcctaattaagggggagattaacaaaaactcttagcttcgcaccacaacgctaataaacgcattgggtggcggaggcaagcaggcaaatactacaaactgagataaatacatgatgcttgttccttttcacatatcaatctcgaccactactactactagccaagctaataatgaaatccaaaccctacctacgtttctatctccttttttgagattatgtctatacagatactgacaacccttgtcaatatactggcatgtacatatatctttcgcctacattatttgtgtagtgtatgtatgcatgtatacaactatatatctattatgtaacaagctatagctctaaacatatgtacctagctatatatggtgacctaccaccagcagcagattttggatcacttcactgctcagacctgatgagtgtcacacagcatcatctcgtgctggctgaagagttttactgtattattttaaaggttgacgacgacgacgacgacgactgggtgttgcactccaaccgctggaggagcttagacgagcgagctaaccgtagaacggggcgcggtgggggatgcccttcctcctggacggccggcaccggttgatcggcggtgtccccggcgtgatgagcccgttgttggacctgctgccctcgtcgtcggaccaccggatgccgcccggccgctcgaagcggccgaggtcgaacccggccatcctccgtggcttcttggggctgaacgagtcgtcggagccggagccgccgtcgtcgccggatccctgcccgcgtttcggccgtatggcgaacgtcaggctcgggtcccactgcatccctcccagcttgcatccgagggagcagaagcggaaggagtccgggaggctccggcagcagatctggcaggtgttggtgacgcccttgccgggcctggcctgcgggcggccgttgaggaacacgatctgggcgctgtggaacacgtac

SEQ ID NO: 18196 - DNA, 371 bp, Zea mays
  Clone ID: MRT4577_116596C.1
ttctttttttcttcttctttttttttttttttttttttttttttattttttttttttattttttttttaaaaaagggaccccaaaaacgaaaattctttttcctcttttacccaaaaaagctttacccgggcaatcaaattatataagtccacgcccaaaacaatcccaaaaaacaggtttttccctcacatcaaaaacacgcaaacccaaaaaaaggggtttttaaggacatcaagcaaataagcatagggggtggtccctgaaaagcaccccaaaaattgcttgctggttcgcacaaatcaccaagggtaaatgcaaattatgattctcacaagacaatttcacataaaaaaaaacacattctgtatag

SEQ ID NO: 18197 - DNA, 644 bp, Zea mays
  Clone ID: MRT4577_116597C.1
cccacgcgtccgcggagccgccgaggcgtctgcagagcctgaccgtccgcgccggcgttgccgtggactccatcgagttcacctacagtaccgacacaggtggtcagacgcgcaccgctgggcgatggggtggacttggcggcaacgtccggaagcagggacgacgatagagaactactgatgaacatatatatatatgagcacaaacatgcgtgcgtgcgtgcagctcgatcttggcgacgctgaatacgtcaaggaagtttctggaacgtacggcgcattcgaaggtgcgactacccttacctcgttcaggattgtcaccagcaccgccagtgattgggggccatggggcatcgagagcggcacacgtttctgcatcaccgcgcccatcggcagcagcatcgtgggattctatggacgcgcgacgaccatgctcgtcgctgcgatcggtgtcttcctgcgcctcggtgtgtctggtttcagcagtagtacgggttctacagatatgctaggataaattcttatatatgtcatatgacctatcatggtacgtcatgttcgctatcattcttgtatatgtgtacatacagtcgtgtctgtatgcacatacatggttgtcaaataaagctctttgcattttgatc

SEQ ID NO: 18198 - DNA, 292 bp, Zea mays
  Clone ID: MRT4577_116598C.1
gccgcacctgctcgagtactcgttcatgtctattaacactctggacagtgacaggggtatcatgctttctggctgctcacaaggactcactccaggcggtcgtcagaaacgcctttgccggtgccgatgctatgctgatcgaggcgttgcccaagctggagattgttgccagcttcagtgtggggcttgataagatagatttgaccaagtgtcaagaaaaggggatccgatttaccaacaccccttgacgttatgactgatgacgttgcggattttgtcgatctgtttgatg

SEQ ID NO: 18199 - DNA, 735 bp, Zea mays
  unsure (1)..(735): unsure at all n locations
  Clone ID: MRT4577_116599C.1
atattatcctgccctgctgccgatggacttgtgttctttcttctcaactttcgttcttttctgcctaatttctttatccatctggcgcacgaaacaagctaatttaaagacgctagatgcacgcacgctgatcatccatctataaatacgccaattagcaaactagagctactagcagcaggccaatggagaaccctccgagcatcctagtgactcccatggctccggccatgtcggcgcagttcacaagaataaccttcagcaacctgtttgtccgtcgggctggcccaggcagcacggagctgaccgtggagggaaggccatccgaccagctgggcaggagaaacctcactgacagccccgtatttgacggccgtggccctgacgccagcctcgtggctcgcgtacagggagtcgctacccagatgggcgacgtgcgccagttgtacaccgtcgtgttccaggagaggccgctcaagggctccacgctcgtcaccgaaggcgcgatgacggaagggtcagacgagtgggcgatctacggcggaactggagcgttcgcgatggcgagaggcgtcataaggagaacgtttcttgccgacacgagcggcngggactccgacgaacttggccgtggaggttctctgccccgtgntccgnnccggncggcgtttggctcatcgtcgtcacagtcagcagcaaaggacatcagctccaccgtcgtcgtcccaaggtcgg

SEQ ID NO: 18200 - DNA, 2318 bp, Zea mays
  Clone ID: MRT4577_11659C.1
cctcgaggccggccggacgacgggtattgcgcccacaagcgacgcccccattcttctccggctccggtgcattccgtgtcctgtcttgatggaagcagcgatggctgccacgtcctccctactcctggcctccggctccaggaggtggccagcaacagcaaccttgcctccttccccctggccccagcagcagcgtctggttattttctgcctcgctgcaagaacgaggccgctggacagcaagaggggtagctggaggcgctcttccagtgccaccggcggccggtcgaccgccgtctcgtcgtcgtcggaaagatgggttctcgaccctgcaggagacggtgactggcgccacatcggctacaaagtcgcgcgccctggggcgatcgagatagtctcggaggacacggcggtgaccgtgggccgggtcgccgacaaggcggacatcgtgctccccgtcgccacagtttcaggcgctcacgcccggctggagaagaggggcggcagcctgctggtgacggacctggacagcaccaacggcacctacatcaacgagcgccggctcaacccgggcttccccgcgtccgtcgaccccggcagcctactcatcttcggtgacatccacttggccatgttccgtgtaaggaagacggtggtggttgaggcgcccagtactagtaccgaggaggccgagggagctcagcaagagtccacctcagctgaagatatttgacatgtgcctttattacagtaacagtagccccattttacaaattacatggtgatcgtgatccatctacttccagtctcctcaaaagctacattattgatcggcttatatatccaatatataaattacatgatcagataaaagctgacagatcaacaaagaattgccgtaacactagcaatgtacagaaccattccatcgtttcgatttacttgacggcgtaacaccagtaatgctcaaacaaagtttatggtgaatgagacgtaaggatggacctctgattcacctcccagaccagcaactgccacgtcatcttcgcctttccaataaatactatggacattgccgcaaaggtcctctaagatgctcctcactttcttctcgccctttgtagacggagcaagaacggcagacaggaacgatggtggcagaccgtatctaagaatgctctctacaaatatgcgcacggcgcagaagtgcatccaggaactgaaaacctcactgtagctggcatagcaccattgcagaagcgaggtcctcataacttcctgctctagcagtaacttctccatctcctgctttctactttcttgtgcttcaggactatactcaaaatcacgaatctggaaacccttctcgcgagcacggaccttaaagttgtcaacaaccttagcaaaaagtgttatggtatagagtgcgtactcattgtcttcatagagctgtttagatgacctgggtaccacaaatgtgtcgagtgattcatagcttgacaaccagtctttttgggagtacttcggaacaatagcaagaagtgttactagatgctctgagcagaccatatcctctggttttaccagattggaaaggtcacgaactgctaagctcccactttgctttctgttgattgcagtaagctggctccttacattgttatattccgctgctcgaaccttcatgtcatcctcgatcttggcgacctgcgactggatgctgccgacgatctccttgagcgacgacattgtggggtacttgccctcatcccacacgaacctggtgaggtaggtgtcgacgggaacgccatcgacggtgagggccccgctgtcgacgcctccggcgcgctcgaggtcttcgatctgcctccggatcttgtgcgaaacgccctcgacgaacacgtttgacttgacgaggtcatcgctgagcgcgaggagggagtcgagggtgccgacgcggaggtccgggacgttgaaccggtacagcggagtgtcgaaggagtggcgggagatggcgtcctggaggcgcgaccacagggagctcgcgatggcgccaggagactgcacgggcagagacacgatccagtagcgtgtcgccatgggcgctggcggtgagactcgggggaggaggcgctggtttggttcgtgtgatctggttgacgcaggagctcgcggcttcgcaatggaggagacggacacccgcacggccgcaccgcacggatcagaattcagaggagcaggacatgtcggcttctgtgtggggctgacgtgtcttttagcagtgagtaacgagttcgaaattagcctcgtgccgaatt

SEQ ID NO: 18201 - DNA, 458 bp, Zea mays
  Clone ID: MRT4577_1165C.1
aacggaagctgaataaccaatttattggatcaaaaaaaaggggatgttatcacaggagggctacataaaccttttgggggaagaaaactgggagtacaaagtcaatccctggaaccaaaaaatgcaaaagagatctacgggcaaaaagtagctttgccactactggacttaactaccacctttttttaaaataatccgatttgttctgttttccgaaaagggggggttcgctatcagttcaagtcactggcaggccggggctggggatcatcaccttcacaaaaaaaatatcaaaaaaatgttttttttaacaaaaaattcatcaactttggaaggactgattgacttttccagcatgcggggaaacctctaagcctcctttttagggaagcaaaagcccttgtctatgatcttttttgcagctggaaaaaaaatttttccatgcttggctgcaaaac

SEQ ID NO: 18202 - DNA, 398 bp, Zea mays
  unsure (1)..(398): unsure at all n locations
  Clone ID: MRT4577_116600C.1
tttaattcggcacgaggctttggggggggggggtgctttgttccctacggctcccggtacgcggcacgcccattccctgatgacccatggtctgctctcgcgcctgctgtcccatttaagcgcctgcccgctggccctctgcgctccccccgttttttttagtaccccccacaacctttggttttggggggggttnctnttgacatcnaccgccacaggcataacctacggggggaggcgctcgcccggctcgggggcggcgggcgcggccgacgggtcggcggctgctctggcgactgaagacctggcgccgctgccggcggcggcctgtgccttcgcatcggtntgggccccgagccccgcagcgcgggcgacatctaccggcctcgagacctgca

SEQ ID NO: 18203 - DNA, 777 bp, Zea mays
  Clone ID: MRT4577_116601C.1
cggacgcgtgggcggacgcgtgttcctctgcgcacacgaaacatgctaattaaagacgtacgcgatgcgtcctaagcttctccactaataatataaccccgagcatgcacgcacgctgatcatccatctataaatacgccaattagcaaactagagctactagcagcaggccaatggagaaccctccgagcatcctagtgactcccatggctccggccatgtcggcgcagttcacaagaataaccttcagcaacctgtttgtccgtcgggctggcccaggcagcacggagctgaccgtggagggaaggccatccgaccagctgggcaggagaaacctcactgacagccccgtatttgacggccgtggccctgacgccagcctcgtggctcgcgtacagggagtcgctacccagatgggcgacgtgcgccagttggacaccgtcgtgtaggagagggcgacgctcgtcacaaggcgcgatgacggaagggtcagacgagtggtcgatctacggcggaactggagcgttcgcgatggcgagaggcgtcataaggagaacgtttcttgccgacacgagcggcgggaactccgacgaacttgccgtggaggttctctgcccggtgttccgcccggcggcgtttggctcatcgtcgtcacagtcagcatcaaaggtgagagcgagcgagcgagcgagaaaccgtttctccttcttactcatcatatcatccgatgaacaacactgggatggtctgatggatggatggatggatggatgcatg

SEQ ID NO: 18204 - DNA, 605 bp, Zea mays
  unsure (1)..(605): unsure at all n locations
  Clone ID: MRT4577_116602C.1
tcgtccacgcgtccgcagatattgatttgttacaaccttcatcttctgccgcaagtacttttgcgtcatcacaaagtcatttaaaagcaataactgcttcaaaacgcatgagatcagctccaaatcaagtctggatgaacataccaataaacacattccagcctcgagcacggcctctttttcagtacagatactacagtgagcagcaacccttaagattgaatcctgctgaaatttctgaagtcatagctgaagtttgttcagaagcaacttcaaatgcaaatcagttgattgttccatcaagattgagcacccagagtcggcaaccttcagcagatgtggcattcagtgtccttatcaaacttgtcattgacatgtatatgatggactccgagactgctgctcctctgacactttatatgcttgagggtatgctgagctctcaaaagtcatcagccagaacgaaggctcttgatttgatcctaaatctggnggtacatgcacacctgctgcaacctatggttattggagatgcgccgcttatagataaaagtgaatctgtgaaccgttcttatctgaacaatgaatacggatcaagataaatg

SEQ ID NO: 18205 - DNA, 1527 bp, Zea mays
  Clone ID: MRT4577_116603C.1
gcagcagcagcccttctttttggagcagcaccacaggggagatcgatcaatcaatcaggaagcaaagcgcgcacggcacatgtgggtagctagcaatggcgacgccgtcgaaccctactctcgagccgcgacacgagcggcgggaactccgacgagcttgccgtggaggttctctgcccggtgttccgcccggcggcgtttggctcctcgtgacctcgagccgggaaaaaaaaatccgtccatagcaaccccgagtcgcccaccggggcggcgagcagcaggccaatggagaaccctccgagcatcctagtgactcccatggctccggccatgtcggcgcagttcacaagaataaccttcagcaacctgtttgtccgtcgggctggcccaggcagcacggagctgaccgtggagggaaggccatccgaccagctgggcaggagaaacctcactgacagccccgtatttgacggccgtggccctgacgccagcctcgtggctcgcgtacagggagtcgctacccagatgggcgacgtgcgccagttgtacaccgtcgtgttccaggagaggccgctcaagggctccacgctcgtcaccgaaggcgcgatgacagaagggtcagacgagtgggcgatctacggtggaactggagtgttcgcgatggcgagaggcgtcataaggagaacgtttcttgccgacacgagcggcgggaactccgacgagcttgccgtggaggttctctgcccggtgttccgcccggcggcgtttggctcatcgtcgtcacagccagcagcaaaggacatcagctccaccgtcgtcgtcaccaaggtcggagtgtggggtggagagggagggtcggcgcaggacatcgcgacgacggagccgccgaggcgtctgcagagcctgaccgtccgcgccggcgttgccgtggactccatcgagttcacctacagtaccgacacaggtggtcagacgcgcaccgctgggcgatggggtggacttggcggcaacgtccggaagctcgatcttggcgacgctgaatacgtcaaggaagtttctggaacgtacggcgcattcgaaggtgcgactacccttacctcgttcaggattgtcaccagcaccgccagagcttgggggccatggggcatcgagagcggcacacgtttctgcatcaccgcgcccatcggcagcagcatcgtgggattctatggacgcgcgacgaccaggctcgtcgctgcgatcggtgtctacctgcgccaactttagtctggtttcagcagcaggacgggtactacagatatgctagataaaggtcttatatatgtcatatgacctatcatggtcttatatgttcgatcgtcgtcgtgtctgtatgtacatacatggttgtcaaataaagctctttgcattttgatcaagattgacaccaccgattaaaaaaaaaaaaaaaagcgaaaaaaaaaaaaaaaaaaaaaaaaaaaaaacttgtgctgtaagcacgctttttcaaggcacatcataatatcc

SEQ ID NO: 18206 - DNA, 481 bp, Zea mays
  unsure (1)..(481): unsure at all n locations
  Clone ID: MRT4577_116604C.1
tttcaaaacccgcgggactgtgaacaagcgcagaaagaaatacgaatgcaacaagtcctacattctgttctccttttttggggggccaaaacgttgaggtctcaactcactcgtgcaagcagtttcatcgccacccccatgtgagcaatccgggacaccgcggagatgcctcgtgaggaaagcggtacggcgaggcagagcagcgtcggtggtcgtggaaggatggagcaacaaccccacatgttttgttctaatgtaagttattgcaacctaaatttaaattatgtgaatccttgaatttggagactaccgctgcaagctgatccattttagctgagaactcattactcctaaatgaagttaaaattgagtatatagctcagggatgacaagttttgatatttagattgatcgcctggcgnggatgttatttgttgtacacaatataactattgagatgctctatttttataggccatag

SEQ ID NO: 18207 - DNA, 371 bp, Zea mays
  unsure (1)..(371): unsure at all n locations
  Clone ID: MRT4577_116605C.1
ttcnaattccgattatcaatccagcataccctaccatccttttgcaaactcataggggggcccgatggcaccgagggcggataataaaccggcggcgaagaagcccgcagaggaggagcccgcggccccggcggagaaggctcccgctggaaagaatccgaaggcggagaagcggttcccggcgggaaaatccgccggcatggaaggcggtgttgacatgaaggggcggtagaaggccaagaagagcgtggagacgtacaatatctacatcttcaatgtgctgaagcaagtgcacccggacatcgtgatatccttcaaggccatgtccatcattaacttcatcaataacgacatcttctagaagctcggcg

SEQ ID NO: 18208 - DNA, 239 bp, Zea mays
  Clone ID: MRT4577_116606C.1
agtagttacaataatgcccattaaaaacattacaaaaaaactaatgagagttcatttttctggtctaaattctaggggttcctgccttctgtcagatcagcagtaaaagcagttcacaacaagagtaaaatcctactttttcctccctacaatacatagaggggaaactcgaatatgggaattttttaaaaaaaaatcaagcctgaaatccgctccaacggaaactcaagctcaggggc

SEQ ID NO: 18209 - DNA, 302 bp, Zea mays
  unsure (1)..(302): unsure at all n locations
  Clone ID: MRT4577_116607C.1
caagntaaactaaaaaaaaatggccacccttggcggccgggggaaaccattacaacacaggctcaaaggttcgacaaataattcgaatccgggggcgagggggcaaaattaattcaaacccagaaagggagcccacctacaaacaaagggaacacgggagaaaacgcccctgaccccgaaaaaaaaagcacagttgggggctggaaccctaaaatctccggaacaggcaaacctgggggaagcgacggtttgagcttgggggccttgccggggccggggacccaaagggtgtaagggaactg

SEQ ID NO: 18210 - DNA, 303 bp, Zea mays
  Clone ID: MRT4577_116608C.1
attgggggtttttttaattacttggtggtcccacggtgtaaaacaattttattccaaaactcatggtctttcctgcggttggtccaagcacatatgggaatctgacaaacggcaaagggtcacacaactttaaaccgctcacgctttcagcaaactacagccaatgtaacacctttgctggagaaatacctgagtttttcaacatgggatgaaaatggtatcctacaatccacccacggttaactccgctgaccgatactacaggggggtaaagggatctgtaggccgaatttaaggtttact

SEQ ID NO: 18211 - DNA, 282 bp, Zea mays
  Clone ID: MRT4577_116609C.1
ttttttttttttttttttttttgggtgtcggggttttttttttttttgtttttaaaaataaaaaatatttcaattgattggaaatatctatttaaaattataccttcctaaggtgacctaccacctccattcctcactccaataaatctaaacccaccttttgctccttttaaaaatggaaaaaagaacctaatgtgcataactgactaatccaacttcatttccaacccatacattttctcgatcccaaaaaaaaaaaacccccccttaatgggtcctcgg

SEQ ID NO: 18212 - DNA, 1026 bp, Zea mays
  Clone ID: MRT4577_11660C.1
ggcgcagaggctggccccagcccagctgacgccgtcgagcgcgccgcctcccgggggcgcgatgcccaggaagcggttccgcaccaagttcaccgccgagcagaagcagcggatgcaggagctgtcagagcggctcgggtggcggctgcagaagcgcgacgaggccgtcgtggacgagtggtgccgcgacatgggcgtcggcaagggcgtcttcaaggtctggatgcacaacaacaagcacaacttcttgggcggacacagcgcccgccgcagcgtctctgcctcctcaggcgctgctgcgctcctccaaaccccatgcgccaacgccggcgctgctgcaccgtcattcaacccgtccaggctcacccctccccctcccgtcctcacatcgtccccgaccggcttcaacatcaacggcgccgcctcctcctcgccgcccaccgtcaccgccgaccacacggacaacgccaacggagcttcatcgccgcactccgcttaagctagagaggagagggaagcgagaatggagagacaaacatgcttaatttcagtggtcacttgtttttctttctatttagaccttccatctaagaaattagccccaacaaaacatgccgccatgcgccatgcctagaaatccaagcttcctcccctgtactttatgctcttgggatctgatgatgatgttgatgctgatttaggattagattatctcatctcatcccaaccacaaaaaaggtagcctccttggtggttcttgtcctctttgattgagcaaggcaagggagagggtttttttccttctaggctcctagtatcccatgctgtttgtgcttgtgacatgttgcgcaaaacggaagcagcctgccacctcccctctcatgtggccgtgagcactgttccgcccataaaaaacgactttgctctgtacttgcgattgctgttaggagtaggataatgactaagcccatgattagtagcggcattgttttttctattataatacttgcatgcatggtttggccc

SEQ ID NO: 18213 - DNA, 246 bp, Zea mays
  unsure (1)..(246): unsure at all n locations
  Clone ID: MRT4577_116610C.1
gccagctaacctagtcggcgggccgncctttttttttttttttgtttaaacaacaagttattgtttcagactggaaacagggctaagcagcaacagcatgacattattgttgcggtcagaacacctgcatccaacatccctttgtatgacaaagaacagacacgctacacaagccacactggcacagtctcaattggcacatagcctctgccaacaggtccacaaatgtgccagcacacactagac

SEQ ID NO: 18214 - DNA, 710 bp, Zea mays
  Clone ID: MRT4577_116611C.1
aattcggcacgagggcaagattggcttttgtttgctgacatctttttcttcctaatgaaaagtggatgcattgactttcttgattttgtggacaaacttgcttctcgagtcacaaatagtgatcaacagattctccggagtaaccatgtcacttggttgcttgcgcagattatccgcattgagattgttatgaacactctaagttcagatccaaggaaggttgataccacaagaaagataatttcattccacaaagaagacaaaagccttgacgccaataatattggccctcaaagtattcttcttgatttcatcagtagtagtcagactctgcgcatttggtctttcaacacttcgattagagaacatttgaacagtgatcagcttcaaaaaggaaaacagattgacgaatggtggaaacagatgatgaaagcttctggtgagaggatgatagactttacgaacttggacgaacgagcaacaggcatgttctgggttctctccttcaccatggcgcaaccagcttgtgaagcagtaatgaattggtttacgtcagctggaatggcagatttaattcaagggcctaatatgcagccaagtgaaagaataatgatgatgcgtgaaacttaccctctgtcaatgtcattgctttctggcttgactatcaatctttgtctgaagcttgcttaccagctttgagaagacatatt

SEQ ID NO: 18215 - DNA, 237 bp, Zea mays
  Clone ID: MRT4577_116612C.1
ccggacacacagcgagggggaggaagaaggaagcaagagggaggaccgagcaggcctaggccctagggtagtcccctcgattcccctgcggctcatgtgcggtccgtctctctgccttactgactggcgtaggtagggggctacagcaatctatatgtgtcgataggctactggtgggaccgtttcatgctgacggtgctgaaatcatcactcggtctttcaagtcacgtttgggtg

SEQ ID NO: 18216 - DNA, 293 bp, Zea mays
  Clone ID: MRT4577_116613C.1
ttctagttctagatcgctagcggccccgttgggggacttttaaactggggggggacccaaccaagaaaaaccgggttagaaaatggaaccggttggtggtttggcttaggaaatggcaccatttttttgggaggcctaaggggaaccctaaccattatggggttttgggggcccttccccttccttttgggacccccacttttaccaaaacctggtcttcacccaatggaaatggttaaaccttgttaaaggggaactttaaaaggccgtgcctaaaagccttgaagggatgg

SEQ ID NO: 18217 - DNA, 438 bp, Zea mays
  Clone ID: MRT4577_116614C.1
ccccatgcctatcttctcagctcacctctctctttcacgcacgcctctctctctctctcgctctctctcgcctctctgggctgtcaaggcgccgggcaagggcggcgccaagcgggaccgcaaggcgctgcgggagaacacgcaagggatcacgaagccggcgagccgcaggcgcagaaaggagggcgcggggcgaaacgcacggagcggctgatcgacgaggagacgcgcggcgagctcaaaaactggctcgagaacgccaagccggacgccgtcacctacactgagcacacgcgtcggaaaaccgtcgccgtcatggacgtgggctacggcctaaagagccagggcgcgcaccgtacacgggcttcggcggggtaaggcgcgcgtccgtccacaccgggggtgggagctggggctgggggcgccttctgcttgggg

SEQ ID NO: 18218 - DNA, 354 bp, Zea mays
  Clone ID: MRT4577_116615C.1
agcctgcagtcacgaattcacgttctccatgtccagccatggcggtgtcgatatagctcaacaatgagtatcgatatctcgtgctggtgctggaggcctatgtcttcatcaacctttggatgggcttccacgtcagcatcgtttgcagaatcaacaaggtgttctacgccaccatgtacgccatcgactcggacaatagtgacatcaagctcttcaactgacatcagaaggggcatcagaactcactacactggatacctgttttcatcgtcatactgcaactggtcggtctgcaacacctgaccatcgacatcggtcaggccgtcatctacatcgtcacgaggttcgtctact

SEQ ID NO: 18219 - DNA, 665 bp, Zea mays
  unsure (1)..(665): unsure at all n locations
  Clone ID: MRT4577_116616C.1
atgattagcgcatccnnnnnnnnnnnnnnnnnnnnnnnnnnnnnnntacttcttttagtcattttccctcccctggccctggcgagttgcacagccttcaacgggccaagcgcaggcactggcgtcgcaccaaacttggattctgagcggtggaagaaatggtggctaacgacgcctcnnnnntatagggctctgcaagctaggnnnnnnnnnnnnnnnnnnnnnnnnnnnnnnnnnnnnttgtattaccatgttttgtctgatggttaaagnnnnnnnnnnnnnnnnnnnnnnnnnnnnnnnnnnnnncagcgccttaatcagttgatctctagccaattatataatctgcctagattatataatccatttgccatagattcatttgcaggagtgttaaaacagctcgttgttttgggatttgccgcctcaagtttcatctagctacctccaacaaacccttcaatctccatggctacatcgatatcaactcaatatactaatgttccttggaatgatgagatggataaggtactccttaatacagttgtattagcctagtgtacaataaagaccaagcaaatggagagggtgctaaaacagcagctgaaagttcgcgaagaatgcttgcnnnnnnnnnnnncggaggcaaggatgctccatag

SEQ ID NO: 18220 - DNA, 668 bp, Zea mays
  unsure (1)..(668): unsure at all n locations
  Clone ID: MRT4577_116617C.1
aattcggcacgagggctgcatctaactaccggcggggccaacgaccttagcttctccttcccgcatgttctcgtcctctcctctcctctccgctcgtcgtccacccacccctcgtgctcgtctcaactcttcacctccagctccggatctgaaacgccgagcaatctttcgtcgtttcgagtctcatccagagcttctcggtgagtgcgacaattgggccggagaactgggaaagcctcgaggagacatggatgggttgcccagagagctgtgcctcaagatcttccacctcctggatcaccagtccctcgcctcttctccccaaggtctgacgcctccctaaaattgtggcatcccaatacggaattgaaagcgccggtgattgcagtcgctctgcctttttttcccttttcaagaacggaatttcagtttcctctaaaattatgaatttcctgtggtcagaatccttactgtccaatttaaagcgaccccgaaaacagatcctaggnngtttggtttccgttggcagttcaaggttttggtttgtgtatcactgtagacttcttccaagtcccagattgccaaatcggatcggctgttaccctgtgtttctgtagtctgtgtacatgctggacctgnaaacgttccagaccagagagcttgatcat

SEQ ID NO: 18221 - DNA, 213 bp, Zea mays
  Clone ID: MRT4577_116618C.1
acttctcctaattccctttctacccactctttcgatgaaacctatcattttctcccaattaactcactttcacgttcattctacatatctcaagacacttccaagtactccctttactcttctcagaaaacaaaacaatcattttatctaccaacatcatctatctctcttttaaaacatatctttaatctttattatctttctcttctaatc

SEQ ID NO: 18222 - DNA, 469 bp, Zea mays
  Clone ID: MRT4577_116619C.1
aaaaaaaaaaaaaaaaaaaaaaaaaaaaaaaaaaaaaaaaaaaaataaaacctaaaaacaaaaaaaaactaaggggcggacttcggccgatacccctcacacggggagggcgttcaaccatccatcatactgggcgccaagttgccctatacatgagggggggtcccaattccactgtgccggtgagtttgcaacacacattcactgggaaaacccttgacattacccaacttagggacctcgcaggccttccccattttaacagcttgggaattaaccaacattcccccaccgggcgtccttccaaaaaggcccgcaccctgaatggttaatagaccccccctgtaccgagtcataaatggcgcgcccgtggcggttacattacacgggaccgttcggtggtcacgcccctagcgcccgttcctttgctatgtcccatccttactcctatggttttcttcctttcctt

SEQ ID NO: 18223 - DNA, 989 bp, Zea mays
  Clone ID: MRT4577_11661C.1
cctcgagccggccgggactactaaaaaatgtgattgatcactcgtttatcggcaaagatggtttctttgggagtgaataccgagaggctgagatcaccactgacggccgctgcagccacacggtttgcgtataaataagtagtcagtcgctcatcttgttccgggtgaacatcgcagtgctgtagcctccttcgtcttgagcgagcatggagatgtcagccatggaggaagccctccccaaggcgatggagaggaggaagggaggcctcagaaccattccgttcatcatcttaaacgagatattcgagaaggtggccacgttcgggctgtcggccaacatgatcctgtacctcaccgagcggtatctcatgaccaacgcctttgccaccgtcgtcctctacttctggcatgccttctccaacttcctgcccatcttaggcgccgtgctcgccgacgcccgcctcggccggttccgggtcatcaccctcggctcctgcgttagcctcttcgggatgtgcctgctgtggctgacggcgatccttccggtgtacaagaacaccccggagtgcgcgccggggcggccggtagggtgcgcggtgctgccgtggcagctgccgctcctcttcacgtcgttcgcgttcatgtccctcgggtcgggcggcatccggccctgcacgctggcgttcggggccgaccagctggacaagcgggacaacagcgccaataacgtgaggacgctgcagaccttcttcaactggtactacacggtgctgggcctctccatcgtgttcgcgtccaccgtcatcgtgtacatccagcaggccaggggctgggtcgtcggcttcgccgtgcccgtcgtgctcatggtcaccgcgctcacgctgttcctcctcggctcgcccttctacatcaaggcggcggccaacagcagcgtcgtcatcggctttgtgcaggtgctcgtcgccagctacaatacccgccacgagccc

SEQ ID NO: 18224 - DNA, 205 bp, Zea mays
  Clone ID: MRT4577_116620C.1
tttttttttttttttttttttttttttttttttttttttttttcttcaccaaaaaaaaccgggggggatccttttttttttgaattcgtttttcccgcgacggggcaggggtacaatactcgaaacacgtgtttacataattaatttcggtccgggtgacaactggttacgtcaaaccggaaccggagcactttttacatacggt

SEQ ID NO: 18225 - DNA, 572 bp, Zea mays
  Clone ID: MRT4577_116621C.1
agtccctggaccctggttagtctgtgtggacaggcctcaggtacaatcaccaagaccccccgatccaagcacctagctaggccgtcgcgctcgcatgagtaaaacaacgggggagaggacgcctgatcggacattcagcttgcccaatccctaatcatccagcgaatggactcgtgctcttgtgaccgaataagcccgacatccggtctgcgtcaacctccggagaccacagggacagatttcccgatcgtcgcggcgacctccagctcaatggcgacctcgtagagcgaagataaaagggaataccaaagctgatggggatgtggttgtcgcaggagagagacaacgcacgctcacgcagcgtgtcacggaagcaatatcctacgactgtgagctctacatgtacaacataaggagcatgaaaggccacgtctccatggtcggtggtcagggtgtgataacagctactagaacggatatcatcttataggggtttgatcaaataaagaggctgatccaagaaggcaaattgtgagtggaggaacgactcgtgaggatgtgggtatgaacat

SEQ ID NO: 18226 - DNA, 1164 bp, Zea mays
  Clone ID: MRT4577_116622C.1
ggaaggcccggggcggcccacgcgtacgcccggtccatccatccaactgcccgggactgcacccaccttttcaatccaatcctgccgcattgcataattcgcatcgaagatcgatgtgaatccgtggaagggagggcggaggagaaggaagaagaggggtcgaggccgaatccgccggtgagaaggggagcgatggcgagttcgtgcggcagctgctgcgcagaagcgatggaggccgcgtcgtcgctacgtgccgcacgccgggttccgcggccgagctccagaagctcagggaggagcacgcgcccgggcgcctcaccgtgctgccgctcgacgtcaccgacgagagcaccatagaggcagctgcggcctcaatcacggagacccacggttctcttgaccttctgatcaactccgccggcatcctctcgatcccgaacgtgatacagccagagactacgctaagcaaggttcagaagtcgtccctgatgctggcatacgaggtgaacgcagtcggccctatcctagtgatcaagcacatgtggcctctgctgaagatcggaggccgctccgagactaggagagggttcgcgcttgttgcaaacatgagcgctcgagtcagctccataggagacaacgctctgggtggctggcatgcgtacagagcttctaaaacagcgctgaatcagttgaccaagacagtgtcggtggagttcggcaggaaggacaacatcgcctgcgtcctgctgcatcctggaaccgtggacaccgacctctcgaggccgtttcagaggaatgtccccgagggtaaactcttcacgagggagttctctgtgcagaggcttctctccgtcatcgacagcgtcaagaaaggcgacaacggcaagttcttcgcgtgggatggccaagaaatcccttggtgaacggtcatcgtaactcgcttgagtctatagcacagcacacagcagtcaacaacgcccctggttttaatccaacgttgctttttttttcaacaagccaagcgaacagatgcattatttctagctaaagggtcctctttttgtgttatcaccgacctaaagttcaagatgttttttctcttactctgagaacacgacttgataggtgtttcattaaaaataatagaatcacacgactctaact

SEQ ID NO: 18227 - DNA, 417 bp, Zea mays
  Clone ID: MRT4577_116623C.1
gggggggggggaggggaaaaaaaaaaacctgtttccccccaaaaaaaaaaaaacccgggggggaatggggaaaaaaaaaaacagggccttggacaatttgaaaaaaaaaaaaaggggttaaaacctaaattggaaaagccggaatccttgggggaaaaaaaaaaaaaaaacccttttggggggtggggtttccccaaaaagtttggagcccccaaacaaaccgtttaaatttgggggaaaagaacccaaggcccttttaaaagggggcctgggcctccggaagggcttgtttaaaaaaaaccggcccaaaaaggttgaaaaagtgggcccaaagggtaaaaaactcaagcttcttgaggaaaagcttttttcccccacccgggagggggaaccgtttggggacctgggggttttggg

SEQ ID NO: 18228 - DNA, 1291 bp, Zea mays
  Clone ID: MRT4577_116624C.1
gccggccgggggacacgagcacgggcgggcgccaccattacttcccggtccatccatccaactgcactgcaccacccaccttttcaatccaatcctgccgcattgcataattcgcatcgaagatcgatgtgaatccgtggaagggagggcggaggaggaggaagaagaggggtcgaggccgaatccgccggtgagaaggggagcgatggcgaggctggcggtggccgcgagggcgttctccgctgcggcctccggcggcggcgtgtccttggtgcagggggcgtcccgggggatcggcctcgagttcgtgcggcagctgctgcgcagaagcgatggaggccgcgtcgtcgctacgtgccgcacgccgggttccgcggccgagctccagaagctcagggaggagcacgcgcccgggcgcctcaccgtgctgccgctcgacgtcaccgacgagagcaccatagaggcagctgcggcctcaatcacggagacccacggttctcttgaccttctgatcaactccgccggcatcctctcgatcccgaacgtgatacagccagagactacgctaagcaaggttcagaagtcgtccctgatgctggcatacgaggtgaacgcagtcggccctatcctagtgatcaagcacatgtggcctctgctgaagatcggaggccgctccgagactgggagagggttcgcgcttgttgcaaacatgagcgctagagtcagctccataggagacaacgctctgggtggctggcatgcgtacagagcttctaaaacagcgctgaatcagttgaccaagacagtgtcggtggagttcggcaggaaggacaacatcgcctgcgtcctgctgcatcctggaaccgtggacaccgacctctcgaggccgtttcagaggaatgtccccgagggtaaactcttcacgagggagttctctgtgcagaggcttctctccgtcatcgacagcgtcaagaaaggcgacaacggcaagttcttcgcgtgggatggccaagaaatcccttggtgaacggtcatcgtaactcgcttgagtctatagcacagcacacagcagtcaacaacgcccctggttttaatccaacgttgtttttttttcaacaagccaagcgaacagatgcattatttctagctaaagggtcctctttttgtgttatcaccgacctaaagttcaagatgttttttttcttcttctaagtgttgaaatattagacatttttttcaaaaaaaaaaaaaaaaaaaaaaaaaaaaaaaaaaaaaaaaaaacccccaaacc

SEQ ID NO: 18229 - DNA, 168 bp, Zea mays
  Clone ID: MRT4577_116625C.1
aaatgctcctcgtggaacttgtgttgaagttccagaccctaatgcggtacacgatcctgatatatcattagctacatagtagtagacctgtaggtgaaaggactgtgtggttgtaacacattattttgttaccaggatcagtacatgtatgggaatctgggtttgcag

SEQ ID NO: 18230 - DNA, 486 bp, Zea mays
  Clone ID: MRT4577_116626C.1
ggtcctacttggttttttttaaaggcggctctttttttaactggccccaattggtttcagggcccaataagggggtataggccctatttttttggctaaaacccgtttttaaccaaaaaaaaaaaagggtaccgggacagggcgggccacaaaaaaaaacggggttaaaaaggggccaaagggggggttttccttcaataaataaaaaaaaacaaagaggggggttttactgaaacccgctgggggccagttaaaaaaacttgggggtttttcaccccccccgggggggaggacgggcctccggggggagcaccttccacaaaaagttggttcttctaacagggcccaggaaaggcctttttgcccccaggggaatcgaccttttggcaaaaatctggcaaaaaatgactaaaaagggttggggtttcttttccccacccggtttcttataaaattgggacggctccaaaaacaaatttggcgggg

SEQ ID NO: 18231 - DNA, 366 bp, Zea mays
  Clone ID: MRT4577_116627C.1
ccccccctcggggcgtcccacgcgttcgttccactttggccgcccggaccaagacaaacgcggccaagctcactcgctgaaacgctccacgcctcctccgctctgccgccacggctcccctcgcacacgagcgccagagcagccatggcggcggcgcactgcgaaccggccaaaagctgggcggcatggaggaggcgctcgccatcgccgccgacctcggattccccgcctctaccacgcaggaagatcaaactaggtgcgacaaaagcgaggattgggtgaaggacttgagggaactgactgtagtgcataggaacatcgccaacttgcaagcggagctacacggaagaaaggatgacaaaaaca

SEQ ID NO: 18232 - DNA, 204 bp, Zea mays
  Clone ID: MRT4577_116628C.1
cgggctcacccacgcgtgcgctaacgctagatctagagctagagctctagaggaggctatcttacatacacgctcatgcaagcttgtgggcgatgtattgggtcgcctatagtgaattcactggccagatgactacaacgtggtgaacagcaaaacgactgcgataaccatgttaatagccttgttactcatcttgctgtagat

SEQ ID NO: 18233 - DNA, 275 bp, Zea mays
  Clone ID: MRT4577_116629C.1
tctacaacatcaggcttgattggttgctgcagtagctctaaagcattctagactggaggtctcaagttcgattcctcttaaatacatcttttaaaaaaaaaaaaaaaaaaaaaaaaaaaaccacaaaaatccaactaaagataacaaataaatgaggtttagttccctcggtgggcggaatcatggccttatgtgcgtcctgtggggcattgattgccgctctgaagtactcacgtccttccaggcggcactatgaagtgcatgacccgactcga

SEQ ID NO: 18234 - DNA, 358 bp, Zea mays
  Clone ID: MRT4577_11662C.1
ccacatatattcttgggggggcttttttttttatttttgacacaaggaaaaaaaaactacaatcagaatttgcattatcaatacctatacccctccacttccttcctttcttttcaaaaggtttccctggatccaaaaccctttcacaaaaccaaaacgggcttggaacccccctttcattgaaccacaaatgttttctgctcggcggtcacaaaccccttcttgcctacccactttttgacctttccctcccaaaactccccggtccaaagataaagactatgtaaaaacccttaacccctccagctttttcattgctttttgggaatccaaaacctacttttccctttgaaaaacc

SEQ ID NO: 18235 - DNA, 289 bp, Zea mays
  Clone ID: MRT4577_116630C.1
tgcacgggctgcaacccacgctgtgcggggcgtcagggcagctgcggcgacatctgcatctgcatctcccacctcgtctccctcgcgcatctgccctgcctcgatcccgccgccagccatctaagggagccgcgatccatgtctccctccggcgagctgctggcgtccatctcctccgctctcgccgtggccttcgtcttcctcgcctgcgtcgagctcggcgacgcgtcgccgccgtcagcgtctaccgtctcatctagtacgacctacgccggcgctgcgctcggct

SEQ ID NO: 18236 - DNA, 734 bp, Zea mays
  Clone ID: MRT4577_116631C.1
agttcgcaggggttgcgtctcagttcctggttgtgttgttgtaagctcccaggtttcttctcttcgcgtgagctagctagactagagtgggatcgcgaggaagaaggatgtcgtgctgcggaggaaactgcgggtgcggcagcggatgcaagtgcggcagcgggtgcggagggtgcaagatgtacccggacatggctgagcaggtgaccaccaccaccaccatcatgggtgttgcaccatccaagggcgggttcgaggcggccgccggagctgagaacggcgggtgcaagtgcggcgccgccagctgcacctgcgacccctgcacctgcaagtgaggatgaccgggtgcagcatgcaggcccgtgacgatggaggaagtagatcggaaggacacccttcagtatctctagctaaatcaagctctgagagtatgttgtagcagcgtcgtctgtgtttgccgccatgcgtagctagctagctagtggtggtaaacgaataattgtcctgttcttcttcctcctcggcccctgccagtgttgcgtcgtgtgggccggccgggtgcatgcacagcaccaggccatgcccgctgctatgtaagtgctcgagccagtagcatcgtaactcggtttgttaccgctagagctcgagccagttcgagagtagccattttaaaatgaagtctgcgcttgtgtgttatggatttaaatcgactcaataacgcctaatccacatgg

SEQ ID NO: 18237 - DNA, 819 bp, Zea mays
  Clone ID: MRT4577_116632C.1
gggcaggggccgtcctgtggttcctatgcaccggataatagtaagtagggatgccaagaaaaggccatccaagggatccatctgctggggttgcgtctcagttcctggttgtgttgttgtaagctcacaggtttcttctcttcgcgtgagctagctagactagtgtgggatcgcgaggaagtaggatgtcgtgctgcggaggcaactgcgggtgcggcagcggatgcaagtgcggcagcgggtgcggagggtgcaagatgtacccggacatggctgagcaggtgaccaccaccaccaccacccagactctcatcatgggtgttgcgccatccacgggcgggttcgaggcggccgccggagttgagaacggcgggtgcaagtgcggcgccgccagctgcacctgcgacccctgcacctgcaagtgaggatgaccgggtgcagcatgcaggccgtgacgatggaggaagtagctagatcggaaggacacccttcagtatctctagctaaatcaagctctgcagtatgttgtagcagtgtcgtctgtgtttgccgccatgcgcgcgtagctagctagtggtggtggtaaacgaataattgtcctgttcttcctcctcctcggcccctgccagtgttgcgtcgtgtgggccggccgggtgcatgcacagcaccaggccatgcccgctgctatgtaagtgctcgagccagtagcatcgtaagggactgttcggttgttccggattggagccccggattaattcccacccggattgcttctctaaaagaaaaaaaaaaggacggccgctcgcgatctagaactag

SEQ ID NO: 18238 - DNA, 607 bp, Zea mays
  Clone ID: MRT4577_116633C.1
ccaagctagcgagatctgttcttgcctcctgcgctgttccgtcggcgttccgatgatgccgtaggcgacctgagcctgtggttccctttccgactgggacatttggggagcaagaagaagaagaagaagttgttgaagaagggataccacccacctctgatcctcaggcagacaattgcttttattttgatatctgcggatccgagcaagacacctctgataacaaagggaggtatcaatttttcaactgtatgcactcaaatctttttgaagaatataagttcttccccaagtatcctgataagcagcttaagatagcagctattctgtttgctgattgatgcagttaaagagctggacgaatagatgagatggagaagaagcaggttgaactttctctgaagcaactggaaaccatcttgacataataaaaccaagctctaatatcattgtaacaatctatgaaacccagaagatgcagatcatgtgcctgggcatgaagctgatgctgccggagtctcataaccagccgctcgagcagcagcagcagcagagatccgctgagcaagacaaccacgattagcagaagtccaaagagatgatcaaa

SEQ ID NO: 18239 - DNA, 1233 bp, Zea mays
  Clone ID: MRT4577_116634C.1
ccgcgctagcgagctgttcttgcctcctggtctgtctcgccgctccacgctttaggcccaggattagctgttgtatcgcttcttagcttccatttgttcaggatttccttgctacatgtgttcttctctagatctgtttcccgtgtgtactgcgtagtctaatcttatttctgttacttgcagcgctgttccgtcggcgttccgatgatgccgtaggcgacctgagcctgtggttccctttccgactgggacatttggggggaggtatcaatttttcaactgtatgcactcaaatctttttgaagaatataagttcttccccaagtatcctgataagcagcttaagatagcagctattctgtttgctgattgatgcagttaaagagctggacgaatagatgagatggagaagaagcaggtctcttctttacgctataagttcatgacatttgcatctattatactgaaccatgcaatcttaagtttatggaaaggctataagaaaaaaacagaaattgtacttggaatagatgttttgacaacttagcatgataatgagggaaccaatacaataagtaagcaacattatgttgagtaaatctttgtacatcattatctgtctataccagcagtcagttttgtatgattgaaacacatatttggtcgacgctgggccagcaggggtaggttttacacctcatgttatttttgtaaaagctacagagttatgaagaaggttctgaagattatcactattgtcttatcaggttgaacttcctctgaagcaactggaaaccatcttgacataataaaaccaagctctaatatcattgtaacaatctatgaaacccagaagatgcagatcatgtgcctgggcatgaagctgatgctgccggagtctcataaccagccgctcgaagcagcagcagcagcagagatccgctgagcaagacaaccacgattagcagaagtccaaagagatgatcaaatgtaattctccctccctgcaacaaagccactttagttgccatcatcagcaaaaatgaaatctgagcactacacaatattgtattaggaacagctcatgatgagctctggaaggaagaagacgacgattaggactaccactactgaaccatcgatcgccagctgcatacgtttgctgatttctctttaacagccatgtctacctcctatctgacgagctctctaaaggcattcagttcagcactc

SEQ ID NO: 18240 - DNA, 2676 bp, Zea mays
  Clone ID: MRT4577_116635C.1
atgcgattgtaagcagatggaaatagcaaattgttaaactttaatggtggagccagtcagactaggtcaattgtccaactcaatggtgagcgatcctcgagaatcctttttgtcggaaacattgatagcaacgtcgaggattctgaattgaaattccagtttgagcaatatgcagacaggcagacacttaatgcttcttgcaaacatcatggttttgtgatggtatcttactatgatataagatcggcagaaaatgctatgagggcccttcaaagcaagccactcagatgtaggaaacttgacatacgttactcgagtccaaaggactatcctttggataaagatatcaacctgtccatggtaatagttaatcttgaagcttcgataactaatgatgacctgcaccagatatttggtgtctttggtgaaatcaaggagattcaccctacttcagataatgaccattacaaatcgatagaattttttgatgtcagagcagctgaagctgcacaatatgccttaaacaggagtgaaatttcaggaaataaaaacaaattggagcctagctgtctgggtggtactgaacgtttgatgcagcagatgtctcgtgcattggaacatgaacagtttggtgcatgtaaactcggaagcccaaacagtccttcaacattcggcacgtctgtcaatatggcacccatcagatccactagcacagaaagtggaactgttcaggttttacgttctagagttcagacaccgataaaccaattccaagagggaaggaattttctggatcttccctcaactaccataagtagatcctctcctgttggaattacacctgcaggatcacaaagcggccaccacgctcttgatgagcacatccattcacttggaaagatgaatgtacagaacaagggacgaatggattgtggatttcaagagagtactgctttccatcctcattctctccctgacttcaatgacagactaagaaatggtatctcctataactgctcaatacctcccatcggtgttaagagcaatgctagagctgctgaagcaatggatgtcaggcacatttacaaaggaggttgtgggcatctcagcaatcaatcttctgctcatactgaagcacttgggttttcaagaactggtagctgccctctctatggtcaccaactagcatggagtaattctaataacctacaccagcagccttcttctcccatgatatggcctagcatgggcccatttaccaataatatgccatctcgccagttgatgcaagtgcatggaatttcaagagcaccattgcgcatgcttgaaaataatatccctatgaatcaccaacatgtgggatctgccccagctgtcaatccatcaatttgggatagacgacatggatatgcaggggagatgatggaaacaccaggattccacccagggagtgctggaagcatgggtttccctggcagcacacatctgcatcagttggagaccaatggtatgtttcctcacaatggagggactttcatggacccagctatgtctcctgtgcacatgagtgctcgctctcctcagcagagggggcatattttccatcgaaggagccatgtggctcctattccatcctctttcgattctgctggtgaacggatgcggagccgaagaaatgactcgaatgtaaatcaatctgacaacaaaaggctgtttgagcttgacattgagcgtatagtccggggcgaggactcccggactacactgatgataaagaatatcccaaacaagtacacatcaaagatgcttctggcagctattgatgaaagtcaccggggaacttatgattttatctacctgccaattgactttaagaataagtgcaatgttggttatgcattcatcaacatgatcaatcctgacaatattgttccattttataagacatttcatgggaaaaggtgggagaaattcaacagtgagaaagtggcctcacttgcttatgctagaatccaaggaaaatcagctctagttgctcatttccagaactcaagtttgatgaatgaggataaacgctgccgccctatactcttccactctgatggtccgaatgcaggagatcaagaaccattccctgtgggatcaaatgtccgttccaggcctggaaggtccaggattttgagctgggaacaaaaccaccaggacattgtgtctgatcataccaaaggtggaactccgagcagggctggtggcactccaggttacatcgccacggatactgatcatacggctgttgattgacgaacttgcgacaacacccgacattctgacaattgcaatccagtttttttttttgaaattgcatcctctcctacctcttttttccttttgttatgttgtatctatatctacttccgcgtgatattttggcaccggaggctctagacggctgcagatttggtcgctgacaagtagcgaggagatggatgttgtgccgtcagtttctccttactttggcacagacccctcagcgggattttgttggacagtttgaccccctttcaccaggaaagatatccatatttgggggagtttccctattgctgtttaaaaaaaaaaaaaaaaaaaaaaaaaaaaaaaaaaaaaaaaaagagaaaaaaaaaaaaactcgaaaga

SEQ ID NO: 18241 - DNA, 306 bp, Zea mays
  Clone ID: MRT4577_116636C.1
aaccggggagattttaaattaatggggaaccacaattaaaaggcgatcatacatgaaaacaaaaacaatggggggcaaacaatttttcaagaaccaccatttttccgcaggggggggtttaagttcttaaaaatttttttttccacacccttgattcttttggggccggtaaagacaaacatcttttcaaacttatgggattcccaaattggggcccccacattctaaaccccaacaattttttggtttccaaaaaaaaccacatgcattttttcattggggggatcgaggacatagggggcccgg

SEQ ID NO: 18242 - DNA, 265 bp, Zea mays
  Clone ID: MRT4577_116637C.1
aaccatgtttcgtgctacgcacatgatcattttacggttgttgaggtctttttttaatattccggtgaccatgttctctctatcaagggaggaacacaagactggttcttttcctcaacgcggggggggagcgaccccctcaaagaaacaccaaactactagatcggcccaacaaaaaagaggccacaaagggaggacccccccatgaaggaacgggagatcctcatgcattaccccggacctttaaattccttgcaagacggcg

SEQ ID NO: 18243 - DNA, 289 bp, Zea mays
  Clone ID: MRT4577_116638C.1
acacaatgaattctctatagctagctaagatagggtagtcacactttgacaggatgcagacagttatcgtgaaggccaaggacatggtgagctcggctaacgtcatgttgaaggagatgacggcaacgatgcattataagactgctgatgcgactgcgctcacacacggctataagaacatggccaaggaggcggaccgcgccttgaatgaccagtccaacgccgacaagcaccaggagaaggacgaccaccgagtggacgccgtcactggccatcacgaaacgcgcgt

SEQ ID NO: 18244 - DNA, 363 bp, Zea mays
  unsure (1)..(363): unsure at all n locations
  Clone ID: MRT4577_116639C.1
accnaacgggcacagttaactactattttcgcgggggcacaacaccaaaccaccaccttcctcggacagacccaaaaataccgcgccgccggcatcgatgccggcagctcaatcaccatgcgccgcaccgtcaagagcgttccccagagcatatggtacagccctcgatcgccccaagtatattggcccgttctccaagcagacaccgtcgtacctgaccagagagttaccccacaactacacatgggacaccgcgggcctctcgcccgacccagagacattcgcgcgcaaccgggagctgtaggtgatccactcccggtgggcgatgctggacgcgctgggctgcatgtttccggagatcct

SEQ ID NO: 18245 - DNA, 499 bp, Zea mays
  Clone ID: MRT4577_11663C.1
gtacatataatccgatacatcaaataacaactggggttgattgatatgacatgccttaatgcacacgcgcgtagggaggaaacaattctgggggtgttttttaacgttgaccggtacacacgggtagaacgggccacatgacttgccctcctctatagaaatactaaatctgcctataggttcatatgttacaagggttatctggcttgcacaatacaccgattaatcaacgggggggctctcaacttttactaaaaaccaaacgtcaagcctccggggagggcaaagaataacaacaactttcatattcagataatggggaacaatggcagatgagaactggagggatcttttaggggcacttgggccctccttgctagactgccacttgaccgcagaacgctagtctcccatgaattcgcagatctggggcggaaccttcatgtaataggatcagcacttgctgtataacgtgaagtaggtcattgtgtactgagtc

SEQ ID NO: 18246 - DNA, 1518 bp, Zea mays
  Clone ID: MRT4577_116640C.1
gcatatgccactgctaaagtcaattcctcctgtaactcgcatggctatgggacgtggaacctgggtgaccgtcctatgcagaaagctgaaggattggtggcattgggttgcagaaggtgatctgccaattgttgcatctcatggaactgaaattgagacatacaaaacactagaaccagctattcgtttattaattttgaaagcgatatgtgatatccgtgttgagcaagaggatattcggaacttcattgacagttcccttaagcatggtcatgacctttctacttttcgtaaagaacggattggaggggattcccttggaatctcatactggtactactttatttatcttgaatgtaaagaatttccattatttcattttcatgcaaggccatgcaaaacaggtatgaagatgatgagattctcgggcatagattgtatcgtgaaattagacgagtagaacaggttaagaaggagcctggaaagaggtccaggggaaaaggaggatcttcagctatttcagttgtgtcctaccaatgggaaactgttgcgtccacctttgatgagtttgatgatgtggcagtaagttttgccatttgagttcctcatatctgctcccgtagagtgctatttgtttttctgcttaatacagtattactactactgtggaaatcttggaggtgaccaatatagaggaacaatagtggaggtagaccttgctgtgttagccaaaattcacattttagagttagtctgcatgaacactaataaagcaattcagagggcagactcaatgtgggaggctcccacatgaggatctggggaagggataaactgaggcaagccttcccctgcaaatgttgagaggctgcttcaaagacagctctcaccactgcactagggctgccttctaataaaacaattcataggaaatacaataattgactaaaatatgcgagtatttatcttgctggagtgttcatttgttctatttctttcttgtattgaactagagcagttcttttctattgtgcttagatcttatcaatgcccacttgaccacttcagctggttgacatctctgtattattcacatgcagcattttttagcacaaatggattacatatgctccaaccattatttatatgcaagtaaaaatgggaatttttttggttgtgactgatttataacacattttagtagcgcatggaaatggtacatgcatgactattttgtgaaactgctaccttaatagttgaccttattggaaccatttctcatggtgccatcaagtgtttcactgtctacacaacacttatttttaagacttcatgccagctacattataaccatgtcctgcagcccatccatccacatatatgatgtgtcaataactcggtcggggagggtaagaccaccctcgcggtattttttttttcgaacacgcaggagagctgtgtatcattggattaagaaaagaagggtctaaaaatagaccaaatacaaacacaacaaag

SEQ ID NO: 18247 - DNA, 481 bp, Zea mays
  Clone ID: MRT4577_116641C.1
gtgattctgaggttgaggttctggtcgaagcagaaacctgctgccccactaaagaaaacatctgtggctgttgcacaaaagaaaaagggagattcttctgagagtgactctgatgatgactcggatgaggaagtgcctccaaagtcaggctccagcagcaactatcaaaaaggaagattccagtgaagtgagtcagagagtgattctgaggttgaggttctggtcgaagcagaaattttgtttcaataggattttggatgcgacgagaagtttcccatcatagatgattgggttagccacttggtacctgatacgaggatataattatgagtgtctatgccaagaagcctgagttggttagtgaacatgaagtgagctactttgttttcatcgtattcatatgtttctgaatgctaatgaaatactggaatcgaggttgatgtatctccaaatgagaatgtatggtgagaagacttaagtc

SEQ ID NO: 18248 - DNA, 366 bp, Zea mays
  Clone ID: MRT4577_116642C.1
gcaagggtaatcaaggaaacccacacaaatcaattgtcctatagaagttagagtccacatatacaaagcaaacgctcctagaactcacttaacaatttgctggagctgttttctagtgaaactgaaaaaccaaagctgaagtttttgaagcaaagctctttctaaaacaggccctacataagggttccaccacacgactcgcagggtacataaatccacctaatccggaaaacgaattcgacgcagtaataaatacagaactcgtcgctggagcagacaacaaaaaccgttgtcggcagtttctcatttcctccttgatcaagcagctggtgtttggatcctcgacagcttcacaccgtagccgcc

SEQ ID NO: 18249 - DNA, 349 bp, Zea mays
  unsure (1)..(349): unsure at all n locations
  Clone ID: MRT4577_116643C.1
gggttgttgtttttttgagacccgttaggaaaatgggttctcaaaattgccgttagaagagcacgaaatccggaacgttacaattttgttttcaacttagctttttgaggaccttcggggtgtgggggttcttgaggttaaccataccacaccttatcattggacatttggaaagctaccggnccaggtgtttaaaatgccatttggtaaattctaaaatttagtcccagggcaggctaattttgttcttcggccttgttctgcacttttttgttgttgcggagctcatagatgttcttgtccttgttgggggtaaggacgcgtgggcaatgccccccgtggtggtttt

SEQ ID NO: 18250 - DNA, 343 bp, Zea mays
  Clone ID: MRT4577_116644C.1
gaccccaagctcggtttcaacctcatgttggacagcaagaagccacaggtgctgaagacgtggtttccatatgcgacattccaacacatgggagaaaatacactcttcaggggcataacactgatgatcactcggtgtgctgtggcaacagtgtggaatatatgggatctgtccgtcacgacctacttaatggtcggtcaatgtaaagtcgggatggcatttatgaactacgatgcaatggccacacattacattcttgcctgtatcaacctagatattccaacctgttcgctattggaagctaccagcatctttaggttcggaacatggtgaataatcagat

SEQ ID NO: 18251 - DNA, 400 bp, Zea mays
  Clone ID: MRT4577_116645C.1
tactgaactggtttataatgtgacgtcaatttactaaaaaaaaaaaaaaaaaaaggaaaaaaaaaaaaaaaaaaaaaaaaaaaaaaaaaaaaaaaaaaaaaaaaaaaaaaaaaaaaaaaaaaaaaaaaaaaaaaaaaaaaaaaaaaaaaaagggggcgccctttttaaagaatcaaagtttacttacccgtgcatgcaaagttataattttttttttgtgcaacctaaattaaattaactgcccgccttttaaaaactttttaattggaaaaaccatggcgttaccaaatttaattgcttttaaaaaaaacccctttttgcaagcttgtttaaaaacaaaaaggccccaactattcgctttttcaaaaattttgtaacctttattggcaattggaacccc

SEQ ID NO: 18252 - DNA, 503 bp, Zea mays
  Clone ID: MRT4577_116646C.1
aagaggattgccacaacaaagtttattataacacagtattaccaagcagtgtttaaggtgcccagccaatttatggccaggagtcccatacatttccacacttgaaagcagctacacattcaagtcaatattttgacccaaaccctgagaactcatgagtccaccctactacaacttaaaacacgcaagggacacctcccgctcacgttcgagactaatgatcctttctactcaagcaaatcatcatacgaatggagaaattaggggtgcaacatttcttataagcgtaattatatatgctgttgctgtttagccatgccatatgtaacacttctgccgcttgatacatcaactccatctgagtgaagggccgaatcagttttacaaacattatctttgtgaagacctaccattaataggcattcgtttttgacttctacatgacgggctcaggaacttgtgccacaataaccccttcacacttcctgccttggacctgaaca

SEQ ID NO: 18253 - DNA, 320 bp, Zea mays
  Clone ID: MRT4577_116647C.1
ggggggcccaaaggaacaggcccccatagttaggagaaggatggattaaccaggcttggccaaagaaacatccgcggaacctttacccaaaaggggggaaaaaaagaaaaaggcgaacgggaaaacgaaagaaggaaagaaaaaatcacccccagagggggggggcctcccaggataccccccctagggccccccccccccccaaaggggaaagagagacccgaggagggtccccatcacccttggccttccaaagggccccccccccgcgggggggccgcgcccagaacccccccccgggggacctactgggggccggc

SEQ ID NO: 18254 - DNA, 518 bp, Zea mays
  Clone ID: MRT4577_116648C.1
agctcggaattcggctcgaggccaactatgtctcgacgtgattatactccggtagactggcgggggcgggtgcctattaaacctatgtcgctatcatgcgtgaacaccgcaaaccgggccattctgtcgccacagtcgtcgcctccacgtcgttcccgggcacgcatcccacatggctcgtcgccgtctccggagacctgccggcgtgccgagactggcacggtttcctagacgctggaggttggcaccgactggcaggcgctcgactgctagacctcggctgtcaaaaaggaaaaggtgatccttgctcgagcatcaagagtatgtgtgcgaggggtggctgggatctgtcaccgaggtcaccggaggctttcaagggactcaaacagctcgtcgtaatcagttggggcgcgcacgttcttgcccacgcaaagaacttgagagactcacctgatgacgtacagtcgcgtattgacgcaaacatggtccttccggaaggctgtaaatgcaacgaagaa

SEQ ID NO: 18255 - DNA, 241 bp, Zea mays
  Clone ID: MRT4577_116649C.1
aaaaaaaccggggggggatgttgtttgcccgtaataaagattcacttcagtgcatgggtaaaaacccattgaaacaatttttttgggattgggtaattcggggggggagaaaaccaccttacctggtttatgctcaaacactttttaatttcaatacttttgggcaatttgttgctcgaaaaaaggggcaaaaccattgtttacaaagggggtttttttttttttgacacaagggcccatt

SEQ ID NO: 18256 - DNA, 1434 bp, Zea mays
  Clone ID: MRT4577_11664C.1
ctcgaaggcggccgggctcttcacctcccttgacccgtcgtcccatgctaaaagcccagggttaggagctagaggtaatctctctcccgtctctccccacggccaagccccagtgggcgtgggggcgccgcatggaagccatggacgtcaagtacaagcccgtcatgttccccaacggcgccggcctcaagaaggcgaagccggcggcggccgtggcgctggccggggagccgctgtaccgcgagtgcctcaagaaccacgccgcgagcctgggcgggcacgccgtcgacggttgcggcgagttcatgccctcgccgggggccaaccccgccgacccgacgtcgctcaagtgcgcggcgtgcgggtgccaccgcaacttccaccgccggacgctggagggttcccctccgccgcccgcgcccgcgccgctggcgctcccgcctccgccgagcgtgatgcacggccagccgcaccgcgcccgggaggagacgcccgaggaccgccacccgggggtcgtcgacgccgacgactccgattccgactcggaaggctcggagtacgacgaggagcggtcggtgtccccgccgccgccgccgcaccacctgctgccggcgccggtggcgcagcagcccccgccaccgtcctacttcccgacggcgccgcacatggtgctctcgctcggttccggcgtgcccgggcccgcggtggcggtatccccggcgcagaggctggccccgacccagctgacgccgtccagcgcgccgccccacgccgggggcgcgatgcccatgcccaggaagcggttccgcaccaagttcaccgccgagcagaagcagcggatgcaggagctgtcggagcggctcgggtggcggctgcagaagcgcgacgaggccatcgtcgacgagtggtgccgcgacatcggcgtcggcaagggcgtcttcaaggtctggatgcacaacaacaagcacaacttcctgggcgggcacagcgcccgccgcagcgcctcctcgcccgcccccgccgccgcgtcgctccaaaccccagccgccggcgccggctccggcgctgctgcagcaccgtcattcaacccgtccaggatcacccctccccctcctgtcctcacctcgtccccgacggccgccaccggcttcaacatcaacggcgccgcctcctcggcgcccaccgtcgccaccgactacaccacggacaacgccaacggagcttcgtcgccgcactccgcttgaactagagaagggagaagagaggagggggaagggaagggagagcggagagggagagaaacatgtagcttaatttcagtgatcactcgttttttttgtttagatctcttcccatctactaagaaattaaccccaagaaaaagcatgccgctgtgcgccatgcctagaaaaaaaaaaaaaaaaaaggccccta

SEQ ID NO: 18257 - DNA, 555 bp, Zea mays
  Clone ID: MRT4577_116650C.1
cgcgtgggcaaatgcacttagtaatgatcatgtagtgtgtgatgtgatataccgcacagcagagcaagttgggaagcgtggccctgcaccgggggaacggttctttgtgatgccatggcagaagagtccagccttgtccaaaggattgtataaggaattaacagtggaggaggtagtacgtcgagggagaagtgcggtggacatggatggtgtgcatgtgatgggaagggatacattttatcagatgctgatgcactgccttccatcaggggaggttggatcaggtgaacggcaaggggagcagagtgctctgccattccgagtattaccatgggaagcagaggtgcatgctgcactatttgtgcatcgtgtctcagggcttcacagggggatttatttcctggtgagaaatgaggagcactttgatgcgttgcagcgtgctatgaggcaggactttgagtgggttcagccggaaggatgccctgatggtctcccactctacaggctgatgaaaggagattgccagaagtttgctatgcagatatcatgctttca

SEQ ID NO: 18258 - DNA, 274 bp, Zea mays
  Clone ID: MRT4577_116651C.1
ctaaaagaaggctaaaaaaaatttacctctttttaaattatgtgcaaagtaattctggctgtctagaaacgtatttgattttagggggttttcttttgtattgtgaagctttcttcgtacacttcttttcctttctgggtgtgattttgatccctcgccatccattagtgtgatctcattgtgaacattactgtgccaaatgtactgtatcaaaaggatgtgaatgtgtattgttccagaacgtgataaacatgacgatgttaaatctcaaaaa

SEQ ID NO: 18259 - DNA, 437 bp, Zea mays
  Clone ID: MRT4577_116652C.1
ggggagcccaccaaccaaacttaaaaactggaccccggtacctttaataaagggacattcagtgaaaggcttaagggtagaaactaaaaactcccccccgtttaaaaaatttatcgccgattattttatttttgaactaaaaccccaaaaaaaaaaacaaaggggggatttttttttttacaggaatttttttttttgcatgccctccatttaaaaaacattttaatcccacaagggggaaggtaaataagtgggtataaacttggagagagggttggaaaaacccggattttgattttaacccccaaaataatttgttttaaccaaattttctgaagcccttccccccttttcaaaaaaaaaaagggaatggcccttgggaacctttttatttgggaaattttttttttctggggggggggggccccaaaaccccg

SEQ ID NO: 18260 - DNA, 190 bp, Zea mays
  Clone ID: MRT4577_116653C.1
ggactggacaaactacatcaaggctttaactaaaaccgattattaacatttcccaccctttcaacatgaaaccggacatagtttaggagggttacaggaaaggcccaattggaacaaaaacatcagggatcgggcaaccagttttttcgagccccttcccaagcctcttgtccgatccttggcggggcct

SEQ ID NO: 18261 - DNA, 176 bp, Zea mays
  Clone ID: MRT4577_116654C.1
gtgcatatagccatctttgttttcaacaccgttcggtgcatgtgacaatgccaagaattacagggaggctgatgccagccatcacgccatgaccctcggtcccaatggttccgactgccacaaggccgcattgatcttagacaccattgttgaccctctgaaggacacctccggcc

SEQ ID NO: 18262 - DNA, 457 bp, Zea mays
  Clone ID: MRT4577_116655C.1
accagtatgcatcagggatgggtagccgcaaacgagagattcatgaaatatagcaggcccccatgtttgccgggtccaggggccgggagagcatttcttcaaaaacccaaacagcgcccctaaatactatctggaggaaaaaaacgagccgagagccctaaaacgccccaaaggagcatcacacaaaccacattgctacaaaatcccccacaacccaaaatatagcgaacaacctatggggcaaaaccgaacccccccgggggcagcaaacacaaccccaaatataaatgttttatcaggggaccgccccccccatgctgggggctcaaggccctcccgggccaatacaaaagccaagcgagggaatcccatgggcacacaggagcggtcccaaaataaaaacatttgggtccgccctcaggaggctcggagctttggtcaatacccccttgggtgg

SEQ ID NO: 18263 - DNA, 657 bp, Zea mays
  Clone ID: MRT4577_116656C.1
gcccctcacggccagaagaccgactggatcatgcacgagtaccgcctcgaggacgccgacgacgacgacgcccagggcggcaccagcgaggacggatgggtggtgtgccgcgtgttcaagaagaagtgcttcttcaagattggcggaggcgaagggagcaccaccagcagccagggcgcggatgccggcggccacctggccaccatgtcgccgccgctcggcggacaccacgacctggcgtacatgcacccgcacccgtactaccaccacgccgcctcctactactcccagatgcaggccccggggccgcatgccaccgcatactcgcaccacgtgcaggtccaggacctcctcaccaaccaccgacccacggacgacgacggcgccggcaccggctacgacttctccggcctgcccgtcgagaatcaacccggcggcggccttgacgtcggcagcagcgatggcgtcgccacagacgacggtggccagctggctggcgaaaggagggatcagaccaccggtacagccgcagatcatcagtggcaggcgatggatggtttcagcaacggcgggagcgccgaggtgcagcaaatgaccggcgcccaacgaggcgggggagatggatttgtggggttacggaaggtaaaaacttgatga

SEQ ID NO: 18264 - DNA, 143 bp, Zea mays
  Clone ID: MRT4577_116657C.1
gccacgcgttcggagtcgcgtcggtctgcttgccagtgggggcactctttgcgtagggggccagcaggacctaatctctttctcccggtatcccctacgtactacaggggactcacctctgcttccttctgtcatagtgcaga

SEQ ID NO: 18265 - DNA, 194 bp, Zea mays
  Clone ID: MRT4577_116658C.1
tgtaataggaccccagggcacgccccacgggagcggggcgatgaaaacggggtgagcaagccacccacgggaaacaagcgagaccgacaaacacgagcgaaggaagacgcgaacgtggatgctgcctcaccagctggtacagacgccaccccggctcaggcagcgcgagacgccgagcagccatggcgcgcgac

SEQ ID NO: 18266 - DNA, 393 bp, Zea mays
  Clone ID: MRT4577_116659C.1
tactgaagcaggacagcggaaccagttcttgcgcggccttctgatctccgtcctctgctcagataaagctctcggagctcctgcgcgaaacctccgacgctcaccgtcgaccaagacgccgccgcctgtagcaggtaagaaccgcgtgttacctctctctctctctctctcgttcttgtttatgctcttcttcagcgcacctatttcgtgctccggagcttcttttgtgttggtcctatgtgtcttcttggatacagaaacattatctcggatgggtccagcagtgtccttgccggctgcttctgcttctgatctttatcacttcaagcatagatttcatggcgctggaatctctcttccccgatatcatccgaatgacaaaataggaggagc

SEQ ID NO: 18267 - DNA, 432 bp, Zea mays
  Clone ID: MRT4577_11665C.1
cccacgcgtccgcccacgcgtccgatttgaatgcccatgagtcaaaagccactatgagtcggacgggcgcaacttgttatatatctagggatgggatgtcgtttggcatgtactccattttgaaagtgtccaagtgagactttatacatatatgcagttgagagatggaattaataataagagcaaacgcaaaaaaaaagaaaaaaaaaaaaaaaaaaaaaaaaaaaaataacaaaatacaaaaagataaaaaaaaaagaggacatctctgataaagaaacaaaaagaacatgaaaatgcaaaaaaaaaaggggggggcccccaatttttccttatcttttcctttgggaaacggggccccccccccttggggcaccaaaatttttgatttgggcccccccaaaattttttggaaagcccccttttgggggc

SEQ ID NO: 18268 - DNA, 852 bp, Zea mays
  Clone ID: MRT4577_116660C.1
taggcgccatccttgatgttgatcaaggcatcgtgctttcccttctcgatgataaccccattcctcacgaccgcaatcaaatctgcattttgtattgttgacagacggtgagcgacgatcactgttgtccggttcaccatcaccctgtccagtgcgtcctggacgatccgctcggactcagcatccaggccatccaggtgctagtctctgttcctctatttgatggcatacataattgcttatacctaagcggagaaatgttacaaatagcaaggaccagatgtaaatgcaaggagctggtccttaagataactttttataatctataaatcttaatatgtatatgtagcttcgaacatagaaaccaaatagatgatggttatgctataactcatgatgttcttgctgtcgtttcccccctttatagcttatatgcaagtaatgataaccctgaagtcccgaaccatggtttctgctcgttaataaaggatgaacgcggcagggattgtctccgatgtcccttcctatttttgtttcccccatcaacagctcgcggccgatggcaggcgtccgcgccaacgggggcggtaccggtgctcgtcgacggcgcggctaggttgtgaccgccagatcttagcgccggaggccgccatccgatcaccggtgcccagttctccggatgtccggatagaacctgacctgaagaagaacagcgcgcggcgtttcgcggatctctgtctccctctcccgtgcacaacgggcatagatagatggagttcggaggggagaaatttgtgctggtgccgaggggcgttgacattgtccgccttgtcgaggcggagttcccggccg

SEQ ID NO: 18269 - DNA, 932 bp, Zea mays
  Clone ID: MRT4577_116661C.1
actcctatgggcgattgggttcctcgaggccggccgggctctttcagggccttgaaatctcgccctcgttgcggtcgtccacatccttttctctcctcctcgccggcccaacctgattgttcttcaaccaagaggaagaaaggaaggaagggaccggaagcatcagccatgtcgaactcggcgtcgggaatggccgtctgtgatgaatgcaagctcaagttccaggagctcaaggcaaagaggagcttccgcttcatcgtgttcaagatcaacgagaacgtgcagcaggtggtggtggacaggctgggggggccaggagagagctacgacgccttcacggcctgcttccccgccaacgagtgccgctacgccgtgttcgattttgacttcgtcactgacgagaactgccagaagagcaagatcttctttatctcttgggccccggatacatcgagggtgagaagcaagatgctgtacgcgagctccaaggaccggttcaagagggagctggatggcattcaggtggagctacaagcaaccgacccgagcgaaatgagcatggacatcgtcaagtcgcgagccctctgaaacagccccggccgctgcacctgcacgctgcaggggcgcatcggctcctgcatgcccgtgggtcgtcgaatccttgcttgtgtgttgggaacggtcttgtgttttcgtgtccttgttttcctggaagcaaaagccctgcattctgtatgagactgtatgccattttccatctttttctctccccatatctctgccctagtcctgctaccgctgtagactagaacttatttggtgtttgatctcgtggcattgtcgagtcttttatgtgtctatcgacgcggccgcggcaatgcaacttgtgtatgttacaaaatgaagaggggtctagggttgatttaaagaaa

SEQ ID NO: 18270 - DNA, 365 bp, Zea mays
  Clone ID: MRT4577_116662C.1
gtacaagcttttttttttttttttttttttctttttttgctttttttttttttttttttatttttttttttttttttttattaaattttttttattgttaataatgtagtaaacgcaaagggatgtaaaataaaaaatgggaacctggcgggggggggctcggaaaggggaaatccaccaaactggggggcgttactaggggaaccaggctggggcccaaacttggcgaaatcatgggcctggctgtttcctgggggaaaatgttttccccttacaatgccccacaatatacaagccggaagggttaagaggttaaacctgggggggctaatgagggaaataactcaaaaaaaaagggggggggt

SEQ ID NO: 18271 - DNA, 384 bp, Zea mays
  Clone ID: MRT4577_116663C.1
tcgtttctccctgtagccgccgccatggtgatgttctaacatggcggctccgatctgggatcctccggagtgggcgggcacggcacaactcacttgagcgcgcggaagagcctatgtcggcggtgcgcgaactcatgttgtacgttatacgagcgtgggcttctaacttatatgtttgtagtttgtacaatttcgatcattgttgcgtagagcatttaatataattttattttaattattctaattataattttttaaattattttatcatatataattattatatatatattttatctatttgttatatttattgtatttatattctatgtattaataatgttgaacttatttttatattctttatatattcattttatctat

SEQ ID NO: 18272 - DNA, 304 bp, Zea mays
  Clone ID: MRT4577_116664C.1
aatttcctttctcaagattatactttatcacgattccccacatatggggggaaaccagtttctacgcccccttaacaacttctgcccacttccagaaaaccgacagttatgggtcactgaaaaaaaataatttttatcccttccctgtgtttgcctccgtccatattctggtccacaatgacttagaaaccgaacaacccacttttaaattgctaactaaaaagtagcatcttgtcgtccagcaacgcaactgaactagttctccaaaaataagcttctcaaggcaatccggcgaaagaccaac

SEQ ID NO: 18273 - DNA, 521 bp, Zea mays
  unsure (1)..(521): unsure at all n locations
  Clone ID: MRT4577_116665C.1
cctttttgagaagnggcatattaaatggtttgaggggtatatgttttttatatcaataaagtcctaatccaacttaaccttgtgcaattctaacctttactagtttactatttaagaaaaaatatccactaacaacacactatttgattttttattttcaatacacaatttattattaggtggggggcataagaactttatcaaatgaggcgagtttgtctaatacttatgtctattgtgcagattatagacaaaatatgttattgtcatttactcatttgttttcattatcacataggcacacactagccagtaattcattaattaatttgatatggttttcaataacatagacacttgttcacccttttaattctaccatggagcagtacataaaggagctagtgccagagcatttcacaattagaaccaataaaaaggagaaaactgcaggagaaatctttagagaatcacataaaggacgtcgtaaaagagctagtggggtgggctcaagggacacc

SEQ ID NO: 18274 - DNA, 300 bp, Zea mays
  Clone ID: MRT4577_116666C.1
cagaggcgatggctcccttgcatattacttttccaatttatatctgaccaatctatttaggctacgtggacttactctcgaggaaacatgtatccacaacaagcaagtcaaaaacccatcactggcactaccgatgaacagcaattgtctcaagctacctttaccctaaatttagctatgacctgaacgtccacatggtttacactatctacacacttactactgataatatgataaggttgatacttacacatctaacaagaatagcatctgtgaagaaatcgatctttgtgaagattt

SEQ ID NO: 18275 - DNA, 144 bp, Zea mays
  Clone ID: MRT4577_116667C.1
gtaaagcggcaaaaggggattattcagagtaccgaaaaccttctcccgggatcatgcacggcggcacccccaggccaggggcacctctggtggggcagaaggtgattgaattactcagatatgaagatcatcatctaggttttg

SEQ ID NO: 18276 - DNA, 2002 bp, Zea mays
  Clone ID: MRT4577_116668C.1
attcttttccgtcctctgaattctcctggtcgttgggctgcctgtgatcggcttatcccctcctcatcccattctcaccgagcttctgccaatctgcgttcgcggcggcgtttcttttggcctcgcaagcggcggaggaggagagaattccggggttttatcgcaaggcaggacaacaccaatttgatgctttctgaaactagacaatacaacctgatggtaaaatgatacagagttatgacacggaaaatggtagaagacaagagttcatcacaagacacggtacagaaaagtgggcatgctgtacttgggaatgtttcttatgacaaggatgttgtggagataaaactggcagacgctattgattccgataactacgtcggtaattttgtcaaggatgtctgtgtcgatgacggagcactgcttcatcggacggcatcagaagaaaaaccagtagacagaaggtcatccctagatctcagttgccaaatgatcggtgcagatagtgacataagctactacgggaaggaagatcattctagaacatctgcgcacgaactaaaaccagaagcagttgcacttgcacctctttgtaacatcggtgcagatagtggcagagagtatgatcttgaagatcggaccggtactggttccatcgcaggcagtcctggtgagaagaagataagtttgcaagagctgcttctccttgaaagtgcagaagagtcccgaaatacaagcgcagtaaactccgagagcagtgaaaagcataaatgtcctctgaatgaagaagaagctgcacagacttccaaggacggcgatcctgacgctgagactgttttgtccaacacctttgagcatattagtgatggcatatcaagtaaggagaaaggcagtggttgcccagcgacgatggctagagaccaggttgatacagctacggcactagatgtgcgagagccacagaaacttgatcggtacaacccttccgttgatcgtcggtcacgagagtacacatcggtgcctgagtgctctataccaggaatcacagatgctgcctcctccacgggttccatctgctcttttcacaacgcgacgggcagcaccgcaaccgcaggcttgggtgaaggtgaaacacttgaaccaggggcgggtactctcagcgcaggcagctcagacatcggttcatctgaaaagagccacgacaaccacagcggaagtatgtttagcaagccaatcgctggtgcatatgggaatgggaagaagcaagaaaaacatggtcagatggatgaggagcacggcataggcacagcagacgacgcagccgccagtacgagttctgcttctaccctcgcgcaggatggctctgcgcctgcggtccaagaaaccgtgcctggtagtagtagtagtagttcgagaccggcagctcgcgccggtgacgacccggacctctctggtccccagtataatgtcaggcccggtgtcgatgtcgggtcacatagcatattctggcaacgtctctctccggtcagatagcagcacgactagcacccagtcctttgcatttccagtgttgcagagggagtggaccagcagccccgtcaggatggcgaaggcagagcgcaggcgcagcggtggacggcatcgcgtctggaggaaagggatcatctgctgtaaattctgatcgaccatggcgggcggccctggcatcttatttgaaatccagccacctcctttcttgacacctccttcctagtggcttgaccgttgagtgacaaggtgtgtatagctgtagcgtagtgacggttctttttgttttgttttgttttgttttgtttttgtttcctccgagaatgtgcttaagtgcccacgtttttcatttgctattgttataaggcagtagagtagtagtgatcacgcttggcagaggtgattagttttgtacatccttttggtggatttaaattaaattagatgcagcgaaaattcgttcccctgttggttc

SEQ ID NO: 18277 - DNA, 430 bp, Zea mays
  Clone ID: MRT4577_116669C.1
ctagtttagatcgcgagcggcccccctttttttttttttttttagagcaaaacaaaactcattgcattatctggtaagtgaaacaacaatacaaccatcgctgttcaagagtttcaatgaaaatgccaccacttggcatatcagttttaagcagtagaatagcaataacctaaggatggcacaggtaccgagaagagtgagaagaaaaaaagaagaagaagaagagccgagatacagaggaggcacaataggtgtagtttatgttggctagctacccttgtttaaagatgctgggaagtttgagatgcaaatgcctttcaaatgctggggaagtttgagatgcctttcttgggtgccttgtatctggtgccactgcttttcccgacgtaccctccttagggtattgcttttctaccgtttaaaaccgata

SEQ ID NO: 18278 - DNA, 714 bp, Zea mays
  Clone ID: MRT4577_11666C.1
gcaccgcgccggcgtacgaggtggcttccggcccacagccgcgccggcccatccggtcgtcgcacctggcctacgaggtggcggcgtcggccgcgtcctacgtccacgcgcgcgcgcgcggcctgctctcgttcggcgcgccgacgcggcagcagcagcaggcagcgggtcagggcaggctgtacaactcgggcgtggccgcgtacatggccgcgtcgacggtgacggcggtggtggccgccgaggacgaggcgcggcaggaggcggcgcgcgacctgcgctcgccgctgtcgtcgccgtgcgagtggttcgtgtgcgacgaggcggacgcgcggacgcggtgcctcgtcatccagggctccgactcgctggcgtcgtggcaggccaacctcctgttcgagcccaccgagttcgagggcacgggcgtgctggtgcaccggggcatctacgaggcggccaagggcatctacgagcaggtggtgccggaggtcgaggcgcacctgcggagggcgcgcgcggggcgcgcgccgcggctgcggctcacgggccactcgctcggcggcagcctcgcggtgctggtcagcctgatgctgctggcgcgcggcgtggtgacgcccgaggcgctgcacccggtggtcaccttcggggcgccgtccgtgttctgcggcggtacccgcgtcctggaggcgctgggcgtcgttgatgtcgcacgtc

SEQ ID NO: 18279 - DNA, 3280 bp, Zea mays
  Clone ID: MRT4577_116670C.1
aaaaagatcatgcaacagatggtgacaagtacctcgagtgggcagctcaaatggccctcagcacacaaacaggagttccatggataatgtgcaagcagtcttcagctcctggtgaagtgatccctacatgcaatggaaggcattgtggagacacatggacacttcgcgacaaaaacaagcctatgctttggactgagaattggactcaacaattcagagcatatggcgatcaagtagctatgcgttcagctgaggacattgcatatgctgtgttacgattttttgcaaagggtgggtcattggttaactactacatgtacaacaccgcatcgacagcacgcgcgcagccactgccaagcgcagttgtctctgatgtctggtcacgcctgacgccgccgctatcacgcgccaccctcctgccgacgaacgcggcctcctcctcattgccgagcgcagcccctcacttctctcctggctgcgccaccatgatgccgccacggaatgcgcagagccgccgaagagagcagagtcccagcgagaaacgcaggagctcttccttccacctctggcgaacctccaaggaaactcgacgcccagacctgctcgcgcacagggagcatctttgctcccgcggctgctcgccggcctccctgtctcctccccagttcttcctctcacagccgtgcagcgccctcttctctacagtggccgctgctcctctcagatgccatgcggaggagctctccaggacgccgcgcctcctccctgctacacgcgcctgtcgaagacgaacttcccgtggtctgggaggccgcgcccgcccagatccgccggaatgagcgaaaggagccccgccgccgctgtcatcacaggccgcacggtattccggtggcctgctcaggcagcggctaaggtttgtagggacgctggggtcgcccagggcggggaccaccaagcgccatccgattgaatcattaggggctcatcccatctaaatatagaaggcggatgcactaaggattaatcactacgtctgatcttggtgggctaccaaaaataaggatcaggcaaagatcagttgaaaccgggctagaatgaccggatagccacttggtagaaaagatattttgatgagcctgattgagatgatccctttttacttgataagggaggaacaagttttggaatgattgtggcttatggtgaggtagctgggaactattaggaagcttccatggatgttgatggtatgtataaggaaccaaaatttgggcatctcagggacttgcacaatgtaataaggtcatatcagaaagcattcctcttggggaagcattcgtctgagatattgggtcatgggtatgaggcacacatctttgagttgcctgaagaaaatctttgcctctctttcctttccaacaataacacgggcgaagacggaacagtgatcttccgaggggataagcactatgtgcctagccgttctgtctccattcttgctgggtgcaagaacgtagtttacaataccaagagagtgtttgtacaacacagtgaaaggtcattccatacctcagatgtaacaagcaagaataaccagtgggagatgttctcagaaacgatcccgaagtaccgtgatactaaagtcaggacaaaggaacccctagagcaatataaccaaaccaaggacgatactgactacttatggtacaccacaagctttcgcttggagtcagacgatttgccttttagaaatgacatccggcctgtgcttcaggtcaaaagtagtgcacacgcaatgatgggatttgccaatgatgctttcgtaggatgcgcgcgcggaagcaagcaggtgaagggtttcatgtttgaaaaacccgttgatctgaaagtaggtgtgaaccatgttgtattgctgtcgtcaactatgggaatgaaggacagtggtggtgaacttgctgaagtaaagggtggcattcaggagtgcctaatccagggtctgaacactgggacgttggatttacaagtcaatggctggggccataaggctgcactggaaggtgaggacaaggagatctactcagaaaaaggtgtgggcaaagttcagtggaaacctgccgagaacggccgggcagccacttggtataagagatacttcgatgagccagatggagatgatcccgttgtacttgacatgagctcaatggacaaaggaatgatttttgtgaatggtgaaggcgtgggtagatactgggtctcataccgaactcttgctggaactccttctcaagcactataccatattccgcgtcctttcttgaaatccaaggacaaccttttggttgtcttcgaggaggagatgggcaagccggatggcatcctcgtgcagacggtgacgagagacgacatatgtctgttcatctcggagcacaacccgggacagataaagacgtgggatacggatggtgacaaaatcaaactcattgcagaggatcacagcaggcggggcaccttgatgtgcccccctgagaagacaatccaagaagtcgtctttgccagcttcggcaacccagagggcatgtgcggcaacttcactgtaggcacttgccacactcccaatgcaaagcagatcgttgagaaggaatgcctcggcaagccatcctgcatgctgccggtggatcacacggtgtacggcgcggacatcaactgccaatcaacgactgctacactgggggtgcaggtgagatgcggagggggcaagaagggtgcctgagaataacaagatggatgctgctaattaatggacgtttcagcttgtttgtttgttcatcccttcggtttggcactgatgcttacattgttctgacattgcaattgaaatgtgattggaacattcttgatcgggaactaacatgaaatgagtggagggtagatgctgatcagaccaaagatgtgtatttcccccctctttccttctgtctcgtgttgtttcatgtaaccatcacaatatatatagatgttgaataatcatgaccagtagtatagatcttagagcatccctaacttttgaataaaagactcttggagattggagctgggctaaaaaaaaaaaaaaaaaaaaaaactcgagagtcttctaggtggccccctttggaatccggggattattccgtttgctgtatttttttctgtgaaaatgaactgattcctgtcaattttctatatgatttatgattcatctgaaattcctgtataaaaaacacaatttttattattttaattt

SEQ ID NO: 18280 - DNA, 525 bp, Zea mays
  Clone ID: MRT4577_116671C.1
tcccaatgcaaagcagatcgttgagaaggaatgcctcggcaagccatcctgcatgctgccggtggatcacacagtgtacggcgcggacatcaactgccaatcaacgactgccacgctaggggtgcaggggagatgcggaggcggcaagaagggtgcctgagaacaagacggatgctgctaattgacgtttcagctcgtttgtttgttcgtcccttcggtttggcactgatgcttatgacccattggtctgccattgcaattgaaatgtggttggaacgtgcttgatcgggaactaacatgaaatgagtgaagggtagatgctgatctgaaaaatatgtgtgttcccccctctttccttccatgtcgtgttgttgcaggtaaccgtcacaatatatataggtggccccctttggaatccggggattattccgtttgctgtatttttttctgtgaaaatgaactgattcctgtcaattttctatatgatttatgattcatctgaaattcctgagaccgatgttgaat

SEQ ID NO: 18281 - DNA, 2426 bp, Zea mays
  Clone ID: MRT4577_116672C.1
gctcaaatggccctcagcacacaaacaggagttccatggataatgtgcaagcagtcttcagctcctggtgaagtgatccctacatgcaatggaaggcattgtggagacacatggacacttcgcgacaaaaacaagcctatgctttggactgagaattggactcaacaattcagagcatatggcgatcaagtagctatgcgttcagctgaggacattgcatatgctgtgttacgattttttgcaaagggtgggtcattggttaactactacagttaactactacatgtatcacggaggaacaaattttggaaggactggggcttcttatgtgctgactgggtactatgatgaagctcccatggatgaatatggtcagaccgattcagttgaccattatatttctgtattatttttatcttcatcatgtagttcttcttgacataaggagcacctcatgtagtccatgatttttcataggtatgtacaaggagcccaaatttgggcatctcagggacttgcacaatgtaataaggtcatatcagaaagcattcctcttggggaagcattcgtctgagatattgggtcatgggcacacatctttgagttgcctgaagaaaatctttgcctctctttcctttccaacaataacacgggcgaagatggaacagtaatcttccgaggggagaagcactacgtgcctagccgttcagtctccattcttgcagggtgcaagaacgtggtttacaataccaagagggtgtttgtacaacacaatgaaaggtcataccatacctcagaggtaacaagcaagaataaccaatgggagatgtactcagaaaaagtcccgaagtaccgtgatactaaagtcaggatgaaggaacccctggagcaatttaaccaaaccaaggacgctagtgattacttatggtacaccacaagctttcgcttggagtcagacgatttgccttttagaaatgacatccggcctgtgcttcaggtcaaaagtagtgcacactcaatgatgggatttgccaatgatgctttcgtaggatgcgcacgcggaagcaagcaggtgaagggtttcatgtttgaaaaacccgttgatctgaaagtaggtgtgaaccatgttgtattgttgtcgtcaactatgggaatgaaggtaaaaattcgtcggaactgtggaatgtgtttggaatgtaagatgactgattatactgtcctagccgatatccaggcgaaaaaaatatggctgtattgacgcaagctacaaacactttattttggaaaggtggacatatataaatatcataaatagaagggtggcccatgcgctctgctaatgcaataatccttcccatcagctctaaatttgcatgtttcactatcttctgcaggacagtggtggtgaacttgctgaagtaaagagtggcattcaggagtgcctaatccagggtctgaacactgggacgttggatttacaagtcaatggctggggccataaggctgcactggaaggtgaggacaaggagatctactcagaaaaaggtgtgggcaaagttcagtggaaacctgccgagaacggccgggcagccacttggtataagagatacttcgatgagccagatggagatgatcccgttgtacttgacatgagctcaatggacaaaggaatgatttttgtgaatggtgaaggcgtgggtagatactgggtctcataccgaactcttgctggaactccttctcaagcactataccatattccgcgtcctttcttgaaatccaaggacaaccttttggttgtcttcgaggaggagatgggcaagccggatggcatcctcgtgcagacggtgacgagagacgacatatgtctgttcatctcggagcacaacccgggacagataaagacgtgggatacggatggtgacaaaatcaaactcattgcagaggatcacagcaggcggggcaccttgatgtgcccccctgagaagacaatccaagaagtcgtctttgccagcttcggcaacccagagggcatgtgcggcaacttcactgtaggcacttgccacactcccaatgcaaagcagatcgttgagaaggaatgcctcggcaagccatcctgcatgctgccggtggatcacacggtgtacggcgcggacatcaactgccaatcaacgactgctacactgggggtgcaggtgagatgcggagggggcaagaagggtgcctgagaataacaagatggatgctgctaattaatggacgtttcagcttgtttgtttgttcatcccttcggtttggcactgatgcttacattgttctgacattgcaattgaaatgtgattggaacattcttgatcgggaactaacatgaaatgagtggagggtagatgctgatcagaccaaaaaaaaaaaaaaaaaggccccta

SEQ ID NO: 18282 - DNA, 558 bp, Zea mays
  Clone ID: MRT4577_116673C.1
tctcctgcctgcccttcacctcctgtccaccctccccctgtcgttcccgcaattccggctcacatgaccgtccgggccgcggccgtgctggtggccaccgccgcgctcgcgctcctgctcccgggatgggcggcggcggagtggggcctcacgaagaaaggcagcgtcgtcacctacgatgggcgctctctcataccgaactcttgctggaactccttctcaagcagtgtaccatatcccgcgtcctttcttgaaatccaaggacaaccttttggttatcttcgaggaggagatgggcaagccggacggcatcctcgtgcagaccgtgacgagagacgacatatgcctgtttatctcggagcacaacccgggacagataaagacgtgggacacggatggtgacaagatcaagctcattgcagaggatcacagcaggcggggcaccttgacgtgcccccctgagaagacaatccaggaaagttgtctttgccagcttcggcaacccggacggcatgtgcggcaacttcactgtaggcacttgccacgctcccaatgcaa

SEQ ID NO: 18283 - DNA, 343 bp, Zea mays
  Clone ID: MRT4577_116674C.1
tgatatcttttaatcacttgttgtacagtaccaagaaaattgattcgggggggcaattctatgacaagcttcttgtcaatcaacagaatgagaactacctgatattcgatgatcgatcacataatctaaaagacaactgtgtctacaatactatgaccccttctggacgaatctaacaggatgagatcaacctattgacagcattcacaatcattaccaagtctgcatggatcttcaccagtaagcttgtgacttcatttgaagaccattcgctctggcataattattgctgcaccaccgatagttacatcatgagcgatcagtatctcagtatctagtactg

SEQ ID NO: 18284 - DNA, 340 bp, Zea mays
  Clone ID: MRT4577_116675C.1
ggcgccgacgccgattttctgctccatcccgcatccaccgtcagcatgtttctcaccatgacgatcttacgacccgcggaggtaacaccttcctcgccggagggcgcgcctgttccacatgctagtacacactctagggcatcacacttgggatccactgccaacgggttgaaaacaaaggactgctgacgtccgttgccgttgagaaacgcgtgacctcgccactgctggaaccaagcagtggggaacaaatcagggaaattgatgagcacatagtctgggccatgagggcgcttattggtgatgctagaacagtagtgcagcctgcaagcggtgaaac

SEQ ID NO: 18285 - DNA, 296 bp, Zea mays
  Clone ID: MRT4577_116676C.1
aaaaaacataaataaaaaaaaataaactaaaactacctaaaaataaaaacaagccagaagcggttttaccaggcgaggcgtgcaataaccttatcctcaagttctgcgaagcgcctttccaagtacggcgtctccaaggagctgtcccacgcctgaataccctgatccatccatttttgtccacctcgctgtgtacgtatgtgtaacatatggttttcatctacctgttagagccccgagagcttcttaagcataccagcgtgattacagaataacagcattcaatcaaagccaag

SEQ ID NO: 18286 - DNA, 862 bp, Zea mays
  Clone ID: MRT4577_116677C.1
ccgggttgacttggcacaaatgttcatgatgtctaaactgcagagtatcgtgtaacaattaacaatgtcaggacacggttcgactttgtgcttccttgcatacatatgcgtaacacatcaaatgtcaagctgtgtagatgtttctgagattaccttggcacaaatcacatagtctggtgctgtagaatatatattccataactatgtgaattagttgtttctctatatatgaaattaattagtgagatatgtttgagctatgagtctacaacatgcttaaataagtacataactatgataacagaaagaccaaacatagccttagtatttcttgtctagttttgctatatgtgtaaatgtgaattacttcttttgcagaatactcacctatgatctgatcaaccctcttactgcaacatgttggaatcatgattcttcttctttactgactacctgtttctttgcagtggttcatcgctcagaaataaacagatgttcaatttaatatgtgaacttccagaaacagtagccagaactttggttccaaggatgagagttgtaaaaggaagtggaaaggcaatcaattacttaacaccaccaaggatcttgcttgctctggttactgcatgggttcggcggggtagatggtttgacgacgaggtacacagatctacttattttatactcaatactaacgtacacgtaggaatgcaatattgtcagttgtcctaggtttatcttttatttagtaatatcaatggttagtagtagacgtgttttgaatattttttgcactataccattgctccttagagctttattgctgccagctgcttgtgccgtcgtaactatacagcgattg

SEQ ID NO: 18287 - DNA, 275 bp, Zea mays
  Clone ID: MRT4577_116678C.1
aaaaaaaaaaactttttttccaatcccccgataaggggtaaaaaccccgttgggccttttaactccaataataaaaaaaaagctttttttaacaagcaaccggggggccgggttgctttttaataaaagggaaagctgcagagggtcctttttttctttaaacaagttactttttaaccggtccataacatggttgaaacatttaaatccggggatccttgtttccttgttcccctgccatcgaaggggtgcccaaagccccccctccttttttt

SEQ ID NO: 18288 - DNA, 1476 bp, Zea mays
  unsure (1)..(1476): unsure at all n locations
  Clone ID: MRT4577_116679C.1
ccggnngtcgagccggcctgtccgggtctgggccgccgccacaaaaggaaacgagaagacaaggcctccgcccccgatgcctccgctcctcacctcacccgcctccctcccctccgcctcccctctcctcgcctcctgcatcggcgctctccaccgccccggccccttcctccaccaccgcgccgccgcctcggtccacttcctcgcgccgcacaggaagacccgaccgccccccgcgatgagctggcttgggaagctgggcctgagcgggcttggaggcagcccgcgcgcgtcggaggcgtcggcagcgctggcgcaggggcccgacgaggaccagcccgcgccggggaacgagttcgcgcaattcggcgccggctgcttctggggcgtggagctcgcgttccagcgcgtgccgggagtcacccgcacggaggtcggctacagccagggcaacatccacgatccgacctacgaggacgtctgcaccggcaccacaaaccacaacgaggtcgtccgcgtgcagtacgacccggccgcctgcaagtacgacgacctcctcgacaccttctgggcgcgccacgaccccactactcccaaccgacagggcaatgatgttggaacacagtataggtcagggatatactactataacccagagcaggagaaggcggcaagagagtccctggagaagcagcagaagcttctgaaccggaagatcgtcaccgagatcgttccagcgaagaggttctatagagcagaagagtaccatcagcagtacctggagaagggcggccgcttcggcttcgggcaatctgcagccaagggctgcaatgaccccatccgatgctacggatgagccaaatggacctctacgtgcatggtgtgaatcgtaactgaataagggatgcatcaaagccagattttatactgctttcctaggtttgttttgccactattgaacggctgtaagagtttagctatatactaccatggtactccaatcatcgtgtacaaaaccatattgtattacatgcaagtgcgagtgagatttaagcgtaaacagattgttgtagaattcgtacgaattttacagagcagaaacaatgggatgcagggattgccagtgaaaaaaaaaaaaaaaaaaaaaaaaaaaaaaaaaaaaaaaaaaaaaaaaaaaaaaagaaagaaaaaaaaaaaaagggtgggggggggggagaagggacaagggggaaaaaaaaagaaaaaaaaaacaaaaaaaaaaaaaaaaagcgcggccggggggcaaaaagggggccccccttaagaagggtttaatcccccccttgggggaaaattggggcgggggggcccccgtggaaatgggttttccggggggaaattttcacacctggcaaaccggaagcaaaaattgtaacgcctggtgaaaaaaataagggcggggaccccaatagagggggcgacgctccttgactgttt

SEQ ID NO: 18289 - DNA, 226 bp, Zea mays
  Clone ID: MRT4577_11667C.1
gtccgcgaggatctacctttcttcatagagttgctggttgagtacgcgaaagcgatggaagagctggggtaaattctgctggagcttatctcccggagcctgaagctgaggcccgaccggctgcacagcttcttcaaggaccatacgaccttcatccggctgaaccactacccttcttgccctagcccctacctggccctcggcgtgtggcggcacataggactcc

SEQ ID NO: 18290 - DNA, 317 bp, Zea mays
  Clone ID: MRT4577_116681C.1
tcagctacatttatacatatttgagcggcacttcactcctccactcctagatctccaggggtccatagttttttcctctctctaaaaatctattgattcgaagagaaatcccaaaaggttgctcttaaggagggggaatgatgagatgttggaagttcacaaattgtgtctttctctaaaagctggtaaccttaatcctagatcaacatgagaaagggactacaggtacagtcctttaccaccaaagggctactcgagaaatacgcacactccaattcctcatgatcattatagtggtcgggacattggatcttcta

SEQ ID NO: 18291 - DNA, 264 bp, Zea mays
  Clone ID: MRT4577_116682C.1
tgtggtgggggacacatatcacctcattcaaatgatggtcctggactcacgtctgcttctgatgattgcatcattacgataagctcatctgaagggcagtcaccagaggtttatcttcctggtcttgttgttcatgttgttccagtaaagaaaggtgcttctccattgcagaatacaattgtaacacgccaaaagaacaagagttacaaagcgctaattgctcgtcgaagagattttatggaccttgttgtgaaacatcacatg

SEQ ID NO: 18292 - DNA, 570 bp, Zea mays
  unsure (1)..(570): unsure at all n locations
  Clone ID: MRT4577_116683C.1
ataccataatactttcctttgatagattcttgacgttatttcctacctgtaacacatctacctttttttctttctgaactgatgtattttgatgtatagactctatgggtctgcattgtcttttttacctgtatttcacttaaaatgaaatgacgttgcagtgtgagtgttggcttaaatgttgattgtaaataaaaccacactagactaatgcctctttggaagtggtcctggggacatgtgtagtctttatatctcggccatttaaagagctgtctatatgtgcactaattttcttcatgatgtttttgttccatcaaagattagtgtggatttgagggttgaggctatttagttagattgcatttattttttcttttttggcttcaattgtaaataatataaacatatttttttctcacagttagatttgtagttcaggatctaaataaagcgtcatatctactttnaatgctttagttatgatcgagttttcctttacgtttcctttactaagcttgaattatcttcccttctagcaataaaatcctgaagcaacatatagcacct

SEQ ID NO: 18293 - DNA, 698 bp, Zea mays
  unsure (1)..(698): unsure at all n locations
  Clone ID: MRT4577_116684C.1
gccggccgggctcaaactagggggtctccggcccgtcgcagccccactgccgtgcgccgccaccctgccggcgcacccggccccgccagcgcgttcgaggccgacgcgcgccgccacctgccgcgtcacgctccggccattcctgccccctcaccattctgccgcctccaccgcagcagccgcggcgatgcgacccgcatcctcctcctcccgcttctcggccacaacatctccgtctcgctgccgacctgaacaacgaggcacactccattgttggccatgcttgatctcctcatcctgctgcagtgctgctgccgtggaagggaggccagtgcgggaacaacccagactgcgagcgccttcgcgccgagctccgccggatgccgccgccaaacggccgagccgtgctgctcttccgcaatcccgtgtggctgctctgcacttcttgatgcatttttgttgacatggtttgcgtttcattcaaacttagaatgcttcttaatttcttttcgttgcattgaaaatatccagcggtttattggtgtttgggctaataaatagataaactgttcacctatggttcatttatggaaaannnnnnnnnnnnnnnnnnnnnnnnnnnnnnnannnannnnnnggaaaaaaaaaaaaaaaaaagggcccctagggccccggccgctcaaaaacaagggaatccc

SEQ ID NO: 18294 - DNA, 1665 bp, Zea mays
  Clone ID: MRT4577_116685C.1
caattttgctgcgttgttttgtttgccgcgcccacagaaataggcgccagttcatccgcttccattcctagttctcaccacccagaagtccacctccttgttgccttcctccaatcccaaatctcacctccttccagttccagctatcgctgctcgtgttggctcgcctcttcctccattcagtggctccttagatcggctcagggacacaccagctgatcgtgtcggcgccgaatctagtggcaatttctcgctattgttgccccggagcagtggtttggatccaagaaagcggccgaccttcttggttgtatatcctcccgcaatggcggcgctcctggagctgttcctgggctcctcgtccgcaccggtggactgggaggcagaggcctacccggcgtacggggacttcgccgtgctacccttactcgtcgcctttttccccgccgtccggttcctcctcgaccgactcgtcttcgaggttttagcacggaaacttatatttggaaaagaacatgataagcttgctgaaacagatgacagtagaaagaaaatcaataaatttaaggaatcagcatggaagtttgtttattttctttctggagaactgctttcactatctgtaacatacaatgagccatggtttaagaacaccagatacttttggataggccctggtgaccagatctggcctgatcaaatgataaaactgaagctcaaagctgtctacatgtatgctgctggattttacacatattcaattttcgctcttctgttctgggaaacaagacgttcggactttggagtatcaatgtcccaccatatagcaactgttgttctgattgttctttcctacattttccgatttgctcgtgttggctctgttgttttagcccttcatgatgcaagtaatatattcctggagattgggaagatggccaagtacagtagctgcgagtggctagcagttgtggcatttcttcttttcgtggcatcgtggatacttctccggcttgttatattccctttctggatcctaagaagcacaagctatgaagtactgctgaccctggacaaggagaaacatcagttttatggccccatatactattatgttttcaactgtcttctgttctcactcctagttcttcacatatattggtgggtactgatatggcggatgctagttaagcagattcaatcgaaagggcatgttggtgatgatgttcgatccgattctgaaggcgaagaggaacatgaagattaactttttaggttgaatgcttaactgaagaactatgttgtgtgatacctacagcaaggcacaccttctgaaaccaccttttccttctaaagaagatttgcagatattagattttattagatcatatcattctttcagcatcaaagatgacaactatcatttgcgagttgccactgaagccgtctgtgctcttggatgtttgtatgaaaacagaagtgcattgtatttttttcccagtcaagcgtcatttgtaaaagatacagaataatcgcttgttcatccattcttgtaactagacagttgatttgatttcaaatcatgtaatttgctacatcagcttagttgattacttggtgtatcatccattatgatgtaaatgggagtcttgggaagttcccaac

SEQ ID NO: 18295 - DNA, 965 bp, Zea mays
  Clone ID: MRT4577_116686C.1
gataaaactgaagctcaaagctgtctacatgtatgctgctggattttacacatattcaattttcgctctcctgttctgggaaacaagacgttcggactttggagtatcaatgtcccaccatatagcaactgttgttctgattattctttcctacattttccgattcgctcgtgttggcactgttgttttagcccttcatgatgcaagtgatatattcctagagattgggaagatggccaagtacagtagctgcgagtggctagcagttatggcatttcttctttttgtggcatcgtggatacttcttcggctcgttatgttccctttctggatcctaagaagcacaagctatgaagtgctgctgaccttggacagggagaagcatcgattttatggccccatatactactatgttttcaactgtcttctgttctcactcctagttcttcacatatattggtgggtactgatatggcggatgctagttaaacagattcaatcgaaagggcgtgttggtgatgatgttcgatccgattctgaaggcgaagatgagcatgaagattaactttttaggttgaatgattaactgaagaactacattgtgtgatacctgcagcaaggcacaccttctgaacctttttttttttcttttacagaagatatccagatattgtaattcattaggtcatatcattcgttcagcatagaagatgacaaccatcatttgggagttgtcaatgaagccgcctatcggatgctttttatcaaaacagaagtgcattgtatttatttcactcaaccgtcatttataagagatacagaatgatcccttgttcatccaaaaaaaaaaaaaaaaaagcggtttgctttcaaatcatgtaatttgctacagaagcttagttgatttcttggtgtatcattcattgtgatggaaatggaaatcttgggaagaagttcccaacaag

SEQ ID NO: 18296 - DNA, 435 bp, Zea mays
  Clone ID: MRT4577_116687C.1
cgggcgaagtagccccatgtggacgagggcgtagcgacggctgtcgggcagcgccggctgtcgggtcgcgtcgcggccagcgccacaggcgtgtggagatatatcgtcatgttcaacatgctaccaccgggcacagcgggtgccgggcggtttacacctacaccctatcgagccgcagcaagtcccggttcggcaccaccggcgacagcagaccgcagcgggagctcgccgcttttcggcagactccacgaaaccaccggtggatgggcgactgtccgggggaccgtttgcctggggatactgcgggtgaaggaacagaacccgacggacccaccctactatggacaggacccatacagctaactatgagtcaactacggctcgccgggaagcgctgaactgaaccgggggcacccggactggtgggagcgaccc

SEQ ID NO: 18297 - DNA, 243 bp, Zea mays
  Clone ID: MRT4577_116688C.1
ttttatctcgccttccgaggaaactcagcggggtaccacagacccgagcggaggaagccatgtccggtcgcggtaagggtggcatggggctcggcaagggcggcgcgaagcgttatcggaaggtgctgcgcgacaacatttatggctttatcaagccgtctattcttcttttgtctatgaggtgtggtgttaagcgcatttcggtgctcatttacgaggagacccgtggcgtgctcaagatct

SEQ ID NO: 18298 - DNA, 343 bp, Zea mays
  Clone ID: MRT4577_116689C.1
gtgacgcgtccgacgtcctccgtctcgttgggcgcgttcgtgctcgcgacgcgcgtgatcacgcgcttgatcacgctcttctagaagctgatgcacgagcagacgatccgggagacgatccgctacccggtcaagttctacacgaagtagtacaactgggacgtgatctgcaacatgttgggcatcttcttcatcctctactgcatccagtacggcgtcgtgatccacgccttgatgcacaagttgaagccgaacgtgcaggagtacttgcaggagtactagttgctgttcgacttcctgtagagcctgcacaagagcctgttcatcttctacgacctgttcg

SEQ ID NO: 18299 - DNA, 205 bp, Zea mays
  Clone ID: MRT4577_11668C.1
cggacgcgtgggcggacgcgtggtatctttgcggccctttttttttcttatttcgcgtgtaaagatcaatcagcatgtcctaatctatgctctccattgttgccgcacatcaagtgtcttgatgttcaccacgttactgtacatacaaaattcttgcgtcttagcatatcgctcttgcgttattaaactggcaaaggaaaatgac

SEQ ID NO: 18300 - DNA, 166 bp, Zea mays
  unsure (1)..(166): unsure at all n locations
  Clone ID: MRT4577_116690C.1
acttggtggtctcgaacttcccaaagcagggggaattgtgatacctctctcacgctgggccttgagcttgtcaagcacccagtcatacttgaatgaccgnttgttcgtctncgngggctctttctggattcttttatctcccgcttaaaaatatgggggggggggg

SEQ ID NO: 18301 - DNA, 447 bp, Zea mays
  Clone ID: MRT4577_116691C.1
atctcacctctcctccgcctagggagcgcccgcctgacaagccgattttctgcccccccactcacgagcgtctggtccacttcgaccgctaacatacttgacgatgtcagatacttcatatggtcagggccttactagctttcttgccagatgagcacaaccccaataggaagataccacttgcagaacagtcctccacactgcaacatctctcttccttaatctgcatgtgccgccccctcactcctctatgacatacattcatcgactggcagctgatcctctctacaggatggctgatatccgcacatataatcgtggcactgtgaagcactaggctattactccgattgggacctcggcgatgggaatgcacctgccacagatccctgaagatgtacaacatcgcatggagagaatcttgctctgctgaatgtgcacaaactg

SEQ ID NO: 18302 - DNA, 427 bp, Zea mays
  Clone ID: MRT4577_116692C.1
tcggccgggaccaaacaccacacattctaaacaaactcaacccaactcttcttaactctactcaaaatgcaaactgttactgatgccgctaactatgtcggagacaaggtccaagaattgacctctggtgcctccaaggaagccacaaggaagttgccaaggacagcaacgcttccctctctactcgtgcctctgccgccaaagatgctctaggagacaagctcgatgaatccaagcactctgcttctgccgaagtcaacaaggagaaggccaagaactaaagcacctttctctcatcaatgtcaaataggatggatcccctcccgtcgtgtttctccttaatgaacgaatgaatgttgtagcttcttaatctaatcaatttatatcaaatctttgctcttgtaaaaaaaaaaaaaaaaaagcggcc

SEQ ID NO: 18303 - DNA, 446 bp, Zea mays
  Clone ID: MRT4577_116693C.1
ttagtttcatctgtatcagacattgagaacacttctgttcctacaagcctcaaagatagtaatttggattcatcgtctgccgtagtaattgaaagtgggaggggaggtgatgagaaaatgtctatgtgggaacggctgcaagcatttgataaatggatctggacttctttttactccatccttactgctgttaaaagtggcaagaagtcatttaaggagtcactacttcgttgtggaagttgtcatgatctatattggagagatgaaaagcactgcagaatatgccattcaactttcgaggttggttttgatcttgaagaaaaatatgctgtacatgtggcgacgtgcatggagcctgaactttacatgaggtaccaaatcataaatttctgccatcacagctacaggcacttatagcagccattcatgctattgaggcatctatg

SEQ ID NO: 18304 - DNA, 227 bp, Zea mays
  unsure (1)..(227): unsure at all n locations
  Clone ID: MRT4577_116694C.1
aaaaaaaaacccaccgtcagcacacggcgcacccaaacatggccgctccgacccaccggcgtngacaccacccgcccggcttctacacctccctcgggagagcccgcggctgcacccgcaccggatcaaaagggggcttcttcttcttctgcccctcagcctgataccggtgctcccccggccgtgcccgcgccaggggcgaggaagcggaagctcgaggaagcggg

SEQ ID NO: 18305 - DNA, 531 bp, Zea mays
  unsure (1)..(531): unsure at all n locations
  Clone ID: MRT4577_116695C.1
cggacgcgtggggtagtgtaaaacggaggagttatgaattttctaagattttggatagaaaagtaattaattaattaaggtcacgaaattaaaaagtttcaaactgagtaaacaattttactaacatgtagagctcattattacgaatccaacgcaatttgaatgggtcaaaatgaagttaagatgaatattttatgagtaaaacaaatccagtggcaatttggtaattactgaaaacgtattttgaaacaacccgaactgagttacgttttccaatctgaaaagcgtattcctcctatgcactttgcactgcgggttggtttgtaaagcttccagcgactctttagcaaaagtgcgagtgaaggggtaccagccatcttggtccgttagatctcgatcgaatggttcacaatgaattgcagagggaaggatagtgcccagctgactgccagtggcctgnacggcggctccatgngccgaaaaggccgaaacctcaccggagttggcgttcttgcgatttctggtgcctna

SEQ ID NO: 18306 - DNA, 606 bp, Zea mays
  Clone ID: MRT4577_116696C.1
gaccccaattaattaaataaataaatcaacaacaatctaagatatgtgatgatgattgcagccattatcataaatctcatcttttacacggagatctaaagaaaaacaaccaaatccagaaaaatataagatgaaaaacacatttaatgtatcacttcaatcttctcattgttgctattgttgttgtttccttgccatttccaaacaatatctttcaaagaaggcctaagctcacgatcacaaaattgcttatactccattgtatcacctccacttttcttaaactcaaccatatgaaaactatttgtcacttcaaatatctcaacatcaatcgcaagatgtccttttcttccttctctcttatcttccatcttcactcctacatcgctcttcgtcaaattgaatctctcactacttgttgctatctcctcgaatttcgacactatctcttttgcatctttcttcgttgtaaacttcgattctgatctctcttctttctcaaacaaacccgagagatcgaatccttgagacagcgaagagatcaagtcaaacgcgttgtaagacatcggttttacggaaaaagctgcgtggacatcgctgatcagt

SEQ ID NO: 18307 - DNA, 517 bp, Zea mays
  Clone ID: MRT4577_116697C.1
ttttgttttgtgtggcgaagagcatgcagcccttaatgggagcctagaatctcaccttacaaaagatatatgagtgttatgtgcctctggtctatgacatcagctatcagtctgtggcttggagcatcaaccacacacaacacatcaaaccacactccagactaggtagatggaagacggaggccggacagcactacaaccggctactgattgcgtatatggcgattccatgctgcctgcagggccgggtaacggcacttatgacgctaaatgcatatgggagatggctgtcttctatcctgtctaaagcgttaaaggatttactcctgtcggcccctggacagtgatctcacactagtgagaacagcgttcaagattggtgtatggcatcatcgctctatgctgctgggtgctgagctacgatctccgacacataacacataagcatgacgcaatacggtatccggctttctcattttggagaacatggaacgtggcaggagacacagaacacatt

SEQ ID NO: 18308 - DNA, 715 bp, Zea mays
  Clone ID: MRT4577_116698C.1
ccccccccccccccccttttttatgataatgtaacaattataaagtacagtaacgtaaaatacattagacaaacatcgttggctgaccaacaaactgatgatcgtaacacaatcgtagtatgatcggtagtaagtagtaacgaacggcaggtgtattggatagagtaccactaccagagtacaaaaggagcgaaaacatacagcccaaaacacaacgggaggctactagtttaacaagtttatttattatcgctcatcgaccatgcacggacgccacagtagggggcggcacgtaggggcgggcgcgcgccacggcatcacatgatcacatcttcccctggcgatgcacgcaggacgagccggcgcaaccctccacgcacttctcgacgcactggtccacccgctccgccgcacgctgctgcatcagccggtccttctcctcgaagtacaccgacgccgccttctccgccgcgcgttccttcgccgcgcgctcgtcctcgccgcccagccggacgtcgacgtgctgaccttggcccagcgtcagcttctccttgatcgcgcccgtcacgttccccagcgcccccagcagaccttgtccctgttccctatcagtgtcgtgagtgctggccgtctccctagccttgtcagcggcggtctgtgctgtggctcgggacctgtccctggcctcctgggcgggcttcctgctggcgttgag

SEQ ID NO: 18309 - DNA, 1494 bp, Zea mays
  Clone ID: MRT4577_116699C.1
atgataatgtaacaattataaagtacagtaacgtaaaatacattagacaaacatcgttggctgaccctcaaactgatgatcgtaacacaagtattccattattggtagtaattagtaacgaacggcaggtgtattggatagagtaccactaccagagtacaaaaggagcgaaaacatacagcccaaaacaagggcccggaaatgaagttaaacacaacgggaggctactagtttaacaagtttatttattatcgctcatcgaccatgcacggacgccacagtagggggcggcacgtaggggcgggcgcgcgccacggcatcacatgatcacatcttcccctggcgatgcacgcaggacgagccggcgcaaccctccacgcacttctcgacgcactggtccacccgctccgccgcacgctgctgcatcagccggtccttctcctcgaagtacaccgacgccgccttctccgccgcgcgttccttcgccgcgcgctcgtcctcgccgcccagccggacgtcgacgtgctgaccttggcccagcgtcagcttctccttgatcgcgcccgtcacgttccccagcgcccccagcagaccttgtccctgctccctatcagtgtcgtgagtgctggccgtctccctagccttgtcagcggcggtctgtgctgtggctcgggacctgtccctggcctcctgcgcggcctccctgctggcgtcggtgtactcgcccgccttctgcctggtcacgtctctcgcctccctcgccttgtcggcggtggcgtccctcgtctcctgggccttctgcatggtcgcgtccttggcctccctcgccttgccggcggtggtgtccgcggcctcccgcgccttgccggccgccgcgtccttgtactccccgagcttgttcttggtcgcctccgcggtctcgctcgtcttctgcgccaccgcgtccttggtctccctcgccttctccacggcgctgtccttgtactcgcccagcttgttccgggtggcctccgccgtctcgcccgtcttacgcgagacgctgtcgttggcctcccgggccttgtcggcggtgtagtccctgtactcgccgagcttgtcgcccgcggtgtgcgccgtctgcgaggtcttgtccacggtcgcgtccttggcgccaccgaaggtgcggcccacggcgctggccaaggacctggcgccctcctgcacgctctccaggatgccgccgccaccggcggcaccgcggtcggcgcgggagcgcgcgatctcgtccgcggccgagcgggcgttcacctccgccttctcgaggtgctcgtcccgcgcccgagccagctcctccacggcgcgccgcgcgtcggcctcggcgcgcgcctcacgcgtgttctgcctcgatgccatagcggtcggtcagtgactctgtagcttctctttctcggtttctctcgcaaacgcactagtgtttgtttcgcagatcgtcttccaggcagacccgagggtacc

SEQ ID NO: 18310 - DNA, 312 bp, Zea mays
  Clone ID: MRT4577_11669C.1
attcggctcgagggctgagctgcgggttgttttgcggtcaccatgaaggtgctgatactgggcataagttaactctcactggggcgcccactaacgcggagacatgcccaatctgatcgaggattcttggatcctgctcatgatcaagacgctgatcatggttataaggaaaagttgctgaacaaaggttggcctgttcaacaaaaagccgtctcgggcgatgctaggcttggtaaaggacttagagagcaagctgggctacaagatgacctcttattagaagtcgtaatctttattaacggcaagccctca

SEQ ID NO: 18311 - DNA, 266 bp, Zea mays
  Clone ID: MRT4577_1166C.1
ctgagatcaagttttggaattcgtaaggggtggtatttgtttaatttaatcctagtgtgacaaagtatgctttcatgtttatttggaggtccccctacctgacgttttgtttgttgatgattagtgcttctgatgtgatctttccagctggtcagatgtttttaggttgtgtgaggtgcacaagcattgaacagaaagaacttttcccagtgaactagcaatactacgtatgatgcaagcgcgtgcgggggtgggggggcttatat

SEQ ID NO: 18312 - DNA, 279 bp, Zea mays
  Clone ID: MRT4577_116700C.1
accagcatcatcagctgcgcctgccgaatcatgtcctactcaaacgccaaaacgccgatcaaaaccaacttgttatgttaacgcgcaaacgccgtaatgccttggggctgggcgaactcatccctccagaacacaagcctgaccacagttctgaatcatacccatatgatgtacctgatggaaaccattatcccctcacaactgcacatattatacacgccccgaactactaaagggcaaccctggcttgcctaaaccgtcagctaacacaaaacaatt

SEQ ID NO: 18313 - DNA, 531 bp, Zea mays
  Clone ID: MRT4577_116701C.1
atcattctccctctctcggcagtctgcagcagcccagcgccgtcgcgcatgcaggaggcgtcatcggcggcggcggcgggggcgggggccgagcccggccgtcgggcggcgcagcatcagttcgccggcgtggacctccggcggcccaaggggtacgcgccgccggcgccggcggtgggcgagggggacccgtgcccgcggtgcgcgtcgcgggacaccaagttctgctctgctctgcgcctgatgatgagtgcaaggaaatggagcgctttgattcttctgctcttggttgcatctgctaattgatttagcagtggtggtaaggtacacgcacgacgagctgactgcgtggttcttggtttgggccttagtatatgatgatgatgatactagttgtatgtgtgacgtgagagacgatcgcgacgacgaccttgaattttagtttctgagatgagaaaggtcaactagtggcctctgtatgactttagttttactcatgaactcatcagatggctggctatggctgtggct

SEQ ID NO: 18314 - DNA, 927 bp, Zea mays
  unsure (1)..(927): unsure at all n locations
  Clone ID: MRT4577_116702C.1
gggtacctcgaggccggcncgggaaccaaaccaaaccaaagcatcacaagcaagcaagtaatataagcgctaactagcaaagaagaagagaaccccgtcgagcaagactagaagagagagcaataattatgtaccaccaccatttccatggcgaggtggctagcctccgcttcctgtcccctccgaacgcctcgacgtccttcgcggcgcaccaccacatgaacatggcactgccgcctccgtcctacttccaagacgacgacgctacccttgcagccatcgacggcggcggcgacgcggcctgttttgatgagcttgacaccatcgtcgtcgtccgggaagcagatgccgcagccgcagcccgctgccacctcaccggcagcaacaatggcggcttgtcgggctccgaccagctgctggacgctgctgtgattatggcggccgacgaggagcgccggcgccggcggatggtgtcgaaccgggagtcggcgcggcggtcgcgcatgcgcaagcagcggcagctcagcgagctgtgggcgcaggtctcgcacctccgcggcgccaaccgccgcctcctcgacgacctcaaccgcgcgctcaggagctgcgccgacgcccgccgggagagcgccaggctgagggaagagaaggccgagctgacgaagaagctcgagcagctgctgcaggcggagaagggctcgttatcggaggcggccgagccatgcaagtcgtattgctgaatgaccaagaagatggagagttaattaattatcatccgcccgggcgacccagtttttagtcgagaggagttaattatttatatctcgataactaataagaacatgcatgtgtgatgatcaagctaattctgttctataaagggagttttggtaccctaattaaggataaggataagttaacgaggat

SEQ ID NO: 18315 - DNA, 892 bp, Zea mays
  unsure (1)..(892): unsure at all n locations
  Clone ID: MRT4577_116703C.1
ccggccggggaagaagcccgccagcaagaagcgccgcgtcgtggcgccggccccggagctcgccgccgcggccgacccaggcaagacggcacccaccacgacgacgacgacgacgacgacgagcgagatcaccacggagactggcgcgctggaggactccgactccctggcgcacctgctgctgcagcccgggacagaggacgcggaggccgtcgcgctcgggctcggcctctccgacttcccctccgccgggaaggcggtgctggacgacgaggactcgttcgtgtggcccgccgcgtcgttcgacatgggcgcgtgctgggccggcgcagggttcgccgacccggaccccgcatgcatcttcctcaacctcccgtgacagccacagacggtcacggcgccgaggcgtacgtcctcctgctttgctctgctctgcgcctgatgatgagtgcaaggaaatggagcgctttgattcttctgctattggttgcatctgctaattgatttagcagtggtggtaaggtacacgcacgacgagctgactgcgtggttcttggcttgggccttagtatatgatgatgatgatgatactagttgtatgtgtgacgtgagagacgatcgcgacgacgaccttgaattttagtttctgagatgagaaaggtcaactagtggcctctgtatgactttagttttactcatgaactcatcagatggctggctatggctgtggctgtggctaactcatcgtcaagtgtttctaccggctgcctataaactagactgagctcttgttggtctgggattcttccttgttcttatgataaagttctgttgtgctgtcaaaaaaaaaaaaaaaaaanaaaaaanaaaaaaaaaanggggcggccgctct

SEQ ID NO: 18316 - DNA, 666 bp, Zea mays
  Clone ID: MRT4577_116704C.1
agtatcagaggcgggacgtcactgctccagggcttcagggttcaggcgaggtgcgacccgggacgacgtccgcctctccccttcgtctccgccgccggccagatctcgtgccgccccttctccggtgacccgctcggcgagacgaccggtcacaggatgcagtctttggcgcggacagtctgtcgagccggaacccgtggcaatcctctgaagctcatggattgcgcagctcctagtgttgaacagtccttcgcggaacccctgaggtcttgcagctggattcgtcaaattgtgagtccgatcattccacgcgacggtgttcaggcatatggtttctgcacgagggctttggcggtgagggggttctcgacagtggggactgccgaggtttctgttgaggatgaagattccagctctcccatggttgagcacccgccgcgcattaagttcaagaggcctgacaagacggccaggcacattatgaatatcttgaacaaagaggcagtcgacaaagttcgtacagagaggaccattcctgatgtacagcctggatgtattgttcaaatgagagtgcaagttcctgagaacaagcgacgtgagtctacattgaaaggcatcgtcatagcaaggcgcaatgctgggatcgctacgactttcagattgcgt

SEQ ID NO: 18317 - DNA, 586 bp, Zea mays
  Clone ID: MRT4577_116705C.1
gggcgcggaggccgtcgcgctcgggctcggcctctccgacttcccctccgccgggaaggcggtgctggacgacgaggactcgttcgtgtggcccgccgcgtcgttcgacatgggcgcgtgctgggccggcgcagggttcgccgacccggaccccgcctgcatcttcctcaacctcccgtgacagccacacacggtcacggcgccgaggctctgctctgcgcctgatgatgagtgcaaggaaatggagcgctttgattcttctgctcttggttgcatctgctaattgatttagcagtggtggtaaggtacacgcacgacgagctgactgcgtggttcttggtttgggccttagtatatgatgatgatgacgatgatactagttgtatgtgtgacgtgagagacgatcgcgacgacgaccttgaattttagtttctgagatgaaaaaggtcaactagtggcctctgtatgactttagttttactcatgaactcatcagatggctggctgtggctgtggctgtggctaactcatcgtcaagtgtttctaccggctgcctataaactagactgagctcttgttgttggtc

SEQ ID NO: 18318 - DNA, 263 bp, Zea mays
  Clone ID: MRT4577_116706C.1
tggagccgcacgtctccttccggccttccccgacgatgccgctgccgccgggaggaacggatggatcccattggcttgccaccaccactgcacgcttcggctcctattcccgctcgctacggccccagtcgcgctcctcaccggccggcaccaccccgcccgccctcgccttttgcctgccgagatttaggcctggcattctagcaatgcagaagaagtgatcttataatcataaaagataacaatggggatatccaaggtga

SEQ ID NO: 18319 - DNA, 1330 bp, Zea mays
  Clone ID: MRT4577_116707C.1
aaccgcccccctcctttcaactcgctcgctcgctcgccttccatctttctccctctgtcggcagtctgcagcagcccagcgccgtcgcgcatgcaggaggcgtcatcggcggcggcggcgggggccgagcccggccgtcgggcggcgcagcatcagttcgccggcgtggacctccggcggcccaaggggtacgcggcgccggcgccggcgccggcggtgggcgagggggacccgtgcccgcggtgtgcgtcgcgggacaccaagttctgctactacaacaactacaacacctcccagccgcgccacttctgcaagggctgccgccgctactggaccaagggtggcacgctgcgcaacgtccccgtcggcggcggcacccgcaagaagccctcctcctcctcctcgtcgtcgtcctacgtggccgccgcggacgccgacaggcagcccaagaagaagcccgccagcaagaagcgccgcgtcgtggcgccggccccggagctcgccaccgcggccgacccaggcaagacggcgaccaccaccacgacgacgagcgagatcaccacggagactggcgcgctggaggactccgactccctggcgcacctgctgctgcagcccgggacagaggacgcggaggccgtcgcgctcggcctcggcctctccgacttcccctccgccgggaaggcggtgctggacgacgaggactcgttcgtgtggcccgccgcgtcgttcgacatgggcgcgtgctgggccggcgcagggttcgccgacccggaccccgcctgcatcttcctcaacctcccgtgacagccacacacggtcacggcgccgaggcgtacgtcctcctgctctgctctgctctgcgcctgatgatgagtgcaaggaaatggagcgctttgattcttcagctatttgatgcatctgctaattgatttggcagtggtggtaaggtacacgcacgatgagctgactgcgtggttcttggtttgggccttagtatatgatgacgatgacgatgatactagttgtatgtgtgacgtgagagacgatcgcgacgacgaccttgaattttagtttctgagatgaaaaaggtcaactagtggcctctgtatgactttagttttactcatgaactcatcagatggctggctatggctgtggctgtggctgtggctaactcatcgtcaagtgtttctaccggctgcctataaactagactgagctttggtctggtattcttccttgttcttatgataagttctgttgtgctgtcatgcttgttttcttcttttctgtaaagattatgggggatttcctcggctctcaatct

SEQ ID NO: 18320 - DNA, 342 bp, Zea mays
  Clone ID: MRT4577_116708C.1
acaatgcctccatcggttggagagtgagttggacctcctttttttccggcccgggagatagcagcagcgtcttcgccgatgggacgtgcacattcgagcagctgatcaaccgcacggcggcgtgggggaagatcgtgctgtgcttcgccacgatgggaggggtgttcagcgacggcgcggcgctggcggtgtacgccggcatcggcgccggcgtgatcttcgccgacaccataagccggaaatcgagccaggacagcttctggcccaccgttcacgtggacctgtaccagggcacccagatcctcaactacattcgcgacttgagaaagccgacggtgcgca

SEQ ID NO: 18321 - DNA, 384 bp, Zea mays
  Clone ID: MRT4577_116709C.1
acttatcatatctctcactggccttgtagcacattcccttccctagctccattgcgttgctttgcgttattgtcggacatcacatctgcctacgtgtgagcggacggagagagcactgtaacgcccatcgcaccacccagctaccgcgttcctgagaacgcgaggagtgagaaaagtgaagagcggacatgttctggcacggggtcgcggaccggctgacggggaagaacaaggaggcgtggagcgagggtaagatccgcggtacggtgaggctggtcaagaaggaggtgctgggcgaagcctgctgcgactactgagtgctctaagtcgcattaattgcgctgcgctcatttgtttttttttacccccccccccccgcgcgga

SEQ ID NO: 18322 - DNA, 328 bp, Zea mays
  Clone ID: MRT4577_11670C.1
gccggccgggtctggacctatccgcccacctaacgacccacgctagcaccaagacgaggggaggggcgatggcaacaggcgtgctgtcggcgaagggcgccacggccgcgggcaagaagaaggggtcggacgccttcacgatcgactgcaccatgcccgtggaggaataagattacactgcattgcacttatatatcaatattgaactcattgaatttgatacttgtacccgtacctttgctaatgcccccatggtatgctctggcgaattttgaatggtttatttattagaaaaaacaaagaaacaaaagggccctacggccgagat

SEQ ID NO: 18323 - DNA, 631 bp, Zea mays
  Clone ID: MRT4577_116710C.1
gtagtagcaaactagtggcgttaactgcaaaatgacatttttaattaagttccttatttgagatcctgccatttcattagtatgttatatgtttacatggaatttatatcaaaatcgaacgaagttgcaagaatcttggaaagtatgccacccattcccaggcccatgcatgggatagaaatagaatgcagtttcaaaagataaacgatctcgcgtcaatttccttttctcatactttattcggaaaatctcatctagattttacgtgttcaaattttaaccaagatcctaaaatgatggcttagctggttattctggtgatcagcttagattatcccatatgttccaagcgtgacctcagttggacgagctgatcatttctagtggaaccacacaaagaggattggtaacaactgaattagtagaaaagagtagatcgaaaagagagatgcttgctagctagataggatatgcatatatagcactcatgatatgggccaatgaaagttgtagaattgaattcagttgatatgggtggtaggtcatgtgccagtctcttaagaatgggtagcacagtttgttaagaaaacactttgaccactatggagaaaagcctctgggcatttaactt

SEQ ID NO: 18324 - DNA, 371 bp, Zea mays
  Clone ID: MRT4577_116711C.1
gggaaaaaaaaaccttgctaatttttttttggggtggtttcaaagggggggcacccaaagggaacaaaggggggccccccccctaatccaaggggaaaacggcccctaacccggggacaaaagcgaacgggaccccgattctttaaaaaaaaaaaaaaacccgcccaaacccaggagggggccaaaaataaatccctccaacccccgccgccgccgccgaaaccgccaccaccacccttgggccaaccggggaaacccccaccgcctccgaagccgccgccaccaccctcgggccgaccggggtaaccggacccgcccccataaccgcgggaagggggcccgccaacataacccccgcccccgaaaccccc

SEQ ID NO: 18325 - DNA, 350 bp, Zea mays
  Clone ID: MRT4577_116712C.1
ggtacaaaactgaatccatggctcggttcctcggaacgagagagaatggcgcgacatggtccgttccaacgccacaaccatcggtccggactggccatgcgcccacacacaatggacgcataatacgggctttctccatcccccacccccaacaatcagcccggttttacgcaccaagaaacaaaccccaaaaaaaaaaccatctcatcatcatgcacgaaccaatccaacagtatagtatgatcacgatgcggtcgcggcggcgtaggtgtggaagtctgcggtggggtcgaaccagagcgagtggcgcatcttccggccgccgacgccgctgtggtacacgttggtct

SEQ ID NO: 18326 - DNA, 274 bp, Zea mays
  Clone ID: MRT4577_116713C.1
ggcgcccacgcgttcgtagcacctctcattgcttcactgattcatcaactacgattacccagagtgtggtggcgacacaatcatggcgctgcccgtccagccaatcatccgtgcccgagctcactttcacggttagcatgtcatcctccagcaacctaatacccttgccctaaagttctgtgcctacatctacgtaccgatggatctatcctttgtacccaagcgcctgtaaacaacatacaccgtaatgtacacaaatatctacattatttct

SEQ ID NO: 18327 - DNA, 742 bp, Zea mays
  unsure (1)..(742): unsure at all n locations
  Clone ID: MRT4577_116714C.1
ccggccggggtgcttcaccccgcccgaaggcagcatctgccagcagcaaccgtatacagggagagagagagcttcacgactccggtcggccgtcagctcgattcgccttcccccccacctcccccgccctccgatgacggggcgtccgtgggcgggcgcgccgcctcttcctctcgcagtcgccgtcgccgtcgccgtcgcggcgctgctgtcctggtgctgctgctgccagggcgcgtcggctgcggcggcggcgtcgttcggcgacaacttcgagatcacgggcgccgaggaccacgtgaagacctccgccgacgggcagacctggtacctctacctcgacaacaagacaggcgtcgggttccagacgaagcagcgctacctgttcggctggtccagcatgaagctgaagctggtgggcaacgactccgcgggcggtcgtcaccgcctactacatgtgctccgacctggacgcggcgcccctgcgcgacgagctggacttcgagttcctgggcaaccgcagcggggagccctacatcatccagaccaacgtgtaccacagcggcgtcggcggccgggagatgcgccactcgctctggttcgaccccaccgccgacttccacacctacgccatcctctggaaccccnagcaaatcgtgtacaacggcgcnaatggacttggcgtggcagctccatgcctccatccgtccgggggtcgtgcttggtgtggcagacggatccg

SEQ ID NO: 18328 - DNA, 517 bp, Zea mays
  Clone ID: MRT4577_116715C.1
gggaaaaaaggccccaatcaacccctttttttttcaacccctttaaggggacccccaaacccgggggggtttcctgggcccccagttcccaaacacccccaaggggacaaccctgggtttcccgcccttagggaaaaaaagggttttgggggtttaaaccaaccggaacgggggaccccagggggaaaaaaacctggggaacccgttaaaaactggccaatggttttccttccaggggggggggggaaaccggccaccgttttgggggccttggtgccattcccaaacccggcttgggggggacaccatttcctttgccccgatttgggtttttaaggaccccccccccccccgggtttggggccttgggtggcccggccaaataacccggtttgggcaaccccgggggagaggagggtttttttgggggggggggggccccccttgggggaaaagaaaaaaacgggggggggggggccgtttttggggggggccttaaccgctttcaccttggggg

SEQ ID NO: 18329 - DNA, 1335 bp, Zea mays
  Clone ID: MRT4577_116716C.1
cttcacgactccggtcggccgtcagctcgattcgccttcccccccacctcccccgccctccgatgacggggcgtccgtgggcgggcgcgccgccgccgcctcttcctctcgccgtcgccgtgggcgtcgcggcgctgctgtcctgctgctgctgctgctgctgccagggcgcgtcggcgacggcggcggcgtcgttcggcgacaacttcgagatcacgggcgccgaggaccacgtgaagacctccgccgacgggcagacctggtacctatacctcgacaacaagacaggcgtcgggttccagacgaagcagcgctacctgttcggctggttcagcatgaagctgaagctggtgggcaacgactccgcgggcgtcgtcaccgcctactacgtacgaagcagcgatgtgctccgacctggacgcggcgcccctgcgcgacgagctggacttcgagttcctgggcaaccgcagcggggagccctacatcatccagaccaacgtgtaccacagcggcgtcggcggccgggagatgcgccactcgctctggttcgaccccaccgccgacttccacacctacgccatcctctggaaccccaagcaaatcgtgttcttcgtggacaaggtggcgatccgggtgtacccgaacgacgcgtccaaaccgccgggcggaggaggcggcggcgacggcttcttcccgatcgccaagcccatgtacatcttttccagcatctggaacgcggacgactgggcgacgcgcggcgggctggagaagacggactgggccaaggcgcccttcgtgtcgtcctaccgcgacttcgccgccgacgcctgcgcctggccgccgccggccgcgggggtcgccccgtccccgccgacgcccgcgtgcgccgcggccacgggggacagctggtgggaccagccccccgcgtgggcgctggacgccggccagcgcctggacaacgcctgggtggcaaggaacctcctcgtctacgactactgcgacgaccgcaagcgcttcccgacgccgcccgaggagtgcaagctccggcccgccgcgaccgcatcgtgatcatactatactgttggattggttcgtgcatgatgatgagatggttttttttttggggtttgtttcttggtgcgtaaaaccgggctgattgttgggggtgggggatggagaaaggccgtattatgcgtacattgtgtgtgggcgcatggacagtccggaccgatggttgtggcgttggaacggaccatgtcggccattcttttgttacgaggaaacgaggaatggattcagttttgtaccaccaaagcaattttgtttcccgttggc

SEQ ID NO: 18330 - DNA, 112 bp, Zea mays
  Clone ID: MRT4577_116717C.1
gccttgtttacggttaggcggtggagcattgtaagggccatttatgttgtctaaatgggatgtgtaaacaatgaagatgagggcttgaccctggatctgattgtggtagata

SEQ ID NO: 18331 - DNA, 313 bp, Zea mays
  Clone ID: MRT4577_116718C.1
acctggaattcgctcgagggacggccatggatgcaggggttttcttttaggcggggaggagcgatggcgggggggcgtacctggagggggcgccggtgcccgaagcccctatctgcggcagatctctgtcagcacttctacgcgcagagatgggacacgggcaccggcggcagatcaccttaaggtaacgaccccgactgccggttgccgaccgactcatcgttattgtacccttcggtgtgcaaaatgagaggatggtagcaaaggacatgtatgagatggctgcaaaatggaaagtgcttttctgcgcctg

SEQ ID NO: 18332 - DNA, 161 bp, Zea mays
  Clone ID: MRT4577_116719C.1
ctagttctagatcgcgagcgtgcgtccttttgtctgcgttggcaagccgtattggtcccggacagacaattgttccctatgaaaaaaatgtgtgtcctattaaagttttgggtttgggcaaggaaagcgctttcctaagtgtccttgttatttgcccagga

SEQ ID NO: 18333 - DNA, 183 bp, Zea mays
  Clone ID: MRT4577_11671C.1
atggacatcacaaagacaaccaatcaagccaaggatggaggcaaggagagcttcgaggtaccgagtgcacgggagaaggtcaaggagaccaggaacccaaagccaggggtgaagaagaagacttgcaaagtcaaggttgatcgagttaagaaaagttatagtgcatcaaggatcactacataa

SEQ ID NO: 18334 - DNA, 252 bp, Zea mays
  Clone ID: MRT4577_116720C.1
cggacgcgtgtacggacgcgtgtatggctgtcgagcatcgaccgactgagactgacccgttcatcacacaccatgacagtgatgcatgaggacaagatcctagttgcgcagaagcagcagcatggatggagaccggagttgcacctcctgcttctccaaccaccctgtagacgctgccggtgccgtcaacgacgaccgctgcaacatcatcaggattgtccaataccgtcacgacaggtgacggcgacccat

SEQ ID NO: 18335 - DNA, 129 bp, Zea mays
  Clone ID: MRT4577_116721C.1
accacgcttatgtcaacgcaaacaagtactctcattctatacccttactgacatttctgagcatggaatattcctgtttcggtctgcggctcaccgtgcctacattacatcaaagaagcccatacctaa

SEQ ID NO: 18336 - DNA, 294 bp, Zea mays
  Clone ID: MRT4577_116722C.1
agctggcacccctgcaggagccgggccggaattatatagccgggccgacgagcttacttgtcggcggccgacctattatttttggtggtcaatgaccgccaaaaacggcacgaacctcctgtgcagcgacaaacacaaaagacggacctgcgagggtgggaataccaaaaatactagcgccagcacgatgaggacatgaacaactgagtgactcacgcgagggaccgacgagatgaacgctcggatgtgctgagtgaattaacctatcgacaccactccgtgtagcaccaggca

SEQ ID NO: 18337 - DNA, 479 bp, Zea mays
  Clone ID: MRT4577_116723C.1
acataaattatgtgttttggtatttcatttcatgtgacaactgttcaatcaacgtaacaaaggcaacaggcgtagcacaacgggatgcggaattgaggacaccacttaaaaatacaacccagcacgcgacaacaaacaaccacaggaaacaggggggggaaaggcccccattaaaagggcgaaaccacgctgccgccaccacaaacagaataaaataacaaaaagaccaagcccggggaaacccggaccgcaaccagaaggcgcaccacctttccccaaaaagaacccgaaaacaaccccgcacaaccaacagcaaaactgccaccagggcgaaaaagatatccccccacaacaccaaacaacataccaaccggaagcaaaaagagaaaagcccggggggccaaaggagggagccaacgcacattaaaggcgtggcccacacggcccgcatgccaaacaaaaaaaccgtcccgcccgcg

SEQ ID NO: 18338 - DNA, 209 bp, Zea mays
  Clone ID: MRT4577_116724C.1
atccgggtggacgctctcctcctccttcctcttcgtgatggttgtacctctacgagcatgattttttctattagccgagtccatttttttggtcttttctgtttttctggctatttgtttggttttctgatggatcgattgctctccgatgatgattaaaaattactttcgttcttctgaagttcgcaatgtggaagaacaatttggag

SEQ ID NO: 18339 - DNA, 1767 bp, Zea mays
  Clone ID: MRT4577_116725C.1
tctcccccatccttctctctcacccatgccttcataaacagcaaagttggctagctggttatttgtatcaagatgaagtttgaagccaacacatccatttctcgctagtaagatcaagaaaaatccattgaagcctacttcctacctaaatcttcatggatccttggagtgaaagtgagggcaagagagcccatgatcctatcttcaaatgtttcagccaaaaccaaggtcaccatcacttcatggaaaggagcacagatgctgctgttgctctctctgagagatgtagatgcatctgggtttcaggtccaattatcgtgggtgcaggaccatcagggctcgctgctgctgcatgtctcaaggagaagggaatcagtagccttattcttgagcgctccagatgcctagcttccctctggcagctcaagacatatgatcgtctcagccttcatcttcctcggcaattctgtgagcttcctctcatgcctttccctgccgactatccgatatatccctcaaagcagcagtttgtagcctacctggagagctatgctgcaagttttggcatatgtcccacatacaatcgcacagtggtgtgcgcagagtatgatgaacagcttctgttatggcgtgtgaggacgcagacttctgacacaacgggagaggaggtggagtatgtatcccggtggcttattgtggcaactggtgagaatgctgaggccgtgcagccggatatcggtggtctacaagagttcccgggaacaatcatgcacaccagtgcatataaaagtggcagtgcattcactgggaagcgtgttctcgttgtcgggtgtggaaactccgggatggaggtgtgcctagacctctgcaaccacagtgccgagccccatattgttgtaagagatgctgtacacatcttgcccagggagatgcttggccactccacctttggtctgtcaatgtggctcctcaagtggctcccggtccacgttgtggaccgtgttcttctgtgcatagcgcgggccatgctcggggatactgctcggcttgggctaaagcggccggcctctggtcctcttcagctcaagtcactgtctggaaagaccccagttcttgacgtcggcacatttgcaaagatcaagtctggagatatcaaggtacgacctgccgtaagacaggtatcaggaagagcggtagaatttgcggacggtgagttggaggagttcgacgccattgtgcttgcgactggctacaagagcaatgtccccttctggttgaaggaccgagtgttattttctgaaaaagatggattgccaagaaaagcatttccgaacgggtggaagggtgagaagggcctgtactcggttgggttcacccggcgtggactgatgggcacctcggtcgatgccaggagggttgcccacgacgtcgagcagcaatggcggaaggccaaagggacgcatcgggacggcgttcctctacctctggtcgctgttgtttaccatggtgatgggttgtgattgtgagttgccaaagggtgtatgtacgtacgcatgcattctgctgcttgcttgtgtagtgctttgtatagggtattgtactgtcaatttctttttctttttttcttttggcgtgcgttcgttttgatgactaaccatcctacgtactataggggagggggtgaatactgaggtggccgtgttcttccaaagtcggggctcagttgacttggcctctagctactgataatgaaagaagcttgcctgg

SEQ ID NO: 18340 - DNA, 219 bp, Zea mays
  Clone ID: MRT4577_116726C.1
gacatcagccaacctttagaaaacaaacaaagggagggattaaggaggaaagaggcgcgtaacaccaaagagggggaaaaggagagcagccaacagacaatcagaggagctccaacgggaaaggacagaagacggcgcgagcgcaggagagagcaagacaccacacgaacaaacacaggccagaaaccccgaaaaggccgcgaagcgggcagtccggca

SEQ ID NO: 18341 - DNA, 237 bp, Zea mays
  Clone ID: MRT4577_116727C.1
aaaagttactttccttgttacgggtcctccgtgttaagagtttgaccgagaaacaggaaataaataaccaaccaaaatttctggtccacttttttaacagatgctcactttgttgcagttcatgggggggggggtaaatgtaaaatttaaagctttcgttcagctcaaactaccaagagtttctccaggcaaaaaccaccagtttcaactttaactgcgccgacctataagtagatc

SEQ ID NO: 18342 - DNA, 1417 bp, Zea mays
  Clone ID: MRT4577_116728C.1
tcggaaatgacggttgcaataaaagtgttgaaatctgatggtttacagggacaatcacagttcgagcaagaggttgctatcctgagtagagtgaggcaccctcaccttgtaactctgttgggagcttgctcagaggtgtctacacttgtatatgagttcttatcaaatggaagccttgaagactttctcatgtgtgcagaaaaaaggcagactctaccatggcaaattcgtgtgcggataatttctgagatctgttcagcactgacctttctacacaagaataaaccgcacccagttgttcatggagatctgaaacctgccaacatccttcttgatgtgaatttagtcagtaagcttagtggcttcggtatctctcgccacctgatccagtccagcagcaacaacaccaccatgtatcacaccatgcatcctatgggaacctttcagtacatggacccagaattttttgccactggagagctcacatgtcagtccgatatctattcttttgggattgtggtcttgcgccttttgacaggaaggcctcctgatggcataaagaagattgtggaggatgccatggagaaaggcgacctgaactcagtagttgataccttggcaggagactggcctgctttgcacgtccagcagttagcactccttgctcttagttgcacagagatgagccggaggcaccgtcctgatctttcagccgtggtgtgggcagtggatgaggcgatgaaggatgctacaacagtaccttcagcctcatcttctagaccagtgtcggatgaaaataacacaccgtcatatttcatttgccctatatctcaggatgtcatgagcgatccacgtatcgcagctgacgggttcacctacgaagccgaggccatcaggagctggcttgacagtggccacgacacgtctccaatgaccaacatgccactagaacacgacgagctcgttcccaatcgcgcgcttcgttctgccatccaggaatggctccagcggcagaaaacggccttgtagcttgttgttgttcctgttggattgctgcgtgattgattgtccaccaccacaaccacgagacggtgttgcttctccaccagaccaccactacgcacggtcatctactgctgcacgctcggagttcaaggttgtttgctgtgaggattctggagaggcaccctcgccttgtaactctgtttgagcatggtctgatgagtaatctttacttgtctaacgagttcgtacctaaacggaagcctcgaagatgtccttgtgtgtgtgtgtgcagaaaagaggcggaaaattcccaacggagttattgcagaaacttgggtgctgtttggtttatatgtttgtaatgtaacaggtaacaaataacgttaaatcatgtttgtttaagtccaatcgt

SEQ ID NO: 18343 - DNA, 250 bp, Zea mays
  Clone ID: MRT4577_116729C.1
ataaggatcattttcgttggctcgtttgggtgtttacgattttttaggatgtcaactcccaaagcaacaaaaacccaacctcctatacatggtaccaggaaacgaccttctgaaaacaactgaaaatacccacccccccggcaatctggtacttgggctgcggccttagcatgaggagggcgctggccatcttaaaagagcgtcgggaactccccctggtcgtgcttcccgtttttctttacccgattcc

SEQ ID NO: 18344 - DNA, 339 bp, Zea mays
  Clone ID: MRT4577_11672C.1
gttttctcaggataagtcaatatatgaggcagtagagagtgcattcattactttatacacaaggaaaagtcccctagaaacagcaaaaagtttgttagaccttgccattgattgcagcattggtgaccttgctgctctcgagagcttaattagttccttagtttccaaagcagacatttcatccagcatggtgcccgcaccggggccctccttttgcgctttcgtaaatggagtgagaccagtgcaaagccgtggagctctatctattctttgtatggctgcaaagtcgtctcccagcattttgggtaatcacttgcaagatattattgacattgggtt

SEQ ID NO: 18345 - DNA, 197 bp, Zea mays
  Clone ID: MRT4577_116730C.1
gggagactaatcttgctggttgctggcacctttccgaccccgtttgaaaccttaaaaacgggtgacgtacgtatgtaattgaatttgaggttgcaaatgtagtttcaactacttttgaagggttcgtgagtggcgtggtcacatgcacgtttcagccggttgactgtatgagatgaatgcagtgtagctgtagttgc

SEQ ID NO: 18346 - DNA, 298 bp, Zea mays
  Clone ID: MRT4577_116731C.1
ggccgccctatgctttcttttttatgtttttttgtgaacagtattcttttacttttcaaatagatgttttcatgccgaatcttaaactggactttctttgtgatgtttgagagttatttgttgttttttcagttttgcttgatcttgctgtatgttaacatgggggggggggggtataacgaaagattaacatgtgctggaagcggtttcatacctactcggcgccgcggctgttttaaaaggttgcgcggaacaggtacttttgtgctaaatgcgctgacgctttttgtttttcccc

SEQ ID NO: 18347 - DNA, 637 bp, Zea mays
  Clone ID: MRT4577_116732C.1
cgcacaggcgagaagatcctcagatcctcaacaacgaggagtgcttcatcctgaagctggaggctggcgccgcgacgctgcgggcgcggagcgctccggcgttcgacatcatccaccacacggtttggggctacttcagccagcgcacggggctgctcatccagctcgaagactcgcacctgctccgcatgaagtccggcaagggcgctcgccgcagcgagaacatcttctgggagaccagcatggagtccgtcatctccgactaccgctacatcgacggcatcaacatcgcgcacggcggccacaccaacgtcacgctcttccgctacggcgagggatccgtcaaccacaagcggaagctggaggagacatggacgttggaggaggccgatttcaacgtgcacggcctcaccacggactacttcctgccgccggccgacctcaaggaggacgacgaggatcagaataagtgatgggctagctatttatttcactcattagtcgagttgagagactaaaagtattcaaaaacgtattaatgtaacacccgggatttaggggtataaaaatctcttctacaatactcaccaagttcaggttttataaaaaaaaacctaagggaaaaaaaaaaaaaaaa

SEQ ID NO: 18348 - DNA, 396 bp, Zea mays
  Clone ID: MRT4577_116733C.1
tttcccgggtggcccaactcgtccgtgagcatttagaaacacaccatgcgaactgcactagcaacaacctaacaacatcggctgccaagatattatccctagcttgcgcttcttgcgctccttgcgagcgcaacacatgcgtacattattgcacagtgctcacttgctcctagttccatatatatcacagttcctcccaccatgttctgtaatggccttcgaacacccaattgtgcaagcctatacgctacaacaagcgatttgctgtagcgatttacaacaaccaattgcccattcgccacaacaatccttggcacatctaacaatacataccatcgcaacgcagcagctacaacagcatctaccaacactgagtcatctagccatggtgaaccc

SEQ ID NO: 18349 - DNA, 132 bp, Zea mays
  Clone ID: MRT4577_116734C.1
ttgcaactccctgacgtgagtcgtattactcagcctcgtactcggaggagagaacacgcatcatggcgtctggaacatcatcacgcgtggcatgttctacagcatgcttagctagcgcggttacaggggatg

SEQ ID NO: 18350 - DNA, 1173 bp, Zea mays
  Clone ID: MRT4577_116735C.1
aacgccttcacggctcctccatctcgtcgccactgtgagaagctccatcgtcgtgcatcaactcagcaagattttgaggagagaagaacaagaattttgcagcaagactttgacagaagcagtatattttaatcttcgattcacatttgtcttggtcggttgggaggagacaactcatgatgcactagtcttacatgatgctttagaaagagaaaatggtattcgtgtgcctgaaggcaagttctacctagtcgatgccggatatggagccaaacttggatttatgccccttttcgtggtgtacaataccacttgaacgagcggggaaataatccagtgcaaaatgagaaaaaattattcaatcataggcattcatctctaagagtttcagtagagtgagcatttggttcattgaaaagaagatttaaaattcttgatgatgctacaccgttcttccccttctctacacaagtagaaattgtggttgcttgttgtattattcacaattgggttatacaagatggacgtgatgactttatcattcctgctcaaaaaaaaaaaggaaccgcccacttccccaaaacctgccacgcttgaacggctctcaatcccaaccctaacagcaccgtctctcggatctgatctgatctgatcctccaattcgttcgtccacgtctcgccatggaggacgaggaacttgttgatcagaagaaatatcttgaggaacgatgcaagccgcaatgtgtaaaatcactttacgaatatgagaaatgcgtcaagagagttgagaatgatgatactggtcacaaacactgcactgggcaatactttgattactggtcatgcatcgacaaatgtgtagcatcaaagctctttaagaagctcaaatgatttgtgcgatgtgatgcgacttctgacaaagtgaatcgaatttgcataccttacacctttggaaagtgtatgagctcgtacatcttggaataaaacatcaatttttctttgctagcaaaaaaaaaaaaaaagcggcctagcatgtggactggactgtgcataaatttcatgtgcatgcatctggtgtcaatcttgctcatttacgtgctgttttgtgagaaaacatattatcaaatggtttttcagtaaggaaaaaaaaaaaaaaaaaagcggcctagggcc

SEQ ID NO: 18351 - DNA, 1010 bp, Zea mays
  unsure (1)..(1010): unsure at all n locations
  Clone ID: MRT4577_116736C.1
ctcgaggccggccaggaccacttcaaaacactcataacacaaagcacaaagcaaagctcatccnttgagttaaaaaatggcagcagcttcttccatggctctctcatccccatccttggctggcaaggccgtgaagctgggcccatcagccccagaagtgggaagggtgagcatgaggaagaccgtcaccaagcaggtctcctcaggaagcccatggtacggcccagaccgcgtcaagtacttgggcccattctctggcgagcccccgtcctacctaaccggcgagttcccaggcgactacggctgggacactgctgggctttccgcagacccagaaaccttcgccaagaaccgtgagctcgaagtgatccactccaggtgggccatgctcggggccttgggctgcgtcttccccgaactgttgtcccgcaacggggtcaagtttggagaagctgtgtggttcaaggccgggtcccagatcttcagcgagggtgggctggactacttgggcaacccaagccttgtccacgcccagagcatcctcgccatctgggccacccaagttatcctaatgggtgctgttgagggttatcgtattgctggtgggcccctcggtgaggtcactgacccaatctaccctggtggcagctttgacccattgggccttgctgatgacccagaggcttttgctgagcttaaggtgaaggaactcaagaacgggcgattggccatgttctctatgtttgggttctttgttcaggccattgtcaccggtaagggtccattggagaaccttgctgatcaccttgcggacccagtcaacaacaatgcctgggcctacgccaccaacttcgtccccggcaagtgagcatgaaagaaaaggatgacttgtggacttttgagagtttttagatttgtgtttggtggagtatatgttatttgcatgtacttcagataatgtgaattatcttgtgtatcccatccccacttatggtacnttgcttttacaa

SEQ ID NO: 18352 - DNA, 295 bp, Zea mays
  Clone ID: MRT4577_116737C.1
gaggagacgaaggttgaggaggtcgtatagaaggtcgagatatcctctactaggagagctactacgatattcaagatttaggagactaaagaggaggagttcgacaagagctttcctacaaacaccgttcaagatctgcgttaggaggtggttatattataagaggaggtcactaagactacgttcgcgaaggaggtgtagtaggaagtgcacggtagtgaacttgcctagggtacttaggacttattggtgttcctgctataggtacggggtctggttacccccttccccaagt

SEQ ID NO: 18353 - DNA, 286 bp, Zea mays
  Clone ID: MRT4577_116738C.1
ttacataccacttcatagcctagctatagtggcacgtaggtacgcttcacagaccgatgcatatcccaaactgctctatcttagccatccctattttattgtaattaagggtgtaacatactagtgctcgtcagcaacttctaagatgactatggaaaatgtaccttgtcactctgatttaaaggaattctccaatgttgtttcatctaaaagcattggtgtatactaattatcgtgtgatcatgctcattcatgttgtgtcctacttgcataggtatataaattt

SEQ ID NO: 18354 - DNA, 271 bp, Zea mays
  Clone ID: MRT4577_116739C.1
cagaccaactcccaccacggtaaacgagcaataccaacacaaggggacaaagtcagcaaaggcatgtacaccacccaaaagagaccccccatcacaaaacagacccaaaaaaaaacagcacgcgccaaccccccacaccaaacgaacagggaccccgaagcaaaccacgctgatacacaccactgggggcacgcggggcacatccacgggctgatccccacagaagagaagaccccggcagcccctaccccattcaccagaagcacccacc

SEQ ID NO: 18355 - DNA, 1300 bp, Zea mays
  unsure (1)..(1300): unsure at all n locations
  Clone ID: MRT4577_11673C.1
ggtaccctccgaggtctcggcccgggccgggnngggagtatggtcgcaagggctcaaacgtagggggtcggcccgggaatcggccccatcactcttccgtcgtgtcttctcgcgctttccactcccaacgagatccatcacccccaacctctgtaagcttcccttgacgtcgtcgtcgtcatccatggagagcaaggacggcacccacgatcccgccacgacggccgcgccaccggccggcgcgccgcagcccgcgatgccttccgcggagacggcgcggtggggcacgcggcagatgggcccgccggcggcccccggggcgcacccggagaaccaggaggcggcgcggtggacggccgcgcgcggggaccaggagctgccgccgtacgtcatcatcggtgagcccgtggcggcgccgccgccgccacagcataggggcaagggggacagccccatggagcacatcctcgacttcttcaacacctggagccgcaaggccgaggagctggcctccaacatctggttcaatctgaaggccgcgccatccatgtcggacgccgcgatggggaagctaagcctcggcgcgaaggcgctgtcggagggcggcttcgagaagctgtacaagcagacgttctcgtccagccccgacgagcacctgaagaagacgttcgcttgctacctctccacggccacgggccccgtcgccggcacgctgtacctgaccaacctgaacgtcgccttctgcagcgaccgcccgctctccttcgccgcgccgtctggccagaccgcctggagctactacaaggttatgatcccccttggcaagatcgcgacggtggagccggtgacgatgaaggagagcccgccggagaagtacgtccacgtcgtcaccgtcgactcccacgacttctggttcatgggcttcgtcagctacgacaaggccgtgcacaacctcgtcgaggccgtctcccagcacggcgtcgccactgccggcggcaagtgatgaggcgacgccgctccggagactgggtgggcgttcggcacccgtcgtcgtgtgtatatatgtagctgatggctctgcctgtgcattactcgtgttctgctactactagtactacgatggtgtcccggcgtgtgtttgaatgttctcggtgtgtgtggcacagatgcgccactgctattctatgcacttgtgagtattatgctttcacggactcgtcgagaaacgagagtgaagttcttccttttttaaaaaaaaaaaataatattataaaattttatttaataaagattatatatg

SEQ ID NO: 18356 - DNA, 362 bp, Zea mays
  Clone ID: MRT4577_116740C.1
gggggttggggatctgcttggttcctttctcgcttcgggacactgtcgcctctcggtcctcatggagggcgaaaagggggccccgccggggaaaaagcgcccccgaacagggcccgcccgccgggccaaaggggggccgggcgggcccaggcgggcgggccagccacccccgagccgggggcaaagacccccgccgggtggttcacgggccccgagcacgaaagcgtccacaccgcccgcacagggggcgaccagcccgccgcccgagcgaccaggggtggccccgcccgggaacgcccccatgggggggggcaaaggggacccggggggggacaaagacgccgggggggccatggagcccc

SEQ ID NO: 18357 - DNA, 402 bp, Zea mays
  Clone ID: MRT4577_116741C.1
catcaacgaccgagctcttcatcgtttaataaacaactcttccgtttttttttcaagatcagtctaactgctgagtgcatgtgcttcggccgcgtacgtaggtgaacacggcatgggctctgggtctcattgttggtccagctcttggaggctacctttcgcagccagctgagaaatatcctcacgtgttttccaaagactctgtatttggcagatttccataccttttgccctgtctaagtgtatcagcgtttgctacacttgtcctgataagctgtgagtggcttccggtatgtatcaacactctttagcctacacaaaagccatgatggtttaaattttattcctttggaaatcactaacactgctactcgtctgaatatattacaggacattgtcatt

SEQ ID NO: 18358 - DNA, 441 bp, Zea mays
  unsure (1)..(441): unsure at all n locations
  Clone ID: MRT4577_116742C.1
gtgaagcgggagcagcagcgaaagccagcgggtgcatggcgcccttcatgcccccgctgccaccagcgagtaaccgtgctgctgtgaagcgggagcagcagcgaaggccagcgggtggtggtgaccgtggcggggacaggttcgagacagtgtctgagcagggcggcaggggccatgacaacactggaaactctggtgcagatggagccagaccccagcctggagacaggtctggtagaagcgcccttcaagacgacggcagcgagagcgaagaggagacggctcccagacgatcaaggaaacgatagagggattctgagattctattcatactggacatggtgaaaacagatcatctcttatttttgtaactgagattagaactaaggtagtgagagagaaaaaatgtggtgggcagngacattgttagttgaaaatttt

SEQ ID NO: 18359 - DNA, 420 bp, Zea mays
  Clone ID: MRT4577_116743C.1
tcgcccttgcgtccgcgacatgagcaagagacccagagggaagcggctgtctggcatctctgagaccgtggcgccagggaaagggaagcacgcgcggccaaaggcaggcacaaagaaaaaggccgaggctgcatcggtggcggccgccgctgctgctgccggccataacaccgactacatagacgttcgggcccgccgaggccaggccaccataagccacagcctcttcgagcgcttgaggagggagaggatcagctagcggatgccgcacctgcaggagcttttgcccgggttcagaaaggtcacggtcaaggcctgcatgcttgacgagatcatcaactacatgcagtccctgcagaagcaagccgagttcctgtccatgaagatcgacgctttcaacccggtggtgagcttccacat

SEQ ID NO: 18360 - DNA, 1691 bp, Zea mays
  Clone ID: MRT4577_116744C.1
gccggccgttccgagaggacaaggaagaacgaagagagatcagcgacttaacaacaataatggccaccgccatagttcccacggacgccgagctgctgcaggcgcaggccgacctgtggcgccacagcctctactacctgacatccatggcgctcaagtgcgcggtggagctccacatcccgaccgccatccacaacctaggcgggtctgccacgctgccggacctcgtggccgcgctgtccctgccagcggccaagctcccgttcctcgggcgcgtgatgcggctgctggtcacgtcgggcgtcttcgcgtcgtccgacgacgtgcagtaccggctgaacccgctgtcctggctgctggtggagggcgtggagtcggaggaccacacctaccagaagtacttcgtgctgggcaccgtctcccgccactacgtggaggccggcatgtccctggccgacgtcttcagcggcctccgctcgctcacctactgctgcggcaggcaggggaacgccagcgcggccgccatcgtcaaggccttcccagacatcaagtgcaccgtgctcaaccttcccagggtcgtcgaggagacgacgaccaagaccatcaccatcccgcctgcgcaggctgtcatgctcaagctcgtcctgcacttctggagcgacgacgactgcgtcaagatcctggagctgtgcaggaaggccatcccttcccgccaagaaggagggaaggtgatcatcattgagatactcctgggcccgtacatggggccggtcatgtacgaggcccagctgctgatggacatgctcatgatggtgaacaccaagggcaggcagcgcggcgaagacgactggcgccacatctttaccaaggctggcttctccgactacaaggttgtcaagaaaatcggagctcgtggtgtcatcgaggtctacccatgatccatgatcgatgtcatgtgactgtgagaggacgatactgtacaattaaataaacggggtatctagctactactcagcttttgtacctcgagatccatgcatgttaattacttgcttccatctgttttcaaaatgcatctatgtaatgtacttcgctgattcgtccattgtgctcgaaggccatcccttaaaacaaaaaaaaaaggaaggtgatcatcattgagatactcctgggcccgtacatggggccggtcatgtacgaggcccagctgctgatggacatgctcatgatggtcaacaccaagggcaggcagcgcggcgaagacgactggcgccacatctttaccaaagctggcttctccgactacaaggttgtcaagaaaatcggagctcgtggtgtcatcgaggtctacccgtaagctgctgcatgatcgatgtgatgtgactgtgagaggacgatactgtaaaattaaataaacggggtatctacctactcagcttttgtagtacctcgagatccatgcatgttaattacttgcttccatctgttttcaaaatgcatctatgtaatgtacttcgcttcttaaataattgtgctcgtagatttggatttattactttggtacagatcgagcagttgttccattccagcaactgtaagtgtaagctgaggttcagatcgtactccatcgtcagcaggatatattatactagagggattcaaagtaaaaaaaaaaaaaaaaaaggccccta

SEQ ID NO: 18361 - DNA, 1455 bp, Zea mays
  Clone ID: MRT4577_116745C.1
cattggtaccctcgaggccggccgggaaaatcgatgaaacctgctccgatccgcactccctctgccttgcccacaatttctagctatttaaacccttttacgcaccataacctagcaggcacatttaaggaagaacgaagagagagatcagcaacttaacaacaataatggccaccgccatagttcccacggacgccgagctgctgcaggcgcaggccgacctgtggcgccacagcctctactacctgacatccatggcgctcaagtgcgcggtggagctccacatcccgaccgccatccacaacctaggcgggtctgccacgctgccggacctcgtggccgcgctgtccctgccagcggccaagctcccgttcctcgggcgcgtgatgcggctgctggtgacgtcgggcgtcttcgcgtcgtcgtccgagtccgacgacgtgcaggtgcagtaccggctgaacccgctgtcctggctgctggtggagggcgtggagtcggaggaccacacctaccagaagtacttcgtgctgggcaccgtctcccgccactacgtggaggccggcatgtccctggccgactggttcaagaaggaggaggacgaggaccgccagctgccgtcgccgttcgaggccctgcacggggtgcccctcgtccacgagagcaccaagctgctggacgaggagctggacagggtcgtggaggaaggcgtggccgcgcacgacaacctggccatcgggaccgtcatacgggagtgcggcgccgacgtcttcagcggcctccgctcgctcacctactgctgcggcaggcaggggaacgccagcgcggccctcatcgtcaaggccttcccagacatcaagtgcaccgtgctcaaccttcccagggtcgtcgaggagaaggagacgaccaagaccatcaccatcccgcctgcgcaggccgtcatgctcaagctcgtcctgcacttctggagcgacgacgactgcgtcaagatcctggagctgtgcaggaaggccatcccttcccgcgaagaaggagggaaggtgatcatcattgagatactcctgggcccgtacatggggccggtcatgtacgaggcccagctgctcatggacatgctcatgatggtgaacaccaggggcaggcagcgcggcgaagacgactggcgccacatctttaccaaggctggcttctccgactacaaggttgtcaagaaaatcggagctcgtggtgtcatcgaggtctacccgtaagctagctgctgcatgatcgatgtgatgtgagtgactgtgagaggacgatactgtacgattaaataaacggggtatctagctactcagcttttgtacgtacctcgagatccatgcatgttaattacttgcttccatctgttttcaaaatgcagctatgtaatgtacttcgcttcttcgtcaaaaaaaaaaaaaaaaaaggccccta

SEQ ID NO: 18362 - DNA, 715 bp, Zea mays
  Clone ID: MRT4577_116746C.1
gccggccgggccgggctaataataaataaaaaatgtcattgagcaagttattcagcaatttaacgattcaaacgcgtagcattagcagctacagacatatgcaccctaccaaatttgttagcattttgcaaaatgtaccaatgaaaccccgtagtgcttggcaagtctatatcagggagcacctcaaaggcacaaagacaacccaagagggattgaccaaatcttcaaccgaattatctgccaagtggaaagctttatctgaacatgagaagcagaaatattacactatatatgaatcagaaaaggacgcttatgaaaaagcctttgctgtagctgtgaacaatgcttcgcctaaacaattttaccaagaaaatttgttgagaaaaaaatacaagttgcccttgttggttgatcccaaaaaaccaaagagaccacttaatgcatatttatcttactatcaagcacttagagattccaaacatgcttcaatggaaggacaacctgttgctgaacaagctaaaattgttggacgtttgtataaggagcttcctgaatcagaaaagaagatttataaagacaaggctaatcaagcaatggaacaatacaagaagcaagtagctgaatacaacagagaagctggtatacatgcctaagaatgaactttaatttttttttttttttttgggaaaataaaccttttttgtcttttattttt

SEQ ID NO: 18363 - DNA, 1063 bp, Zea mays
  unsure (1)..(1063): unsure at all n locations
  Clone ID: MRT4577_116747C.1
ggnaatgcatttcataggttaaatttgccgcttgtcatattttgtaggcttcacttcttaacattgtccctcgttctcatatatgggtggaagataaagatttgtcctgggttgatggtgaggtatttcgaattgatggccaaaacgcccatgttcgcacaaccaaggggaaggcggtatgtgttgctctgcttttgaagtctgtcacaaaccctttttagtttgttttttagttcttcataatttcatagttctgtttctgacccagagtttctcgcacaaccaatgttgttaactgaatagttaaactgaataaaaggtatgatgtttcacatttttaattttaaaaattatttcttttattataggcaagaggttacctctattgaaggagatgacaggtgtctattattatagcagtaaatcatctttgttgctcctactacacccgttttgagctagaaatttcgtacttaatcaccattacaatatgacagaagtgtaggatatgcacaaaagcacttattgagttgagtggtaatatatactgccaactccaagggaatttgattttattactcaacgtttatgcctttcatttactaccttcattttttttccagaagtgtttagtgcatcaacattgttttcagtaaatgtcttgactgttgccttttattgctatatgtcgggccgttttgttgcgctgttgtgcacgcggttgtagggagggcgtattagtggcggctacgagggaccgatgttcctgtgtggcgatgacaacgacactgtggagccaaggcaatgtcagcaagctgatttttcagattggaatctatggttctttttaaaggtcggatatgttatagcatcttaaaaagatttgtcagaatgtaaacatttgttctgaggtcatttaggcctcaaacaaaatttcttggacttatttcgttggagggaatgggacatctcgagatctaaatgtgtatagaagatccaaatgtgtatagaacatatattttttatgggtaccaaatataattgtgtgcaaagcacggacaaa

SEQ ID NO: 18364 - DNA, 3221 bp, Zea mays
  Clone ID: MRT4577_116748C.1
gcctgcgctccctgtcggtttgggtcgtcgacgccaacgccgacgccgtcgcccgcactcgcactcgcactcgcatcgccgccaccagcacccagcaaggatcgggcggcgaaggcatcctccacatttcctccttgcacgagatcgcccgcagcttggccctcgagaacctgcacatcaagggaaaggtgagcctcccttcgtggatcggaacggctccgaagctcaccaacgtcaccctaagcgacaccgagatggacggaggagatgctctgaggaggctcgccaccgtcgtgaacctgtgctgcctcaagctcagccgcaacgcgttcaccgagcaggcgctccacttcaaggacgtccagttccaagctctcaggttcctcgtcgtcgagggcgacgccttcaccagactcgccttctccgccggcgatgcagctccgaagctcgagaggattgtctggtccataggaggaacacgagcggcgcagaagaacgaggagctcatcgtcggaatccaacaccttcccagcctgaagaggattgagctgagggccagcttcagggagcacaatcttttggaatggatgcggcagcagcggcaaacaaccacttcatcggcagcgaagtatcgcatctactacgtatcctcctcaaccgatagacgaaatcaaacaatcgctgaggtcccaaaagctgctactgatactaccttgacacttccggctgctgttatccatcaactaacttaaccaacagtaaaacctacgtatatatgacatccatggcgctcaatggcgcggtgtgtatacacatacatatgtatattgccctcgacgggaaaatcgatgaaacctgctccgatccgcactccctctgccttgcaatttctagcttaaacccttttacgcaccataacctagccactaaggaagaacgaagagagagatcagcaacttaacaacaataatggccaccgccatagttcccacggacgccgagctgctgcaggcgcaggccgacctgtggcgccacagcctctactacctgacatccatggcgctcaagtgcgcggtggagctccacatcccgaccgccatccacaacctaggcgggtctgccacgctgccggacctcgtggccgcgctgtccctgccagcggccaagctcccgttcctggggcgcgtgatgcggctgctggtgacgtcgggcgtcttcgcgtcgtcgtccgagtccgacgacgtgcaggtgcagtaccggctgaacccgctgtcctggctgctggtggagggcgtggagtcggaggaccacacctaccagaagtacttcgtgctgggcaccgtctcccgccactacgtggaggccggcatgtccctggccgactggttcaagaaggaggaggacgaggaccgccagctgccgtcgccgttcgaggccctgcacggggtgcccctcgtccacagagagcgccaagcttctggacaggagctacgggtctggggacctcggcggcggccgggccgggaggcacaaggaagaacgaagagagatcagcgacttaacaacaataatggccaccgccatagttcccacggacgccgagctgctgcaggcgcaggccgacctgtggcgccacagcctctactacctgacatccatggcgctcaagtgcgcggtggagctccacatcccgaccgccatccacaacctaggcgggtctgccacgctgccggacctcgtggccgcgctgtccctgccagcggccaagctcccgttcctcgggcgcgtgatgcggctgctggtcacgtcgggcgtcttcgcgtcgtccgacgacgtgcagtaccggctgaacccgctgtcctggctgctggtggagggcgtggagtcggaggaccacacctaccagaagtacttcgtgctgggcaccgtctcccgccactacgtggaggccggcatgtccctggccgactggttcaagaaggaggaggacgaggaccgccagctgccgtcgccgttcgaggccctgcacggggtgcccctcgtccacgagagcaccaagctgctggacgaggagctggacagggtcgtggaggaaggcgtggccgcgcacgacaacctggccatcgggaccgtcatacgggagtgcggcgccgacgtcttcagcggcctccgctcgctcacctactgctgcggcagggcaggggaacgccagcgcggccgccatcgtcaaggccttcccagacatcaagtgcaccgtgctcaaccttcccaggggtcgtcgaggagacgacgaccaagaccatcaccatcccgcctgcgcaggctgtcatgctcaagctcgtcctgcacttctggagcgacgacgactgcgtcaagatcctggagctgtgcaggaaggccatcccttcccgccaagaaggagggaaggtgatcatcattgagatactcctgggcccgtacatggggccggtcatgtacgaggcccagctgctgatggacatgctcatgatggtgaacaccaagggcaggcagcgcggcgaagacgactggcgccacatctttaccaaggctggcttctccgactacaaggttgtcaagaaaatcggagctcgtggtgtcatcgaggtctacccatgatccatgatcgatgtcatgtgactgtgagaggacgatactgtacaattaaataaacggggtatctagctactactcagcttttgtacctcgagatccatgcatgttaattacttgcttccatctgttttcaaaatgcatctatgtaatgtacttcgcttcttcgtccaaaaaaaaaaaaaaaaaggcctgcaggggcagaaggacggaaactaatcatgatggtcaacaccaagggcaggcagcgcggcgaagacgactggcgccacatctttaccaaggctggcttctccgactacaaggttgtcaagaaaatcggagctcgtggtgtcatcgaggtctacccgtaagctgctgcatgatcgatgtgatgtgactgtgagaggacgatactgtaaaattaaataaacggggtatctacctactcagcttttgtagtacctcgagatccatgcatgttaattacttgcttccatctgttttcaaaatgcagctatgtaatgtacttcgcttcttcgttaaaaaaaaaaaaaaaaaaaaaaaaaaaaaaaaaaaaaaaaaaaaaaaaaaaaaactcgagaaggggc

SEQ ID NO: 18365 - DNA, 472 bp, Zea mays
  unsure (1)..(472): unsure at all n locations
  Clone ID: MRT4577_116749C.1
ggcagttgaggtggattaaaccaaacccagctacgcaaaatcttagcatactcctcaattacccacataggatgaataatagcagttctaccgtacaaccctaacataaccattcttaatttaactatttatattatcctaactactaccgcattcctactactcaacttaaactccagcaccacgaccctactactatctcgcacctgaaacaagctaacatgactaacacccttaattccatccaccctcctctccctaggaggcctgcccccgctaaccggctttttgcccaaatgggccattatcgaagaattcacaaaaaacattgcctcatcatccccnccatcatagccaccatcaccctcnttaacctcnattctacctacgcctaanctactccanntcaatcacactactccccnnntntaacaacgtaaaaatnagatgacagtttgaacntanagaccca

SEQ ID NO: 18366 - DNA, 599 bp, Zea mays
  Clone ID: MRT4577_11674C.1
aatcggcccctcactcttccgtcgtgtcttctcgcgctttccactcccaacgagatccatcacccccaacctctgtaagctttccttgtcgtcgtcgtcgtcatccatggagagcaaggacggcacccacgatcccgccacgacggccgcgccaccggccggcgcgccgcagcccgcgatgccttcagcggagacggcgcggtggggcacgcggcagatgggcccgccggcggcccccggggcgcacccggagaaccaggaggcggcgcggtggacggcggcccgcggggaccaggagctgccgccgtacgtcatcgtcggtgagcccgtgggggttacgtcgacgaatacatctagaatctcactgctgtgttgcatgcagagaatgctcatgttctccaaaaggtggacgagggtggaaccggatttgtccttaaccatctgaatgacctcgaattttttgtcgtcgatgtcatgagccatgatgcgtatgttaaatctcgctattaaggcgatgtcggcagtaatcctacattaatctgtttatctcatgttctcaacgagacccgatgataacctggagaagacgttagtttgct

SEQ ID NO: 18367 - DNA, 998 bp, Zea mays
  Clone ID: MRT4577_116750C.1
cccacgcgtccgcggacgcgtgggctcggcgtcgccctcacccccatctcgaggccgccaccccgccgccatcctggctcaccccacgacgcaaatctgtgtgccgcccctcccctcccatatcgccatctctcctcccctccccggtcaccacccatacctcagccacctcggcggttgtgctaggggcgatggtggtggaggctgcggtcgcagctgtgttagtggaggagatgtggtggcggcagctagacagcatcgtgagcgcggtgtcgtttgggctcatgtccatgttccttgccattgccatcctcgagcacttcctccgccccctggcccacacgctcgagcacgcgccgccccgggggatccgccaccgcctcctcctcttcctcagccgtggcggtgcagccatgcccttccatggtgtgccacaccagctctcggaggtgcacaagaagcgcacgctctaccatcccgagttgccctctgcctccagatgtccgcccaaaacataccaccaggaaaatattgcacatattatccttccctctaaatctcatcagtccactgaccgaaccgaaccactgttcgacggagcagatgacacgatggccatcttcctggcgctgcggtcgccgaagctggaggtgttgggcctcaccactaccttcggcaacgtccacaccgccctcgccacgcgcaacgcgctccacctgaaagccaccaagctgaggatcgcaagctttgtccacggttcagacggcctgaggatcgcaagcttcgtccacggttcagacggccactgtggatcgaggttaatgccaccaatgctgggacagaaacaagcttcaatgttaaacattgtcacaggttctcatatatgggtggaagataaagatttgtcctgggttgatggtgaggtatttcgaattgatggccaaaacgcccatgttcgcacaaccaaggggaaggcggcaagaggttacctctattga

SEQ ID NO: 18368 - DNA, 1614 bp, Zea mays
  Clone ID: MRT4577_116751C.1
tcgtccgggattgattttattcttgttctaaatattgcatttgatggaacagaacgagaccttactacgttgcacttatccaaattgatcagaagttaattttaacatcataaagaaaatatctgatttacagatgtccgcccaaaacataccaccaggaaaatattgcacatattatccttccctctaaatctcatcaggtatgctgaacaggggcgcaaaacttctaaaaacattgtagcatgccttctctaaaactaagcttttttgttacttgttttttcaagacaagcggcacaaaacatagccaacattccagttgttacactcaaccaagtaaatatggtcagccatccagttcccatctcttctacttctctactactacttatgtacctaacgtaggcgtccacactcaaaattggtgcacggttctgcctttctccacgcgctggccgcgaatctcgtcggtctaccaaatccgtcgcgaatctcgtccacaaaacttccagccatggctgccgtgaccaatccatggcagccgcgccctggtcccccgaccgcgccggcttccatccatggtgcttcttcttgttgtggtgttcggatcgcagtccactgaccgaaccgaaccactgttcgacggagcagatgacacgatggccatcttcctggcgctgcggtcgccgaagctggaggtgttgggcctcaccactaccttcggcaacgtccacaccgccctcgccacgcgcaacgcgctccacctggtgccgccgcctaccttccttcctctctctcccccaccctgctcgtctgttccacccactccgaccgcggctcacatttgcttctgatgtgtgtgcttgagctggaggctgttggcaggactgacatccctatggcagagggatcccatccaacgatcaagaaagccaccaagctgaggatcgcaagctttgtccacggttcagacggcctgaggatcgcaagcttcgtccacggttcagacggccactgtggatcgaggtgcggcaggtcggggcgccgccgcggattgtaggctcgaccgagactacttcgtcaccaacgtcctcgttttagcaagcatcactataaagcacgagtgaaggttctcccagaggttaatgccaccaatgctgggacagaaacaagtgagttgaagcaagatcgacagatttgataaaggttctcatatatgggtggaagataaagatttgtcctgggttgatggtgaggtatttcgaattgatggccaaaacgcccatgttcgcacaaccaaggggaaggcgggatggcgtattgtggcggctacgagggaccgatgttcctgtgtggcagtgacaacgataccgtggagccaaggcaatgtcagcaagctgatttttcagattggaatctatggttctttttaaagatcgaatatgttctagcatcttaaaaagatttgtcagaatgtaaacatttgttctgaggtcatttaggcctcaaacagaatttcttggacttatttcgttggagggaatgggacatcttgagatctaaatgtgtatagaagatccaaatgtgtatagaacatatatttttatgggtatc

SEQ ID NO: 18369 - DNA, 1516 bp, Zea mays
  Clone ID: MRT4577_116752C.1
tgtgcttgagctggaggctgttggcaggactgacatccctgtggcagagggatcccatccaacgatcaagaaagccaccaagctgaggatcacaagctttgtccacggttcagacggcctgaggatcgcaagcttcgtccacggttcagacggccactgtggatcgaggtgcggcaggtcggggcgccgccgcggattgtaggctcggccgagactacttcgtcaccaacgtcctcgtatgttctcatatatgggtggaagataaagatttgtccagggttgatggtgaggtatttcgaattgatggccaaaacgcccatgttcgcacaaccaaggggaaggcggtatgtgttgctctgcttttgaagtctgtcacaaaccctttttagtttgttttttagttcttcataatttcatagttctgtttctggcccagagtttctcgcacaaccaatgttgttaactgaatagttaaactgaataaaaggtatgatgtttcacatttttaattttaaaaattatttctattattatagactagaggttacctctattgaaggagatgacaggtgtctattattatagcagtaaatcatctttgttgctcctactacacccgttttgagctagaaattttgtacttaatcaccattacaatatgacaggtgttcactacagttatacttgcattcactttgcaaccaataccgtctcagttatttttaaaatggtctttgactaattccttcaatgtactactgatctactgcatccctgttaaccaataccatcagtttttattaatttaactttgcctagaaacaacatatgtgtaggatatgcacaaaagcacttattgagttgagtggtaatatatactgccaactccaagggaatttgattttattactcaacgtttatgcctttcatttactaccttcattttttttccagaagtgtttagtgcatcaacattgttttcagtaaatgtctttgactgttgccttttattgctatatgtcgggccgttttgttgcgttgttgtgcacgcggttgtagggatggcgtattgtggcggctacgagggaccgatgttcctgtgtggcagtgacaacgataccgtggagccaaggcaatgtcagcaagctgatttttcagattggaatctatggttctttttaaagatcgaatatgttctagcatcttaaaaagatttgtcagaatgtaaacatttgttctgaggtcatttaggcctcaaacagaatttcttggacttatttcgttggagggaatgggacatcttgagatctaaatgtgtatagaagatccaaatgtgtatagaacatatatttttatgggtatcaaacatgattgtgtgcaaagcacggacatggtactataacaatgaaacacatatttgttcattatatatatgcttgatacgtttgctgatgcttctgagagaacatgattaaattaaattaaacttgattaaatgaaattgcccaaccaacac

SEQ ID NO: 18370 - DNA, 676 bp, Zea mays
  unsure (1)..(676): unsure at all n locations
  Clone ID: MRT4577_116753C.1
gttcacccccgacgctccagacttccgactccctctacagatccttcagatactcagcgcccttcgccgcccccttcatgcgtgacgatcacagatcactggaaccgcgctggaaaggagcgcgtgctccatgcccaaggttgaccccctcctcaacatcaccaacgcccgcgatcgcgctctcctgcgcatgcatgacatccggctgttcaacgccgttctcgctgaattacaaaacacgcctatgcctgactcatcggataagtacatctatgtatgattttgtgttgtattccccactaatatcctctactgatggtgacttgcggaagacttatgctactctagctgtatcgatgacactgcatactgtgaaaagacatatatggatgggatattgatacaagtggtctgggtggaggatcctctgatcatgactaggatgatgaaactgtgcctactggcagatgtgctgcatgtgttgttgaagtggaaacgtgattgattgcaaatctgacaacagaaaaactgccacaaatctgaccatctccagatatcggacaactgagcgctagttgataacgcactagacatctacatgggctgtatttgtcctcacgngtgacacctgaatctatccagatatccgctgagcatgctgccgaaataacaaggt

SEQ ID NO: 18371 - DNA, 583 bp, Zea mays
  Clone ID: MRT4577_116754C.1
cattgttacagtactatgtccgtgctttgcacacaattatatttggtacccataaaaaaatatgttctatacacatttggatcttctatacacatttagatctcgagatgtcccattccctccaacgaaataagtccaagaaattttgtttgaggcctaaatgacctcagaacaaatgtttacattctgacaaatctttttaagatgctataacatatccgacctttaaaaagaaccatagattccaatctgaaaaatagcttgctgacattgccttggctccacagtgtcgttgtcatcgccacacaggaacatcggtccctcgtagccgccacaatacgccctcccttgccaaagtacgaagaagcaaaagatgacaaaaatgatcaaagccaccagattcgcaatggaagatgctgatttggaattcatcatcttctccaatgccttcatacgcttcatcctagccctctttaacaccacaagctccgaaaaaaacaattttcattttatctttttggtatcatcttttaaagttcttcattttgtttccttggaacaaacctatttggtgcacctacac

SEQ ID NO: 18372 - DNA, 557 bp, Zea mays
  unsure (1)..(557): unsure at all n locations
  Clone ID: MRT4577_116755C.1
ctcatcattacggagtgggggggaatctttcatcagttggatctcactgcattcnttcacaagttcgtcagtgtaaagagggctaggatggagcgtataaggcattggagaagatgatgaattccaaatcagcatctccattgcgaatctggtggctttgatcatttctgtcatcttttgcttcttcatactttggcaagggagggcgcattgtggcggggtggctacgagggaccgattttcctgtgtggcagtgacaacgaaccccgtggagccaaggcaatgtcggcaagctgatttttcagattggaacctatgtttttttaaagatcgaatatgttctagcatcttaaaaagatttgtcagaatgtaaacatttgttctgaggtcatttaggcctcaaacagaatttcttgaacttatttcgttggagggaataacacatctcgagatctaaatgtgtatagaacatatattttttatgggtatcaaatatgattgtgtgcgaaacacggacatactgtagtactataataacccaccacacatttttacat

SEQ ID NO: 18373 - DNA, 295 bp, Zea mays
  Clone ID: MRT4577_116756C.1
atgcactcaagcgctcacgactgacttgtcaaagagctccgtgaggctgacaaggccatatacaagcatgcgcgtcacttttgcgtgcttactgatgactgtgaccagccatatgaccataagctggcgatggcactctgcgctgagcacaatgctcacctcgtcactgttcctggcgcgaaaactcttggcgagcagtccggactttgccagattgactctgacggcaaggcacggaaggatgtaagctgctcctgtgtcagggccaaggactacggtgaacaatctgacggcc

SEQ ID NO: 18374 - DNA, 819 bp, Zea mays
  unsure (1)..(819): unsure at all n locations
  Clone ID: MRT4577_116757C.1
aaccctatcccaccggctccgcaccggcacatctccttcgccggaaccctaaacgcctagccgccgcagccgcacccgcagccgccgccgccgccgccgccgccgccgccgaagcagctgcaggtgggatcaagatttcctcctgcggtgacgtcccggcaagccggtatgagtagccaccgcaaaaacttccgccgccgcggggacgacgctgaggacgccaacggcgacggcggcagccaccccaagccctccaccacgaccgccacgaagacgaaaaccctaacggtgcccaaacccaagtcgccgccgaggcgtcagggtgcgagccgcctcagctttgcggacgacgaggacgaggacgacgtcgaggcgggcccgttcgcgcagcgccgccttcccccgacggcctcggtgcgcccggcccgcacggcgtccccggccgcgggagcgctccaccgcctcacgcccgccagggagcggatcaagagctcgccggcacctgccggcgctgctgtgtcggcgcctaagccttccaacttccaatcccatgctggggagtacacaccagagcgcctccgtgagctccagaagaatgcgcgcccgctccctgggagcctcttgcgtgcccaaccgcggactcctgcgactgagccccggtcgcagaagttgtctggtacccctgcaagttccactccagctaccaccaccgcagctgcaacagaaacggtggttgttctttaaagtctggtgaaaactatgtctgangccagcattgggccaaggataccgaagcacgacaaggaggaagataaatct

SEQ ID NO: 18375 - DNA, 165 bp, Zea mays
  unsure (1)..(165): unsure at all n locations
  Clone ID: MRT4577_116758C.1
ccggccgggacgtctgtttagaccgaaatcactattcaaaatggcttctgttatggcatggggcgccggcgctgccgtcgcggcctttttgggtcgagctggtctggtcgcatggagacgctnncacgaggtggtgttgnggaagncccccaattgtgggggggg

SEQ ID NO: 18376 - DNA, 558 bp, Zea mays
  Clone ID: MRT4577_116759C.1
ccgcctcttcctcagcgagaacctgctgttcggcgacatcccgcccgccatcggcaacctcgccgcgctcgaggagctcgagatctacagcaacaacctcaccgggaggatcccggcctccatgtccgcgctccagcgcctgcgcgtcgtccgcgcgggcctcaaccagctctccggccccatccccgtcgacctcgccgagtgcgccagcctcgaggtgctcggcctcgcgcagaacaacctcgccggggagctccctagggagctctcccgcctcaagaacctcaccacattgatcctctggcagaactccctctctggcgaggttccgccagagctcggcgactgcaccagcctccagatgctcgccctcaacgacaacgccttcaccggcggcgtgcccagggagctcgcggcgctgccgtcgctcgcaaagctctacatttaccggaaccagctcgacggcaccatcccgccggagctgggaaacctgcagagtgtcctggagatcgacctctcggagaacaagctcactggcgtcatccccgccgagctcgg

SEQ ID NO: 18377 - DNA, 665 bp, Zea mays
  Clone ID: MRT4577_11675C.1
gcctggagctactacaaggttatgatcccccttggcaagatcgcgacggtggagccggtcacgatgaaggagagcccgccggagaagtacgtccacgtcgtcaccgtcgactcccacgacttctggttcatgggcttcgtcagctacgacaaggccgtgcacaacctcgtcgaggccgtctcccagcacggcgtcgccactgccggcggcaagtgacgaggcgacgccgctccggagactgggcgttcggcacccgtcgtcgtgtatatatagctgatggctctgcctgtgcattactcgtgttctgctactactatacgatggtgtcccggcgtgtgtttgaatgttctcgtgtagtcgtgtgagtgtggcacagatgcgccactgttattctatgcacagtgcacttgtgagtattatgcttgtgcataatgcacttgtgacttgtgagtattatgctttcacggactcgtcgagaaacgagcagtgaagttcttcctgtctgcagcacctacatcgagctcggactgtggtagaattacgaattcgtgtacatgcagaatgcctcattttgaatgaaccttaattcgtgtagatgcagaatggctcattttgagcactcgtacttctttaaagctaaaaaagcactaatctatactatactt

SEQ ID NO: 18378 - DNA, 228 bp, Zea mays
  Clone ID: MRT4577_116760C.1
ggggctgctgaactaaattgttgcagtataaaagctcattctatgtcgaacagcgccgctagcgagatgcaagcgcacagcaggccacaggcagcggcccccggcggcgtcggccgcggacgctgagatgcagagggtgttctgccgcatcgacgcggacggcgacggccggatctcctcctcggagctggccgcagtgaccgcgccatctcccctctaacgagctcc

SEQ ID NO: 18379 - DNA, 792 bp, Zea mays
  Clone ID: MRT4577_116761C.1
cattgggtacctcgaggccggccgggagccttgttttccttatccaaaatctgctgccgtccgtcggggtgccggtgacacgcgatggcactggcgtcctcgcctgcggcggttagcccaagcacccgtcatcacacgcctcgcatctgcgtctcctcgtgcttcttctgcccaccgtcgggtgcgccatgtcctcttcgtgttgccactgccagtgccagcaccaccagcagaagtcgaggtcgagggcatctgccgcctccagccgccctgcctgacccccaagccgccgcggcgctgctcctcgccgccgccgggacagtcggcgccgccagcctcctgcttcgctcctcctcgtccggcgccgcctcgcagcagcaaggaggaacgagaagagcaggtagagggagaggagtgcccggactgcggcgggactgggctctgcggccgctgcaaaggagagggcttcgtcttcaagcagctctcagaggagacggccaccagggcacgcaaggccgccaagaacatggccactagatacacctcggggctgcccaccaagtggacctactgcaacaagtgctcctccacccgctcctgcacaacctgcggaggctccggcagaatcgtcaccgcaccacctgtcacctagctaacactcaaggctatctatggaatttgcagctatatcatgtacctctcagagagtctgataaagagggtcactcagaattattttttttccttgtaaagaggattaccaagaatttttataccatgtcatttggcagc

SEQ ID NO: 18380 - DNA, 350 bp, Zea mays
  unsure (1)..(350): unsure at all n locations
  Clone ID: MRT4577_116762C.1
acccgagccccgccncctgcaaccgccgattttccggcgacngcagaggacgagacggcgggggcaacaaaagaaacaacganacacgggcgncnacaggcgagaaggaccacccnccgngcncggngngcgngcngggaaaaccccggagggcccngagcgcgngagncaccganngnggnggaaagcgggacngggncnnnnggaagggggggggggannnnncnncaccgccaagccgccccncacnccnaccagancccngcanccccccccaccgacgggcaagngacngaggacccagaagcncagcaggnggaaaccagngagcaggagcncggngaaggcaa

SEQ ID NO: 18381 - DNA, 305 bp, Zea mays
  Clone ID: MRT4577_116763C.1
tctttcgttcactcgtcctacagtctgtgcttttaatgatgatgagtaggagagttgttgctgttggttgtactgtcaggtgaggttataaagctgttgcttattggtgctggtctgttgtggaaacacgtccttaagtgctttgctttgggtctaatctgaagttcagaaccctctgtctggcttggttatgaacggaacgtctagataccgggagagtagctgacaaacttataacacatgaaacgttcttgtattgccattgctgacattaaacttctttactacatctgctatgaataaac

SEQ ID NO: 18382 - DNA, 145 bp, Zea mays
  Clone ID: MRT4577_116764C.1
ggaatccctgaagtagacctctacaaatgtgagccttgggagctagcagagaaatcattcctgcctggtagagactccgagtggtacttctttgggccaagggataggaagtatccaaatggatgccgcacaaaccgcgcaaccc

SEQ ID NO: 18383 - DNA, 398 bp, Zea mays
  Clone ID: MRT4577_116765C.1
gcgtgtaccttcaagaaccccgagcttaccttgctttttcaggcgaacctggtggcttggagtctatgaattggaatggaatcattattcattagggtggttaacatttgaattttacatttatgggtggataggttaacaatcaagttaacctcaattggactttggtttggctttaccggagggaaatgggtaaccagggctttttttaccggggggggttcttaattttggaaaccagaattttagggaaggaggcattccttatttgggaggtggtttccaattcaggctggcttaaggggaccaacaatggtttccaaggaatggttaaaccaaatctggagagtttatcttggaataaggacctccttccaaagccagtggagaaaataaaa

SEQ ID NO: 18384 - DNA, 312 bp, Zea mays
  Clone ID: MRT4577_116766C.1
ggaaagggaaacaaaaaccttgcttattcttgtgtgggcccgtttcatagcgggagcaaacaaagggaacaacaggggttccaactcctaatgcaaaggttgaacggtcacttacaccgggacagaagccaacggtaacaacgatccttttgataggtaaaataactccgtcgtagccagtatggccccacacataaatccctacatacattgccgacagcggcgtatacttcacaaccaccatcgtgcctatcgcataaccgacacggtctcaggaggggcatcacaatccttgggacgaccggcacaatc

SEQ ID NO: 18385 - DNA, 147 bp, Zea mays
  Clone ID: MRT4577_116767C.1
ctcccataaagttggtggtccttcaacaatatttcttttctcattccagctcgatctgctttgttgccttgctgctttgagcatcttatagtctctcttcagttgaccttctttatcctgaatctaagcctttgtaaaggatacata

SEQ ID NO: 18386 - DNA, 466 bp, Zea mays
  Clone ID: MRT4577_116768C.1
gagaatatagagaaaacaccttcccggggctttttttccccgcgcatactctacccccacctctgggatacgcacaaatgagagctcttctataaacggggacacccccaacgcgtaaaatctttgtccccaggggtagaaaaacagtgttcccacataaaacaccacaaactctcgcgcacacgtgttatcgcgttttgagaagtgaccccaccccccccctggggttttttccccgatcaaaacttaaaaggttttttgggcccttacttaccgggggttaaaggcccggaatcccaaattcccaaattggaattagggttggttttttttaaaaaggcccaaaaatatattattttcgaaacacaaacacataagtgcccctccccgggcgcgctctaaaaggggaaaattgtgcatatacctatcacagtggggggcgctagcatgtgcttataggggcccc

SEQ ID NO: 18387 - DNA, 394 bp, Zea mays
  Clone ID: MRT4577_116769C.1
aaaaccctgaacacccaaggaagtaaaaaaaaaaaatttccaaacaaacagtttttaccctcaacacggtttttggcaaaccccccccaaaattattaataagttttggccgccgttaaacaccgttacaaaatttggtttggttcccggcactccacgtaaccaccaccattgtccatttaaaaccatttacagttgggggggggcggggaaaacaccgccgtaagggtcacccccaggggcccccccccaccgttggtacacggccaaaacaatggggttgcacacggcctccaccttcttgagcttttcctggaaaccctccttttcggccgactggttgtggtacaaccacttcagggcctttttgagggccttcttcactttttctttt

SEQ ID NO: 18388 - DNA, 646 bp, Zea mays
  Clone ID: MRT4577_11676C.1
gccggccgggtcgcaaaaggaagtcagagcgacctgttccaccaccccgtccaggccacccgggcgcctgggtgtgtcgtccgcgtagaactccttggtgcgcgacatgcgcggcgaagcgatcgcctatttcacctgactgagcgcacggctgatcggcgccgctccacggattgcgtgacctaccatacgacgtgaacggacactcggcgcggcatcggcgatatggtggtcgtggatgcttacgctcttgccctcgctccagaaggtctgaattcgaatgtattccttgcataacaacagggggaggatcatctacctccgtgtacaaggacgtgaagacatgcccctgctaggaggcgcacatcgtctggtgcttcatcctagactcggaccactcccacctgccgcctggtgaatctgcagatctacccctgtctgaatcatgccttgctcactggcaccgtcaagctagatcggcggccgctacagacttacgagccaggagagttcctcacatgccaccataatcagccatcgcgaatctatatatatacactacatgatgcatggtcgcattcggcatgcagctacatacatatatatataccggatcacccaaaaaaacaaaagaaaaaggccccta

SEQ ID NO: 18389 - DNA, 332 bp, Zea mays
  Clone ID: MRT4577_116770C.1
ggttggaacatgacttaattgcttgaagatccaatatgaaaagacactcggtgattgcaggacccctaccatgtgccccgagcacggagacccactggacaatcactgcataatcatgtgggttggtgccaggactactcaatctatgcgctcaagctaacacggattgcaaacaccgaggatacatcactcccgcatagaaatagcatccattcaaccacaattggccaaacacgaaaaacaatcatgtgtacctacagagtgatcacaagcttacaacaacctaacacatttgctgtgggtaaactacttccacagacagttgttcaaga

SEQ ID NO: 18390 - DNA, 586 bp, Zea mays
  Clone ID: MRT4577_116771C.1
aaagagcttgaagaaacatttgaagagcgtcacctctttccatctttcacttgttcatttcttacctatttactggctgtatcaataaactcccgctcacggaatatcacaaatctcgctagattatacattaattttatctttcggaactattatctgtagccttcttttttttatctctcaggtgtatcttctatctcaacaggacagtaatgtggactggcggggaggagatttgaagcatgaagggtttgaaggatgtcttggaatgaaagttggaaggcatggaggagaaagagggggcagaagaaagggtggatgaagtattgggtgaataatattatgctttttcttatttttgtcgttctttctctttatctttctctatctctgtacggtgctgtagggcactggaatgttttagaaactatactgttgagtgaggctttatttttttatgcactgggctgttcttttatttggtttgtatgctctcgtcctgtggatggggtgtccctcgcaagatttttacctagccagaatttgctcgacgcagccatccaacgcccgcccgctcataattaat

SEQ ID NO: 18391 - DNA, 638 bp, Zea mays
  Clone ID: MRT4577_116772C.1
ccggccgggacagacatcactcgcacagctacacaggacagagagaggaaagcatccgacaaaagctgtgatgctgatcgacatgctcgccctcaccatgcgctctcaccgtcccaccgcgcatggtactgcaaggcacggacgagaaccagggacgtcttcactccaggtgagcatcaccatagtgcaagactgctggcaaggccaagccctgatcagcagggtccaggagaccctgactacggtaacgaccgcgacctgcacctgagtaccgatggccgcccatatccccaagctaattgatgcgtgattgcccggcgtatacacactgtgacaccgctgcccatgaccgccgacccgaagactatctccaagaaccgcgtagctggaggcgatcaatgccgatgggacatgctggttgcgatagattgcgagtccccgtaactgatcgcacgcaacggtgacaagatctctgaggacgagtggatcaaggccggcctccagatcttcattgaggtcgctctcgactacctcaattacccgagtctgatccacgctgagagtatcctgttcatgtgtgagagtcatatgcggttcatgtccgcccaacatacgaaccgcatcgacgaagtgcgact

SEQ ID NO: 18392 - DNA, 345 bp, Zea mays
  Clone ID: MRT4577_116773C.1
ctcctccaaaaattaacaaaataaccccaaattccccaccctcctcttttcaaaaaaaccataaaacaacattttttttcccccgcccaaaaaaaaaaacgccccccatcccctcccctggaaccctcccaaattgctttttgggaagcttcattttttaaaccacaaaaaaaaacccttttcaaaacaaggaagtacattattctatcttattctcaaaaaaactccaacccccaacccaaacattatacctttttacaactaaaaccccttcttaaccccttacaaaatacttctctacaaataaaacccccaccaaacccgtgggtaaccccaaaaattccg

SEQ ID NO: 18393 - DNA, 655 bp, Zea mays
  Clone ID: MRT4577_116774C.1
cattgggtacctcgaggccggccgggggcgacattgtgacggacgctggcggtatctcctcaccgcccgtcattcgtggcacccgatccgcccgcgacgtggcgcctgcttcacccacaatgtgttgtcctgcgacaaccgccagccttaaccagaaaccctgcccgatggacaccagacgacagcctgagacctgtgaaactggaacggactgatgtgccgatatcccccatgttcgccgtgcggcgggatccttcacgcactggtccagggtacattcggaagaatgggacgcggtggacagtgatctgggccaccaagatgatattgtgagtgggagcaacgcatgtacgtctatctccggcgtttcaccgtatgctcagagactaggctgcacagactgagcatcccaaggcaaagagggtgggccctgcatgcagagcgatccatgagaagagctatgagctactccctctccaaggagtgcttctatagaatgtgccaactgctaaagatcctagaaagagtaagtctcgactcataggccgatacagtccaaggagtccgtcgatatacgagcttagaactgcaacgaaagtgatagcccagacaatacttgtactgtgtgagcggattgaatatcaggaatgatttg

SEQ ID NO: 18394 - DNA, 1051 bp, Zea mays
  Clone ID: MRT4577_116775C.1
cagcatcaatgtaagtgtgttgattagcatcattcgtttgaagagtggacgagtggacagatagatagggcaaagaaatgcagtccgttcatgtatatatatgcaacttcattaaatttaacatcgatctttatttccaagccagctagcaactcaaaggaggaagactagaagatatatagccttctccttgtgtgacactcataaataaactgttagcagcttgcgagcactgcaagatctttctgctggcatctgaatagtcagctgctggcatctatccgggcacctctcgaccagccagaggcagatacctgatcccaaactagctggccaacatggcgaacgatgaccctgtggacgacgaaaaccccagatccaacaccactaataacagcatcaatgacaagttggctgaagtgttcgacatggtctcagtccacaaacatcagtataaaatgccgacgttcgccttccacaccaacaagacgatcaccgaagctttacatcggcctctactgcgagcacaagctagcatggtcacaacctcctagcctatatatgaactggtgttatcccgactgaacttttctttttgttgacacctttcgtcaggcctctccaccagaggttgactcgtatgtctgttttctggtttctcataccagaattaacgttcttgaccttgtaaggcctcttcttgaccttgtaaggctctcactctgtgtctgcatccttctcgcatcccttgtttccttctttcccactacatgcaggatcagtcccgatattgccgtgtttgccagccttctgcatccacctactttctgttcccttctatccctcctgagctaattgttgctcctatgtaatccgtgtttattatttcggtaccatgatgatgaaattagttttaatttattgtaagactagttcagttaatgttttcaccctgtggatgctctgcaatacatgaacatacatatgcaaacactcattcatccatttattttttattaaacaaaaaaaagttttaaaaaaagagacccgc

SEQ ID NO: 18395 - DNA, 386 bp, Zea mays
  Clone ID: MRT4577_116776C.1
cccctcctccctccagactctcggaggcgggcgcgcggatctgtcggccggggccgatccagtcgattccaccggacaaggccgccaaaaacacactcgctcgacgcagcgagcggggccggcccttcgtgccgcggggcgcccggtggcgagggccgcagcgcgcagcgatctgaaccctaggtggtggtgggcgccgccgccgtgtgtagacgcgatggatgcgaggttcccgtactcgccggccgaggtggccaaggtcgagttcgtgcagttcggcatcctcagccccgacgagatcgtaatacccctcgcctccctcccctcccctcgctgctactgtcattcgagtgggtcgagggttgagttgagtgagcgcgcagcct

SEQ ID NO: 18396 - DNA, 1855 bp, Zea mays
  Clone ID: MRT4577_116777C.1
atggatgatccgacccctgagaccagagagtctgccatcacacaaagatcatctaattcctctgtgggagacatgatagaggaattcagagatctcgacaaattaggacaggggtttagatcggtcgatcctttggaggaaatcgacataggagatggtaaaactccaaggccgacttttgtgaacaagaccctggagaccgatcctagagatgaaatgattggtctattaaaagaatatttggattgctttgcttggaattacactgagatgtcgggattaagccgtgagatcgtagtgcatcggctgcccattaagtctggtttcagacctttcaagcagaaagctagaacatttcgtccagaccttctcccacgaatcaaggacgaaattcaccggctgctagaagctaattttattagaccttgcagatacgcagagtgggtctccaatattgtgccggtgaaggagtcagtcaaattggctgagtttagctctcatatagctgattcacgcaaagcctttgataaaatgcgtcggtatggcctgaaaatgaacccgcgtaaatgtgtttttggagtgtcggctgaacaacaggaagcgtttgatctcattagaaagtatttgtcttcggctctcgtattaaaagcaccacaagtaggagtatcattcagattgtacattgtagctgaagataaggttattggggctgttctaacgcaagtgactggaggaaaggagcatgtggtgacctacctaagtcggaggccggtggatgctgaaacaagtcaaaccgatgtgattaaatacatgttgcaaaacccgattatgagtggtacgattggtaaatgggcttatgcacttatagagtatgacttggcctttgaaccattgaaatctatgaaaggccaggtcgtagcagattttattgtagaacatcgaatcaatgatactcataaactagacatatcatacctcactgttactccctcgactttatattttgatggatcggtttgcaatgaagggaaaggaatggtcattgtcacacccggatttaagggacaaagccgagtgcatctcatacatgcgccaaagaagacaacatatataataatagagtgtatatagataaatgtcataaatcatcagagtatttattacatagcggaagacttattacaaagtaaaagtgtaaacataaaacgaactaaggatcatccttggcgcaagtcaactgggaaacgccacctagatcgaatcgaactcctcgatgtgtggctccacttgaaccacctgttcttctccttcaatgagctcctgctcagctacttctatctgctgctcaccaggattcctcagcaacgggttcttatcagatggccgtgagagagcacgggctcacgttgaagcgcggacccgcggcgacgaccaccaatgtcgtgaaatcaccggccctccggtggtgaatcacgccagccgagggacgcgatgcgtgcggctggatccccggcacctctagctagcctccacgtagtttgctggcgcccggtgtctgctcggacggcgggtggttgacggcaggcgctagcagggacacggcagaggagcagagaggggcgcaccgagcggaggccacaggggagggagctcgggcactggagtgttgaagggagagctcacgcgtaggtgcaactggatggcccttagaggacggcggaaaggagtgggtggttcacctgttcggtcgccaagggtgagcagagacactgggtgccgagcgccatgggtggtcagaaggggagaaatggagaggaggggaactggggaaggcagccgacacggtagttattca

SEQ ID NO: 18397 - DNA, 647 bp, Zea mays
  Clone ID: MRT4577_116778C.1
tataatcatagtcgtcgatcgtgtgattagtgaagaatcagatgatgaggcgagacacaacacaatcgattgtaatgtgtcctgctgcatctatgtatttattcatgtactaagtactatatatatatatatatataatatatatgcaaaaaaaaaaaaaaaaaaaaaaaaaaaaaaaaaaaaaaaaaaaaaaaaaaaaaaaaaaaaaaaaaaaaaaaaaaaaaaaaaaaaaaaaaaaaaaaaaaaaaaaaaaaaaaaaaaaaaaaaaaaaaaaaaaaaaaaaaaaaaaaaaaaaagggggggcccctttaaaagacccaaatttaccccccggggccgggaaaaaaaaacttttttttttggggccccaaaaaaaaataacgggggcccgttttaaaaacgggggggggggaaaaacccggggggccccaaaataaaagcctttggaaaaaaccccctttttcccaaggggggaaaaaaaaaaaagggcccaaccgatcccccttccaaaaaatttggccccccgaaggggaaaggggaccccccctttaaccgccctttaaacggggggggggggggggtttcccccgagggcccccttaattttggcagggcccttggccccgcttttttggttttttcccctt

SEQ ID NO: 18398 - DNA, 686 bp, Zea mays
  Clone ID: MRT4577_116779C.1
ccggccgggtattctggtgtcctaggcgtagaggaacccaccaatccatcccgaatttggtggttaaactctactgcggtgacgatactgtaggggaggtcctgcggcaaaatagctcgatgccagaatatacctctcacacttctctgattcgctcgtctttcttaacgttgtcgcctctcactctctctatttcaatatggatcttagacgaagttcgaacctcgattttttcatcgacttgctcaacgagcaatctctacaacatcccaacaccactgccgttgtagatcagtaggtatacatcattttgcgatgtgatgttttttgccccgtccccacaatccatgcatgagtctagaatttctgtttccgtgttcatatgcttctctcctatgtatcactttcgatcatatgtggatgctcctcgttctcccagtgaaaaccctaccacaccggcgatcctctttctaccattgaaacttctaccaccaacactcttctcccaccatgccctccttcgcagccgtatgagtggtgctctttgtctataaggtgcctgtcttccattttgttctcatacaagcaatgattgtgtccctaaaccagcgacagtgagctatactgaaagtaagcatatatatatatttatgaattctacatatttacgtctacttattattact

SEQ ID NO: 18399 - DNA, 764 bp, Zea mays
  Clone ID: MRT4577_11677C.1
ccttcctccgcttccgccccgtcccgtctccctccccccttcctcggcggccgccgccgcctcccatcgcggcgagtcaccccgcccgcagccgacctaagctgccgccgcgtgcacccgggatcaccgaggaggcggcgccatgaggttggagaagtgctggttctgctcctccaccgtctaccccggccacggtatccagttcgtccgcaacgacgccaagatctttcggttctgccgatcaaaatgccacaagaacttcaagatgaagaggaaccctcgcaaggttaagtggaccaaggcgtacaggcgcctgcgtggaaaggacatgacacaggatgccacgtttgagttcgagaggaagaggaacaggccggagcgctacgaccgtaacgtcactgagcagactctgaaggccatcccgcttatcacgaagatcagacatgaacggcagaagaaacacattacagagagacagaagggtggtaagagcatggtgcgaaagagtgacgctaaggagctggatcagtttatcgacatggttcccaagcaggaaaccgagaactatgtagccaagcagaaggttctagtttctcagctgaagaccgaagagaatcttatggaagagtaatggaatcaaacagttttgtgtgtgcgcgtgcatgtgatcctttccttatatggagtactttgtgtctcatcagattgtagacgacagtgaacatttgttttctacttactatgagcaagttatgcatgtgatg

SEQ ID NO: 18400 - DNA, 574 bp, Zea mays
  Clone ID: MRT4577_116780C.1
ggccgcttttttttttttttttttctgggacatttgacacgcctccatttgctaagacatccatcgcgatccgacaagaaaacgcactacgccttacccttcttttccccactctttcttcgccccttctttgattcaacctttgtctctttcgccttaacaccattgggcttttcctttgtcgcaacatcagttgcgacttcaacaccgccgccctttttctctttgcggcttgctttctcctttgcgctcacatgaccattcttctcttttgatgctccgttcgtactcttctccgcctttggcacaatagccctgggatccttgcccttcttgcgcatcgacttggcctgagctttctcgatgtacttctgatcctcttcctcatcgaatccaccaaagtccgattcttcgtcactgtcggcgccgataggagtgcgatcgatgatttcgacctcggtggttgtgtctgcgttgcctgcaccgttgttcttggtagcctcgttggcgccaacagcattaggtgggtgtagggccaatcttcttgaacttggcgacaaagaaaccgtcgaca

SEQ ID NO: 18401 - DNA, 390 bp, Zea mays
  Clone ID: MRT4577_116781C.1
accaatccttcccccttacactggatagagttagagctagacttccaactccagatcgctcgtaccctatgggggcatacgactttccagctctacttctgctcatatcagcactccttctcctaccggtaacagatgccccgtcgctcgaactctcgccatctgacaccaacttcctctccgatcagatccatcccaacgtcctattgcatcccgactacgctatcatctacgattcccaccccacctatcatcccaccttacgccttcaagtaatacatctaccatattgccacatactgtgcactcatattataaatacacttcatcagtcctgttagcattcaccacttcagaagctctaaactaccttgcatgtttctggatata

SEQ ID NO: 18402 - DNA, 264 bp, Zea mays
  unsure (1)..(264): unsure at all n locations
  Clone ID: MRT4577_116782C.1
ctctgcagcgatggcgatcaagcggactaaggccggaaaaaagaatggttccaccagaaactgttcaaccctgctcgattagtccacaaagtggctaatngcctggccgacaacgtcggttccaaacagcttcaggacattcgccggggcctcaagggcgactcggtggtgctcatggggaagaacacgctcattaggcgttggatcaaagtgtacgccgagaagaccggtaaccacacctttgacccgctcatggaccttctg

SEQ ID NO: 18403 - DNA, 501 bp, Zea mays
  Clone ID: MRT4577_116783C.1
aaaagggggcaaaaaaaatataaaaaacgtttttattgggttaccccgggggggccattttccaccaaggaaaaaaataaaatccatttaccccaggagcacccaaccaaattaaacccaaatccccccaaccttaacccaaaaaaaaacctttgttaaacccccccaaaaccaacaggggggaaaggggccccttccttaacccccaaatgggttaaaaaatcccggggaacaaaaaaaaaccaaacaggggcataaagttcaaatttttttaaaaaaccaaaaaaaaaaaaccggaaaccccaaaaggggggggcactaaatctgcccggaattgccccccccgggaaaaaagggtaattccaacaatgaacccccccaaaacacccccttttccaaaaatgaggagaaagatcatccccaaaaaaagccccggatggggggaatttgccctgactccagcataaccaaaaatgccgaaggccatcccaggtgcaaccc

SEQ ID NO: 18404 - DNA, 1376 bp, Zea mays
  Clone ID: MRT4577_116784C.1
gacaaaatatatgtacattttgttattacataggaatacggcgagctctcatgccctccatcgtttcagacaaccgtactaacgtattaagttctcaaagcaaatcacctttacatataatagaaccaagaacagaagaacttggcgatgcgttccaattcccagtcaaaaacatttttttagtcccacaggtgaatgttttctaccactgatgcgatgagaaactgaccacgcaaaacaacaacaaaattaactagaagacagcagagacaatagtagcactagcataccaacaacagattgcataatagcataagtggtaagacccacagaacagacccgatgttctctctctttcctccataagaataaacccagcttagtcgacctcctccatcttgctctcgccagcgtcatcctccagagggggcatgtcggtgtcagcctccggagcctcctcgtcctcgtcgatgctcaggcccagcttgagcatgcggtggatgcggctgccaaaggtgttgggatcgtcgaggctaaagccagaagtgagcagcgccgtctcgaacagcagcatgacaaggtccttaacggacttgtcgttcttgtcagcctcggcacgcttgcggagctcctccatgatggcgttctcggggttgatctccatcgtcttcttggaggacatgtacccagacatgctggagtccctcagcgcctgggctttcatgatccgctccatgttggcggtccaaccgtactcgccggtcaccaggcagcagggggagtccaccacgcggtcggagaccaccaccttctccaccttgtcgcccagcacctccttgatgaccttgcagaggccctcaaacttctccttgagctcctccttgcgcttcttctcatcctcactctcgtccagcttcaggccctccttggtggcagagacgagcttcttgccctcaaactccttcagctgtccaatagaatactcgtcaatggcatccaccatgaacagcacctcatagcccctcttcttcagcttctcaaggaacggggagttctccacagccttcttgctctcaccagtgatgtagaagatgtcgttctggccctccttcatcctggtcacataatccttgaggctggtcagctcatccccgctcttggtcgagtggtacctcaggagctcagcaatcttggtcctgttcgtggagtcctcgtggatgccaagcttgaggttcttggagaaggtgttgatgatgagcgagagcagctggttgatctccgcctggaaggcgaacgtctccgtctccgaggccatggcgaaacgaccttcccgaacgcgaggagagcgcgagcggtaggcggcggctagaggggac

SEQ ID NO: 18405 - DNA, 314 bp, Zea mays
  Clone ID: MRT4577_116785C.1
gggaaggcaacaaagaaatatataaaaccaaaaccacactttaaacccataactgcctagtctcttgattagtgagtgaaacaggtccagaaagctgggacccaagggattagcaaaagaaaagcctcgtaatggctaggggaatggggttttttttttgctaaggcactaaactaacaacctgccgaaactagttgatcccgttgataaacacctgttccaaacatctttacgtttaagatcgcgaaccagggagctaattggggacctaacaatcgattggctacctaacgactgcggagttactatttgac

SEQ ID NO: 18406 - DNA, 1617 bp, Zea mays
  unsure (1)..(1617): unsure at all n locations
  Clone ID: MRT4577_116786C.1
atatgtacattttgttattacataggaatacggcgagctctcatgccctccatcgtttcaggcaaccgtactaacgtattaagttctcaaagcaaatcacctttacatataatagaaccaagaacagaagaacttggcgatgcgttccaattcccagtcaaaaacatttttttagtcccacaggtgaatgttttctaccactgatgcgatgagaaactgaccacgcaaaacaacaacaaaattaactagaagacagcagagacaatagtagcactagcataccaacaacagattgcataatagcataagtggtaagacccacagaacagacccgatgttctctctctttcctccataagaataaacccagcttagtcgacctcctccatcttgctctcgccagcgtcatcctccagagggggcatgtcggtgtcagcctccggagcctcctcgtcctcgtcgatgctcaggcccagcttgagcatgcggtggatgcggctgccaaaggtgttgggatcgtcgaggctaaagccagaagtgagcagcgccgtctcgaacagcagcatgacaaggtccttaacggacttgtcgttcttgtcagcctcggcacgcggaaaacagttaccgctcattcccaattgccctagttcgggagattgccaaacaactgttggaatgtatagcatttatgcacgaattgtgtctcatacacactgatttaaagcctgagaacattctccttgtttctccggagtacattaaagtgcctgattacaaagtttcatcccgatccccaaaggagggatcctattacaagcgggtgcccaagtctagtgctatcaaggtgattgattttggtagcactacctatgatcaacaggatcagagttatattgtgtcgacgaggcattatcgggctccagaagttatactgggacttggatggagttacccatgtgatatctggagtccgataatgcctcgtcgacacaatataactctgatcatgttgatcataggtagtgctaccanaatcaatcaccttgatagcactagacttgggcacccgcttgtaataggatccctcctttggggatcgggatgagactttgtattcaggcactttaatgtactccggagaaacaaggagaatgttctcaggctttaaatcagtgtgtatgagacacaattcgtgcataaatgctatacattccaacagttgtttggcaatctcccgaactagggcaattgggaatgagcggtaactagatctactttcatcatatttaccaagctgctcgagcatgccaatttctatcattgcagcatccctgtacttcttaatgcccctgatgattttgatagccaccatttcttttctttccttgtcccaacactccaacacctgaccaaaggtaccttctcccatttttgcattgatcttatagcgagatgtgaggttatctccaacagcaaaaacataatgcccgtccctgtcatcttctctcagaggaggggaaccatcatgaggctgctcttgtttgacttgagaagaaacacagcctgacgaaaggcccaacgctgcagcactgatggcattcacaacttcttgtccac

SEQ ID NO: 18407 - DNA, 330 bp, Zea mays
  unsure (1)..(330): unsure at all n locations
  Clone ID: MRT4577_116787C.1
tgtcgcccttttttnttttttctcttttttttttttttttttcaggggaaactttctaacatttttgggatctaaacccctttcaactttttttacagtagatatctcacaacatacctttaatagcatacatttcacaatagttttttcacgggtcacaacctaaccaattatattttaaatatcccaccaaccgactcatataagtgcttttgccaatttaataaccaaagcaacctattcggagcgcaagaaaaaaccttttgcattgctttcattaacaatactgtaattttttagctataaccttgtccgtccaccattattgtt

SEQ ID NO: 18408 - DNA, 703 bp, Zea mays
  unsure (1)..(703): unsure at all n locations
  Clone ID: MRT4577_116789C.1
agctggtcgctgctggtgctgtagatatattgctaaagcaaatatatttgctganccgtgggattgctgaccaggaggtcttgatgcaagtgttccttactctcaggaacattgctcgatattcaaatcttagacaggtgttagccagcactgcagaatctgttgaaatcatcttccaggaattactgaggaacaaagcagacggattcttcatcgcgtctgatattctaaaaagcctatgtgaatccaaggaaggccgtgaaaccgtccaagcgctgagtcacctcatcaaaaggctgcgcaatctggtgcatgacctggaaaagaaggtagagcttgataagaggaatgggcgcaccggagccgtgaaggcgaccaacctgcggcggcttcgggaggccgccacactctatcatatcctcaccagtggtacttaacgcgtcggcagcatagctagaaaggctaatctgacgttttgttgtacaataatttagtctaagaaggttttcatgtaactggaggtgactacggtgcaattgtcgaaaaccttcctaggtaaccaggatcttctaagttctgttgctgcagttggttttgtgtggtaggtgtgagaatcatcggcttgatgtattggattacctcttataaagagtgaagtcgctgagttaaccccaaaaaaaaaaaaaaaaaaactcgagcccgg

SEQ ID NO: 18409 - DNA, 280 bp, Zea mays
  unsure (1)..(280): unsure at all n locations
  Clone ID: MRT4577_11678C.1
gcctcattcntctccattcgaaacaccntcgcacccacactctccnttcgtncccagcntaaatccccgcaactntggntcgcacgaagcagacggcgcgcaggtccncnggncggcaatnncccgangaagcngctgggggccaaggcggcgcggcaagtcggcccctgcgaccggntgcntgaagaanccgcnccgnttccggccgngcaccgtggcgtgcgcnagntccgcnngtnccagnnnancacggagntgctcatccgcaagctgccnttcc

SEQ ID NO: 18410 - DNA, 555 bp, Zea mays
  Clone ID: MRT4577_116790C.1
gcagaaactagcagggccgcatcagccaaagtcccggggatcccgccgccgcgacagcgctgatacttactaggcactggcttaagatagtctttccaacaatcaagatgagccgcggcaggtagcagcggcaggtggtcaaaggtctatgagttacctgtggggaagcggggagcccgccaaaccagcagagggaccagactggaagagctccacctgctgctgcgggtgctacaactgcgtgagaaaccacgtgctgcaaaaggtgaaggacccacagacattggtgctggggttaccagccaaaccaattgctaccacacggccggcagagaaaacaccggaaacttccttaccgaccgaccttgaaacaaagtacaccctgctcctgcacaggagctattacctggaatacctgattgatagcaactgatgccgctcaccagactataacaaacgcactgctgcacaatacttagtataaatcgcgaacagccacaatcatttgatgtacactgaaacctccggtgccgcgtgggcccttcagctgcccct

SEQ ID NO: 18411 - DNA, 580 bp, Zea mays
  Clone ID: MRT4577_116791C.1
ttttctctcaaactgttggttcgagcctaggatcggtgccatcccgacgctgattggtctcctcctgtagctgcctctcatgttatccttactgatggggacccctggacactgcctaaactcgacccgacatagatacaaactgcctgaacttgcaccattgtatcaagaacatcccatagcgatctgaactagccaccataatgatcacagcgactatctttcttgcgaataagagaccaatagccatctcatggggacacccacctaactgaaatcttggcgaagatatactctatgatcctgaatgtgggccgcaccttgacctagtgctctcaatgctcatgagactacacccgatccgatggagaacccaccgaccatcggttgactgaacatgtacatcaaactcatgctcctgactgctacgttgacactgctgttcctcatgccactactctcgactgctttcccacatgacctgccaatacacgtctgcgccgcttggacctcaccgatagcactcctccttcagtacctctcccttacaagctgccatatgatatgtctagtgtgcagc

SEQ ID NO: 18412 - DNA, 418 bp, Zea mays
  Clone ID: MRT4577_116792C.1
gggacaaatggccccaaattaaattatggggcccaaggcttaactttggggaaaaaccaagtaactaaggaaaccaagcctttttgcttaaggggggaaaaaggggataagcttaaaaaagggcatgctgggcaattgggggggccccattgttacaaaaaccaatgaacactttgcctcaggaagggggggacacctcccgggaccaaaaccaaaagaggggcagggaattaagggcgggggtaatatcccacacatgaatttggccagcccaaaaattttgtaacaaaaggcccaaaaaaaaaaaggacctcaaagccccggggggggggtaataaagggggggggccgggctcaaaaagccagtaataagggtcttaaagcaaaccccttggggaaaaaatgggggggggggggg

SEQ ID NO: 18413 - DNA, 388 bp, Zea mays
  Clone ID: MRT4577_116793C.1
gtgagcagacggattaccggcgatccctgcgtcggtcgccctcatacttgctcgtacggtgcgttcctttctctgtccaacaatcaatattagccatggcggcagcgctcgtaggtgtcaaagttctctgggttacctctttggaagcggagagccctccaaacacatcagtggcaccagctgatagtgctccacctgctgctgcaggtgctccacttgctgagaaaccacctgctgcaaagcctgatggcaccagtcagattgctgctggggctaccagctcaaccaattactaccacagggcctacagttagaacaccggaaactttcttacggaccgtacttcgaccaaggtccacgctgatcctggccgtggctatttcctggg

SEQ ID NO: 18414 - DNA, 194 bp, Zea mays
  Clone ID: MRT4577_116794C.1
cgcccatctcaatcctgccagcgtatccaaccttacccatgtcactctcgtctcctgttcgccagagccaccttgctacagaagcttacctgccctagatcaccctcccgtgcccggtcgcgctgccgacccggccatggcgaccaaggggaagctcggcgagctagtgtgggagcaccgagtgcaggcgtgtc

SEQ ID NO: 18415 - DNA, 488 bp, Zea mays
  Clone ID: MRT4577_116795C.1
gcgtgcctgtttctacagggcttcccgtactgacactgatacctgcctggatattattagtaggatatagtatatattatggtctcaagggctgctaccgattggagggtcaggtcttcattcgcaaaacacagacatttgacttgcgctctccctttctctctctctctctctgtgtatgtgtgtgtgtctcaggttctcagcaaagagcagggaggataagcttggaatgccttggcagtgagagctgcaactgcaacaaagcaaccggcgtccatggtggagagggaaaggggcgagggagaagccagggccctggccagcgggccagggcagcagcagcagcaggaaggagcagcggagggcgagagggtcgagaaagaaggagacgagcgggaggaggaggatcgagacgacgaaaccgtggagtggtccgagatacggctcgccatcgaggagctgtccccagcggcccatctcaagcgcgg

SEQ ID NO: 18416 - DNA, 684 bp, Zea mays
  Clone ID: MRT4577_116796C.1
cgagtttagcatcggtcagttatcaaacagttaaagcgttttctgaaatcttgtttgaatatccgcagtctttttttggtttggcatgccgaattattctgaaatgtttaccaaaaaaaaaaaaaaaaaacccgcggccgcgggttttttttttttttttttgcagaagaagaactgttctggaatttttcgttatcccagacccgtccgtgtgcctcctctaacaaatgaaactggagtgccaaaagggtaatgtgcagctccaggtcaatgtcccaatacaaggcgcgcacgcctcagcatgcatagaccatccgtcgttgaccgtcttccaagaaccccatgctccccagaatgcacatttatcgtagtcgtcgggcctcacgctcggactcgaggaggcaaaggatgtcgtcctcacggactgggcccttgacgtttcggatgatggatcgggtctggtcgtccatgaactcaacgcggacctgggtgacaccaccacgagaaccggttcggccgaggactcgggtgaccttgacgagcttgacgggctgcttggaggcgtccattgttgcgactgtagggaaattggtggattgggcggtggtcgcgggcgtgagctgtagattgacgcttgtttgggacaacttttttttttttaacgtcagggtttttcccggccgg

SEQ ID NO: 18417 - DNA, 433 bp, Zea mays
  Clone ID: MRT4577_116797C.1
ttttaataattttttttttttttttttttttttttttttgtttttttttttttaatttttgtctttgttttgatcgcaaagccaaaaaggggaccacaacaaataaaaacaggggacccaaaaaagaaattaagccaaaaaccaagttcgaaacctttggagcaaacccctaaaagggaatcgggggggggtgggggaattgcttttgggggacgtggctgggattcccttggcgggggacccccttggccggggccccggcgcttgggaacagaagtctctgcgatacctgggggggcccctttcggttttgggggggggggacccagccctggggagaaactggtaaacctcccgggggggttcctcaccgaacctgggtgggagctcccagacctgcctctttggggcccaaaccggggggggccggggg

SEQ ID NO: 18418 - DNA, 536 bp, Zea mays
  Clone ID: MRT4577_116798C.1
ttaacggcgcctttttttttttttttttacactcaaaagtggaatgaataaaccaacagccaaaaggacatgaccgcttcgatcgacctgcttctctctctctttctgctacacgtacacacacatacatggacacgtctacatacatgctaccatgcacatgcaagcgacggcacacacgaagatttatttatagacatacataacaagaccatcatcataccgtaattgatagatatatatgacacatcgatgatccgccgcggcgacggggaatggttggcgatcacagcgccgtcgccgcgggtctagtttagtaccctgacatcggggagtgctgatgggagggatctgacccgacttgaggatgtgcggcgtccgcgttgagccgtgacccctgcgcgtctgagcagtgcagcgcccctgtcgcgcgtctgcgcgctcttgagtctgacccgtacacagacgcgaggccggccccgtgccgggcgtagaaggcaggcgcgatgcggagctacctgccccaggtgaatggc

SEQ ID NO: 18419 - DNA, 258 bp, Zea mays
  Clone ID: MRT4577_116799C.1
cagctagcaacatagaaagcacaatattgttccaacaatggcagccaaaatattttggctgcttatgctccttggtagttctgcaagtgctgctacggcgaccatttttccgcaatgcttacaagcttctatagctttccttctttccccgtaccttttaccagcggtgtcttcggtatttgaaaacccaattttttaacccttccgggttcaaccggcaattgcaacttgcaatctacccttaataaccttggttct

SEQ ID NO: 18420 - DNA, 135 bp, Zea mays
  Clone ID: MRT4577_11679C.1
aattcggcacgaggctagcttttcccatctcttcttccacagactctctgcccgcctcgcatattagctgcactcaatccgctagtggcactgctgctactcccgtgtactcccaggtacctcctctgtatactc

SEQ ID NO: 18421 - DNA, 360 bp, Zea mays
  Clone ID: MRT4577_1167C.1
gcaagaatgagggggcacagggcaccataaacataccactaaaaggttaggtaacaccaaaccaccagtacggatacaacacaatgggggcctacaaattatatggttatagaatctggaatgcgggccacaaagttttagtatgttactagcataacccatttttacagctgtttccccaccggtgggaaactatgacgttcaccttttggctcgggagatcggttaaagaaggtcatactcctccaaggagatcttgccacaaaaagatttcttgattggcaacaaaacacactgtggtagctttcgtgcaaggctaaataccacatggtcaaggggattgaagggacttgaatgagc

SEQ ID NO: 18422 - DNA, 254 bp, Zea mays
  Clone ID: MRT4577_116800C.1
ggcctcgtgtctatataggttgcatgaaatcgggccaaggttttttttgcttaaaccaaaagggggtccaattaaaactgggggaaattgggggaggggaaatcgacctttcgacacgcttttggggaaatgttggtcatatccagggccatagctcagtttatttatataaacaagtccgctctccgcacatatgcccattaagatgttagtgtgagatcgggtgatatggcccttcccggaaatcatgtaaa

SEQ ID NO: 18423 - DNA, 363 bp, Zea mays
  Clone ID: MRT4577_116801C.1
tgcaacgactgcacctgaacttcccggaattaccgcactgcgttcaaactaatggtggcactcaaccaattggggcaactgggctaatttggtagggtggcaggctcaattaccactaccatttaaccatctgcctgaaatgtgctacagtcactttattactacacctgaagcccagaaattttttccgtcgacgagcacctgccacctacaggggtatgggaatggaggtcgttggtgcttaaacaacaccagcagacgacaaagaatatgatgataccaacctgttccaagagaaggaaacgcaaagcaactgtgaaaaaacgtggggaggcacctgtattcggtttagaaacaactacc

SEQ ID NO: 18424 - DNA, 237 bp, Zea mays
  Clone ID: MRT4577_116802C.1
attcaacagtagcgatttgaactattatgtgaaccctgcacgcataggtgctcaaaagttccttgcaaaaaatggacaactttgccgaggccgccatctactttatattctaggagcgcgtttggcctacaccaaggcaaaattgggcggcgggctcactattgacactataccacgtgcatgcacgtgtgcatactgaagccccgtggtgtgggcgaacatttcacgcgccgatga

SEQ ID NO: 18425 - DNA, 416 bp, Zea mays
  unsure (1)..(416): unsure at all n locations
  Clone ID: MRT4577_116803C.1
ctaaaaactctcaacaaactactaactgataaccttattagataatctcaactatctcctagataatctcaactaatcttatcctttgacctgcgctccttgctgcagcccccttgggccctgacaggtcctgacagggagggagggtaataggcatttgagggtgtagggagcctttgggagacttttattgcttactctacaagtttgttgtagcttaaaaagggagaaaataaggagacatctgaaattgcttgaaaggttgacaaaaggccacccaaaagatggctctcaaatgtacccgtgggtctgttgccacaagcttggatcttaatccatacttaacagttgccaatgttcaagccctggttcgtagcctcacgactggagaaactaaccaccatcctacangcatg

SEQ ID NO: 18426 - DNA, 365 bp, Zea mays
  Clone ID: MRT4577_116804C.1
gggtaaaacttccaacgctgggggatactattgcaaacttgattctcccaatatgcagttttgccccgcccattttcaattaaaacatccaacgaaaactttgccgggggtttaaatgctgatgaaaagttaacccgatccctaaactaccaattggaaaggtgccttttccaaatatgctatcagggggggcttggccaaattcgagggccgggcaaatgcccaaggggggaaaagtctacttttaaacatttgggatatttttaaacaatatttttaagcagccagtttccaagaaatggtgtcctttacaagcatagctcccaagttttggaaaggggaatattcaccgggcaggaaacatt

SEQ ID NO: 18427 - DNA, 515 bp, Zea mays
  Clone ID: MRT4577_116805C.1
ttagcgtgccaatgagattgaacaagctaagccgttggatgtttaccacacgattttaaactgaattttgttctaagaactgtggtgtcaaaaactgaatccccgtactaatctgatggctaaactcgtggacaaaaactaagacagtctccatcgactaagcatcaacaagacaactcttacggtcctacttttggccttgagttaggaatttcaattccctgcaatgctgttgttttgcgtattgtgtgtggtggagctcacgctgtgctcgtgcatagtgttagaaagtatattgtaacgtgtgtacggtacaagtataaactgtgtacatgcgtagatgaagttagcattgcgtgcgttgtactctaggtggtttaggttttgttgaggtcgatccttatctgtatagattgttagcttgaggatgaatctagtaacaacctaaaccacctaccgtataatctataccgctatataaacaagcaatgcgtccctgctaacgcatacgcttc

SEQ ID NO: 18428 - DNA, 347 bp, Zea mays
  Clone ID: MRT4577_116806C.1
agcccgccctagctagctatcagctcttgaatctcatcggccgagttcttctgctagctatgtcctttttccttgtcagatttagaccttttgaatgcactagagctaaatagttagctagctaaaaattggtaatgaaattagcttactaataaatagctgacaagcagttagctagtcttagtggattgaatcagctaataactaatgtgtagttgaaggtgtagctaatagttagttggacgactatttgctagggtgttctgatgtctccaattaaaagtagctaataactaaactattagttaggttgtttcgatttctatagctaattttagcagctaact

SEQ ID NO: 18429 - DNA, 1954 bp, Zea mays
  Clone ID: MRT4577_116807C.1
ctcgaggccggccgggataagcatgcaagtaatatatcacgcattcagctcctctgcttacggtgccagaccgaccgagcaagatccattgatcgatatggagctgcttcctctgctcacgtggctcctccttgcgcacgccatggcctacctggcctggatggccgccgcgcgccgccggcagtcgcggtgctacctcctggactacgtgtgccacaagccccgcgaagaccgcaagctgtccacggaggcggccggcgccgtgatccagcgcaacgcgcggctggggctgacagactaccgcttcctcctccgcgtcatcgtccgctccggcatcggcgaggagacctacgccccgcgcaacatcctggagggccgcgaggactcgcccacgttgcgggacgcggtggacgagatggacgccttcttcgacgaggccatcgccgagctcttcgcccggaccgacgtcgcgccccgcgacgttgacgtgctcgtcttcaacgtctccatgctctccccggcgccgtccctgtcgtccaggatcgcgcgccgctacggcctgcgcgaggacgtggcggcgtacaacctcacggggatggggtgcagcgcggggctgatcgcgctggacctggcccggaacgcgctgcggacgcgcccccgcgcgctggcgctcgtggtgtcgtccgagtccatcgcgcccaactggtactccggcaccgacaagtccatgatgctggccaactgcctgttccgcagcggcggctccgcggtgctggtcactaacgacccggcccgccgcgggcgcgccaagatggagctcagctgcctcgtgcgcgccaacatcggcgccagcgacgacgcgcacacgtgcgcgcagcagcgcgaggacgccgagggccgcgtcgggatcagcctcagcaaggcgctccccaaggccgccgtgcgcgccttcgccgtcaacttgcgccgcctcgcgccgcgcgtgctccccgtcgccgagctcgcgcggttcgccgcgcgcctcctcgcccggaggctcttcccgcacctgcagcagcactcgtcgtccggcaagcacaagggcgacactgcggccccgcccaagatcaacttcaaggccggggtggaccacttctgcctccaccccggcggcacggccgtcatcgaggcggtgaagcagagcctgggcctggaggacgaggacgtggaggcggcgcggatgacgctgcaccggtggggtaacacgtcggcgagcagcctgtggtacgtgctgtcgtacatggaggccaagcgccggctcaaggtcggggacagggtgctcatggtcacgttcgggtccgggttcaagtgcaacagctgcgtctgggaggtcaccggcgacatggccgacgacaggggagcatgggccgactgcatccacgcctatccgccggagaggctcgccaacccctacatggacaacttcggatggatcaacaacgtcgacggcgacaccctcatgttctaacggtacagtacgctcacgatcgagcactatttcgtacagtcgtacaagtgatggtacatatacatgctactgcatggcggaaccggtcaaccggacatgacgacaacggaagcagcaggttgttcagaacgacagacaggtgatgcatacgtgttagctaatgcgtactgtacctacgacctacgtgtatctatttaccccccgaacaatcgaacatattctttcttttgattattttctaccgcaaatgaaaaatatagttttacttttttttagaacagaggaaccatgtattttatattgtctttgaccttatcttgtctgcctgttaaatgatgttgacatgttgtccctgtccattcataaatgtttgcaaaaaaatcaagtgtaatcccccctaactttaaggaagatgatattatcacttctatagtgatttcgaagtgg

SEQ ID NO: 18430 - DNA, 1793 bp, Zea mays
  Clone ID: MRT4577_116808C.1
ccggccgggacaagcatgcaaggtccgcagcttctcggcttatggtgccagagccagaccgacgtgcctagtagcgtactatcttagcttcaagagaccgacccaggcaagatccattgatcgatggagctgcttcctctgctcacgtggctcctccttgcgcacgccctggcctgcctggcctggacggccgccgcgcggcgccggcagtctcggtgctacctcctggactacgtctgccacaagcccagcgacgaccgcaagctgtccacggagacggccggcaacgtgatccagcgcaacgcgcggctggggctcaccgactaccgcttcctcctccgcgtcatcgtccgctccggcatcggcgaggagacctacgccccgcgcaacatcctggagggccgcgaggactcgcccaccctgcaggacgcggtggacgagatggacgccttcttcgacgaggccatcgccgagctcttcgcccggaccggcctcgcgccccgcgacgtggacgtgctcgtcttcaacgtctccatgctctccccggcgccgtcgctgtcgtccaggatcgtgcgccgctacggcctgcgcgaggacgtggcggcgtacaacctcacgggcatggggtgcagcgcggggctgatcgcgctggacctggcccggaacgcgctccggacgcgtccccgtgcgctggcgctggtggtgtcgtccgagtccatcgcgcccaactggtactccggcaccgacaagactatgatgctggccaactgcctgttccgcagcggcggctccgcggtgctggtgaccaacgacccggcgcggcgcgggcaggccaagatggagctcagctgcctggtgcgcgccaacatcggcgccagcgacgacgcgcacgcgtgcgcgctgcagcgcgaggacggcgagggccgcgtcgggatcagcctgagcaaagcgctccccaaggccgccgtgcgcgccttcgccgtcaacctgcgccgcctcgcgccgcgcgtgctccccgtgggcgagctcgcgcggttcgccacgcgtctcctcgcccggaggctcttcacgtccccgcacctgcgtcagcagcacctatcgggcggcaagcagaagggcgacgcggcggcggccccaaagatcaacttcaaggccggggtggaccacttctgcctccaccccggcggcacggccgtcatcgaggcggtgaagaagagcctggacctggaggacgaggacgtggagccggcgcggatgacgctgcaccggtgggggaacacgtcggcgagcagcctgtggtacgtgctgtcgtacatggaggccaaagggcgactcaaggtcggggacagggtgctcatggtcacgttcgggtcggggttcaagtgcaacagctgcgtgtgggaggtgaccggcgacatggccgacaagggggcgtgggccgactgcatcgacgcctacccgccggagaagctcgccaacccgtacttggacaagttcggttggatcaacgatgtcgacggcgataccctgatgctctaacggtacggtatacgatcgaggaccgctctccaccggcggaaatgacgacaacggcggaagcagtaaaaagcaggctagctgttgttcagaacgacaggccggtgatgctagcttgcagcctgcgtaggtgtatttatgcccttggttttactgggcctgtcgttctgaacaatatagccctatttatttaccacccaattatatatgtgtagcctgatgcagcagtagcacaatatattcttcttcttcttctg

SEQ ID NO: 18431 - DNA, 221 bp, Zea mays
  Clone ID: MRT4577_116809C.1
ctcgatctccatctcgaccgtcgctcaccggtaagctacgctacgacgaaccatggcatgggtgaccgcccgagcccgggtcgcagccctgcgcccgtcatcctcgtcgggcttccttggccactctaaccaactcggccgaactgctaccgagtcgccgacgaggcatagtctcaaggcggatgccaaagtcaagtagatcccgaaccttacctctcacg

SEQ ID NO: 18432 - DNA, 230 bp, Zea mays
  Clone ID: MRT4577_11680C.1
tttctatttttcacatttttaaaaccagaatgggggcatttttaaatccacgagggctcactccccgggcaagtcttctgcagcacaaataaaaccgggatggacaaaaatctgaatgttaagcaaaagcacaccaatcaacctctaatccctcatataaaaaaatactccctccgtcgtttcaaaaataaactattaggtaacacatatttgtgaaccgagactatatt

SEQ ID NO: 18433 - DNA, 1175 bp, Zea mays
  Clone ID: MRT4577_116810C.1
ccggccggggctcagtgctcacacacttctccctttccgccgccgccaccgaggaagacaccaggtcaccagccataggcccatagcaaaccaagcgcgaggaggaacaggcgtagctccgtagccatagatggctaacaagcgtcagcgggatgcgcggaagcgcttccgggaggcgaacccagacctattccctccgcaaaccgccccttctgccgacggaaccaagaacaagagcaagaagaagaagaataagagcatgttcaagaaggccaataagggcggcacgggaaggtttaagcacccgctacgggttcccgggatgcggcccggggaacgctgcttcatctgcaagtccaccgaccacgtcgccaaggcttgccccgagaaggccctctgggacaagaaaaagatttgcttgctttgcagggagcggggtcatagtctgaagaactgtcctgacaaaagcgagggaaatttgatgaaattttgctataactgtggtgaatctggacactctctttccaagtgccccaagcccattgagaatgggggtacgaattttgcaagctgttttatctgcaatcagcaagggcatttgagcaagaactgccctgaaaacaaacatggcatctatccaaagggtggttgttgtaaggtatgtggcgaagttacccacttggccagacattgtccgaataaagggagacaagatttgatatcctccagagatgatgatgtcaacatggaagagcacagtcaggaatgtcctgcggttcaccatggtggagatgacctagaagatgatttcgttaatgaagaagaaccaaaacccgccaaatcaaagaaggcaaagcaatcaggttcaagaccagccacagggacgggaaatgacgtgaagagcgccagtgccaagacaaaagcgaaacaagctcctaaagttgtaaaattctttggttaaagaatgggaattttgttgtagcttaagatacgaatgttccatctggacaaccttgtactgtcaagcggttgtgtgtaacgctgatgacgatgagaatacgtctgccaactgcatacgcctctcgttgcccctaggtgctcttctgtcttctcattgtttggctagcattgggttatgcgagaccagtagacccattacaatatggaattcgctc

SEQ ID NO: 18434 - DNA, 226 bp, Zea mays
  unsure (1)..(226): unsure at all n locations
  Clone ID: MRT4577_116811C.1
ctgcaggcggcctgctttcttttcctgggtggtatcatataaaccagtgtctggcaatcaagccaaagaggagagtattttttttttttttnanaacganaaagaaccgttggggggggggggggtttttttttccctggatacctttttaatttagtgggtagggcagatgcattttttgtacgattcaaatttagtgtattatcaactggggtgcatggaattg

SEQ ID NO: 18435 - DNA, 465 bp, Zea mays
  Clone ID: MRT4577_116812C.1
aaaaaaaaaaaaaaaaaaaaaaaaagggggggggggaaaaaaaaaaaaaaaaaaaaaaaaaggggggggcgggtctataataaaaggatcgctggcttacgtaacgcgtgcatgcctatttcctagttttttttttgagggctgccttaaatttatttgggggggcccgttgtttttccaccgtcgctgggggggggaggggctgtcgtttacctagaattaattggcttggcaacccatcttttttttccgccggctggcattccttgtggagccggcccgtgatcgatcgtttctacccaccggttggccattcctgtttggacggttgggcaccctccttgtgaggggttcattcccgcccgggtggtgtgtggttgtttaccgcgcgaggttggttggttttattaggcccgcgtcctctaccgcctcgttttctttggcctttcctgtcccttttttttt

SEQ ID NO: 18436 - DNA, 726 bp, Zea mays
  unsure (1)..(726): unsure at all n locations
  Clone ID: MRT4577_116813C.1
ccggtaccggcacctcccggngtcgacccacgccgtccgcccacgccgtccggcaaaccaacctctctatatcatcatagcacagggtgaaaattcccgactacacatcccatctctcagcgaagagcatgcatcgaaggtgatagtccttgctgatagccctgtcaccgcggcgccagcaggagttgaagttgcagtccttcgtcagatagacttggagtctattctccaacttcttgcacagcgagggctctgcagcgtgctggtggatttcagagaggccacagaaagcttcgcgtcgcttctgaacgacttccaggaggacaagctggtgcagaaggtcgtcgtggagatcctgcctttttggttcgcgagtgaagggctcagcaacctggcatttggtggcagccaatcgttcccgttgaagaacttggagcacagggaggtgaatgggggcgtgctgatggagggctatgtgtaatctctcttctagtcggagattggtagttcctgcacttgaaccattacctgcagagccatgagtcatctggggttttgttttaggccttgtttagttggcaaaaactttggtttttgactactgtagcactttcgtttttatttgacaaacattgtccaatcatggagtaactaggctcaaaagatttatctcacaaaaaaaaaaaaaaacgctcgcgatcagaactgactagttctagatcgcga

SEQ ID NO: 18437 - DNA, 783 bp, Zea mays
  Clone ID: MRT4577_116814C.1
attgggaccctcgaggccggccggaacccggtctcctcccccccggtcctctacccgccgcacaccccaatggcgaccgccaccgcgtccgtggcgccgccctcccggcgggtgcgcgcggtccccccgctccgcgtctaccacgtcctcaaggcgcccgacctggacatccagggcatggagggcgtcgtcaagcagtacgtctgcgtgtggaagggcaagcgcgtcacggccaacttccccttcaaggtcgagttcgagctcgccgtcgagggccagcccaagcccgtccggttcttcgcccacctccgtgaggacgagttcgagttcgtcgacggagagtgacagcgtcgagtgcgttcgggtaagcggcgacggcgagcgccgttcttatagaataatcaaggccgcggcggtcgctggtttatactgttccggtgcaggagctcgcgaggcaaggcatgtcaagtgtttgcttactcactgtctgtgctgctcaggcttcttcctcgttcggttcagcatcggtttttcagctgtggggaattaattgttcggatgctgtgcaccatcgatagtttataatagtggtaatttggccgctgttcgttggctatgctctgcgcttagttattttgctggctcttccaagagattcgtttgtctgattggtacacattgcattgaaacccgggattgtttccttggattataaaatctggctattgtacaaaaaaaaaaaaaaaagacccgcgcccccccgcgtccggcgtacgcgtgggt

SEQ ID NO: 18438 - DNA, 303 bp, Zea mays
  Clone ID: MRT4577_116815C.1
ttcactcgttcgaaaaaaaaaaaaaaatgagatataaaaaaaaaagaaaaaaaaaaaaaaatgaaaatgagtatgctaaatctgttgtaagatcaccttgtattggacctcatacatattatttagcgcgatctaaatgaacattcagtggctgcatttttaagtgcatccataatgtgaaaactgctggggctaacgaaattaatctgattgcatctcatcaaggtttatcaagctggggtaatatcgaagaggccggtacagattgacgttccgaacattttgacaccctgaatggggaat

SEQ ID NO: 18439 - DNA, 325 bp, Zea mays
  Clone ID: MRT4577_116816C.1
tttgccgagcagtgacttttgttaatgcgggcgattaacctgagattgaacagaggatcgactcagcgaccaaaagcgcacggtttaaaaaggatggagacttatagacagatcgacagacttaccacaaaccgacagactggacctatcgaccaacataccggatccacaaactaccggactgtcgcccaaccagcctggcaaattgttgattctgctctgactggactgtgactgcctgcctgccctcctggacacactcactgtcctgttgcactacatactgccgtcatttaattacaatgttctgtgcgtatccaccagc

SEQ ID NO: 18440 - DNA, 453 bp, Zea mays
  unsure (1)..(453): unsure at all n locations
  Clone ID: MRT4577_116817C.1
ttttttttaattaattggtgttttggcaaaattaangttttgaacttcaatatgatttangtttacttatgggtagtnagaaaanggggggtagaccccaaaatgcattatcctcctttttgggattaacgggctgccggccggacttgggtacaaattttctttttccgttcgggggggaacccctcccggttcttagaaaatacgggccctttattctttagagccgggtgttgattaaaggggccccccactcttttaattttttgacccaagcccccgttcctagtgaggggggccccccctttttttattttaaaaacacggtttgcccgtaacaaaaaaaatctttggtaaaatttttcccccttttttccttgaaatgtgaactggaaaagggaatggcccggggggttttttggttctcgcacttcggttgggcttttggtttgc

SEQ ID NO: 18441 - DNA, 175 bp, Zea mays
  Clone ID: MRT4577_116818C.1
tggaacctttgggctgatttatgtgcttgagttcgttccgtccctggtgagagaggaagcacgtggccgagactagggtaacgggtggggtggaggtgtccggttagttggatggctacgtgaatggggtttgggcggaagagaaatccgatccctcctggtggtagtccgggaa

SEQ ID NO: 18442 - DNA, 647 bp, Zea mays
  Clone ID: MRT4577_116819C.1
gggaataatcgtccaaaatcaccaaataatatttgtatccagagagaccgattacaagggaggtacaaagatcacaatgaatcaggtcaaaagcctgttcagcccaagaagacgaagtgggaaacgggagacgcgtatgtcggcctaactgacaagcatgacagaggccctcaaaatgtttccgactacgagtagagtctagactactggaaagcttggtcatgacggcaggtcctgggtggccgagacgacgatgacaggtggtggtcgtggcggagaccaggacgggaggtggaaacgcgccggtggacaaagagcggagcgtgtagaggggcccggtgctgtcacatcgtgcgagtgggtcctggtggccagatccttctcagaaaaaccagaagggtcaaactcaatggaacagtaattgtcggtagtgaaccgacgaacagaaacgagattgtgagtgatgtgaggggcgacaagaacgtcgttgagatggaacggtccggggagaacgaggcacctactgaggtgatcgggagagtggaaccattcccagcgacgatcgaagtggggtgggaggaatgaagtgggtgagaacgagataacatgcctgcagtgagggtggtgtggtaggatgcaccggagtc

SEQ ID NO: 18443 - DNA, 419 bp, Zea mays
  Clone ID: MRT4577_11681C.1
cttctgtttatgatttcttctgccacagtcccataccttcgtttctcctcctctccacggcgacctacccacccgacccagcccgccttgaaatctctcccgccgccgcgccgtacgccgtagcttagcgccaccgcccgtcgccacaatcccctccgcctctcacgcgcgtcgtcgccaccgccgtccgcgcccttccccaccgcggcatcgcgcccctgctgtctccagtccaccccgccctcaatctctagccattgggctctgaggtacggcacgagcttgttttcacccagtgattcgttacaccacactgacctcggcagttcttaggcgcgccggcgcgcatccggcacaccctagatccgcccccggaacccggaggtctcgccgcggtagaaatcgggcggaggtaggac

SEQ ID NO: 18444 - DNA, 606 bp, Zea mays
  Clone ID: MRT4577_116820C.1
tcaccaacacccaatcaacgtgatcggcgctaccacagatccagctgaggtggtaactctagcaacaactgcagcgggatggctgccgtgctgaaccgcgacatccgatcatgcggggccgccacctcggcgacggcgccgaggcgtacaaaccagattctcgtgcgttgcatgtcatcgacgcgaataaaatgagagggcgtggccacgaccgagcagactacgtccatgtcaacgacatgcagatcttgctcatagatgacccagcacggcgtgaacgtgaccctctcccagacggaagcggttgggatcggcgccgaagcccctgggtatgcagtcgtaatccacagaataacgaggcccctcggtgagatgatgcccatccccgcctactgatgcgagacttatcttgagcgacatctttttgacggtcgaaacctgcagtctgtcccagctgaggagtgggctgatactgcgcttcctgactctcatcagcaaccactgtccgtgcgccatgtggtaggacacgatcgttctgtgattacagaggggctactacatgcgctacggtgtggagatccaacgaaatctcagactgatactcca

SEQ ID NO: 18445 - DNA, 853 bp, Zea mays
  unsure (1)..(853): unsure at all n locations
  Clone ID: MRT4577_116821C.1
agacttcctcagctcagctcgcctcggctcatctcacaggtgtagtactagagaccgaaaacttcacccatcaattgccatggcgctcagccttcgcgccgccgcatccctcgccgccccgccggctcacctgcgtccgcgccgacgcgccacctctatggtccgcgccactgtgtcccctcctccggcgcttgacagcaggcggcgcccgcagaacgtgtccggcgagttcttcgtcgatcaccggtgcatcgactgcgccacctgcaggtggatggctccggaggtgttcaagagggtcgacgaccagtccgccgtggcggcgcaacccacctccgaggaaatcaggaccaaggcactgcaggccttgctctcttgccctacaggctctatccacactgacaagcctacagaggacattctccaagtgcaaaacacgttccctctccccatcaacgacgatctccccggagtttacctctgtggttaccattctgagaactcatatggagcaacatcttatcttatagttcacccggaagggaacataatggttgacagcccaagatatacgccgaaactagcgaaccagcttgagaagctcggcggagcgcgttacatgtttctgactcacattgacgatgtcgcggatcatcggaaatgggccgagcggctaaagtgcgagagaacattcattcnagagatgtggaggatatcactgctgatgtcgagtggaaacttactggaaatggcccctgggacattggaactgattttgaacttatccatacccagggcataccgaaaggctcagtctgtttgctgtacaaacctctgaaggcactattttact

SEQ ID NO: 18446 - DNA, 441 bp, Zea mays
  Clone ID: MRT4577_116822C.1
gtgagcgcatcatacagagcacgcccgactcccgttcagaggcgtgctctcctctactacgctccagtcagggcacagaatggcacccgaggggtctaaggtcgatggtaaatgctatgattctaaaatgcaggagctgctgagcactgctgagactgacgagtaattaacattcatatgatgaagttattgaaagatctgatgacatgggccttcaagagaattttgtgagaggcatttatgcatatgggtcagagaaaccatctgcacttcataagagaggaataggtgccttctgcaagggggtagatgtcattcagcaagcacaatctggtacaggaaagacagcatcctaatgtgctgggattttgcagaagcttgactatggtctggcggtatgccaggacctgggtcttgctcccagccgtgagcttgtacagc

SEQ ID NO: 18447 - DNA, 278 bp, Zea mays
  Clone ID: MRT4577_116823C.1
cttactctcacgcgcccattttatccactcgagcggacgagccctcgcggggcggagagtgcccagcctcaagtccatcacaggatggagagcggattgcttgacaccgccgcggttgccggactctgcccggtggcggccgggcgccgtcgcgacgggagcacggcgaggtgcttcttcagctgctcctgtgctttcagagactgcatggtgagcgcgacctactcttactcgatcagccggatgttgagcggattgcggtccgctgctcgcaagag

SEQ ID NO: 18448 - DNA, 190 bp, Zea mays
  Clone ID: MRT4577_116824C.1
cttccgcaccttgtgccccttagggacgaacaccttgtggttgtccaaggtgaacaaacccttttccgtcagacggctggttcacagttagcgggcccattatttggttctccaagatcttccttgtgatggaagactccgctgggcccttcaccttcaggtacaggttgttttttttggggaactcacc

SEQ ID NO: 18449 - DNA, 297 bp, Zea mays
  Clone ID: MRT4577_116825C.1
ctcctactaataatataatgatctccattaatgcctacgaattagaactcaagtctttgggcactcatcctatactacttattctaatctttaccccttacacattaacatctcaaagttcacctcacattactaatacttatccatataagtttaactataagccttatcctgtatagataccatcacttctatcaaacttatcattatccgtaatatactactctgaatatccatataacaatctactattactactattcatctccaatcaacatcaacatcttatcttatcaa

SEQ ID NO: 18450 - DNA, 353 bp, Zea mays
  Clone ID: MRT4577_116826C.1
ccaattacactcgagcacctacttcatactacacccctccaccataggcgtgtcccctacactcttgggtccctaaacccactccgtacctcccttcaactcaaccaccttacccccaaaccctccacgcaacgtctcaatacctctacacccctaccccccatactccactcagtcacgccacatacacctacacctaacccatctccaacactcattctttccaccatctccacaccttcgcttactacaacccacatttcgctgccgatacatacgctgacattcattccctcctcaacatcttcctccggctacagcgcaccatgcatgctgacctaccggcaggcaac

SEQ ID NO: 18451 - DNA, 468 bp, Zea mays
  Clone ID: MRT4577_116828C.1
atgggcaaggacaaaaaggaccaaggttcgtctcgtcgctccgacgacaagcggaagcacgagccgagtcctccctcagaggacttcggtgattctgagtacttggaggaggagttttcctccgagaccgaggggtcgccgaagatagctgctgaggtgtggatgtacatccggtccgtcgagcgcgccgagctcgagggctcgaatgagtcagaggtctcctcggacgaggagaactcttccgactcatccgaggaaggaagcggtggtgacggcgacgacgaaggcaacgacagaggtggcaatggcagtggtggcggtggtgacgacggcgacagcgacggcgacaagggcagctgcgacagcaagggcagcaacgacggcaggagcagcggcgacggcaggagcggcgatggtagcaggagcggcagcagcagcaaggccagtggcaaagcgccactggcttaa

SEQ ID NO: 18452 - DNA, 780 bp, Zea mays
  Clone ID: MRT4577_116829C.1
tcctctcggcggccccccagttccctaaaatcttccccaaaacccccattgctccgcgatgagacccgcagcaacagcggtagcagccaccgccgccgcgctccgagccgcgttcctcgcccctcccgctgccgccttccgcctcctccctccccgccgtgtcttcctcctccccctgcaccgcctctcctcctcctcgtccccggtcgcccctccttgcgccgcttcctccgactcccagccgccgccgttgcctgccttcatggacgcgcagttcgagtccttccgggcgcagctcgatggctcctccgccctccgcgaccgcatccgcgccgtcgtctccgaggtcgagtcagcctcccgggccgcctccgctgcgctcctcctcatccaccagcccgtccccctatctgatgtgctcggcaaggcgaaggcgcaggtggaggtgatcaaggggctgtactctcagctcgcggagatcctcaaagagtgccccggtcagtactacaggtaccatggggactggaagagtgagacacagtctgtggtgtcgatgctagcgttcacgcactggctcgagactggtggcctgctcacgcacgccgaggcccaggaaaagctaggattgggttctggggagtttggcctggacgttgaagactacctgactggattgtgcttcatgtccaatgattttcctagatatgtagtgaatcgggtcacggcgggtgactacgactgcccacggaaggtgctaagctttttgactgatctgcatgc

SEQ ID NO: 18453 - DNA, 438 bp, Zea mays
  Clone ID: MRT4577_11682C.1
attctatattctcgcgacgtcactgaatctcctacaaagtactccccgccgttgcccgctcccggggatcccgcaaccacagctggggcgcagacaagatctgcaggaccatctgcctctcctggaagaagctctacgatggagaggccgtccttgggtacaatcgaagccaatgagaacagaactgatagatatcgctctcgtgaacatcgcagatgaacgaccccaagatgatcccacagtgagacctgggtgatcgacaggactattactgaaatcctgtaccgatactggtcctgccctataccgatgtccctggggggaggccttccggactgctataaaatccttgggaaaccgcggcatttatttgaccgatcctaagactattttcttggtacgtaattgcacgtggttcaaataccccttgcccaaaaa

SEQ ID NO: 18454 - DNA, 303 bp, Zea mays
  Clone ID: MRT4577_116830C.1
caggaagaagcgtacgtgtggtttggatctgtgttccctttggcttgtgacgtggtgaatgctcgattcacattcgaagctctcactgccaccacagctaacaggctgcactaccctgcctatgacaggttcctgaaagagatggataagtccttcaagttcttccaagacttgccaactccgactggagttgaattcgctgaggatgagttcattttgcacatggagggcacggcagggacacagagagtggtgaggcacattggaaccactagctggccaggtcgagtgactctgacgaac

SEQ ID NO: 18455 - DNA, 1302 bp, Zea mays
  Clone ID: MRT4577_116831C.1
cattgggtacctcgaggccggccgggagatcccgcaaaccgcgaaaagaaaccgcatatcagcgggcgctgctcgttctcatcgccccccctcgtctctcgcggagccgaccccgtccccattcggacctcagctagccaccaccaccatggcttcttcgaagaggagatttggtgctgccggcggcgcggacaagaaggatctattccatgtcgtccacaaggtgcccgccggcgacagcccgtacgtcgtagccaagcacctccagctcgtggagaagcaaccggatgtggcgatcgtgtggttctggaaggcaatcaactcaggggacagggtggacagcgccctgaaggacatggccatggtgatgaagcagcaggaccgttccgaggaggcaatcgaggccatcaggtccttcaggcacctctgctccaagcaggctcaggaatccctcgacaacctcctcattgacctctacaagaaatgcgggaaagttgaggagcagatcgagctcctgaaacagaagctcaagtcgatataccttggcgaggccttcaacgggaaggcgacgaagaaagcgcggtcccatggcaagaagtttcaggtctcgatccaacaagagacgtctcgtattctgggcaatcttggctgggcttacatgcagcagaacaacttcgaggccgccgagctggtgtaccgcaaggcgcaagctatcgagcccgatgccaacagggcgtgcaaccttgggctgtgcctgatcaagcagggcaggcacgacgaggcacggcaagcgctcgaggacgtccgattgcgcagaatctatggatcagaagatggaaaggtggttgcccgtgcggagcagcttctccgcgagctaaacccgttgcaatgcgtttcatcgccgttccaggttggcctcagcgtccatgaagggatcatgggtgaaccagacctagtagtgatgaacgagtggacgccgttcaggtcgaggaggctgcctgtgtttgaggagatagcaactttccgggaccaaatggcttgttgatgcattactttgcatggtttaatttatctgtcagtgtcacactcacatccctctagaagtttttgttcgtatagagatcagtaggtatcgacggtgaggaatagagatcagtatatatcatatagctggggttgatgcaaagcgttgcctttaggatagtatttggttcatgttatatcactgtatggttcagatttcagtgaacaaatgttcgtgcgtgccctgatcttgtacaggatttacagttggctgttgtg

SEQ ID NO: 18456 - DNA, 474 bp, Zea mays
  unsure (1)..(474): unsure at all n locations
  Clone ID: MRT4577_116832C.1
gcagggcaggcacgacgagaggcacggcaagcgctcgaggacgtccgattngcgcagaatctatggatcagaagatggaaaggtggttgcccgtgcggagcagtttctccgcgagctaaacccgttgcaatgcgtttcatcgccgttccaggttggcctcagcgtccatgaagggatcatgggtaaaccagacctagtagtgatgaacgagtggaccccgttcaggtcgaggaggctgcctgtgtttgaggagatagcaactttccgggaccaaatggcttgttgatgcattactttgcatggtttaatttatctgtcagtgtcacactcacatccctctagaagtttttgttcgtatagagatcagtatatatcatatagctggggttgatgcaaagcgttgcctttaggatagtatttggttcatgttatatccctgtatggttcagatttcagtgaacaaatgttcgtgcg

SEQ ID NO: 18457 - DNA, 411 bp, Zea mays
  Clone ID: MRT4577_116833C.1
gccttctagcttatttacaccccaattctattactagagtcagcagcggctacaatgcgtgcttacacgatcaagagcgacgatcagcactctcttctcatcctacttctgcaggccctccagctctattcatctcttcccaaacgaccttcatcccctaacaaccactgctgctgccgacaatgccccacctgctacagcgtctgtacctgctactacctcctcaccatgtgcaccgccccctgcactaactgcgtccctgtctccacgtacaaaggcgctaccaagtacacatatccaaacttccttacccaactctagccctgccccatccactccagactcatcctatcaaccatgtccacattctatcgacccttcttccatatgcatgctctcctaacttcatcc

SEQ ID NO: 18458 - DNA, 618 bp, Zea mays
  Clone ID: MRT4577_116834C.1
agctttataatggttaaatgaagacagagatactaaagcaaaagataggaaggagtgatgcgaaaaaaatgaagtgcttggcagctttgagatcatacttgacaggtttgttcctaaggagttgatctatgctagtctctattattagaaatgctccttgtggaacacaaatcgcgtgaatgtttttgtgttcactttgtggcagagcttctccagctgccttcccaaatcgtccggaccacagtagaaaacccaggagtttttgagatgatatcaatgccatggcgtgcaaaatgaagtgcttgaatcgcacttattagcatcgaccgcttatcaccttcttggtagacacttgtcaggtagttatacatttctatcacaccctgcttgctgtctagaaccgaaacctctttcatgatatccctgaaccactcaaaggatccttgctctcttgtcacccaataaaagtaggccttcttcagtcggtcagagtgataatttaagttgccatgcccctgaaatagtttcagataaatatgatagattttcagctgatatgatagacgtaaattgcatatcatgaaggtgcagtcattgccttatctaatccattggcaa

SEQ ID NO: 18459 - DNA, 214 bp, Zea mays
  unsure (1)..(214): unsure at all n locations
  Clone ID: MRT4577_116835C.1
ccacgcgtccgccacgcgtccgcccagcgtncgaggagcgtgggcggacgcgtgggtgaaggcgtggtatggggtgtgaaaagtttagggaatcttggaaaaggatttggtggagtgaacgtttatcatatagagattgataatagattatgtaggttgataaagattagggcatcataggatagtaagatgcttgatgaagaaaaagttttat

SEQ ID NO: 18460 - DNA, 213 bp, Zea mays
  Clone ID: MRT4577_116836C.1
ctggtgcgaaaacgcttctaattcatcacgcatatggccgaccgtgacaggttgtttactcgaaaaacagactcaaagcataaactcatgtctcatacgtctctctttggggaaccaaaccccagtacgcactgaacagaccggaacaacgacacactattatttagcaaaaaggcatcgtctcacaccctgcactgggttgaaatgaacaca

SEQ ID NO: 18461 - DNA, 282 bp, Zea mays
  Clone ID: MRT4577_116837C.1
cacgtttgttgacagaatcaggaatgactgacgcgtatgacttatctagcgatactacaggtgcttaaaaccctgtgtctacaaaacccactgaatctgccagagttgaggccacatattctactgatattcaactggagaatgaagaagtagataagaaagaagaggaccagcatgcatacacaaccaatgatgatgtttctaaagagtattgtataatgctcaaatataaatctgcataaaataacaaggcctgattttttatctaatgtgcttgaatct

SEQ ID NO: 18462 - DNA, 141 bp, Zea mays
  Clone ID: MRT4577_116838C.1
tagttaccgagttttttttcccctggatatataggggggtgatttatgtattgtgatggcatagcaacctgctataaggtcatggctgatttggtgtggttgttcgtgtttgatttgaggacaggtctagttcagaatttg

SEQ ID NO: 18463 - DNA, 245 bp, Zea mays
  Clone ID: MRT4577_116839C.1
ggatgcgggaagatgggtttattgccaaatccaagccccaccgggtcggtaaaagggttatccacccttcataatgataacttcgataacaccgctgttcctttaagtaaaaagattgactcaagctttacagccataaacttggacatttgaaatgggcaacttttcggaaacctatctttatgctaaaacatttccaatggataaacaagaaacgagctctactcttaggttggccaatttgt

SEQ ID NO: 18464 - DNA, 1076 bp, Zea mays
  Clone ID: MRT4577_11683C.1
ccggtcgacccacgcgtccgcacggacgacggttgggttggcagcaggcacttgcgcttccccacgccgccgcacgccaagaaactaaaagggggcaaccgacgggctcgttcacctatatttgttaagtttcaggcagagagaaagatagaggagcaaacagcaactccagaagatgagtctccctcgccgccgccaccttgtcctgctcgcctgcctcctggtcttcctcgtcttcgccgcgtccgcgtcgacgagttccgccgaggtggccccgagcgtggcggtggacttcgtgcggcggtcgtgccggtcgacggagtacccgcgcgtgtgcgagagcacgctggtcccctgcgcggctggcgtggggcgcagcccgcgcctgctggcgcgagcggcgctggtggttggcgccgaccgcgcgcgcaactgctcctcctacatccgcggcggcggcggcggcgcgatgaaggactgcgcggagctggcgcgcgacgcggaggagcggctgcggcagtccgcggcagagatggagcggatgggccgtgccggcacaccgcgcttcgcttggtccctcagcaacgtccagacctgggccagcgccgcgctcaccgacacctccacctgcctcgactccctcgcccagcagtcccgcggtggcaaggacagcgacgacgccgtcagggtgaagaggagggtggtggccgtcgcgcaggccaccagcaacgcgctcgggctcgtcaacaggctccagccggcgccgcaccggcggcgtctcctgtgactcttgtagcagcagctagccacggaaatctttgatggttcctcgttctcatccatgtcgacatcatccgtcccctgcatctccttctccaattgccatgtatgcgtgtatgtatgggtatggtatgcgtgtatgtatggactacggatcgatcagctttctcgattgcgtggttgtcgttgtctatctgtagtaactctgcagctgggatcactcaattcccgctagtggttgttcaggattatgctcaagtttatgcgtagtaaatagcaaaatctttgattagcct

SEQ ID NO: 18465 - DNA, 628 bp, Zea mays
  Clone ID: MRT4577_116840C.1
gcaagaacgactcttcttactatgatccaacaagaacgtgatgggatcaggatggattcgagccttcgggatgttatgcatggcatatgttgttctgaagcaaaatccataatgcaaaatgcttttcttgatgaaatatatggctactactcggtgagaagttccgaatggattaagcactactccttgccagattaccttgctaaggttgaggaaagtatggaaatggaaaccaagaggctggcttactatctggaaatttcaagtggggatagctacccgctctgtttgcaggctgttaatgctcctttgatggaaacatatgtgagctatgtgacagagaaacagatcgctggtcagctgatgcttgaaacgtacaagattgttgaggaggaactgctcggcagatgcagtagtttgacacttggttaaccgggcagtagttccttggactgaatggagtgggaaggcaaccttgcctaacatccatccatgacccagcttacctacaggagagctctagaacatggccgtgcctgaagtatgacttttgctgcaacttgtttttggtactactcaaagctacccccagcttactcctagcgtagactttttacaagcagatcta

SEQ ID NO: 18466 - DNA, 1977 bp, Zea mays
  unsure (1)..(1977): unsure at all n locations
  Clone ID: MRT4577_116841C.1
cttttccgccggagcaagccaaaaaaacaacaaaaaagcgagaagcgatagagagaagaaacggaaaatcccttcaaaacccctccggtccctcacccccatccgccgccgctttcctcccacggtcccaccacgcgcgcggccggcgggcggccaacggcggggagcagcaccgcgcgatcgtcaccgacgcttccacctacgtggctgtgtcagaacaaggtagcaaaatgaacaaccacctaagcttcgaggagggctggaaagtcctggaacaggggattgtaaaatgctcgaagattttggagtgcaccagtacaaggcctaccgtgaacgaatacatgaactactatgattgtgcttacaggatggctgtgcagaaacaacattactgtccagaaatgtacaatggtttcaagatgatgcttgcagaatgtgtccgcacaatggttctgccccatctcatgcacaagcaaaatgacagctttttcagagagcttgtgaaaatgtggtcaaactattgcatcatgattagatgtgtaattggcttcttcagctatttggaccgctgctatgtgaagcagtacaaactaccatcgcttagcaacactgctgctacctctttctttgatccagtcttttcctacttcaatgatgaagcaagaacggctcttcttactatgatccaacaagaacgtgatgggatcaggatggattcgagccttcgggatgttatgcatggcatatgttgttctgaagcaaaatccataatgcaaaatgcttttcttgatgaaatatatggctactactcggtgagaagttccgaatggattaagcactactccttgccagattaccttgctaaggtcaatatatttataatattgtaggaatcaatggcattcttctacagcttgtagacactgctgattatggtgtcttacaggttgaggaaagtatggaaatggaaaccaagaggctggcttactatctggaaatttcaagtggggatagctacccgctctgtttgcaggctgttaatgctcctttgatggaaacatatgtcagctatgtgacagagaaacaaatcggtggtcagctgatgcttgaaacttacaagattgttgaggaggaactgctcggcagatgcagtagcttgacacttggttaaccgggcagcgccgcagcagttccttggactgagtggagtgggaaggcaaccttgcctaacatccatccatgacccagcttacctacaggagagctctagaacatggcgtgcctgaagtatgacttttgctgtagcttgtttttggtactgctcaaagctacccccagcttactcctagcgtagacttgttacaagcagatctagctgccgatacgaatgcacgattcagttgaggtttatgtggatgacatttgattcccaggatctagggctgtgtaactcaagcgtcatgacccttttgcctcatgttgcgtgttatttggcagaatttagaaatgtacatgtggtttctgttactacctacctaagtactggcagaatttagaaatgtacatgtggcacttgtgctttactgccaaaaaaagtatcaaaaaattgatgtaggttatccagtgttggtggtatgtttgggttccttgcccaaacttgattacacttgcacgtgggcaaggaaatttgattttggacaagcacttcgttttgaactcaaaattcatatgttccttgtttatttcccaatttatgcgctctctacacttggcntaccaggagtgaagtgttaaattgggaagtggaatctgctgctgcctatgctttattgggattctgtacattgcatgcatgcaacaagcattagacaatctgctgattttactctttgcaggctgttaatgctcctttgatggaaacatatgtcagctatgtgacagagaaacaatcggtggtcagctgatgcttgaaactta

SEQ ID NO: 18467 - DNA, 266 bp, Zea mays
  Clone ID: MRT4577_116842C.1
aattcggcacgaggcgacaggctagcggcccgcgaatacttggcaccagcatcagagctcctgtactaagctccagatccccctcccgcggccgagctgttacttgcgctgcggccttaggatgagctgcccgctgtcgatactgactcgccgccgcccactagggcttttgctgcttctgggcctgctctagagcatatctggcgcatttgcatcgagggacgtgacactccatgctattgagatattttctactcatgaatggc

SEQ ID NO: 18468 - DNA, 173 bp, Zea mays
  Clone ID: MRT4577_116843C.1
ttttttttttaaaaaaagattgtgtgcactctcatttctaatctacaacttaccatttcttaaatttgggtggagaaacgggtattggacatggggaccaaatcaggattttcccgttaccacccacctgcacgggccctaaggaggatggggaaccctctcttcttggagat

SEQ ID NO: 18469 - DNA, 483 bp, Zea mays
  Clone ID: MRT4577_116844C.1
gccggccggtccggaactcctcaccagcataaccaacttgttacccggtatttctgagttaaatccggatcagagatggtggaattccaaaatttcaactcatcaatgcaaggaggcaatcttgtcagccacagccacgattgagcggaacgcaacgtatatcaccctcactgaacctctgggctacttctccgaatgtgatgcttttcacatacaacgttgtatgcagtgaacatatacgctgcttactcttatacatgatactgcggactcttaattggacgccatcacttgttacaagtcacgtcaaacccggcctcatcttcccagcagctcaagtctcgatatctggatgcgggatgggtctgtgttgagctgagctgttagtcatcaccacatcgaaccacacgttacagaacagaaggactccatttaatgtcagttgcttctaccaacgaaaaaaaaaaaaaaaaaaggccccta

SEQ ID NO: 18470 - DNA, 235 bp, Zea mays
  Clone ID: MRT4577_116845C.1
agacgttggagatcacagatgatgtgctttcgtcatacaaaaatcaaggtggttttgatttgctgggcaggactgttgatcaaatccgcacgacagagcaagtagatgctgctaagtcagcatgctgtgatcttaacttggatggcctaatcatcattggaggggtgacctccattcagatgctgctcagcttgcagaattctttgcggagcatgactgccagacaaaagtcata

SEQ ID NO: 18471 - DNA, 764 bp, Zea mays
  unsure (1)..(764): unsure at all n locations
  Clone ID: MRT4577_116846C.1
tacaatcaaganatagcgcgcgcgcatgctgtctcaagccttcccaatctaggtccgctcttcgcagcacgcgccatccccgcgatgcacagaactatgcgtaccgtgctccagagaccgaccccgggcagcgcggctagcgagctcaagagccacagcacgaatgagggcggcgccgacaccgaatccaagaacagccatgttgaaggaggacggcaacacaacctgcctcgtccatccatgagatccgcctgacgtgtacaagaccgtcctggtggccaagcagctccactcccctatcctcaacagtgatcatcggtcatccgaggtaagaatgaaaacaacatagatgtactccatccgacagaccgtcgccaaggactatcttcacctactagatgaagtacttgatagatgccttcgagaaggaggtccacgatgtcttagacattcacgacggcacccttctcgtcgccgacgccaccggcgggtatccgattaacctcttcgagcataacaaccagaacccaaggccttaaattcgacttgttaccgatatcatgaccggtcttgccgaacagttagctgggtagatgcttattaacaaagcgaggtcggtatgcgtgcattacattcctatcatcggtaacccataatgtggtcgatgactacaatctgttttaccactcgcttgtgctgagtgacatccttacatagcactgtacatcctctgtgtcagacgcctttggcattgggcccctagg

SEQ ID NO: 18472 - DNA, 386 bp, Zea mays
  Clone ID: MRT4577_116847C.1
tgataaaggaggggttttattaactcgatggaacaatctgggggcttgaacggatcatgcccagagagagaactggctggctattcagagaaccgagaaggtcgagaagagaagactacgatggacatgaactctgcatgcgccaagaactcgagaaacaagagaattgctggctacagagaaaggcggcggaattacctctaccactaccacccgcaagcagaattccgtgcaccgctccactccatcggagccaggcctgaagaagacggttgcctaggaagaggaagcagcaggctctgctctggccatggctacggctcctccttcacaattgcccctttgtgctcaccgaatgggagagagaaagagagagagagagagag

SEQ ID NO: 18473 - DNA, 308 bp, Zea mays
  Clone ID: MRT4577_116848C.1
ttttgggtttttttttttttttgcgcgcgaacaaaccggtcaggttatgcatcagacctgcaacctattatccatacgaaactgccacaaacaccaaaaccaaggcatgtccgttttaacttctttacgggaacctcacagataccactcttaaccagagggtagaaaccactcagctcccaagctatcatgtaactaggacaagccctaaaccgcggtgagacacttttttgcgaccactacataacaaagtgcccacaacaccgcctgaacgtgtgaccaggagccgccattgtgcatcaaggtgg

SEQ ID NO: 18474 - DNA, 431 bp, Zea mays
  Clone ID: MRT4577_116849C.1
aataaatccatcaattgattgtcaagtaaacaaaataatgccattaatccggcataagcttgccattaagtggttaagaatcgaacataataatgtaattcggttctgggcaggagatatgatatatgatctattgcatgcaccatgggcgtgatccctcttaaaggggccatctgcccaaactcggcacatgcacattggctttcacttccttggtgcatgcaatatggaaacaacagctgatttaccaattacaggggctggggtccaccaatattgcaccacgtaggacataagcctccttgcgaatcccgtgggctgttactttatgaaaaccttcatttcatgaatcttaggagatgggtccgagtccaactgcccaacaaagtagtcctgcattaactgcttggcactcttgttgtgccctgcat

SEQ ID NO: 18475 - DNA, 364 bp, Zea mays
  Clone ID: MRT4577_11684C.1
aaaaaaacttttggttccaacactttttttttggtttggaggcttcaccgaagcaacagattgggggggggtgttgctttttccaggaccaagggggacgtcctttgttgcagaacacaattttcaggggaaaatttttggccggttcaaaaaaaaagccttggaagattacggggggtgtaaaccccgaaccacgccctggttaacaattaagggggcttttaacaggccttttaatgacgggcctaagttttgcattagttgaagccaggtttttccgggtaagaacaccccgggcgttggataataacgtttggggaataaaaacttgccttaacgcagttttaaatgcctttgcctaaaa

SEQ ID NO: 18476 - DNA, 1087 bp, Zea mays
  Clone ID: MRT4577_116850C.1
tgggtacctcgaccgggagccgacaaaccacagtcaacggctccagagcagagcatccacacgtatcagatcacgaaacagctcggttcctggcttgggcgcaggtcgtcgatgctgtaccctgtcaagttgcgggaaaaactgagctctccgaggtcagaagggagcgagcccggtcagtcccagtgggtctcttcccttgcctggatcgccacgtatttatggcacaagccacgcggtcttcttcttctcccgcggccattgcaggtcttgcagcaacgtctctctcctctgggcggtgggcgctcgatgttcttggctccttcacttggacttcgccccgtcggcgtccactgatcaattgatcatctgcaggtagataagctaccagcatctattttgcgtatctgaactccaaaaaggagagctcgaaactacagcaatgggttgctaccctgtgttctggaggaagaagaactccagaagccaggttgtgcagcttgaccaagacatcccaatcgcgggcaacgtgaaaatctactcgtccaaggagctgaggaaagccacgggaaatttctgcccgggaagcaagcttggacagggttctttcggccgtgtatacctgggaaaactgaacaatggcgagaaagttgccatcaaggtgctctcctcagagtccaggcaagggacaaaggagttcttgaatgaactgagtgtcatatccaacataactcaccacaacctagtcaaactgcatggctgctgcatcgacggaggccagaagatgctggtctacaactacgtggagaacaacagccttgcacaaacccttttcggtaattcccgcagcggcatcagatttgactggagaacaagggtggagatctgcgttggcgttgccgatgggctcacgtacctccacgaagaagtccgtccaccgatcgtccaccgcgacatcaaagcgagcaacatccttcttgacagaaatctcagacccaagatagcagacttgtgggctggcgaagttcttccctgggcacatgacacacatcagcaccagagttgcagggacgctaggatatcttgc

SEQ ID NO: 18477 - DNA, 581 bp, Zea mays
  Clone ID: MRT4577_116851C.1
attcaaggtgcaaacaaaagaaggcgaatcgagagtgagtaccaaagagacctcacgagaaagcctaccctcctccaacacatctgcgatctcaggagcacccggacccaccggcgacagaggtgtacccgatctccccatcggtgccatggacatccaccaccatcccatgccgtgtacccgtcgcccgacgaggctcttaccccacaccagacgagactgccccgatctaccacatgctacttcagcgacacagcagtgtccttactacccggcggcgcatggacagcatcatctgatacctctcgccagaacaaaccagatctatgtccgtctggcttcctacgaggatgtgtcgtctgctctctgctgctgctgatggatgaacaactgctgaccctgctattgagatgcctgatgctcacccaagcccatccggagctatcggcgctatgattcgactagtactccagttatcatcatataacatccactgtggcgtgtataccatatgaactggctgtgaacgtgagatcccacccgcgaaattatattcacataatttgtactacctgtctatg

SEQ ID NO: 18478 - DNA, 702 bp, Zea mays
  Clone ID: MRT4577_116852C.1
acttccacggtcaccagttccagcggcctgcacgtacgtagctactgttactcgtagagagcaggaacgacagatccaacaaggagatcaatggagatgactgttaacgggagggacaccgagcaccaccaccaccttggtcttgccctcggcctcggcctcgggctcagtctcggcatgtctggtacgacgtctcctgtggagccggcggcaccccagaccgctgctgcgccgtcgtcgaagctggggctggggcagcagtcctggaatggcgccggccttttctttccggcctcctccggcgagcaacgctcgcatgcagatgaccggaggcttgcggcgttggcgtgccacgagatgccgttcctgcgcgggatcgacgtcaaccgagcgccgaccacggggggcgcgaggggcagctgcggtgccagcgaggacgaggagcccggcgcgtcgtcgcccgacagcacgctgtccagcctcagcggcaagcgcggcgcgccaacgaggagcgccggcggcgagcaggagcgtaccggcgcgggcagcgacgacgaggacgactccggggccggcggcggcgggtcgcgcaagaagctccgcctgtccaaggaccagtccgctgtcctcgaggacagcttcaaggagcacagcaccctcaaacccaagcagaaagcggcgctggcgaggcagctggggctg

SEQ ID NO: 18479 - DNA, 508 bp, Zea mays
  Clone ID: MRT4577_116853C.1
atttctagattctaaaaaaaaaaaaaaaaaaaaaaaaaaaaaaaaaaaaaaaaaaaaaaaaaaaaatggaaaaaaaaaaaaaacactgccaaaaaaaaaataaaaaaaaccaaaaaaggtttgcccctgcccgggcggccttttccagggccgggtttcccccccccgggcggccgttcctgcgggttccggccttgttcccggcctcggggtaatctgggaaattgggggttcctggggaaattggtttcccgttcccatttccccccacctttctgccccggcaccttaaatggtacccccgggggtcccttgtgggggggcttccccccattagtggggttcccctccttgcccgttttccgctcgggaaccctgtttcccccggtgtatttttgattccccccccccccgggggggggcgcttggcctttggggcgcttttccctttcttgccccactgcctcgttgccctcggccggtcggctggggtggggggtttcgcctc

SEQ ID NO: 18480 - DNA, 188 bp, Zea mays
  Clone ID: MRT4577_116854C.1
atattttgcggcccgaacagtccttattcggatcaggcccgctcgatgttaaccagaaacattctaacgaaggaagctatctatggggacaaaaaatgctgagaacaggggtgttacggtaatcctgctctaccaccaaaattcactgtggggacaattttacgggaatatacccgtcaaccaaaatg

SEQ ID NO: 18481 - DNA, 827 bp, Zea mays
  Clone ID: MRT4577_116855C.1
ctcaatctcggtcatcactctctccctcctcacgtcgccattagcgcacctccgctctctgccctcctgctgcctcatcaggcggactctctctctggagctagcgcatgtcgtcctccatggtgcccaagaacccgccgcccccgaccgggtacgatggcgaaggcggcgtcgaggcggcgccggtgacgagctgcctgtacctgcggcccggggcgggggcgctggacagggacgccgtgctgcgccgcatccgccaccggaggcgccacagccgcctccgcgacacgctgcgccccatggtgctgcaggcgcagccggcggagccggacggcgccgaatggcgcctcccgtggccgctcgacgacgccttctcggcgccgtagcttttgtgaaatagaatcactagtcgctcgtctcttgtgcccgcagattaagcaaatgccatgccatggatgatcgcctcttgttgtgtacatcgtcaagaacaggtgcagattaaataatcatctgtagtatgtgagctactgtactgcaaggatggagccatgcatatggaaggattgttttgggagcgcctttgtataattgcttgcatgcttggtgttttatgaatcatgctcaagtaattaaacaaagcatgtctgtattaaatgtttacttgtgttctgggttcattttttttttataaaaaaacaacaaaatgtcttcgttatgaaataaataaaaaaaaaaaaaaaaacattctgtgggtggatggatacaatgattggatcatcaaatcatataccactagacccagcttcttgtaaaaaaaaaaaaaaaaa

SEQ ID NO: 18482 - DNA, 287 bp, Zea mays
  Clone ID: MRT4577_116856C.1
aggccaaggcggccaccgtcagcctgggctccactgtctgtgattttgagataacatggggtgttggtcgcaatgttgtatactataatgtggggtaaagcgatcgtacatgcttagcaggcgagggaatctcaccgtcggatgacacgtggacttaaggtgcgggatttccgtgaggagggacatgccaacggtcgtatacactgtgatataggaggccttcaactctggatagagctgatcttatgttcactgcacgggtgcttttaaggctgtggtcgatataa

SEQ ID NO: 18483 - DNA, 3237 bp, Zea mays
  Clone ID: MRT4577_116857C.1
cccacgcgttcgcccacgcgtccgcccacgcgtccgcccacgcgtccgcccacgcgtccgcccacgcgtccgcccacgcgtccggaagtatcaaaaggttgatgagcaaggctcagtcgctatcaggcaaccagcaaatacattttggaccgacaaaatatgtgacaatcaaaatgaagatgtcaatcgaggtgttttgaggcaagaaaattttagccacactgccagagaaggttttaagttggtcgaaccatatggcagtaatatatcttgtgctcagcatgtatctagttctgccacccaacaaccagcatttgaattgaggaatcttgaggaaagctggtacaaaagcccagaggagctcagtcaatttaaaggcacatccccatcaaacatctatagccttggggttcttctatttgagctcttttgctgttctgagacatgggagatgcactgtgctgcaatgtcaaatcttcgccaacgcatccttcctccaaattttctttcagaaagtcccaaggaggctggcttctgcctttggttactgcatccagatccttgttcaagaccaaaagcaaaagagattcttggatgtgacttgataaatgagggtcgggatttgtccttgttagataagtcaccagtttccatcagtgaagatgacactgaatctagtttgctacttaacttcctttctcaattgaaagaagaaaaggagatgcaggctgccaagttatcggcagagcttggaagcttacaaacagatatcacagagattgacagaagacactcagcaggaatgagattgagtttagaggatagtccggtactgccaagttcaagtgctttgtcaggagcttctgtgagtgcccttcaaggtgcattgctgtcaggtttgttaccagcatcatgcaagtcgagcatatatgaggagagggtaatgagaaatttggtgcagcttgaaaatgcatactactccatgaggtcctctctggacacctgtgaaactaatgtaatcaaacggccagataacgaggctttgagggcccgtgagaatttccatcaacttcatagtgattccgatgccaaggacgaggaaaccgatcgtcttggatgcttttttgatggtttatgcaaatatgcccggcacaataggtttgaggtacgaggaattttgaagaatgcagatatacttaactccccgaatgtcatctgttcgttgagttttgatagggatgaagaatattttgctgctgctggagtttcaaagaaaataaaaatatttgaatttgatgcactcttaaatgatcgtgttgatattcattacccactgatagagatgcctagcaagtccaagcttagctgtgtctgttggaacaactatataaagaactacctggcttcaacagactatgatggcactgttcagctatgggatgccagctctggtcaaggattcacacagtttacagagcaccggaaaaggacttggtctgtgagtttttcagatgtcgaccctactaagttggcaagtggtagtgatgattgttgcgtgaaagtatggagtattaatcagaaaaattgtgttgatacaatcagaaatgtggccaatgtatgctgtgtacaattctctccatactcctcccgcatgctagcttttggttcagctgattacaagatatactgttatgatctgaggaacacaaggataccttggtgtactattttgggacatgggaaagctgtcagttatgtgaggttcttggatccatacacacttgtctctgcatcaaccgacaacacattgaagatatgggatcttaaccagactaattgcagtggattatctaccgattcttgcagcctgactctgaatggtcataccaatgagaagaattttgtagggctatctgttcatgatggatacataacttgtggctctgaaaccaatgaagtgttttcttactacaaaactttccccatgccaataacttctcataggtttggttctattgacccgataactggacaagtgacaaatgaagacaaccagcaatttgtgtccagtgtttgctggagagggaagtcaaacatggtagtggctgccaactccagtggtagcatcaaagtgcttgagcttgtgtgaatgaacgagagtcatattggagaagaaggttctagtgttgccatgcgggcctgcgatgctttcgtgcccttgggcactaaaagactcgactgctctatgcaagcatcctacaacaccgatcattggttattggaagctttgcttgaaactcacaagcaaactaaagtttttttttttccaagagtatgatggcctcacctccatttttgtgtttggcattttgagacggtacctattcatcgtgatgcaaacttcttttgggctagaggtgcgcgggacttgctatgactgttaagagcaaacgatggaaagaaagggaaaaaaatgatcatgtagctcgaagaagttaatcgtgctgtgtgaatgtttcaaggagaatgtctcaaatagttttatacccccttcattattgtacatatatctagggctgcctaatgaaaggccttgtaagttgtaactagagtagaatgctgatcatgagttaagtataatgaatggtcttcacaaaagattaatcaatggaagattcatacaaagtataatgaatgattatccttttggctggaactagacgaatctactaagtagaaggattgctcatatgccttttggtgtgtgcaggtgttttcttactacaaagatttccccatgccaataacttctcataggtttggttccattgacccgataactggacaagtgacaaatgaagacaaccagcagtttgtgtcgagtgtttgctggagagggaagtcaaacatggtagtggctgccaactccagtggcagcatcaaagtgcttgagcttgtgtgaatgatccaacgagagtgtcatattggagagaagaaggttctagggttgccatgcgggcctgtgatgctctcgtgccctcggtgatgctccaatggccctgcttatccggtgtctgcatcctcaatggaagcactaagcgaactgggtacctcttctaggtctgcatttcactgttttgccagggcactaaaagatgcgactgctctgtgcaagcaacctacagcaccgatcattggtcattattggaagctttgcttgaaactcccaagcgaacc

SEQ ID NO: 18484 - DNA, 1178 bp, Zea mays
  Clone ID: MRT4577_116858C.1
gctgtgtacaattctctcctactcctcccgcatgctagcttttggttcagctgattacaagatatactgttatgatctgaggaacacaaggataccttggtgtactattttgggacatgggaaagctgtcagttatgtgaggttcttggatccagacacacttgtctctgcatcaaccgacaacacattgaagatatgggatcttaaccagactaattgcagtggattatctaccgattcttgccgcctgactctgaatggtcataccaacgagaagaattttgtagggctatctgttcatgatggatacataacttgtggctctgaaaccaatgaagtgttttcttactacaaaactttccccatgccaataacttctcataggtttggttctattgacccgataactggacaagtgacaaatgaagacaaccagcaatttgtgtccagtgtttgctggagagggaagtcaaacatggtagtggctgccaactccagtggtagcatcaaagtgcttgagcttgtgtgaatgaacgagagtcatattggagaagaaggttctagtgttgccatgcgggcctgcgatgctttcgtgcccttggtgatgctctgatggccctgcttatccagtgtctgcaccctcaatggaagcactaaccattggtctgcatttcactgttttgacagggcactaaaagactcgactgctctatgcaagcatcctacaacaccgatcattggttattggaagctttgcttgaaactcacaagcaaactaaagttttttttttccaagagtatgatggcctcacctccatttttgtgtttggcattttgagacggtacctattcatcgtgatgcaaacttcttttgggctagaggtgcgcgggacttgctatgactgttaagagcaaacgatggaaagaaagggaaaaaaatgatcatgtagctcgaagaagttaatcgtgctgtgtgaatgtttcaaggagaatgtctcaaatagttttatacccccttcattattgtacatatatctagggctgcctaatgaaaggccttgtaagttgtaactagagtagaatgctgatcatgagttaagtataatgaatggtcttcacaaaagattaatcaatggaagattcatacaaagtataatgaatgattaccctttggctgg

SEQ ID NO: 18485 - DNA, 622 bp, Zea mays
  Clone ID: MRT4577_116859C.1
cgaactggccaatgttgctgtttacaattctctcctcactcctcccgcatgctagcttttggttcagctgattacaaaatatactgttatgatctgaggaacacaaggataccttggtgtactatttcgggacatggaaaggctgtcagttatgtaaggttcttggatccagaaacacttatctctgcatcaaccgacaacacattgaagatatgggatcttaaccagactaattgcagtggattatctgctgattcttgcagcctgactctgaatggtcatagcaacgagaagaattttgtagggctatctgttcatgatggatacataacttgtggctctgaaaccaatgaagtgagtattctgtttactgcatacattttccttggcatgcagaacttgttttagtcaagatcagtcaggaattgagttttcttcttgagttgtaagattctgagtgaacatctatgtgttgagcacagtggaatatcaatgaagcatattgatttcattaacaaaagaagcatatagacgaatctactaagtagaagggttgctcatatgccttttggtgtgtgcaggtgttttcttactacaaagattccccatgccaataacttct

SEQ ID NO: 18486 - DNA, 373 bp, Zea mays
  Clone ID: MRT4577_11685C.1
gccatctattaccggctacttgaggaggtcatgggagtgtcacactcctataggtggttggcttcgagctcatctcctctcttgttatggctttgatcagctggcagctgttctcggcttgtcagagaccgacgtgactagacatccatatcactgccaattttacgtgcagtttgaagctgctgaggatgcttcctgatacgtcagaagaattacgatgattctctgaactctggaccacaactcttcttggcgttcggtcacagaacattttacatagaacatctgttgtgacttagagaactgtcgagcagaaacccatgcctcaaatgagttaattctgtaacagatgctcaggtaggcctttgatctg

SEQ ID NO: 18487 - DNA, 2937 bp, Zea mays
  Clone ID: MRT4577_116860C.1
tattcccctggttattgttctttatactaatcgctgttttttttttttttttttactagtaaatgtccatcgcatttcaatttagctgacaaacgacccaaacaatacaatagcttctgcttaatattgcagagtactggagtagcgagttcaccacgagagcagcaagacacaaacgagaagaaaatagcggcagagcacagggctcgcaatcatatacggccctttatttaaccgaccacggactcacgggaggacgaggcacccttcagcgacgggcagaggggtaaccttgacaggaacataggccgtagggccctcaccgtcgctggcttcctcctcttcctcatcatactgaaccaggccagcagcgctgaagatgtacgccttcacttcctcgaagcgctcctcggagagagagacctcggcgaggagtttccacgcggaggtttcagatgcctcctcatagtccatcctccgtttcagcaccatgtgtccactgatctcccacacagctgggttcacctgagtgtccagcagctcctggctcacttcacccagagcctgcttctctgcgtagcactgggggaacaggaaaaccctcttgccacagtcagaaatgagcacattgtaaggcacattgttgtcttgcagccaaatgcaagcattagaaaccacagtggccaggtcgtccagggtgttccctccctcaaataccaggcctctcacaggataatttatcagcttggacacggttgcaccccattcttattcctgtcctcacagagtgggaccttgtggctagctgccttctcacgcagggaaagggcactgactaagtagtcctcctgaaagaggcaatcattaaaaacgacaaaggcaaggtagtccaagtgtatcccaaccctcaaatatggggagcctcccggtgcagtttgaaaatgctgaccacgccatgagctcccttgttcaaacctgtgaagctaatggaaccaaacgtcaggaaatcagaaccatgagtgtccgtgaaaattggcatcagcgtgacagtgattctgatgcaaggggggagaaaaaagacagtcttggatgcttttttgatggtttatgcaaatacgcccggcaccataggtttgaagtaggaggaattttgaagaatgcagatgttttgagaaatcgaaatgggcacggttcatagcgtcttgatagggatgatcaatattttgctgctgctggagcttcaaaggaaagaaaaatatttgaatttgagccactctcaactgatttgctcaggaatgaccttggtctcacaggcagtgacatcatagcggagcagacctctattcgttgggacagctatataaagaactacctggcatcaacagactatgatggtactgttcagctatgggatgctggctctggtcaaggattcacacagtttacagagcaccgcaaaagggcttggtctgtgagtttttcacaagtcgaccctactaagttggcaagtggcagtgatgattgttgcgtgaaagtatggagtattaatcagaaaaactctattgatacaatccgaaacgtggccaatgtatgctgtgtacaattctctccatactcctcccgcatgctagcttttggttcagctgattacaaaatatactgttatgatctgaggaacacaaggataccttggtgtactatttcgggacatggaaaggctgtcagttatgtaaggttcttggatccagaaacacttatctctgcatcaaccgacaacacattgaagatatgggatcttaaccagactaattgcagtggattatctgctgattcttgcagcctgactctgaatggtcatagcaacgagaagaattttgtagggctatctgttcatgatggatacataacttgtggctctgaaaccaatgaagtgttttcttactacaaagatttccccatgccaataacttctcataggtttggttccattgacccgataactggacaagtgacaaatgaagacaaccagcagtttgtgtcgagtgtttgctggagagggaagtcaaacatggtagtggctgccaactccagtggcagcatcaaagtgcttgagcttgtgtgaatgatccaacgagagtgtcatattggagagaagaaggttctagggttgccatgcgggcctgtgatgctctcgtgccctcggtgatgctccaatggccctgcttatccggtgtctgcatcctcaatggaagcactaagcgaactgggtacctcttctaggtctgcatttcactgttttgccagggcactaaaagatgcgactgctctgtgcaagcaacctacagcaccgatcattggtcattattggaagctttgcttgaaactcccaagcgaaccaaagaaaaataaaataaaatcaagagtatgttgtgtttggaaatctctggcattttggcacggtaccttattcatcatcgtaaggagggccccaggtctgtacagaattagggggccatggggctgatgaaatagaacatgtgatgcatgcaaacttcttttgggctagagaggctgacggacgccgtggcgccttactgaatcagttgggaatttaactcagttttgatgtgcgccggacttgccatgactgttaagagcgaacgatggagagaaagaaatgatcctgtagctcgaagaagttaatcgtgccgtgtgaatgtttcaaggagaatgtgtgtagtaattttctttctacctcccttcattattgtacatatgtttagggctgcctaatggaaggccttgtaactagagtagagatgctcaaaagactcggtcatgagttcagtataatgaatgatcttctcaaaagattaattactggcagatttatacaaaaaaaaaaaaaaaaaaaaaaaaaaaaaaactcgaaaaggg

SEQ ID NO: 18488 - DNA, 876 bp, Zea mays
  Clone ID: MRT4577_116861C.1
tgacacagttagtctacagaagtcagataaaagtatggcacaccaaagtaagaaacatattacaaagaaaaatgaactgccgttttcagagattcatgatttcataacatatctattgggtaagcgaaagagcaaaaccatttctatgtacgtaaatcataatattgtttatttttagaagaatatacaagtctaggtgctctgcagcagatgaaaccagtggcggatcaagaaccagatcaaagagtgggctggattatggattggggaggctagagatggccataatatgaatgaatggagccaccgcgaagatgatgcgcgaattgcaaacatgtgtgatggcctgatgggtctgcaacgtgctgtgatgcgcccgcgtcttgtaattgcgggccctctttctatgactatgctgaaattactacagggtactaagtactaattgggttgctggaccggggttgcggctctgccagctccggtcctggatccacccctgggtgaaatgtccgtgaatggtgaccatttttatatgctttcgtgaattgtgaattgtccatgttgtttcagtaacccagactacataatctttgaagcaccttgcaatttaacacataaccaatagagttaacgagtctacatgatctatttctcccgggggtggatccaggaccggagctggcagagccgcaaccccggtccagcaacccaattagtacttagtaccctgtagtaatttcagcatagtcatagaaagagggcccgcaattacaagacgcgggcgcatcacagcacgttgcagacccatcaggccatcacacatgtttgcaattcgcgcatcatcttcgcggaggcttcattcattcatattat

SEQ ID NO: 18489 - DNA, 334 bp, Zea mays
  Clone ID: MRT4577_116862C.1
cttacaagtcttggatcacggagagcaaagctccaaatactggtaactgggcatggaatacctcagagagagatgctacagcgataaggcacaaggtgcttatttcaggtttctagatcctcaccatccgccccaaattttacttgtagacttcttatttttaggttgcacgacaactcaagctgtgtgaaaaacaggtagcgagaaggagattgatgctgcaggagatggttttgccatcaatatgctactttgaatatagctccgactaaaactttccttggttagatccctatattgctttttgctataggcgacggtttaatcattttag

SEQ ID NO: 18490 - DNA, 975 bp, Zea mays
  Clone ID: MRT4577_116863C.1
gaacggtcaaaggcagactactattgcttacttaataagtagtagagattgttgaagagaggctctcccttactacttttcttggttcatccatggtataggatgtgactgtcagcctgggccctaacggcgagctccggtacccaccatacccgccggggaaccagggcgccgatggctacgccggcatcggcgagttacagtgctacgacaagtacatgctggcccggctgaagcggcacgccgagttgtcggggcagccactgtggggcctgtcaggcccacacgacgggccgcggtacgacgagtcgccggagacgtccgccttctttagggagccggggggctcgtggaagtcggcctacggcgagttcttcctgtcctggtacgccggggagctgctggcgcacggcgaccgcgtcctggccgcggcgtccagggcgttcggcggcaagcccgtcgagctgtccgccaaggtgccgctcatgcgcggaccgagccccgccgacgccaccgcggggctctacggcgggtacggcccggtcgcggagatgttcgcgcggcacaggtgcgcggtgatcgcgtccggcgtggaggcgcggccggacgccgcggcggaggggcgcctggcccgggtcaaggccgcctgcgcggagcacggcgcgcgcctcgcggcggagagcgctcctctctccgtggcgcgcggcggcgccagcgccggctcaccgggcgtcgtctggctgtccgccgggcgcactcggccgtgccagttcacgtaccagcggatgggcgcggagttcttctcgccggggcactggccgctgttcgtgcagttcgtgcgcgcgctggagtgccccgaggaggcccatgaggacgacctgccggtcagcgctggcggcggcgagcggctcaccgtaccgtcagcgtccgccccgacgagcgaagccacaaggacaagggaggtgcagaccgtgg

SEQ ID NO: 18491 - DNA, 377 bp, Zea mays
  Clone ID: MRT4577_116864C.1
attcgttctgcattcgttcatagatcatttttgatctgacattcgtttgactgtgtcatacgtcccacaatcgtttaagctactctagctatccagtcttttaatcgaaccaaccgacctaatatctcattcttcactcaaaatgcgtttcgctgcttttgccgtctcggctctggctacatgtgcctttgccctcccgtccgcctccgtccctgctgtccttcaccatgagcggggcctcatctccgacgtgctcaacctcctcaaccctaccgacttgctgagcggtctccctgccgaaggtgccgccgctttcgtcggtgccagtctcggcctcaatgccggcctcatcgatgccaaagccaaagcctcactcg

SEQ ID NO: 18492 - DNA, 405 bp, Zea mays
  Clone ID: MRT4577_116865C.1
atggctgaggataagaaaaacactaatcccacactcgctggcttctacgaagccatggaaaggaccaacgtagagaaaatcaccaatgaaatgttagctggactatctggtgattcaagcgacagtgaaagcttcgatgttgggagtgagaatgaagatgccgaagatcagtcgtggagaccaagccacgttgtttttgggaaatcaacaattagacaagggcaaattgaagcgatgaaagacaaatactttcatgatgtgtctatagtgtgggctaggggagaagacactgttcccctagacatatccaacacaccatcatggactaacttttttgatataagtgtgagcataggtccattgcaatgcaatttgaaggcactaagtcctaaagagcttgaatga

SEQ ID NO: 18493 - DNA, 545 bp, Zea mays
  Clone ID: MRT4577_116866C.1
atttcggcacgaggcggacgcgaagcgggaccagcttgtgaaggtgctaggcgtcgtatggtcgagcgggggcaagcagcagctactggtccaccgcgtgatggtggcgctggtggagatggtcgacgcgaacctgttccacgcaatgccgctgccgtgcatacccgacgctaccccccgacgacgtcgacaaggaggcggcagtgatggcgttggcgtgcgcgatcgagcagcacgccaatgcgcacggggcaagcagcacgccaacgtcgcacagggaagtgagtgagtcccggagaaccaacgtcggacagggccaagtgccatcgatctttccaaggggagctttccccatctacatcggatgagcgcttgtgccgttgctggtaccggcggccagggggcacaagagcatcatcgactgcccgagaacgtggtgtacctctcggcaaccaagcaagaaatggagctgatcccacccaggccgacgaagctattagatggttttatccatcatcatctgcaaggcattgctcgtgctcaat

SEQ ID NO: 18494 - DNA, 792 bp, Zea mays
  unsure (1)..(792): unsure at all n locations
  Clone ID: MRT4577_116867C.1
tttggggaantgtttgtttgtttgatcttttattataaaagacgacgaagagagaagaagaaaacgccagcaccatttgtaatctcgatccccgccgcacaagcttgatcggacggtcggacaccagacagtctgtcagagacaccaacgcccgggtccgctgccacggtgccaccgctgtttcccacgccggtcggcggtcgccgctccagttgaatttgaaggagcctgacggatcgatggcggctgcggcggaggtgtaccggcgtttgctgaaggcggtgcagaagcacgtcggtaggggcgccaccaagcagcgcttcctcgacttcggggcggccgagttccgcgcccccgccggcacggaggccggcgctagggcgaggctgcggctcgccggggactacgcctacctcctcaccagcgtccaccaccacaaggatctgctgctctcgtacaatatagctgtggatcgatctgatgaaacgaagaagatactgaacaaatctgccgccagtgtaggcctccagcttcctgatgtctacaagccatgagtgcttcatttctgcatctatgtgtggtccatgagaccatgatactgccatttagctatgcaacttcaccatttaccttgtttccaatgctactgttctctcaactctcaataacgagagatgacatttgtttattaatgatgtcattcatcgatgtatgaattccttctacaaaaatcaattgccagtgtgctatagtctgcacaaaatctaaataaaaaaaaaaaaaaaagcccct

SEQ ID NO: 18495 - DNA, 360 bp, Zea mays
  Clone ID: MRT4577_116868C.1
gtcttacctagtacaagacccagggggagatgggctgttttaaagggtatatttctgttttctatagcgtcactgaagtgtaagattgaaaaagtggtgatatgagttacagattgcaaaaacgaagacaacggcaggtccgatggcctgtacactactgctgatgaatcgatctagcccaataccgatgagatatcacatccatgtgagaacgttgtgaacgacataatagaatgatgtattgatgtaactctggcgttggacagtaaagtgttgatgaatctgggacattgttcatttaatacaaacagaggatgatgaaaattcagatgcttccgtccatacacctggactagctgt

SEQ ID NO: 18496 - DNA, 2197 bp, Zea mays
  unsure (1)..(2197): unsure at all n locations
  Clone ID: MRT4577_116869C.1
aggtgccctcctcgaggccggccggagtggcacgatgacacgaaaataaacacgctctttggttgatgcttgcttgttcgtcctctaaaccacaccgcccggtgaaggcactaggcgcccaattctctcccgctctcccctctgctgcaagtctgcaaccgcagcagcacgtccatttcacgtgccctttcctccctccctttcccctgcccccacgccacctccgttcgccgccgcccgccgcgccggcgatggcgatgaccgaagggcttgtgcctattacgcggacctacctcgcgcgctactacgacaagtacccgctgcccccgctgcccgacgccactacggacctcgccgcccggctccgtgctctctccgccgacctcgctgccgttgctcccatcgccccagatgaggagctcttggaacaagaagcagctggcatacctgcccacaaaattgatgagaatttgtggaagaaccgagaacaaatggaagaaattcttttcttgattaacacatcccatcgtcctgtggctcttcaacagaagtccaccccagaagatgctgagatagtttgtacacttgatgatatagaagctaaattgaaggatatgttgaagaacttagaacaatttcagttgaaaaatgctgacaatgttttcaatacagttatgacatacatgccccaagattttcggggtactctaatcaggcaacagcgagaacgctcagagagaaataagcaagcagaggtagatgctctggttagtgctggtggaagcattcatgatcgatatgcattgttatggaaacagcaaatggaaaggagggtgcaattagcacagcttggttctgcaacaggtgtatataagactcttgttaggtatttggtcggtgttccacaggttttattggattttattcgacaaataaatgacgataatgggcctatggaagaacaaagagaacgttatggtccagccctttacacccttacaaaactggtgcttgcaattcggttgtatttgcatgtctctttggcacgatatggacaaaggaaaatagagaaggatgacgctgctgtgttgcagcaagctgtggttatctacaccaaggagtttttgaagttcactgaattcattggtgaggtctttgtgaatgcaccattctttatatctgctgaggatgcaggtgccgtggatgcaaggaaaagtgatgagtacaaagaaactattattccagctggaaagacacatgaggtcattttgagtgttgaagctgtaaactcatacatcgcatgggacttttccttgcaacaaggggccctcaacatggtattggacattggctttcatgtggagtacattagcccttcaggggagaaaactttaattcttccataccgacgatatgaagctgaccaaggtaatttttgcactgtttcatcgggatcatacaaacttgtgtgggacaattcatattcttcattcttcaaaaaggtccttcggtacaaggtggatgctgtgccaccggttgttgagccggccttgtcagccacggaactctgaagaggtctgtcttaatataatgatgtaacgagggccgatgcatgcccgagtatagctgtacaaatgtttctgaaggccccacacggtgctgttactgattattccatcgaatgctttgcggtgttctgatcgcagcattccctgatagctcgctgtcagagcgcatggatatgtactttgtgtgcacatggctgcggccacttgtcaccgacgaatgcctgaatataacagaaatgtattatatcgaccaataagagcatgtctgataggaagctgtcgtggtttgttttatttttttctcgaacacggagagctgtgtgtcattgcaccaagaagaggaacgtgctccctggaaagagcatcccctttggctaacaaaaaaaaaaaaaaaaaaaaaaaaaaaaaaaaaaaaaaaaaaaaaaaaaaaaaaaaaaaaaaaaaaaaaaaaaaaaaaaaaaaaaaaaaaaaaaaaaaaaaaaaaaaaaaaaaaaaaaaaaaaaaaaaaaaaaaaaaaanaaaaaaaaaactcttccccccaaaattgcggtttttttttgcgccccttttttgggcccttcccccttgagagaaaatacccccccccaccccggggaagaagaagcccc

SEQ ID NO: 18497 - DNA, 531 bp, Zea mays
  Clone ID: MRT4577_11686C.1
aacttggtagggggcctacatcaatctgctccccttcctctacaccttcatcaccatccgcagtaatcacaaccctcatgttccttctcagataagtgtgcatctcctttgaaaccacttctggtactctagcacacttcatggtgtcaccaaacccactggctagatgctgcttaaatctcttgattccagatggcacaatcttcttacagaagacacactgaacaaaatccttctttgttgtgtctggccaccacccaaactgccatcctgggtcctgtgaccttgcctttctcttggggtcatttgcttgtgcactaagctaggagggagtgctgcaattgccttttcagcaagggttttacaatctgcagcagctgataaagcagacgcaggaccagtgctacctacatttgaggccacttgaggaacagaagcactttgactttcactgccgaccatatttgactcagggaataagacctcaacgttattagcacgtccacagccaccattaaaatctgaacagac

SEQ ID NO: 18498 - DNA, 655 bp, Zea mays
  Clone ID: MRT4577_116870C.1
ggtacccggccccccccctcgagttccccccccccccccccccccccccccccccccccccccccccccccccccccccccccccccccccccccccccccccccctttttaaaacaaaccgggggggaaaaacccaaccccccgggttttcaaagggaaatccttgatttaaacggggcccaggggccccaaaaagccctttttttcttgggacttggggggttttttagggaaaaacatttgggggcccgcccctttccccatttgggccattttttaccctttttttaaccccagggaatttttttgggcccagaagcggggggggaactaaaatttgcccctgggggttttgaccttgggaccattttcggggccaaaaggatctttgggttttggcccccggccccgggcccaatttgccgggaaaccttttgaaatattaaaagggggcccccccttttctttaaaaatgaaaaggaaaatcccccctttttttttaattttcgggggaaaaaccttggggggaaaaaacccttttgggggtttaaaagggaatcccgggggaaaggaaatttttccccaaaaatcccccccctgaaatgggttttcccaaagcccccatgagggccctttcccaaggaaaaatttccc

SEQ ID NO: 18499 - DNA, 244 bp, Zea mays
  unsure (1)..(244): unsure at all n locations
  Clone ID: MRT4577_116871C.1
ataacccnnctcagggttttcttttttttttttttttttcaaaatcggaaaaatgggccgcctgtgcttaattttgcgaaaaaattaaccaagggaccgcggcccccgggggggtgctcaattgacggaagccccatttccctgcttttttccaccccctgcactcggggccgtcatggtccccaaataagacccggggggcccggaccaactggtggggactcaccctttgggggggggcccc

SEQ ID NO: 18500 - DNA, 370 bp, Zea mays
  Clone ID: MRT4577_116872C.1
aacaaaaaaaaggaataacttattacatcacaggagccatagacatccacaggggcgtgggcttaacggggaaataaaagtcctggcgaaacccaaaaaaaataaggcccccaaaggcaggtgacgggggggggcccccaacccacacctaaaattggtcgaaattttggaacccctgaaagttttcttccacgggtcccccttttcctgagcaggggttacaagggggacaaccttcacaaaaaaaaaccccagggttttaaaccccctaaaacccaaaaagcttgaacacttggttgccaacccttgatcgtgaattccctgaaacccggaaacaaatcgcgaacccaaaacccaccaggaaacggcc

SEQ ID NO: 18501 - DNA, 515 bp, Zea mays
  Clone ID: MRT4577_116873C.1
actaatcgaagcacacagcaagacatgaatatatcgtataagacaccggaaacattcgaacaggacaggggcgcgatgattttctggacagaatacacagggataccttgcgacgtccaaccagcccatattggaaatggatgctgaacgcaacagtatgctcaataatcttcacacatcacgctaattgtactcagcctagggcacggtgaccgcgagcactccgggctcggaggccagcacgcgacctcgatccacctctgatagttgattcggcaggacgagaagcgccgtgatcaactggcacagtggtgctgctggacgcaagaggcacttgcgctcacttgtcctcacttcacctgatgcgctggccgatagtgacacagcctgtggcgcgtcttgagcgagatcttgacctttatcttcttgacgctcactgaggcgctttccagaacacgaaacgcctcgggcgagttgtttcaatgaatgcgggcactggcgaagggaggagtctc

SEQ ID NO: 18502 - DNA, 340 bp, Zea mays
  Clone ID: MRT4577_116874C.1
atcacaacaattgaacaatctcacacgttgggacttttccctaaacgggccggcaatcaccttccccaacacaaggtgcgacttccaaacacccgtgctttttaatgaccatcaagttaacccttaaatccaacaggcttaaaaatgcacacacaaaaaaacaatttactcaatccaaaataggattcatcgaatgcctgaatcgattgaattcaggctaaaattataacaaattctttttttctcaggtcaactcatatcaaatagcaaaccgattgtgcggcgccccctcccattcaaccttttaaaatttatcatcaacttgttcaattttcggggt

SEQ ID NO: 18503 - DNA, 401 bp, Zea mays
  Clone ID: MRT4577_116875C.1
cccacgcgtccgcttccacttgcacaccacgccccgacaaagcgagcgagagcagccacggcaaaaccctcgcgggcgtctctctcgagatcggcgggcagcagcgacgcgcgcgcacaacacagcaggtgaaggcaagtgagtcagtggttggggtcctcgtcctggctatgagaggtttaagtcggtatctgccgttctgcggcggcgggtgctgctgcggtgacggcgccggcagggcagggggcgtggcggatgggctggtgtgggacgtggccctcaaggcgcacgcgtccggtgactactccatcgccgtggcgcaggcgaacgaggcgctcgaggaccaggcgcaagtggtcgcggctccggccgccacgctcgtcggcgtcttcgacgggcac

SEQ ID NO: 18504 - DNA, 420 bp, Zea mays
  unsure (1)..(420): unsure at all n locations
  Clone ID: MRT4577_116876C.1
gtggttggggttttttttttttgctcattcttctctcgtctcgtttcatagcgggagcaaccaaagcgaacaaaagggggtgcccaaccaccttaattccaaagggtggnaacgggacacttaacacgtgtgaccagaagccgaacgggtaacacgtatgctggtnggtnggggagataactcggccgaagccaggatggggccacacataagtccctccagccgccgccgccgccgccgtagccggcaccaccaccctcgcgccgaccgccgtagccgccaccggcttcgtagccggcgtcaccaccctcgcgccgaccgccgtagtcggcaccggcggtctaaccggcgttacggggcccgtcaccataggcggcgccgctgtgaccgtcttcgttgccaccttcgcctgcgtcgccg

SEQ ID NO: 18505 - DNA, 668 bp, Zea mays
  Clone ID: MRT4577_116877C.1
ttttaattcctttttttttttttttttttttttttttttttttttttttttttttttccttttttttttttttttttttttttttaaaggaaaatttggaaaaaaccattttgggggttgtttggcctttacttggcaaaaaaaaaaaccaaaaaggggtggaaagaccttcctaccatggtttttaaccccgcccgacttaagggggcccaaggggggcccccctttttttttttaaaaagggaccctttttttttcccccaattaggccccctttttttaaaatttttaaagggggggtcgggttcccaaacctttcgttttgggggttttggaccccattcccaaagttttggggggggaccccccctttttttttggcccccccccccccggcccttggggaccaccattccttaaaaaaggggctttgggggccccggtcttgaaaccaggggggcatcccccccccccttaatttccaagggccccccggggaaaaaaaaccccatttttccgttaagttggcccttaaaaaccggttgacacacccccggccaaggccccgttcccaagggaaagtttttttccagcccccgttcccaaactttttttttgggggggggggggaaaaaaacccggccaaaatttttttttgggggggccgg

SEQ ID NO: 18506 - DNA, 282 bp, Zea mays
  Clone ID: MRT4577_116878C.1
acgcccacgcgtgcgcagaaacacaccaagcgatgcagattagcgacagcctaacatcaatggctaccaggatgttctgcaggcttgtgcgtctcgcgcgttttgctagcgcaactaatgcgtctattaatacacattgctaacgtgctacaaggtccattattacacagttcctaccaacagatagttgaatgggcaggaaaaacctagctatgctatcatataggctacaatgctcattttcgcagagcatggttcgaccacctatttaccagtggcaac

SEQ ID NO: 18507 - DNA, 242 bp, Zea mays
  Clone ID: MRT4577_116879C.1
attagaacaaagaagaaacattcagtagaacattttattgcctagttgacaacattgcttgaatgctggtggttcctatccctttgacactacacaattttctaatatgtgttaatgctatgtgacaaaacgccctgattcctagtgccaaaggttcaacttaatgtatatacctgaaaacccatgcatttgtgctcttttttttttttatggtgcttgaagtaaaacagcccatcctctga

SEQ ID NO: 18508 - DNA, 459 bp, Zea mays
  Clone ID: MRT4577_11687C.1
tgaccattatccccacctgacgctcgctggatagggtacggaacaatgcgacacgggccaggcggagctagaccaggaaccccaacagcacaaccctccgtcatcttcggcaagcgcccgaacgagctgttaaaaaaggcgcacgatctaccccttctctctgactgcgaagaagctctcatccttttgtcaaacactcctgaccctataccgaccattatagcgcacttaccatcctaataacacttcttacgtacgaaaaaaacattaatcaagctcatgaactgctacacataacacatactattaactactgcagaacatcctgaatgatttcccttaattaaaagcaacatttgataaactacaatagactcatgagaatatgttttgtgaagataaagatctactagctttcaaataactcatcagattaacaagcaaacaaattcatcctta

SEQ ID NO: 18509 - DNA, 269 bp, Zea mays
  unsure (1)..(269): unsure at all n locations
  Clone ID: MRT4577_116880C.1
acctttaactgatcnatggccttccattctctcctctccgtccttcatcttctgttccaccccctacatacttccgtctctataccgtccaccactaatgctcccttacttcacataaccatctccatccctccatccaatcaaagttcctacattcaactttttttctccttcaaactatccctctattacctcaactgcacactgcccttctactattacttctacccacattacctttcatacccatattactcctattacttcat

SEQ ID NO: 18510 - DNA, 181 bp, Zea mays
  Clone ID: MRT4577_116881C.1
aaaccataaagggcgggtgttactaaggggagaactaccaaatcgcataaaccaaatcatacaggtcctaaaacataaacaatacacgcactatctactattttaacaacgaacgcaaatgacgaacttacatgctatggcattccagtctcacatgcggatccatacaagtttatgaaga

SEQ ID NO: 18511 - DNA, 332 bp, Zea mays
  Clone ID: MRT4577_116882C.1
acccaagcgtcaatcctattatgatgtcatctctgatgtgtatagtggtaattctgacgtattatgatctcgctgactgaaacttctacaggccagttgatagcaggttggattccttcacgggacctcgtaatcattcgtgctagtgagtaactcatgtaatatgctctcaaaccaagtgtatcctgcaggaattttcgagacacacatatctgcgaatgtgatctcaatccagtggcatataaatttctatcatggaacgagtactcgttgcatcattatgagcacatattgaatccggattatccctgcctctgacgagaatggatttt

SEQ ID NO: 18512 - DNA, 556 bp, Zea mays
  Clone ID: MRT4577_116883C.1
aaaaaaaggggctcccggtttaaaaaaccgcctttgaaggggttacccgggccccaaaaagtttaaaaaccccttcccccggttttttgggttcaaacccccagggccccaaagggaaaaggtcggggggggggttttccccaaaaaaaaaaccccaccacggggtcaaccccggccggaaggcccccccaaaaaaaaccccccccccgggttccctttggggggccctttaacccgaaagggggggaaaggcaaaccccacctacccccccaaaaaaaaaattttcccgccggtaaaaattaccaacttggaaattttttgggggcttaaaccccggcggggaagggaaccctttttttatttttgggccccccccccaggggggggggggggggacccgtaaaaaccggggggaatttcttcccgggggggggaaaaaaaagcaggacggcccccccccccccgggaaagaaccccctttgcccccccaggggggcttacccccccgcctttaaaaggggggggggcccccccgggcaaaagggggggcccccc

SEQ ID NO: 18513 - DNA, 724 bp, Zea mays
  Clone ID: MRT4577_116884C.1
ttgggtacctcgaggccggccggggttcatcacccgtcttcccccaatggctccgccttcctccgccaggcgcctcccatggtcagggacgaccgacgacactggcggcagcgagctgtccctgccccgcaggcgctggcagtcagttgggctgcaggttaggagaacgaggaggaagccgacggaggggctgtttggattcagacggatcatggaggcggagttcatgggcatgttcctcccggtctttgggtcgatgcttcggagagtggtctcagaggaggtagagaaagcaatgttcagacaattcagtgcaccaccagcacctccaaggttactggtggacaggaatcagcaccctcggtatcagctgatgttcttgaatggactgagacccgtttacacaatgacaaagctagaaccagatgacggaaaggcgctgaaggtggctgtagtcgaaaggctcgaaaacggtcggacggacatcgtcagatacggccctctttcttctgctagggttgaagtcgtagctctccatggcaacttcaacgctaaagacgaggaatcctggagccctgaggagtttcagaagcacatcgtgtccggtcgagagaagagcgcccagctcctcactgggaacctggcactcaagctcagtggaggcgaggctgtccttgagaatgcaaccttcaccgataactccagcttcacccgcaccaagatg

SEQ ID NO: 18514 - DNA, 272 bp, Zea mays
  Clone ID: MRT4577_116885C.1
gaacaagctctttttctttgttttttttttttattttcttttattatttttttttttatttttttattttatattatcatctctcgaaaggccaatattggagagttccataaatatgtattacacttatcacatgcattgggggggggggattagacctattttgacttatattaaaatttattggaggggggtgtaccaccctatgaaaggtaaaaccttggagaaccccgacttaagccaattgaagcacattccaattaccccagctc

SEQ ID NO: 18515 - DNA, 804 bp, Zea mays
  Clone ID: MRT4577_116886C.1
atggggctcggtgtatacggctcgctctgccaaggtggtgacgaggatgatgattttgattatgactatggtaatgttcactacagccaaacgggacatattgctgagtatgttgatgtgtactcacccttgctttacacaccaaacctccccaagttgtccgcgttgcaaccacaggagatagagtctgtgaggagctgctcccctgtgctcccactggaggcgccccctgcaccaccactgagcgcacccgccgctggagtaggtgctggaggagacccagacgacagaggtggtgacagtagctcgagccacagcaccgacctttcagaggagcaggagctggaaggatgggttgctcgacccatcactcgcgacgctgctcgcgggtctcacttccacgacgcgctcgacaccctgctgcgccaggcacttgaccggcgcacttggtctatcgagtatcgctgtgttgtctttcagcacaatcgcggggtttacccggaccgctgggaggcgacctgcttggtgcgccatccggagaacagtctccggggtgcggagatctgctcagagcactattccatctctgagcgggactcagctaaggcgaccatgcaagatgttgcacggcgtccgctttcgagctactgctcagtgctcagcggggtagccgacggtctcaacctgaagtattacccccgccgcccatctggcagcacaggaggcgtggttgtctcacctgttggtgaggacaatcctaggttgagcagcacagtcaacctagccgccgtgctaaacacgtag

SEQ ID NO: 18516 - DNA, 488 bp, Zea mays
  Clone ID: MRT4577_116887C.1
aaagggaattgggggtcctctttacgggaagggcaaggtgggccccccctaaaaatttgggtttttaagggagggggattggcggccaaaaaacccctcccaaagggtttttttaaagagcccccaggcccccaaagggggcccccttaaaaaacctcttttaaaaaaaccccttttttttccccaaaaaagggggccccccccggggagggcccccccaaaaaagggtggggttgttaaaaaaaccgggggttagttttttaccaatttttttaaaaagtgcccccggggggggggggccttttctcccaaaatttttttttttttgggccccctttggaaataattttttggggggggggggggattccccctctccggaaggatggggtgttttagggcccccttgttttttaaaaaaaatttagcccctccccccccccatggggaaaccctttttttggggtaaaaaagggcccttttaaaaa

SEQ ID NO: 18517 - DNA, 544 bp, Zea mays
  Clone ID: MRT4577_116888C.1
ggtgtgtatttttcctttctccttttcttttaaaacaaaaccaaggtatgcaaaaagtaaggcaaccccaccaacaccgatgtcaggttgccacggcgggagggggaaaaaattgtaaaggccccccggcttcaaaggaaggaaggggttggcttttgtgcaagaaagttacctgggagctccaaaaacttttgaaggagctttccccagggcccgccccaatgaacagggcgcatagcggtgtgtccaacgcattcctgtgcaacgggacgggagctcccctggagctcccgcgcgagagcccagaaatagcaccacttgcttcctaaggcccaaatccacatgcgggaagaccccgggaaaagccaggccggggccctccccccaatcaaggaaactcccgactaaaagttgggcgcattaaaagacttggcccatttggaaaccctaaacacccaccgggagaaagggtcccccccctgtccaagcacgacccccgcccattgaaagcctaggcgggggaataccccacgaggaaaggccc

SEQ ID NO: 18518 - DNA, 821 bp, Zea mays
  unsure (1)..(821): unsure at all n locations
  Clone ID: MRT4577_116889C.1
aaacccctgacctgtgcgcctgtccatcccagcatggccgccgcctcgtcctcctcctgcggcggcgccggctgcggggcccgctgctcctcctccacctcgtcatccgtagaggatgctccggaggggattctgggccgtctctccatatccggtgccgccgcctcctgcggcaagtgcggcggcggcgccgtcgtcgtggttgccggaggcgtcggtctgtgcggagagtgcttgcgcgcccagctgttcgggaagttcaagctcgccgtcacaagcaacgccatggttcggccaaccgactccgtcctcgtcgccttctccggcggccccgcctctagggtggctctgcaattcatacatgagatgcggtccaaggcaatcgaaagctgggacgccagcaattcgcaagccctacccgtcttcaatgtcggggcggcgttcgttgacgagagtgttttgttgtcgaagcccgaatgcgaagttgagcaggcaactgaagatattaagtcacttgtgtcgagtttgttgccgggagataacgcaatgcacattgcctctcttgatgacgtgttctcgtcggaatcaaaagacggtaaaggcaggctgagggagctagttggaatgattactgatgatactgggagggaggatctttcttcagtgcttgcgcatgctttcgttgcagaagattgcactggaaaatgggtacacaaagatcatgctgngatcatgtgcttctacaatagcatgtcatgtgctatctgcaacagtaaagggccaaggttattccttaccagctgatatccatatgttgatac

SEQ ID NO: 18519 - DNA, 151 bp, Zea mays
  Clone ID: MRT4577_11688C.1
ttagaaaccaacagacctgatagcaagatctgtcagtaccaagaaactatcaagataggagatctgctactaaacagagttcagaaactttccagagtaattaatatgtaaagccatgtaactaactaaggatttgctttagagataatta

SEQ ID NO: 18520 - DNA, 412 bp, Zea mays
  Clone ID: MRT4577_116890C.1
ttagcttttgtcgtcgtggagcctccaccagtgccgtgtagcattcaagaacaatggaaccaaaatacaggacattttcctacttcacgtctggatgccatccaattaatatcttctctgcgatattgcaatggaagggactggtcttatgtgttattggtgctattcttgtacagccaatgaaataggtcctactacacaaggtcaaaggatgggagaatgtttaatgcttcttcagatactatttcttggtctgtcaaatctgcttgacccaaatgcaagttttgctcaaatgtgggaaaaaatgattgtctcaccaattgttagcacgtttgcttccagcaaagttgtccagagaaggaaaagatgaaatggaactcaaattttagtggtcgcacaagtgtggagacag

SEQ ID NO: 18521 - DNA, 356 bp, Zea mays
  unsure (1)..(356): unsure at all n locations
  Clone ID: MRT4577_116891C.1
cgccgcncncncnnnccccgagcccncgaaacccnaggggcgngccgaccggcggcggcggcgaggnganggcgaaggacccggacgcggnggcgaaagccnncgnggagcacnacnaccggacgnncgacaccaaccgcgcggcgccggnggggccggaacaggagaccnncaagcncaccnncgagggccagaagnnccagggcccaaccgccanggccggcaagcncggaacgcnacccaaccaggccggcgagcaccagaacgncaccgncgacagccagccgncggggccccagggaggcaagcncgncnncgncnccggagccaaccgcaccggccccgaggagcacccc

SEQ ID NO: 18522 - DNA, 511 bp, Zea mays
  Clone ID: MRT4577_116892C.1
tctccaacgatcctatctggaatatgaccgtactgagcttctaccagcgtacagaaggatccgacatgagtcctttcggatggtcgatcacgacttaaagcctctggacatgaccaaagactgaggacgcgacatctagcaagaggactgtgaatcaatacgagaagaagatgatctacttgcatgaacaagaactcttcctctgcgtatcttcttcgatgtctacccgcagaacaattgctctcacctggtgaccaccatgtgactggtccactacaccaccggccactgactgagccaggtgtatcagcagaaaaagtgaatgtcatccgtctacagatagccaatatcgcacagcttgcgcaacatgcagtgaagcgccttcctctacctgaaggccggttcgctgttgcattgcaaccagaaacgactgggaggtccgcgattctagacgtcaaacgcccgtactctggactgcatggtctgctgaaacatccccagctaatcatac

SEQ ID NO: 18523 - DNA, 508 bp, Zea mays
  Clone ID: MRT4577_116893C.1
atttctaaaaaaaaaaaaaaaaaaaaaaaaaaaaaaaaaaaaaaaaaaaaaaaaaaaaaaaaaaaaaaaaaaaaaatttaaacataacccgaacaacacattaaaaagggcaaatttttaaaaatttccttccccttggcgccccaatcaagcatgcttttttggcccccccttggccctcttttgagggggttttttttgaattttcccttccttttgcggcggcgttgattgtaaattcctgggggccccccccctcttttgcctggcggaattaccctttttggccccctgttttaaaaccttgggggcgggaacccttggcctttccaacttttttcccttctaaatgtcccctttttccccttggggcgaccctttaagcgccccgcctgggccccctccccccagggtgcccgttccttttgccagttcctctccccccgttccttgccttttttccctttcttttttggcctttccccccggttttccccttcaattttta

SEQ ID NO: 18524 - DNA, 1904 bp, Zea mays
  Clone ID: MRT4577_116894C.1
cggccgggccgggaagataaacagaagagtagagaaaaaacgccaggaaaacccggagccctcctcgtctcccccgttcggcggcgcgacggtagagagattccgtcgaacacatggccgctctcgcctcagccgcccgctcgaggcgccggctccttccctatctgtaccgcctcctccactccgcgtccacaaccgctgtctccccgtcgccctccaccagccgcttcctccgccacgcctcgccggtgccccgcacccctgaccactccccttaccttcggttccccgccgcgcgcgtctctacgctcccctcaggcctccgcgtcgtcacgcaggcctacccggtcgccacacggattgcctccgtcggcgtctgggtcgatgcggggagccgcttcgagctccctggaaccaacggaaccgcacacttcctggagcacatggccttcaagggcacacggcgccggcccaacgcgcaggtgctcgaggtggagatcgaggacatgggcgcgcgcctcaacgcgtatacctcccgcgagcagaccaccttttttgccgacgtgcaggcgcgccacgttccggcggcactcgacgtcctcagcgacatcctacagcacccgcgattccccgaaagggctatccagcgggagcgcggcgtcatcctccgtgagatggaggaggtgcaaggtatgatggaagaggtgatatttgatcacttgcatgcagcagcattccaaggccatccactaggggacacaatattaggtcctgaagaaaatattaggtccatttctaagaaagatttggagcaatatatctcaactcactatacctgtcctcgaatggttgtatctgctgctggaagtgtcagtcacgatgaggttgttgatcaagtgaaagaattattcacagaattctccactgatccaactactgctgatcagcttgttcaggcgaacccagctatttttactggatctgaggttcgtgtagaaaatgcagagtttcctctagcacacatcgcaatagctttcaaaggttcatcatggactgaccctagctccattccccttatggtgatccaaagcatattgggatcctggaacaggagcattggggttgggaactgctcagggtcttctttagctcgtggtatcagcaatgctaatttagctgagagcctgatggcgttcaatactaactatcgggacacaggaatatttggcatttatactattgctccgcctgacaccctgcaagacttgtcacggttaataatggcggagtttagaagacttgcatcccaggtgtcagaaacagaggttgcccgtgcccgcaatcagctgaaatcttctctgttacttcacattgatggatccactgcagttactgagaataatggtcgccagatgctaacttatgggcgagtcatgccgttcctagagctttttgcacgcattgatgctgttgactgtgctacagtaatggaaactgccaaggagtacataattgataaggatattgctctggctgcagtgggacagctcacggaattaccagaacttagttggtttcgctccgaaacatgttctgacgatgattttactcgaagaatattatttgggaatgcaaagtagttgaagctgtggctctgttttggtattgttgtaactctaggtcaatcattctaagaaactatcaattgatagatagcatcagctatttcagttatttgttagttttgcgcttgtactgtgtacttatttgacgcaaaatgtgcaaataatttactttgctgtggtgctctacttatgaattcatttcatctatgagttctaagaatatatattttttgctattaagcatattgaaaaaaaaaaaaaacaagggaaactagggcc

SEQ ID NO: 18525 - DNA, 258 bp, Zea mays
  Clone ID: MRT4577_116895C.1
tttgttgggtagaaacaaacacacggggcgctttaatttataaacagagccgcgaaaaaaaaaaccaacaacattatcactgacatggaccattcacaagagtagcaacattatacagcggcacgagcgcccttcttaggaagccaagaatccacgactgaaacaacaaactcctcattattccactcactgctggacaaccataagcaatgactcctctttctccctacatcatttaccatgctccacctgctaatt

SEQ ID NO: 18526 - DNA, 108 bp, Zea mays
  Clone ID: MRT4577_116896C.1
agttaaacaactcatcttataaacgaggggtgtgtacacaatatgcttactcatggagtcacaaaataccaaaactttacctattttccactacaaattctgcaatat

SEQ ID NO: 18527 - DNA, 275 bp, Zea mays
  Clone ID: MRT4577_116897C.1
aagggaaactgacaaaaatgtgattgctcacggaccacaattacactctattatttacaagtttttgcagaattgttaaactcttaaaaaccgggaatttattgtgatacctgccacatgcaaaaccgcgctacaatgaaacactctaacaggggaattgttcctgggaacagcttttgattgacaaaaacatcgggggcacaccctaacagaaagtgacacatcctatttttcagggacgcatcctctaaacactggagccacaaactttatgt

SEQ ID NO: 18528 - DNA, 279 bp, Zea mays
  Clone ID: MRT4577_116898C.1
ctaaaaagggatccaaaggttatccttcaagggcaaaaatagtgactgcttctttttgaggaaccttataccaaatctaaataccaccctgtagcttgtttaactggttaggaacattcaaacccatttaaaaaagataaaatcttgggatgaccaaaggacataaccgctcctctcaaacaacttatggaaaaagtgcacgcctaaagggcttaatcgagttttaccgtgcaaaaatcaaacatagtgtgtggagtcttgataaaagacccatggcaa

SEQ ID NO: 18529 - DNA, 163 bp, Zea mays
  Clone ID: MRT4577_116899C.1
ggggccaacagattcttccttggttttgaatttttggcggttggtaggtcattttttttcctaaacctggaaaattaaaaggaccgggggggttccttacatttttaacaaccgccggtttggcccttggtttcaaaagcgcccttaattcacaaaaattctt

SEQ ID NO: 18530 - DNA, 405 bp, Zea mays
  Clone ID: MRT4577_11689C.1
aagaaaaaaataaaaaaaaaaaaaaaattaaaaaaataaaaaaaaaaaaaaaaacaaagagaaaaaggaaattaatcaaacctaccccttcttacacattaaatcaacacaaaaaaatgccaccattattcaataaacctcacttgcttctacatctttttttttaaaaaaactccaaccaatcccaacaaaattcttttatctcccatctttttaatcccagctgccataataaactattgccgccaactttacctttttttcaatttttccactttttcaactattcacgcaacaccactattccaaccattaaactcatcatttcgatatttcttcatctttatcgctctttttttttttactattcccatactttcacttttttctttctttctcccactt

SEQ ID NO: 18531 - DNA, 360 bp, Zea mays
  Clone ID: MRT4577_1168C.1
cctttcccgtagtgcggagccgccactccccaccccgcggaccatttcgcaaacctagatccaagccctcgtcgccggccatggccacccgccgggccatctcgtcggtcctccgcaccgcctcccgcatccgcgccgcctccccttccccgtgcccccgcgcgccgctccaccgcccgtccccggccggcttcctgctcaaccgcgccgccgcctcctactcgtcatccgccgcggcgcaggccgctccggtcacgccgccccccacctccgacaagcacacaggcactaagattaccgatgacttcaccggcgccggtgcggtgggtgaggtgtgccaggtcattggtgccgtggtgg

SEQ ID NO: 18532 - DNA, 943 bp, Zea mays
  Clone ID: MRT4577_116900C.1
ccggccggacctcacctcaccaaacgacgcgcacccacggaacggtctttttgttaagacaattcctcagctcttactactaactcgcaggttgtttgagaggacggaagtcataccacagtcaagatgccttcagaagccggtcaccgactatacgtcaagggacgtcacctgagctaccagcgctctcgtcacaccacccgccctgctaccagcctgatcaagatcgagggtgttgacgacaccaacgccgccaacttctacctcggcaagaaggtcgctttcgtctaccgtgcccagaaggagatccgtggcaccaagatccgcgtcatctggggcaaggtcacccgtcctcacggaaactctggcgtcgtccgcgccaagttcacctctcctctccccaccaagtctttcggtgcttccgttcgcgtcatgttgtacccttcgtcgatataaaaaaagggcttcgggctggagttggtagtgaggggcggttctcatttggctgcattggtcgaggcaaggataaaacaaactgccttgctttgaggcattcaattcaaaaagacgtcaaatcccaaccccgaaaagggctcttcgcacctgagctactcgtttttgatgatataacttgatctccctttcatgcaacggttatcggaaatcgatcctgtccactgggaggggagcttcagcgatgaaacactttctggtggttgggattcgggaccggtgtttggaactacggtcgtgaatagggtacaagcgaatcatcgatgaaatgccaggtccagggcctctattacggcagtacacaacgtccctgaaagctggattgtgatttgactcgtatggagaaattttgagccatggttggcgtctaatgatgaatcagaaatgtctattgaaaccacacaaaaaaaaaaaaaaaaaacccgcggcc

SEQ ID NO: 18533 - DNA, 908 bp, Zea mays
  Clone ID: MRT4577_116901C.1
ggcgcccgctcctgcgaggccgaggccgaggcacgcgcggcagcgttcgaccacgacatttggagcgccccgggggccgagccggtggaggtgcttttctgttgccctggtcttatgtactgccgacggtggtgtcttggtacaagggccggaggatgtgtagtagccgccgccgctagtgtctttcgcgccaacccgtgcatgacggcgttggtccacctccattgatcgcgcacactttttctgtctcccggccagggcagacgtctttggttctattgctgcgccttcttcgcccgggccggagactgcgctggtcgtgccggacgcgcgcgccgtggactgctgggacctttacgccgggctgagcgcggcggcggcctggtggacgtggggcgtcgacgaggacaagctgctcggctggttccccttcgtggaggaggacttccggtgcgccaccggcgcccgctcctgcgaggccgaggccgaggcggctgcgttcgaccacgacatttggagcatctggtgaaccgagccggtggcggtgctttttctgttgcgctggtcttgctctctgcccacggtagtgtcttggtacaagagccggaggatgtgtagtaggcgaggtagctagtcgactagatgcgatgcgatgtcccaactccaggcgcgctctccattgatcgcgcacactgtctctgtctcccgggccgggcagacgtgcttggtttggttctatgcgtgaacaacggcggcaatttcaatccgagcacgttgccggtgtgttgatttgacattttaggcaggcattgtgtgctacgggattgcaattcgcagttcacccaagctgggcatgtgatcaacacgttggagatcgaaatgttcatgccgggtttttttggtggaat

SEQ ID NO: 18534 - DNA, 209 bp, Zea mays
  Clone ID: MRT4577_116902C.1
aggacgaggcaataacgaaccgaacaacacatcaaggtttctcagagatcgttcaagtgccaagtcgttagccaaccatagattaaacgaacccacaccaagccatgaatgtccacccctaccttacaaggcctagagacgtgataggatgctgcaagaagaagaatggtggggggcagaaactctttttcgatcaattgacggaagag

SEQ ID NO: 18535 - DNA, 456 bp, Zea mays
  Clone ID: MRT4577_116903C.1
gacttccggtgcgccggcgcccgctcctgcgaggccgaggccgaggcggctgcgttcgaccacgacatttggagcatctggtgaaccgagccggtgccggtgccggtgccggtgccggtgccggtgcgttcctgttgcgctggtcttgctctctgccgacggtagtgtcttggtacaacagccggaggatgtgtatgcgaggtagctagtcgactagatgcgatggtgtgccgtgtgtgcatgtcggcgttggtccaactccattgatcgcgcacactgtctctgtctcccgggccgggcagacgtgcttggttctatgcgtgagcaacggcggcaatttcaatccgagcacgttgccggtgtgttcatttgacattttaggcaggcattgtgtgctacgggattgcaattcgcagttcacccaagctgggcatgtgatcaacacgttggaggtgg

SEQ ID NO: 18536 - DNA, 638 bp, Zea mays
  Clone ID: MRT4577_116904C.1
aggccggccgggcctggagtgccacgctccccccattgctctggctctgtgctgtgcagctgtgctgccgggctcctgcgccatggccgcggccacgctgctccagggcccggccgccgcctcgccgcgtctcggcgccgcggcttcagcgccgtccgcgtcccacgggaggcgtcgcctcaccttcagcttcaggtgccagtcgaccagcgtcgacaagcaacaggagcggccgcccaagccgaagcagcggaacctgctcgacaacgccagcaacctgctgaccaacttcctcagcggtggcaacctcgggaccatgcccgtcgctgagggcgccgtcaccgacctcttcggcaagcccctcttcttctcgctttacgactggttcctcgagggagttctcgctgaaattttaaaacccataatggggaagggtcttatacctgctgaccttgatacctggaagcaaaggagaaaagttataacacctgggttccatgccttattcatagaagctatggtgaggacatttacaaaatgttcagagagaacaatatcaaagcttgaggagcttactgaaagtgagagtcgtgaacaaaattcgactattgtgggaccttgaagcttgaattctccca

SEQ ID NO: 18537 - DNA, 866 bp, Zea mays
  unsure (1)..(866): unsure at all n locations
  Clone ID: MRT4577_116905C.1
ctcgaggcncggccaggccgggaattcaattcaatcaatttcagcgcggccaccttatcatctctgtccgttcaggtccagtggccagtgaccacgctccaccccattgctctggctctgtgctgtgcagctgtgctgccgggctcctgcgccatggccgcggccacgctgctccagggcccggccgccgcctcgccgcgtctcggcgccgcggcttcagcgccgtccgcgtcccacgggaggcgtcgcctcaccttcagcttcaggtgccagtcgaccagcgtcgacaagcaacaggagcggccgcccaagccgaagcagcggaacctgctcgacaacgccagcaacctgctgaccaacttcctcagcggtggcaacctcgggaccatgcccgtcgctgagggcgccgtcaccgacctcttcggcaagcccctcttcttctcgctttacgactggttcctcgagcatggctctgtctacaagcttgcttttggacccaaatcattcgttgttgtctctgaccctatcgttgctagacacatcctccgggagaacgctttctgttatgataagggagttctcgctgaaattttaaaacccataatggggaagggtcttatacctgctgaccttgatacctggaagcaaaggagaaaagttataacacctgggttccatgccttattcatagaagctatggtgaggacatttacaaaatgttcagagagaacaatatcaaagcttgaggagcttactgaaagtgaaggtcgtgaacaaaattcgactattgtggaccttgaagctgagttctccaatttggcacttgatatcattgggattgggtgtgntcaattttgattttgact

SEQ ID NO: 18538 - DNA, 847 bp, Zea mays
  unsure (1)..(847): unsure at all n locations
  Clone ID: MRT4577_116906C.1
cccagcgtccgcggccgcgtgggcagnacagtcccctctcggcggtgcccttggccgccgtgctgctgctgggcctccccgacgacccgtccaaggcgtctcctacggcgccgtcctcttcatcatgggcgtcttcatgtcctggaacggtcccgccacaaactttcccatatttgcggagatcgtcccggagaagtcaagaacaagcatctacgccctcgacagatccttcgagtcagtgctgtcatcgttcgctcctccgatcgtcggcctgctggccgagcgagtgtacgggtacaggcccaacgacaagggggagagcgttgagcaggaccgggagaacgccgcgtccctggccaaggcgctctacacgtccatagcaataccgttcattgtctgcaccgccatatactcgttcctgtactgcagctaccctagggacagggagcgcgcgcgcatgcagtcgctgatcgagtcggagctccagcagatggagcatgagggctcctgtctggaactggaagacggcgatggtggtgtgctgcccaaggttctcggcccggcgaacgacggtgaaagggctaccattagcgttacctatgaccacaaggaggctcctgaagctgagaaggatactgtcagcctattggcaaaccgggactcatgataggaaatcgaatggtgtgttctaactctgagatttgacgggagtttcgtaaagtgaacccgggaatgcccatgttagacaaaggcttttaaattttgggcaaactgtaacaccaagagatatttgctggaacgagtttcttacagtagttagaaaaaaaaaaaaaaaaaaaccccccac

SEQ ID NO: 18539 - DNA, 290 bp, Zea mays
  Clone ID: MRT4577_116907C.1
ctgtacggaaaaaccgatttgtcatcctccccaatgacttcgaaaagggcttccgaaccaacgtgggggagcccgtgacagactttgatttctacaaatgagtcatcccaaagtgttgaacttgtttctttctgcaaatgagtcaacccagagtgtcgaactcgactattgtttatcaattcgattatgtcttaccatcaactgagtttatggatagatgccattacaaatattcaagtttctcaacgattatgcgtgttctgtaatgattcttacgccaagtaccaacc

SEQ ID NO: 18540 - DNA, 1563 bp, Zea mays
  Clone ID: MRT4577_116908C.1
atggcacggccggcagcgttcgtacccccaccgcctcagtatgtaccccctgaagagccttcagctttcgcgaggctctatgacgtggtggatcgcgccaaggccgccctggtgaccatcaccggtggaccgacgacggtgcatggtgtcgtcgtcatctcctccggccacgggcagagagcacgccgtgccgtgaccgagatcatcacgacggccccggcgtccgacccggcacccgcggcaccccagacgggctcgccctcgttcttgaattccgtggccgtcaaagtggccgctggggttgtcggtctggttttgggcttgtgcgtgctcgcgctctggatccggcgatggaggcggcggcggcggcggcaacaggcccagccgcttccgctaccaccgccaatgttatacaaccccaacccctactacaaaggtgaccagccgccgctgccattcgtcttcatgcagcagcaccaccaccacccgacggcgccgcagaccagcggcggcacgttctccgacgccggctccgagcgcccgcactccatctccatcgacggcggctcgctctcgtacgaccagctggccgccgcgacgggcgggttctcccccgacaacgtcatcgggcagggcggattcgggtgcgtgtacagggggaggctgcaggacggcaccgaggtggcgatcaagaagctcaagacggagagcaagcagggcgaccgcgagttccgcgccgaggcggacatcatcacacgcgtgcaccacaggaacctcgtctccctcgtcggatactgcatctccggcaacgacaggctgctggtttacgagttcgtccccaacaagacgctcgacacgcatttacacggggacaagtggccacctctggattggcagcaaagatggaaaattgctgtgggatctgcaaggggtttggcctatctacacgatgactgttctcctaaaattatacatcgtgatgtcaaggcatccaatattcttctggatcatggttttgagcccaaggttgcagattttggtctagcaaagtatcaaccaggaaaccacacccatgtttccacaagaataatgggcacatttgggtacattgctccagagttcctgtctagcgggaaacttactgacaaagccgatgtctttgcttttggtgtcgtcctcttggaactgataactggaaggctgccggttcagtcatctgagtcttacatggacagcacgttagttggttgggcaaaacccttgatttcagaagctatggaggaaggcaactttgatatccttgttgatccggatattggagatgattatgatgaaaacaaaatgatgcgaatgatggagtgtgccgccgctgccgtgcgccaatcagcacatctgcgtccatccatggttcagatcctgaagcacttgcaaggacaaacgcatggagaagatctaaactctatatttaggactacgtacgcagaagatacctacagttccatcatggaatcgggcttaccgcgttctgatcttttcacaaaacaaccgaataactaccgataa

SEQ ID NO: 18541 - DNA, 822 bp, Zea mays
  Clone ID: MRT4577_116909C.1
cattgggtacctcgaggccggcccccgcgccgcgatcatcagaccagacgccgacgccgccgctctccttcctctcccccgccgcgcaggcgctggtgctcgccatctcctcgcacccgctccccacgctcgcggccttcctggcctcccgccgcgacgagctcctccgcgcggacatcacgtccctgctcaaggcgctggagctctcggggcactgggagtgggcgctcgcgctcctccggtgggcaggcaaggagggtgccgccgacgcctcggcgctcgagatggtcgtccgcgcgctgggccgcgagggccagcacgacgccgtctgcgcgctgctcgacgaaacgccgctcccgccgggctcccgcctcgacgtccgcgcctacaccaccgtgctgcacgcgctctcccgcgcgggccggtacgagcgcgcgctcgagctcttcgccgagctccggcgccagggggtggcgcccacgctcgtcacctacaacgtcgtgctggacgtgtacgggcggatgggccgctcgtggccgcggatcgtcgccctcctcgatgagatgcgcgccgccggggtcgagcccgacgacttcaccgccagcacggtcatcgccgcgtgttgccgcgacgggctggttgaggaggcggtggcgttcttcgaggacctcaaggcccgcggccacgccccgtgcgtcgtcacgtacaacgcgttgctccaggtgttcggcaaggccgggaactacacggaggcgctgcgcgtgctcggggagatggagcagaacggctgccagccagatgctgtgacgtacaacgagctcg

SEQ ID NO: 18542 - DNA, 417 bp, Zea mays
  unsure (1)..(417): unsure at all n locations
  Clone ID: MRT4577_11690C.1
attctgtaattntagtctccatggtcaccggaataaatggcttttggtggtggtgatggttaatcttttcctttgcctgttaccctatggttgggggtttcctgtgaagttgtacgagtttccttgcctnaccctttcttcttaatatattgatacgcagctctcctgcgttttcgaaaaaatctagccggtaattacctattcgtcatcctaggagaagcttcacctaagttgatatttactgaacgatctctagtcattatgtatacatatgtgtgtgtgtgtgtgtgtattacattaactcttttccatgtatgcagcttcactgcttggaaaaaaatggcagacagacaacaaagaagatttcttactgtgctcaacatcggagccctaaccctgataatgntttgataattc

SEQ ID NO: 18543 - DNA, 595 bp, Zea mays
  Clone ID: MRT4577_116910C.1
ggaaaattgttcaagtaaaaagaagcgaactgacaaccaagggattaaatgtagctaatcagatagtcaggtctacgcttacagaaaaagacatatgaagcccttacacctagacttgtggtggaggcacaacgaatgactatctctgtttctggattttaacatatctgtacaaatatcagaaaacaatgaacattcagattgttgacacttaaaaaatattgtaagtggctttctctgtttcattaccattttctaacctgttcatattggagcaaaattttacatatgtaaaagagagagatcttcattttctggattcgaacatctgaaggtgttccccatccatctggatgcacattaatggaaagtatggctaatttctactgcattttaaataataataactgacggcatatgtgttggccttgtttaaccataccagatataccttgctctccatctatagtatttatctacttgatgttgtcgcctttgctctccaagtactatttgattctatgtaaaagacagttaatgacatctgttgtagctacataaggtctattatgtgcaacattaatatccattagcg

SEQ ID NO: 18544 - DNA, 1000 bp, Zea mays
  Clone ID: MRT4577_116911C.1
ccgcggcccctaggggcttttttttttttttttttttgcatggaccgaatcattgcacttgcacagatcactgagtacaaagaaacggagtttccaaattgaaaaaaggtcgaatgaacaaccgagcaacgcagaccatccacttcaacacaattccaaacgggtaaagggtgttgtaacaatgagagaaatagcgttacataaggcatatatcgttcgaaaatttaggagcatgatacgacgaggccagcaccgaagagtcgtcaaccctaagacgctgggatccacatgcacggtactcgttcatctcgacggtattccacccggcgatctggagctggtgttggagaagtcggaggtcgccatgggaatggagatggagagctgggtggccgagaagccgaggctgctgtcctcgcccagctccggccacgagtccctcgacttgggccactcgtcgaagaaagggcgcagcgtctggttctcctgcttggcggcggttacgaagtcgctgccgaagaaagagaggggctccctctgggtcttcggcagcgacgcgatggtgctctcgtctagcccactcagcgtgccgaacacagggtagcttgtggcttggaatgtgttggtttgggatggcagcaggcgccacgagttgtccatcatcgacggatccatgccgcccgacaagagcgtgctgtgctcgtccgacagagatttcaccccgtatgcagagtacctgagatatttgctccctccaccggcagcagtcgcgtaggcagcggcactgtccatgtgcagctgagaggtgggccccaggccgaacgtgccaccaccagcaccagcacctaacccgccgccgccgttgccgttgaggatcgacgggtacagcgagtggttctggaagccagcagcgggcgcgggggcctgctgctgctgcggcggctgggcgtgcggcgggggcgcgagctgcgcttccacaggctcccgtgcacggtcgagg

SEQ ID NO: 18545 - DNA, 110 bp, Zea mays
  Clone ID: MRT4577_116912C.1
cgatcccacaagatccgagagacctcacaagcccaagtccccatcgcggcgcctgccaccacttcttttgtctggactatattttctttctaaacccaccagatttgtca

SEQ ID NO: 18546 - DNA, 432 bp, Zea mays
  Clone ID: MRT4577_116913C.1
gttgggtctttgtctatgtagtgcaacccttatttttgttttctaataccatcacaacgcatgtggagtaaaccaagcttttatacgcttcatgcttgcaaaactttagttcttattctaatgaactgctggtttgtgatgaagttttgtttagggtttagggtttggcattgtgtataaaggttgtgtttaattgctcaccccttattttgttcaccttcactggatgatatacaatagtatgtgctttcccaagaccctttagttaagaaacatgaaatgctcctgaatctccttatccaagacatcttttggtaactaacaaattgcaggttgttggagcaattgcttatttgattaaaaagactcaggttgaccataactggctagatccgactggtgctccttgatctctggccatctttttaagca

SEQ ID NO: 18547 - DNA, 383 bp, Zea mays
  unsure (1)..(383): unsure at all n locations
  Clone ID: MRT4577_116914C.1
acagggtgtaaccatgttatctcaaaacatatgcacaaacaaaatctcagacagggtgtaaccatgttatctcaaaacatatgcacaaacaaaatctcagttccttctaaaataatatcataccaactactaactaaagtaacacttagatcttacaaatagtagtgtatatatatatatatntttatgtagcttggtggaactggtggtggtggtggaagtagtgggggcgttgttgttgtctttccaaccgtgcttgtcttattgcttgtcgcatctccagccggccccaacgtatttcttggcgttcttgtcttatctgattttgcattttgttaaccactcccgccatttgttgtattaccagcatttgggcagcaacc

SEQ ID NO: 18548 - DNA, 554 bp, Zea mays
  Clone ID: MRT4577_116915C.1
tctgactagtgcgtccatcttttatcgttcggaacgccaagccccccctccggcaaaatggcccccaagcgaggcggcagggcgcccgcgccggccaagcagaagacggataaagtgacaaaccctatattcgagaacaggccgaagcagctcggcatcagcggcccgctgtcgaccaagaaggacctagtcctgctcgtggagcggcccaaggcctggcgtatccagcggcagcactccatactcaagcacaccctaagggtaccaccggctctcaacccggttacccgcaacctcgacacgagcctggatactaacctgtttaagatgcttctcaagtaccgacctgaagacacgggtgccaataacgataggctactgaagagggcccaagctgacaatgaaggaagaactgttgactccaacagaccaattgaggtgaagtatcgtcttaaccatgtcacttacctcgtcgagcagaacaaggattagcttgttgccatgtctcacgacgtggatccgatcgaacttgttgcgtggctctcatccctgtg

SEQ ID NO: 18549 - DNA, 454 bp, Zea mays
  unsure (1)..(454): unsure at all n locations
  Clone ID: MRT4577_116916C.1
ccagcgcccaccacaccaggggcgggcaggcggggggccaccaccagaaagagacgagagagcagagacaccaggcaccagcacgagcgagaagcgcgcacggcggcgcagagagcagagcaccacgccacccggccgacgaaagccccggcgcggaacccgaaggacgagcaccgggtccgcgggggcaggatcgccaccaacagcagggccaacaagaagaacaagacagcggcggaccgggccagggcgccccccacagccacagncacagacacagcggagaaggccccggagccggccgggccggcggccaggcaaagcaggacgacgcgactcgggacgcgcgacacccacgccgccggccgagcgacgaagacggagccgccccgccgaccaccaacaccacggataacgacgacgacccgcccagcagccacaaccacgagggccc

SEQ ID NO: 18550 - DNA, 271 bp, Zea mays
  Clone ID: MRT4577_116917C.1
accacgcgttcgcgtttagcaaaagggtttaaactcaactctcaagcaccttcaagaagggatcgagcgagcgagcagtgtccggcccccatggccatggtcgcgtacacctccttcgcgtaccacaagccgcgtatcgtggaggtgtgcatgaagaacagggtctgccgggacagggagcgggacggtatggagcacaagcacccccttaaggtctttgagatcacgccgtctcctaggtgccttagtgttcgctgctttctcaccaaca

SEQ ID NO: 18551 - DNA, 237 bp, Zea mays
  unsure (1)..(237): unsure at all n locations
  Clone ID: MRT4577_116918C.1
gaccgacgcgtacggcgtgtaagttctctcgcatggttttcttctttgctttcttcnggaaccccgtgcgagatcgtgctccaccatgagatccgtgctcaaaaaaattatgttagcaagcttaccgggcataaatctgaagtttgtggactcaagtggtcttatgacaatcggcagcttgcattctgaggcaaagacaaaggacgctttggttgtttttcacattttttttcaacc

SEQ ID NO: 18552 - DNA, 2751 bp, Zea mays
  Clone ID: MRT4577_116919C.1
attaaatagacataatatgtaatggtctactagttatatgtccgtgcattgcttcgtttatatatatatatatagtttatctattaagagccctgggctctatataactgtagagagccccagcccacgtccgatcactttttacgcaagcgaacagatttagcgtaaacggaaacccattttagcgtaaacagagtaacaaccgcgagccctacatgtttacgttattccattcttccgtttatacataatagtgatttagcataactacttcagccgacccacgttccagaaataaaggaatgggcccactaccccacttcccacgcggtcaaacacttctataccctaacccccgcgcggtcaaccatcctggccgactcgccgcgtttcttcagcggtcgcctgggcgattcttgttcatccgccgccgccagcccgtttcgccgtcctccaccgccgcacgccctcaacattaatcgtcgccgccgttgacatcatcgtcgagccgctgccgttgtcaatcttgcgcgccccgcgtcacattggctcacgtccgcggtcgctatgtcgtccggattccaagtgtgaatcgccttcatttgtctccgcgcgaactcaaccctaatcggcgccgccgttgaatgggatctttcagcttctaaagatcgtgaaagacgcgggtggcatcctgtaacatataaagtctctgatgctactccaagactacccccaaccaattcgaagtgtttaatcattgagtcaagtcaagaatgttgaagggagtggtgtacaagtaatggaaagccagccccctgattcctttgtgccaggaagtttacacgtcgagctggtctgaagcttcttgattcatcactgatagcttcaaagtgatgaatatgtgtagtgtcagatgcaagtgccttttgattgtttcacctttcgagaatattgcaggccacacaaatgtaaaggctgtattacctggataagatgcataatactggtgctccattctacaaaaatggctcactacgcaaaatgtattttaataagaatattataagggcgttgtcaatggccgataagcggaagcctcgccagggtggtgaaccatttggtgtttgcccttttcgtagcagcagtgagacatgttacgtctcaaaatcgccaactacttgccagattgagtttcctatgaggccagaaacttttgatgaagacccaaatcaacatgatcgacttcccaatataatcatccaactccctcttatgcaagacttgatggcaaataagattcagatgcttcctgtacatcaacgccagaagttccaagctacgttgattgattatgacttagaggttggcaaaatatttgcctctatcaagcaatgtttgaatactattggtacaaagcagtccaatctagccgctacatttggagaattgattgatgaggttcttcgggccgatgaatctgttacaccaaatactgtcagacagtggtaggtggcacagttgaaaatgattctggaccagtatttgacaagactcctattgggagtgtttctgcaccaggtctcttcttatctgaattagaatgtgctcgcgctcttcgggcatacttgtgttctaggttcattgaattggacagaaatataattgactttggtgaacatcgcgccaattgttgtgacatacaacaatcttttgctgatggcgcatgtctcgacaacgtgtttatgcaatgtgtcattgagtgtgtccgcgatgactggtctaaacatattcctccactcaatgctcaccagctcattctagatgttaatgttggggctatattgaactttgaggagcaggagcaacatagtaagtctcctcgtccatttgacccttcagttttggagagttacctattgaagacactgccttctttcaagcagctggatgactacaaatcaataatggtacccatgctacgatctggacattggacattgtatgttgttaatcttcagattggacgcatacatgtgttagattccaacccttatggaccagagatgggtgggactatctggaaaaattaccattgtatacctatggatttgggtgataggaaggtttcatgggccatgttaatgatgagtaggctcaatctagctattcaaaatgctcgaccaagatcagctctccctgcttttttgaagtaccctattgaactcatgaataactgcccaacaatgaaattggggtctaatgattgtggattctttgtcatgagatatatgcagaactacgactacatggttggagctatgaatgcagtcattgatccggataattcagaggacattcgctctcttgtactgcattacctaatattccatcgactaaatagaaacagcttcgtggtctcccatctggacagattcaagttctctcagtagtagcctagtatagtttactatcttaatattagtatgaacatcatggtctgatggcttttggtggcttcaagttatctcagttctagcttagtttagggtagtgtcactgaatggtgttcatgtacatattggtatgttggcttatgttaggattcagataatacttatgtccatatgcagctcttagcaaactcttatatatatcataccagatatgttttagatggttatatttatatatgatagttctgcactttaaaaaaaaaaaaaaaaaaagggggcgcccccagattagtgcccc

SEQ ID NO: 18553 - DNA, 301 bp, Zea mays
  Clone ID: MRT4577_11691C.1
ggcagccccaaaaagccccattttttccttaggataaacttaaaacaaagcctgggggggggaacagaatccattgatccgcagcccagggggggggggggctttccttttggggaaggggcaggctgataactaggaccgaaggccaaccccgggggcttaaacttatcccgcttggggcgggtcttaaaaagctttggtggatttactttaaaaaacgggaccgggggataatttttaccttttttccctccactccaacccatttttggggggagaatcggttaatgccccgggggca

SEQ ID NO: 18554 - DNA, 235 bp, Zea mays
  Clone ID: MRT4577_116920C.1
cggctccgcaacaccaccagcaccacagcgatcgccgcagccacgacgagcacgaccgcagaggcaccgctcaaccgggctagggaagctacggccagcgagcgccacgcgacaactacgcccgcgagcccatcgaggccgatgcgtagcgtggacgtccgccccagtcgacgtaccgtgccgacgagcacgcctaagcccacagcggccaaggctacgcgcacccggacgcata

SEQ ID NO: 18555 - DNA, 468 bp, Zea mays
  Clone ID: MRT4577_116921C.1
cccagcgtccgcccacgcgtccgcacacactgctgcccacgcactgctctacacagtctccagcacgcgatcgaaaaaaccagagagactcttttatggcagcgctgggaggattcattcttctgactatggcttgcgaaagcacacctccacgcagacaagagcggtgatgctgctgctaaaccatctcgaccaggcaacatacctacaggcgtgggtctgtgctgatcataccacactgcacatacaaggtatcagcactcaacagggaaccacaaaggcacctgatggtacaactctcaaaggtacaagttagtagctggtctgttgaactacagcgccaactactccatgtgctgactcttgcacaatgaacgaattcaaggcgattgccacaaatgcatcacagtgttcgattacagattaagatcattataaaagttaataatgattctatgggagggcaca

SEQ ID NO: 18556 - DNA, 841 bp, Zea mays
  unsure (1)..(841): unsure at all n locations
  Clone ID: MRT4577_116922C.1
cattgggaccctcgaggccggcggggctacctgcacccgtaaatcatctgctttgtctacctcagcaggtttgcaacatttacgcgatccattgcattgcgacttgcagctgcagagccggtgatggcggaccggcggagcaatggtggttcgccccctagctggagcttcgcgtctcaaagcagccactaccacttggcggcgatgagaggaagctacgcgccacagagcctctggcgcccgtcgccgatgccggtccgtggtgccgccctgtcctcgacgccgcacgttgtggcctcggcgcccgccgagaagaacttcgccgccgacttcctgctgggcggggtgtcgtcggcggtgtccaagaccgtggcggcgccgatcgagcgcgtcaagatgctgctgcagaaccaggacgagctgatccggaccggcaggctgtccgagccgtacaggggcatcggcgactgcttcggccgcaccgtcagggacgagggcttcctgtcgctgtggcgcgggaacaacaccaacgtcatccgctacttccccacgcaggccctcaacttcgcgttcaaggactacttcaagggcctcttcaacttcaacaaggacagggacggctactggaggtggttcgcggggaacatcgcctccggcagcgccgccggggccacgtcgctgctcttcgtctactccctcgactacgccaggacgcgcctcaccagcgactacagggcggcggctaagggcggcgagaggcagttcactggcctcgtcgacgtgtaccggaagacgctccggnntcgacggcgtcgtggggctctaccgcgggttcaacgtc

SEQ ID NO: 18557 - DNA, 227 bp, Zea mays
  unsure (1)..(227): unsure at all n locations
  Clone ID: MRT4577_116923C.1
tattgcaatacttaactagggtggattaaagagctcgttgtggacattcatggcgccatatgngagaatatcaagagacatgcttaggtgcgaactaagaatcaaataagatcatgtgatggtatgatctccgcgatgcgcctgaatgcaggagctttaattgtatccaccatttattcaccattcatccgatcaaagattctgtataatatatgacttataaccct

SEQ ID NO: 18558 - DNA, 332 bp, Zea mays
  unsure (1)..(332): unsure at all n locations
  Clone ID: MRT4577_116924C.1
cnccatgccccnacgcngcncaaccgcgccgggcgcagccncanccccagccacacccangcccgngccaacagccgcanccaagcccgngccagcngcagggaaccngcggcgnnggcagcaccccgancccgggccagngcgncgaggggcngaggcancagngcagcccgacggcaacgccggacngcncgccncagngccagncgnngcggcagcagngnngccagcagcncaggcagggggagccgcagcaccgggaccaggcgancnncggcnnggncccccagnccancccgcagcagcagccgcaaagcggccaggncgcgggg

SEQ ID NO: 18559 - DNA, 269 bp, Zea mays
  Clone ID: MRT4577_116925C.1
cctgcagtaccggtccgggggggccgggtcgacgccacgcgttcgtccacgcgtccgcctacgcgtcctctatctcttgctatgtactaatcgggggtgacttggtgggagcagcaatcaaaatcccaactatctcattatcagtctcttgatctcttgcgctgctccagatgtctcaccttctatgaatggaagccttttttcttttaggtgtacagactaaacaaggtattcgccaccttatatggacgtagtgactcttttcgaac

SEQ ID NO: 18560 - DNA, 697 bp, Zea mays
  unsure (1)..(697): unsure at all n locations
  Clone ID: MRT4577_116926C.1
gctctcngctattatcgcttctcctccctccctcctggccccggcctcccttccaagcttcaaggaaacatccaagcacttccctgttctaagtcaggagactaaacgctgttagcagtagcggatcatacaccagcagcctagttagagttggatctgagcaatgggggaggagcgggcggcgccaaagccgggtccggctgccgccacggcggtggagctgacggggttcgtcatgggcgcggaggaggccgagcgcgcggcggcggccgccggcgtggcgaccgtgcaggacctgctgccgctcctggtcccgtccgcgatggagcgggcgcgcgccccgatctcgcggttccgcgtgggcgccgtggggctgggcgccagcggccgcgtctacgccggcgtcaacctcgagttccgcggcctcccgctgtgccactccgtccacgcggagcagttcctcgtggccaacgccgccgccgcgggggagcccgcgctgcgcgccgtcgccgtctcccacatgccctgcggccactgccgccagttcctgcaggagatgcgcggcgcggcggccgtccagatcctcgtcaccagcgacgccgcggaggngcgcgccccggagtggcgcgcgctggcgtccctcctccccggccccttcgggcccgcgatctcctcccccaggacgtggcccttcccc

SEQ ID NO: 18561 - DNA, 303 bp, Zea mays
  Clone ID: MRT4577_116927C.1
attgcttagaatgttcagagtcaaacccaaaccacaaagttttgacaccaacctcaaaccgaaacacaagaattctttctaactgcgaaggggggcccgaggctctgttggccatcggagatcatagtcctgccgcccgcctgctggcaccatggaccggcgcctgggggcccgggggaagccgagggcagcggcaaaggcaaaagccggaagaagatttgaggggacaggggacgactcaaatgccaaattacactccaaagcttcaagcttgcccatcagccattacttgttaacgtcaaa

SEQ ID NO: 18562 - DNA, 348 bp, Zea mays
  Clone ID: MRT4577_116928C.1
gtgactgcgaggagatccactttctatcgagtgacgacgctgggactgacaagacctagccgtaccacgctgtgaccgggcagaagaacgggttcctcaacataaataaccggccatgcatggatgtggaggcagctagctgtaagactgagtaggacggccacgatcgatgttactaacggctctgcaacatgtatgatggaagggacgctgcctatatcggtcctttatgacccagctgtgtcgtgactactctcaaccggactgattctcatgtcatcgctatatcacacgatcgattcgctagctttcctactttagatggcaacactgagggatatcttagac

SEQ ID NO: 18563 - DNA, 852 bp, Zea mays
  Clone ID: MRT4577_116929C.1
ggtcccagtaccaagcgctgcagcgatgaagtatgagcccagtggactagccattgcttctccaccaggctcataccaggcgatacggcgctgaagtatgtaacccatgccatactcccaggaaaagctcgaaagaccttcaacaaaagggtacctgtacccgaaaccaacacaggtgggtaggtagagcgcacgcgtgggattgggatcccatggccaagctcgccgtcctcctcctcctcgccgtgaccgcgtccgccacagtgccggcgcacgtccgcgataccccgactgagatcaagctcatcaaaggcacggacgcctccggcgtgggcgacgacagcatggagtgcgtgtacacggtgttcatccggacggggtcgatcttgaaggccgggacggacgcgaacgtcacgctggagctggccgccgcggacggcaacggcgtggggatctcgaacctgcccgcctggggcgggctcatggggcagggctactcctacttcgagcgcagcaacctagacagcacacacgcctggactggacctgctgggtggcttggttggttggtgacgagtcgtaataagttgtgggcgcatgggcgccgcgctcgtgagtggcgtgcgccacgatgcatgcgtgtatggtgatgaactgaattggagccgtgcagcaagtcgaataatcgggagccacctcgcgtgatgtgtagtggctagtttttgtacatggacgtgttggatcttgatccatgttttgatctgatctttgagaaatggtaatccgcgttatcatgcgtgtttacccacgcgtccgcggacgcgtggtcggacgcgtgggcgtacgcgtggg

SEQ ID NO: 18564 - DNA, 291 bp, Zea mays
  unsure (1)..(291): unsure at all n locations
  Clone ID: MRT4577_11692C.1
ccggtcgaccaccgtccgcaantttacgcttatccaccatacatccatttgctgagatgatgtacgactagtgttctagaggactaatgagagtaagaagcgttcagacaccgngtttcaatgttcttcgctagattgcagctgcttctctggctgggccgggtttctgtgggctggcctaatcactccctgccgaatccgcgatgctccgaacgcctgcctctttccatgggcttctactcttgttgcttgcgcctgggagctctttctcattcctgtgggcctgctctt

SEQ ID NO: 18565 - DNA, 168 bp, Zea mays
  Clone ID: MRT4577_116930C.1
tggtactgctgccgtatgaactacatagcagccactcaccacttgatttgcacataccaacccattaaccaacattactacaactccaaattacaaaccaattcaccacaccaatcaccgaaattcatacagcatcatttccaatgaactacatatcatccatgcacc

SEQ ID NO: 18566 - DNA, 1151 bp, Zea mays
  Clone ID: MRT4577_116931C.1
ggccgccctttttttttttttttttttccaaagtgcataaaaattatattgccaattccattttaaataaaatccttttttttttttttttttttttttttttttttcttttttttttttttttttttttttttttttttttttttcgcgagtaggggcctttttttttttttttttcaagaaacacgcatgataacgcggattaccatttctcaaagatcagatcaaaacatggatcaagatccaacacgtccatgtacaaaaactagccactacacatcacgcgaggtggctcccgattattcgacttgctgcacggctccaattcagttcatcaccatacacgcatgcatcgtggcgcacgccactcacgagcgcggcgcccatgcgcccacaacttattacgactcgtcaccaaccaaccaaaccaagccacccagcaggtccagtccaggcgtgtgtgctgtgctctcctctaccggccgccggccacatcacgccgccgaggcgcccttggcgtcgccgctgcagtagtcgcgaacggcctcgagcttgaagggcggggcgtcggtggcgagccactgctcgacggtgaacagctgctgcccgcaccccttgtgcgggcccgtggtggtgacctccacgtagttgcagtaccacccgtggtggtcgccggtgccgtcggtggccagccgcatccagcacggcgccttctccatgcagggcccgcggccgctgaagatgtccaggttgctgcgctcgaagtaggagtagccctgccccatgagcccgccccaggcgggcaggttcgagatccccacgccgttgccgtccgcggcggccagctccagcgtgacgttcgcgtccgtcccggccttcaagatcgaccccgtccggatgaacaccgtgtacacgcactccatgctgtcgtcgcccacgccggaggcgtccgtgcctttgatgagcttgatctcagtcggggtatcgcggccgtgcgccggcactgtggcggacgcggccacggcgaggaggaggaggaggacggcgagcttggccatgggatcccaatgcaatcaggcgactggattggatgagctgcgccgattggggaatgggggtgtgcggatcgttccggcccggccggcctcgag

SEQ ID NO: 18567 - DNA, 316 bp, Zea mays
  Clone ID: MRT4577_116933C.1
atcacatgtgatcgccacgaacgtccgcatgctgggaatgggcactgatcagcctgacagtcgagagagctctcgaatcgcgcctaggtatgccagataggaggccctgtgagccgcatttgccatggacgcgttctttgcttcagcctggaatgattccttccaggaggcttgccacaacggcatccgcatcatcgcccaacctggacgcagtatgaatgacgaggacgccgtcgcgtgctgcaacaagtattgtgtgtcactcggtctctacggcattaggcactttatgcattatccgtcatgccccatggct

SEQ ID NO: 18568 - DNA, 251 bp, Zea mays
  Clone ID: MRT4577_116934C.1
ttcatgtgtcttattgtcgggcacctggcttgggcatcccagactgatctcctggtccaatggcacgacacggcatgtatgatcaacagacctttactgttcactagagttctgttgccatgtttcgactgtgaactggtgctcggcggccacattcttatggctgggtccgtcatctcgagattgatgcacacacatgcatttctgagcctgatggatacacaccctaccagggcgcgatcgctttcttg

SEQ ID NO: 18569 - DNA, 314 bp, Zea mays
  Clone ID: MRT4577_116935C.1
ttctggctaacagccgactaccggcagctggggaaaggcacggtgacaggccggcagcaaccacagacggcaggcgctccacctggccgggatccctcagaccccaaatccgctaggcatgctccattcacagtaggaccacctgagggagccggtgaacctccacagaaggagtgaagagaccggagcacatactggtagcctatacacagcaagttcgccgtcacggacatggtacatggatgctgctaccaggtggaacggagcaactcactcgcggtcgggaccagatatgcacacctcatcgcatacgg

SEQ ID NO: 18570 - DNA, 412 bp, Zea mays
  Clone ID: MRT4577_116936C.1
tttgggttttttctcgacctctaacgggttttttatattttacccgtcacttaaaaaacactagctccaatctctatctttaatggtccagatactaataatagagaaagagaatatctagatctaatttttttaaacatgaaaggctcaagaacattgcatgattcctaagaaacctcgtgagcacgaagcaataatagcctctactagttgtgcgacaatgactattattgcctataaaattcaaggcaaatctgtctcatttcttttgggtatcatacaaaagtgtatcccaactagtttcccgggcgttgcaaatgtcgtgtagccggttctccctttttgcttcacaaggatcagtccttcagttcgaggcttcttttgcgtgtgaattatgaactgagtactgatg

SEQ ID NO: 18571 - DNA, 360 bp, Zea mays
  Clone ID: MRT4577_116937C.1
tatgctgggtgtggtcttaccacatatgctgctacctatacaattttccctcaatgctaacaagctcctatagcttcccttattcccccataccttctatcaatcatagcttaagtatgtgaaaacccaattcttaacccctataagatccaacctgaaatcaaagcaagcaccatacctttaacacctttgtactttaaaaaacctcgagccctataatttaagcacccttgggtacaatccatttccacacattatctacaaaaaatcatgctccctctgatcaaccattcacatctgtcaaccctctctacctactatgagcacccatctttttcttgcatccaaaaaactgtctac

SEQ ID NO: 18572 - DNA, 513 bp, Zea mays
  Clone ID: MRT4577_116938C.1
ccttggccgggtggttgtttttaagggttaattccaacccacgggcgggcgggttttgggggtccggcctttttaccaattttgggggtcacatgggcatggggggggggggggggaaattttttttcccccacacattccacccacacataggaggccgaaagcaaaaacgggaaagcccggggggcccaaaaaaggaacaaaaaaaaaaaaaagggcgggggccccctgcccgcttaccaaccggaaaaaccggggggcccgctgaattaaggaaccccccaaaggagggggagaggcggtttggccattgggccccttcccccttcctaaataaaagacctggggggctcgggcgttcggctgcggcccgccgtatcaaataacggaaaggggggaattcggggatcccccggatcaggggaaaacgcaggaaaaaacccggggcccaaaggcccccaaaaggccaaaaaccgaaaaaagggcgggtttttggggttttcccataacccc

SEQ ID NO: 18573 - DNA, 544 bp, Zea mays
  Clone ID: MRT4577_116939C.1
ccccccctcgagttttttttttttttttttttttttttttttttttttttttttttttttttttttttttttttttttgagaaaaaaccccgtttttattcatttttgaatagggaaaaccttttaccccccccaacccctttgggttttggagcccccaaactaccccccaagggggggggaaaaaaggaaacaaaaacctttttctttgctcccacacccccgaacaaaacatggaaaccctacccctttagccccctaaacgggcccccccaaaattccccggtataaactttacaaacaagggcccctaccgcccacatgaatccttttttcctcaaaaaaacaagaaagggcccccccctctcatatttcacagtttaaaattatgagggcggggcagaagggcatccacggccacttaatccttccaatgggggggggggaattccctctcctgcccggactgttgtatggcccaggcttgggacatcaggggaccttttcatatcccatgtaaaaccttgctgacccaagctttttt

SEQ ID NO: 18574 - DNA, 374 bp, Zea mays
  Clone ID: MRT4577_11693C.1
attcggctcgagctggaagcaagggcccctatttttatttttaaaaacgcaaagcctatcgagagggtgggttagaacagaacatgggactagcaaggaacagggctggagctatgcaggatcctaagctgtagaacctaacagagcacgacctgctggagatgacatggttccctgtggcgaatgaagcccgccgagagctggaagagggaagtgctctcaaagcatatgaccttgcggcagcgtttcattatggggatgggtttcgctgtttacaaggcaggagtaatgatgctgggttgactagctcggagcgaaatatgtgactgacaaactggttgcatactccaaggattatggggagttcttcaaac

SEQ ID NO: 18575 - DNA, 292 bp, Zea mays
  Clone ID: MRT4577_116940C.1
aagggatttaacacttatagaacgggctttgttttcactcccaagaaaaatggggggattttcgacggaagtaaacgctaccccaacgccgggtgagcccaaaaaattaacaacgcaggttacaggtttttgcgaattaaccaaaacctaaccgaaagaaactgttttcaaacagaacgggttaaaacttagttgggggtgtgcagcaaaggtcatcctaattaaccagggtagcctttgttagcctcgacgccagaatttgaaaggtcggcggcccccaaacctgggtctt

SEQ ID NO: 18576 - DNA, 345 bp, Zea mays
  Clone ID: MRT4577_116941C.1
aacccgaccgaaaaagatttgaaaattcaaatgccccggaatataaaatgggggggggcgggaacggatacacgagggggaagggaagtacatttaaaagccaggaagggagggacgaggacgggacaaacaaggagggaaaaccaaaaaacaagagggagagggggaagccaaaatgaagcggaaacactagtacccgggaccggagaaacagcactagaagccttggaagaaacggaacctggtgccccacggccggggttggggcccaaaccgggtgggccgactaggggccggggccgggggggggttaaaaaattcccacataacgggcacgttctggaa

SEQ ID NO: 18577 - DNA, 1251 bp, Zea mays
  Clone ID: MRT4577_116942C.1
cgtctcgcgctaccgatgcccagccggatcgccgcctgcttccgctgcgccgcggcgccgtcctcgggcgcgggcgcgggcgcggcggggcccagcctggcgacctccatctacgagacccacctcggcttggtcgcgctctcctggtcccggacctcgctcggcctctccctccgcgccgtgctccgcctgtcggccacgcccccgcccggctcctcctcctcggcgtccggagcgggctacctcgacgatgacgcggacgaagagattctcgccttccgcgtcagcccatggctattctggcgccgccgcgggtccagacggttccgcgctggcgaccgcctcgtcgacctggcgtgggatctctctcgcgcgcgcttcccggtctccgggtcccccgagccctcatcgggcttcttcgtcgccgtcgtcgtctgcggcgagatggtcctcgcggccggggacctgaccgatttggcctaccggaggacccgggcccggcgcccatcaggcccgcgtccggtcctcctctcccggcgggagcacgtctcgctacgcgacggcgagcgagtgctgcacgtccggcgcctgcgctggaagttccgcggcagcgagcgggtcgacctcgggggcggcgacggcgtccaggtctcttgggatctccacaactggctcttccccccacgcgagccgccccccacggaggcctcgacgcacgcccacgcggtgttcgttttccggttcgaactcgccagcggcggcgaggagagcgaggcggatttggggaagaatccctcccccagcaaggacgcaaggaggaacacgggcgtttggggaggctacctcgcgcggtgggggcaacgggactggagcgagacgggcagcaacggtgagaggaggaagggcagggggcggaggctggccaaggagagctcgtcgtcgtcggcgtccgtggcatcctccacggcgtcgtgggccagtggctccacggtgatggactgggccagccccgaggaggtcgagatgcagcgcggcgacggcttctcgctgctgatctacgcctggaagagctaacaccggcgacgacggcggcagcatagttctgatcaactagcggtgatggtaaattttctctggactgttgtagtttgcagtgttcttgtgcagttaaagcctggagagattgaattgagcttgaattacagtagtgccattgctaagtggaacgagcgattagtgtgattttttttc

SEQ ID NO: 18578 - DNA, 688 bp, Zea mays
  unsure (1)..(688): unsure at all n locations
  Clone ID: MRT4577_116943C.1
gggtcccggttccccccttcngagtcgaccttgggggcggcacggcgtccaggtctcctgggacctccacactggctcttccgtccgcgcgagccaggttccgcggaggcatcgacgcacgcccacgcccacgcccacgcggtgttcgttttccgcttcgatgtctccagcggcggcgaggatttgggtaaggatccctgcccggacaatgccacagggaggaacacggacgtcgtttggggaggctacctcgcgcggtggagacaacgggactggagcgagacgggcagcaacgccgagaggaggaagggcagggggcggaggcttgccaaggagagctcgtcgtcgtcggcgtccgtggcatcctcgacggcgtcgtgggccagtggctccacggtgatggactggggcagccccgaggaggccgagatgcagcgcggcgatggcttgacgctgctgatctacgcctggaagagctaacaccggcgacggcggcatagttccgatcaattggcggtgattataaattttctctggattgttgtagtttgcagtgttcttgtgcagttagagtgaacagagcttgaattacagtagcgcaactgctgagtggaacgaacaattagtgttgatttttttttcccattacaacaacaatttcttnccatgtattagcaattaatgaatg

SEQ ID NO: 18579 - DNA, 1801 bp, Zea mays
  Clone ID: MRT4577_116944C.1
ccggccgggaagccagcaaacccagccgcaccacttgcggaacgcagcaagccagcaaccccttgacgccttggattcgcactgcaagtctgcgccacagcgcgcacgcattccaatcgactagcgtagacgcagtggcgtctcgcagtggcgtctcgcgctactgatgcccagccggatcgccgcctgcttccgctgcgccgcggcgccgtcctcgggcgcgggcgcgggcgcggcggggcccagcctggcgacctccatctacgagacccacctcggcttggtcgcgctctcctggtcccggacctcgctcggcctctccctccgcgccgtgctccgcctgtcggccacgcccccgcccggctcctcctcctcggcgtccggagcgggctacctcgacgatgacgcggacgaagagattctcgccttccgcgtcagcccatggctattctggcgccgccgcgggtccagacggttccgcgctggcgaccgcctcgtcgacctggcgtgggatctctctcgcgcgcgcttcccggtctccgggtcccccgagccctcatcgggcttcttcgtcgccgtcgtcgtctgcggcgagatggtcctcgcggccggggacctgaccgatttggcctaccggaggacccgggcccggcgcccatcaggcccgcgtccggtcctcctctcccggcgggagcacgtctcgctacgcgacgcgggcgccggccgaggccgcagccacaccacctgggtgaacgtccagggcaaggagcgggagatctccgtggatctcgtggctcgcggccgtggcagggacaaggccaccgccggcaaggggaaggagaaggaccgggctgatgtcggcatgtcggtctctgtcgacggcgagcgagtgctgcacgtccggcgcctgcgctggaagttccgcggcagcgagcgggtcgacctcgggggcggcgacggcgtccaggtctcttgggatctccacaactggctcttccccccacgcgagccgccccccacggaggcctcgacgcacgcccacgcggtgttcgttttccggttcgaactcgccagcggcggcgaggagagcgaggcggatttggggaagaatccctcccccagcaaggccgcaaggaggaacacgggcgtttggggaggctacctcgcgcggtgggggcaacgggactggagcgagacgggcagcaacggtgagaggaggaagggcagggggcggaggctggccaaggagagctcgtcgtcgtcggcgtccgtggcatcctccacggcgtcgtgggccagtggctccacggtgatggactgggccagccccgaggaggtcgagatgcagcgcggcgacggcttctcgctgctgatctacgcctggaagagctaacaccggcgacgacggcggcagcatagttctgatcaactagcggtgatggtaaattttctctggactgttgtagtttgcagtgttcttgtgcagttaaagcctggagagattgaattgagcttgaattacagtagtgccattgctaagtggaacgagcgattagtgtgattttttttcattactagaacaattttcttccctggattagcattaattactgaaatgaacccaacaccaaatctatttgcctacaatctagggcaatggctcaggatattttgagcagcttggaatcagtccaccgtagcgatcaacgtcaacaactccagtatagtatcttattctgtgtttctcttgtgtcacctgctcaaaagagaatctatccatcaatcaattagctgttgctgc

SEQ ID NO: 18580 - DNA, 740 bp, Zea mays
  Clone ID: MRT4577_116945C.1
cgcggagactgtgccggagaaggcgaggacgacggttctacgcactggacttgtgtttcgattctgtgttcgcgtcgttttgcgtctcccctcgttcggtgttcttgcagagcgcgtgtttcggcttataagcccgccggccgggcgcgtgttcgactataagccggtctcgtccgacacgagcgtggacacggacagggagaatgctgccgcattggcaaaggctgtctacacggagatcgccgtgcccatggccatatgttgcctgacctacaccttcctgtactgcacgtacccccgagacagggagcgtgctcgaaaggaccttctgatggcatcggatgaccacctcggtggagaagccaatgacaatgagtcaagtgcggttcatacactggtagacgaagaatcttctgtcagctccttaaatcagaggctaatatcttgaggaggctagctgcaggtggagatggggaagtccaccattgtttcctggactctgtccctcttattcatgtgtggctccacggtttcagattcgccgaaaccgtcattaccggttaccacgcatggaaatgcgaaatctacagaccatatttgcatctaaactcttaggcctactttgaaaactcaatcccccttcaaaattgaaggatgttcagagaaaaataaactaatttctctctcaataagaaacgcaactctttagacatgacaaaaaaaaaaaaaaaaaagcggcc

SEQ ID NO: 18581 - DNA, 656 bp, Zea mays
  Clone ID: MRT4577_116946C.1
gccggccgggccggggtcgatgagatgcacaccctcccaaccatggacaaggcgggtcctcctctcctcgacgccgggagccgcactgccatcacagtgcagcttgcatcgggaaagaaaggagacgatgccgaaggtatgatgtgcaggggcgacatcgacaacaagagtatccctcccacacggcacgtcgaagacccacatgtgcagcctgcaaacaagggcaacttcatcaccaaggacgaggaggcagtagacacgactggaagaccgtcaccgagacgtacgccaagagaccccatgatagacacctcgctgacctacgtcatcatctacggcgtggacccccccattacgtgatcgtcgacgtcgacttctccaatgcctggatcaggaccctgagaccatgaccggagcgcgagcaaccagacgggagcatagatgctgacgcgacgaactgtgtctgtatcacaacgcgtgtcctgatgcttgggaacatcatatagataaacgaaaagtgttgcgggagctgctaactgcatgatggcttgcaggatgtgatccgtgcctgcttaccttttcgcaaaaacgtccctatcattcactgcgcccatatcaataaaggatcccccgaactgccctaagtccatatccgc

SEQ ID NO: 18582 - DNA, 242 bp, Zea mays
  Clone ID: MRT4577_116947C.1
acaactcaagaggtgtgttattatattgatatggagtttctttatattcatacactggtttgattgtgatcaaccccccaaaagtttgaacatccaaaaaaaaccacggaaaggggaattgggacaggggggtccagcaaaaggcctttaaaaaaacattcctcacagggggaaaaaaacccccattttttacgagaatcccccccagagaacgcctggggataaggaagaaggcccagggg

SEQ ID NO: 18583 - DNA, 652 bp, Zea mays
  unsure (1)..(652): unsure at all n locations
  Clone ID: MRT4577_116948C.1
ggtaccgcggcctcctctcgagtttttttttttttttttttttttttttttttttttttttttttttttttttttttttttttggaggggaaacactggaaaaaaggttcgggtagaagggagggaaaatgatgggggacagatgagtacaagggtacaacctaccccaacctttcctaaaaaactccactactccaagaacgcccaaagttttttcacaaagctgtaggggggcaaaaacttttatggggggggaggactttaaggggggctttccaagcaatttacgggtcagggaaaaacagccgccataccccatagtcggaaacgactagttttcccgatgggaaagccgcaccaacagccctcttttaattttaatgggggccggaatttcgaaccccgggggggcctccttgttagccaccggggccaccacgtccaacctaaacctccggagcacggccgggggaaccgttttaatttgcacgaacgccatttctttcccgaggcacacccggggcccaggggggaacaccggaaaccgcgcggggtnaaccggaaaaaactcgccgccctcgcttaaccaccgttccggaacgaactccaagaagtccttgccccacagtttttccatccggcccatcgggta

SEQ ID NO: 18584 - DNA, 257 bp, Zea mays
  Clone ID: MRT4577_116949C.1
gtctgatatacctatcgaccttatctcgatgattatcctgggtctgccgatcattcatgatacaggcgactgcctgatccatgcctggctttggatcatcatcacactgagcagcatgctttctcagtgaatgacagaatgtctgactagcaagcgtgttcatcatacctagacagcttaaacaacacgccttccatcactgcaacatactatgatactgacagaggcacgatttatggtacactgatgacgatcag

SEQ ID NO: 18585 - DNA, 409 bp, Zea mays
  unsure (1)..(409): unsure at all n locations
  Clone ID: MRT4577_11694C.1
caacggctgtaactacacctctttccatcttttatgtcgcgcccatggtctgctgcccncggcacggggtctatttcaacagcatgaggtacttatactacntttntaaagtggacacggatctcgtgtattaacagctttagagaggccagttcaaggccgccatctacagtctctttttcactaagtaaggttaggagatcaatgataggattaatgaattcaagatcgcttctgccaaaggcatcttcatcttcatctacttttactaaactgcttcttcccttacttatttaaccgatttgtttgatctcataaaatccttcttagctcattacgatctatctatttggtgattcctactcttttcatcttgctctacttttctttctacttactataaattttt

SEQ ID NO: 18586 - DNA, 788 bp, Zea mays
  Clone ID: MRT4577_116950C.1
ggggaactatgtctgttgtttgtgtttcgaactacgtttgttaaatcttatgctccttctattttgtttgaagtattctatgaatggttgatcgagctatgattgaacttgctgcgcttatgtcatatcatactatatttgtatgtctcgacaaccatgattgtaggaagatctccaccaaaactccgatctattatgtgtgtgaaatcttcaactggaaatatcatgcacacatgtaggggagctattcctacaccctgagttttgttgtgacttatctatctcttagatggaacttcaaatcaagataagtctctcgaaactcacccctcaaatccttcttatacctagtgtatgaggaagatttcaaaaaccaaaatgacctctgggtgaaaagtatagtgttgttatcaattaccaaaaagggggagattgtgaatcatctaggccccttagtgatgttttggtaataaatgacaaccatttgtggactaacaattcttggaaaaataagaatgcaggttggaccacagagaaatgaaagtcttggagacttataagcattggttgtggatcaggtgaaggcaaaggtataacatagatttttgttttttgccggtcaccaggagtttagagaaggaattgaccggattaataggctaaatagccgtactattaagaggggtcaatgactttggtctgtgtaaaacttagtgcctcatagtgcatctagtggttgcatttgcatgaggactaaccacgctttcagtttcgagagttaaatcttt

SEQ ID NO: 18587 - DNA, 1452 bp, Zea mays
  Clone ID: MRT4577_116951C.1
atggagcgaccacccgggaaaacagtgctaccacaagggaaagctagtggaagactaccttacccgaaaggggcaagggcagtaggggagaggcaaaggcagtttatacactgtgctaagggaaccgtagaactcaccagttccaaaggacaaagatttgaagttgaagttgcagtaactaccaccatcagattagcgacaatcttagtagatgagaagtttttgggtgacaacatccaggtggttagagattttccggatgcctttccagaggagttaccagggatgccacctgagagagaagttgagtttgttattgacctcttacctggaaccgcccctatttctaaacggccatataggatgtccgtagaggagttgaaggaacttaagaagcagttaactgagttacaagaggccgggtacatttgtccgagttcctcaccttggggagcaccggttttgtttgtaaagaagaaagatggatcacaagggatgtgcgtggattataggttccttaatgggatatcagtggaccctgctaaagtcaagaagttagtggcgtggagcgtacccactacagttactgagatccggagtttcttgggacttgcaggatattattggagatttattgaaggattctctaagattgccaagcctatgacctcgcttctggagaagggaagagagtttaagtgggacgagaggagacttaacctggggatagttgctcacactgaaagagttactattgatgtggaacctattttggagcaagaaatccgcagaaggacaaatcgttaccaggccagtttgaagatgtcaccgtttgaggctttgtatggcagaaagtgcaggactcccttgtattggaatcaaactggtgaaagacagttgtttggacctgagattatacaagaagcagaggaacaagttcagcaaataagggagaatttgagaactgcacaatccaggcagaaaagttatgctgacacccggaggagattacttgagtttaaggagggtgattatgtctatttgaaggtgtcaccgctccggggcatgaggagatttaaagttaaaggaaagttgtcccctcgcttcattggacctttcttgatcttaaagcgagtgggagaagttgcatatcaactggagttacccaatcatctgtcagatgtacatgatgtgtttcatgtgtctcagctaaagaaatgtctcagggtacctgaagaacagttaccaatggaagaccttagtgttcaagaggatttgacttatgctgagtaccccatcaaaattttggatactttgactcgagttatgaggagtaaagttataaagatgtgcaaagttcaatggagccaccacggtgaagatgaagcaacttgggaaagagaagaagagcttcgtatagattttccccaccttttctctagttcttcttaa

SEQ ID NO: 18588 - DNA, 1001 bp, Zea mays
  unsure (1)..(1001): unsure at all n locations
  Clone ID: MRT4577_116952C.1
cccacgcgtccgaaaaacacaggcttgtgtggagcatccctggccaatcagcgtccctccctccgaccaccaaatggacctcctccatgtcaccaccaaggattgaaggataaactctcccttggccaccgcccattctccgccccgccttatcctcccctcatcccccgtacaaaaccgcgctccctcccgcccggccggccgggaagccacctacaccaccacctcgccggccacactcgtctttctcacgagccacagcccacaggcacaggcaggctctcgagctcagtccacccatcgcaggggatggcgtcgtcgttcgccgtggcaacggtcccgtcgctggcggccccggcggccaagaagcggtccggcggcgtcacgtacgtggagggcatgaacgcctacagcggcctcaaggggctcaacaaggtgaacatgctcggggtgcgcaagaccgccgactactccttcgccaaggtcgtggcgtcgctcagccccgcgggcaggaagcggcgcggcggcgcgttcggcgcccagatgaacgccgccgccgagatcttcaggatcgccgccaccatgaacggcctcgtgctcgtcggcgtcgccgtcgggttcgtgctgctccgggtggaggccgccgtcgaggagtccgagtagggtgcgtgggcctgccactgtcggctgtcgccccgggccgcagtctgcttcagaaaccgtgatatatatataaccagatgtacgctttcgattcaatttactttggtatgtatccatgacaattggtgaatactgtggaaatatgtttttggagtcgaggcctgcaattgatcttcaggtgatcacatcaatggccgagtgagaggaatgcaaccaaagtttttttttttgggggaaaagcaaatggtacccttcggtgctagttttcaaacgttagtattccctctatcgatcccgacataaatacgatnaatattctatttaatttttaagcacta

SEQ ID NO: 18589 - DNA, 356 bp, Zea mays
  Clone ID: MRT4577_116953C.1
tgcctctaacccggatagcgaaaaataactgaccggtgtcttttaaaacacaaagtgacacaactttaccacctacacaacagaacagcaagcctaaagttcaaagacaaccagcccttgactgtacagctggggaacaaaactaccccaggccaaccctgacttaccgttcaaaaagtaaggaaaactatgggcatggtacccacgctcacgcacctgacagagcggtgaattgcctctggaacgagggatcgatgcacgcaaagatcgattattgcttacgctgtgacccaaacaggaagttgagcaacggccccctcgaccgactagaaaaatgctagaattgcccctcgggg

SEQ ID NO: 18590 - DNA, 1156 bp, Zea mays
  Clone ID: MRT4577_116954C.1
ttgggaccctcgaggccggccgggctctctctcggccccgcccattctccgccccgccttatccttccctcatcccccgtacagaccggggctccctcccgcccgcccggccgctcaagccacctacaccaccaccccgccggccacactcgtctttctcacgagccacaggcacaggcaggctctcgagctcagtccacccatcgcaggggatggcgtcgtcgttcgccgtggcaacggtcccgtcgctggcggccccggcggccaagaagcggtccggcggcgtcacgtacgtggagggcatgaacgcctacagcggcctcaaggggctgaacaaggtgaacatgctcggggtgcgcaagaccgccgactactccttcgccaaggtcgtggcgtcgctcagccccgcgggcaggaagcggcgcggcggcgcgttcggcgcccagatgaacgccgccgccgagatcttcaggatcgccgccaccatgaacggcctcgtgctcgtcggcgtcgccgtcgggttcgtgctgctccgggtggaggccgccgtcgaggagtccgagtagggtgcgtgggcctgccactgtcggctgtcgccccgggccgcagtctgcttcagaaaccgtgatatatatataaccagatgtacgctttcgaatcaatttactttggtatgtatccatgacaattggtgaatactgtggaaatatgtttttggagtcgaggcctgcaattgatcgatctccaggtgatcacatcaatgaccgagtgagaggaatgcaaccaaagttttttttttatatccagatgaacgctttcgaaatgctacaatttggtcgatatccatgactattggtgaaaactgtggaaatatgttttggtagtagaggcgtgcaaaaaaaaatgacaaaactgggcctcttgcagaagaccgacgcatggaagtttagcgtggaggacgatcgcatgcagaaagaggaggcgaggaagaagagggctaagtcgaggcagaagagaagaaattattgatctcaggatgaactacccccaccaatgtgaccatttcttcttcttttccaccatgtttcttgtaatagcaatgattttgtatgtagtgttgcaccttggtaaaaaaaaaaaaaaaaaaaaaaaaaaa

SEQ ID NO: 18591 - DNA, 603 bp, Zea mays
  unsure (1)..(603): unsure at all n locations
  Clone ID: MRT4577_116955C.1
aacagatcgatcacaaagtttctccaaagaatctttgcatcctatgcacaaggcaaagagatttatatagtagacattgctactatgcaaaatctttactcttgtcatcccgtgcacttgtacaatttccccctctctaaggctgtcttacagcaagtataatacaggattaagccaaacaacaaatgacacccatcggggcaggttacaactttcacacattgccattcaaaatagagctaagtgcgtttgagatacaattttgaacaggcacctacgtgaatgtgtcctccctatcagcttcagcgacctctccctcaatgttgctgaactcaaggaagtgtgtcggcctatggtcctcgtgataaatgtcctgcggcatgcccagcttcatgttgtacttcatctgtgggtcgtgcttcactcacatgaagttgaaattccaaggggtgttatcatgtagaaactaaggaagttatcgctcagaagcatctggacattcttgtaatgaattggaaggtatccatgtgggttgcttccattgtcccttgntgttgcgtccccacttggccactcaaaaccgcttggtgccagcttgtaagc

SEQ ID NO: 18592 - DNA, 360 bp, Zea mays
  Clone ID: MRT4577_116956C.1
cgggggaaacgggggggcttcccttttttttcccttttcatttggcccccccgcagacagacaacggggggcaggcaggaagcaaaccacgggcccattcaagaccgggggggcccccacgaccccttccaaccgcacattggggaaacccggagcccccccggggggtttgggcccccccgctgggaaaacgggggctagctgaccccttcgtcgatgggccccgggatttttaccctgacccccccaaaaccatggcaagccctccttgatggaccagcgaaacccccagggcttgtttggaccaacccccaaaacccggggaaaaaccaacccggttaatcggcccctataacctcc

SEQ ID NO: 18593 - DNA, 330 bp, Zea mays
  Clone ID: MRT4577_116957C.1
tttttttttttttttattattttttttgggggggtttttttttttgtttgggttatttttttttatacattaagaaccgggactgttaattaatttaaaggggaaaccctgaaattatttaactgaaacaaaatttttttaattaaaatgtaaaaaaattccccaaacccctgtttaaaaataaattttaaatgtgaaaaatttcatgcttttaatcttaaaaaatgcccttaaacaaattttaccaattaaaaggggcgaagcccacccgtggggaagggggggattctaatggcccctaataaaagaaaaaaactctttggtgctttg

SEQ ID NO: 18594 - DNA, 452 bp, Zea mays
  Clone ID: MRT4577_116958C.1
ggccctcttgctccatccgcttcacagatccgcctgttcggcttcttcgaccgcacacgagcagtgccgtgtcaagaggatcgtgtggcacgggcgcgtggacctgttgaactactgcaaacctgtggacgtctcatcttcatcagtgatgatggcgaccagaacagccacttgtggacgcctggtgattcttacaggtgccagattaactgtaagacggctctcacttcactgacgtagagattgacatcaagcgcgttaccaagaagtacatccctgatcaaagatatggatgaagctagtgtaaagactaagggcataaacagctcatggggcaagaagcctagttgacaaaggaggaaggatgctcttagttactttgacaggctcaaggacttgctgcctcggatcatgaggggaggtgctatcaggcaacaactagtcaagtttaa

SEQ ID NO: 18595 - DNA, 307 bp, Zea mays
  Clone ID: MRT4577_116959C.1
ctggttcaggcggatctcttctaggctcagagggttgaaactctcatcgctcgccctatcacaccgggcatgcaccgtccgatcactgcaaagatactgttacaagcaggccgacatacaccggcagctgactagaaatccactgtacgacgctcccatactacatgcaccgagcgcactacggccacacttcctacttccttatgctcgatgaccccctcctgaccaccgagagcttgcacaggctccctgagcttgatgagaggttcacatggcttaataaaagactcacgagatgccttgcgag

SEQ ID NO: 18596 - DNA, 275 bp, Zea mays
  unsure (1)..(275): unsure at all n locations
  Clone ID: MRT4577_11695C.1
cggacgcgtggggttccagcgaacgcacacagccgccgctgtttcttcatcttcctcgcagcgccggcgctgaggctcgggctctcancgacggcggcancngcancggcttcgcctcccgcctctctccattctcctcgcgccctcgcctccggtcctccgcacaccggtcggttaccctgcgataatggctcatcgtggacatctattatggactgaatggtcaacctcctgctcttatacgccattgggtctttcgctgcaatgagcctctc

SEQ ID NO: 18597 - DNA, 267 bp, Zea mays
  Clone ID: MRT4577_116960C.1
gaagggtaggtattttatgttctttatattatatatttggaacagaggaataaacacctgtgttcgtataaaatcattttaaaacttataattatgaaaggaaagggggaaaaaattttaaagccaagggtgaattttaaacccgggggaagcatcctttcaagaccggaagaatctggaagcagcatcatcggctcctttaatacatactcttgaacgggatcgccctgatgatcacctggtggtagatggcagccagagcaatgc

SEQ ID NO: 18598 - DNA, 386 bp, Zea mays
  unsure (1)..(386): unsure at all n locations
  Clone ID: MRT4577_116961C.1
ttctgctntcacttttgcttccgccgctcacccgaggcgatctggctaacctttgcccgtactctcagttgcggacactcttttccattcaaccggctgtgtctactggcccctgctgctgatttgcctggtcaccggctcctcccgttctgccatctcgctactgcctactgtcagcgggggcgggggcttgcatttgaccacttggccgctctgaacccctctgcttatttccagctgccaactctactaccatttgggctgctcgctacaacacgccccgttcccttcttgccgctgcatctagtgcttgcgttctaccagccgttggtggcttaccccgcaaccctcttactnctgctgctgttgccggcctctgtccaact

SEQ ID NO: 18599 - DNA, 324 bp, Zea mays
  Clone ID: MRT4577_116962C.1
tggtagatcaattaatccggtcagttcatttattagttggattggatcggcagcgcgcaaccccgttcgtctccgttcccgtttgcacggcagtcgtcctagcttcattcgctggcctccctttgatcttcctcggtccctccctctttctcctccgatcccatagcttctctctctgtgtgtgctaaaaacagctagctaggttaggggagaggcagcagagacagggacaatctagagattaacagacaagatcgatcggtcgagcttgcgcgcatgcactgaattgattctcaagcgcgcagagatccatgaactctcatg

SEQ ID NO: 18600 - DNA, 353 bp, Zea mays
  unsure (1)..(353): unsure at all n locations
  Clone ID: MRT4577_116963C.1
ccgccctttattttttttttttctttttatagtatacannattaattgactcttgtggttataggtgatcggtgcaatggggaccgacctaaattggatttaacccccaaaaaaaatcggtttcttttttataaaaaaaaagcccctttatttttgttgcccaggggcattttttgaaaaaaaagggttttttttttttgggggggggggacccccggaccccccccaaaaaaaggggcctacgggttttttttttttacaagacatttgggggaccacttcattacggagccggcgttggggttctcagaaataaaaatatgcggccccatggacttttttttgttcaagtg

SEQ ID NO: 18601 - DNA, 1407 bp, Zea mays
  Clone ID: MRT4577_116964C.1
cattgggtacctcgaggccggccggggtgcctcgctcgagccggccgggaaaaaaagcaaagcgtggacgtacttcaggcggagctgagtccttgagaagaagacttcaagaagagcacatcagtcacaactttcttttggtgagcattttgagaaagttacttacaatgatctagcgcaagcaacaagggacttctcagaatccaacctgattggaagaggaagctatggcacggtgtacagtgggaaattgaaggaatcaaagacggaagtggctgtcaaggtttttgaccttgagatgcaaggtgcagagagaagcttcttggcagagtgtgaagcattgagaagtattcagcaccggaatcttcttcccatcataactgcatgctcaactgtagatacggcgggcaatgttttcaaggcattaatttatgagcttatgccaaatgggaacttggataaatggatacatcacaaaggcgacgaggcagttccaaagcaccgtctaagcttaactcaaagaattgcagttgtcgtcaatgttgctgatgcattggattacttacaccacgactgcggaaggcccactgtccattgtgacttgaagccaagcaacatccttctcgatgacgatatgaatgctctcttggcagattttggcatcgcacgtctctatgccgatcctcagttgacttttgcaggttcaattagttcgatcggtattaagggcacaattggctatatccctccagaatacggaggtggtggccatgtttcgacgtccggtgatgtttatagttttggtatagtgttgttggagattttgaccggtaaaaggccgacagatcctatgttcaccgggggactagacatcatcagcttcgtggagaacagttttccggatcaaatatttcaagttattgatccgcatcttgtggaagaccgccagaagataaatcagccaaatgaagtagcaaacaatgaaatgtaccaatgcctggtggctctgctgcaagtagcactttcttgcacgcgctcattaccatctgaacggtccaatatgaagcaggtagcaagcaaactgcaagcaatcaaggcggcacaacttggaggcaaatccaagtgagattagatgtactccctcgacgagcagcgtaaaccggaatacgagatgactagaaatgtactctagtctagcatacaagtgttgtttaccttgtatatgcatctatggttcaatatggttataccgtcaagcaactacaacatgatatgtaatatctagtatttacacattgaaagcatcgaactatgtatggtttgaaatagttatttactttgtttagatttcttgaattatgtagttcattatttaattgtgagaaaatttaatgagtttatcctctc

SEQ ID NO: 18602 - DNA, 265 bp, Zea mays
  Clone ID: MRT4577_116965C.1
aataacttagtctcctaccatgagcttgttcgcgccacacaaagatttagcgataacaacctgctggggactgggagctttggcaaagtattcaagggtcaactagacaacggtttggtggtcgcaataaaagtgctagacatgcatcacgaaaaagccattggaagctttgacgccgagtgtcgtgtgcttcgcatggctcgccaccggaacctgataaggatactgaacacctgctccagccttgattttcgagccctggtgc

SEQ ID NO: 18603 - DNA, 1973 bp, Zea mays
  Clone ID: MRT4577_116966C.1
cattgggtacctcgaggccggccgggtgaacttgtacttgctggaacaattttaccggtacaattgaggattggatcccaaagttgacgagcctacagctattagatctcaacgacaacaactttgatggtacaatcccatcttccattagtaaccttaagaagttgacacttctagatttttcaaataataaattcactggtacaataccacctagcattggaaacattgaatctctagtcaatttgagcctaagcaacaacaatttcaaagggagaatacctgccgagttcggggaccttaaacaattagtcttccttgatgtttcatcgaacaaacttagtggggaaattcctcaaagtttgggccagtgccaaaatctagccaccattgaaatggaccaaaatattcttacaggaaacatcccgacctccttcagtaatctatatagcttgagcttgctcaatctttcccataacagtttctcaggtcgcttgccagattatctaaatgacctaaagcttctcaataaaattgacctgtcttacaataatttccaaggagagataccaaaagctagtatattcgataacgctacagttgtttcactggatggcaatccaggattgtgtggaggaaccatggatttgcatatgccttcatgccctactgtttctagaagagcgacgatcataagctatttgattaagatattgatcccaatatttgggttcatgtccctcctattgcttgtctactttttagtccttgagaagaagacttcaagaagagcacatcagtcacaactttcttttggtgagcattttgagaaagttacttacaatgatctagcgcaagcaacaagggacttctcagaatccaacctgattggaagaggaagctatggcacggtgtacagtgggaaattgaaggaatcaaagacggaagtggctgtcaaggtttttgaccttgagatgcaaggtgcagagagaagcttcttggcagagtgtgaagcattgagaagtattcagcaccggaatcttcttcccatcataactgcatgctcaactgtagatacggcgggcaatgttttcaaggcattaatttatgagcttatgccaaatgggaacttggataaatggatacatcacaaaggcgacgaggcagttccaaagcgtcgtctaagcttaactcaaagaattgcagttgtcgttagtgtagctgatgcattggattacttacaccacgactgcggaaggcccactgtccattgtgacttgaagccaagcaacatccttctcgatgacgatatgaatgctctcttggcagattttggcatcgcacgtctctatgccgatcctcagttgacttttgcaggttcaattagttcgatcggtattaagggcacaattggctatatccctccaggtatatatatatatacatggtttcacaaccctcccccgtctctctacaaaacattataaatctgcatcttttcatgacttacataaatcaatctactttgtacatatttttctattcagaatacggaggtggtggccatgtttcgacgtccggtgatgtttatagttttggtatagtgttgttggagattttgaccggtaaaaggccgacagatcctatgttcaccgggggactagacatcatcagcttcgtggagaacagttttccggatcaaatatttcaagttattgatccgcatcttgtggaagaccgccagaagataaatcagccaaatgaagtagcaaacaatgaaatgtaccaatgcctggtggctctgctgcaagtagcactttcttgcacgcgctcattaccatctgaacggtccaatatgaagcaggtagcaagcaaactgcaagcaatcaaggcggcacaacttggaggcaaatccaagtgagattagatgtactccctcgacaggcagcgtaaaccggaatacgaggatgact

SEQ ID NO: 18604 - DNA, 334 bp, Zea mays
  Clone ID: MRT4577_116967C.1
ttataagaatgcccttcctactaatatctttagaactaggggatacaattgcatgaaatatcatacacattttctctctctgaccttcttgttctgttcccctttactgaagattcacatgtcctagagatgatctccttcggcgacgcctcctagcttcgacctctcattgaccagcttcgtcttgattcaaagctctttccatacgcttcaatcttgaaagtttgtttaaacaagggcttatgttaagatgaaccttaggggaggaccttctccctaaccccaacagtagccccttgcttggtttcctataacaagctcaatccaaaaaaaa

SEQ ID NO: 18605 - DNA, 556 bp, Zea mays
  Clone ID: MRT4577_116968C.1
ttttttttttttttttttttctttttttttttttattgattcaacttaacagtagcgattaccgagaattagaatcccggaaagaaaaacaacatgaggttagggatgggagaagaatgccgaagccactctacaagggtctagaagatcctagagagggaagtagagaatatatgggagggagtaaacttgataagcaagatgaactgcgtaatctcattccccctgcctttctggtgactgtctctctttgtagtgttcctttagcaacctgggccgtatgggccatttgggctcacattcctaacacttgtgcgagggggggcgacaccgacgctcgcgtgattaccctcattgccctacgtcatcaaggcggcgagcccctgagacgaacaacctttgcgccattggtgttgtgttgcgtgagggggagtgcgagggctccccgacaccatggcctgcaccgacagtgtgaagggtccccaggtctccgattacatttgtgtcctgcattcacagacgatcagcttggttctagacgaagtcactcgatggt

SEQ ID NO: 18606 - DNA, 164 bp, Zea mays
  Clone ID: MRT4577_116969C.1
ctctccttgcgctagaagagaacagaataaagatcggtccgtgctcggttgccggaaatctgtctcacctccccgaagcatgcgagcggggcagcgcgccatgaaggatccgaggatacccctcaatcagaaattgtttttcgcacggagggccacagtggagg

SEQ ID NO: 18607 - DNA, 349 bp, Zea mays
  unsure (1)..(349): unsure at all n locations
  Clone ID: MRT4577_11696C.1
aacctttgggctgatttatgtgcttgtttatgtgcttgtttatgcgtcgggcgaggcactatcataatatcgtctgcggcgcgtagaaggcctcctagaatcataaaaactcctaggacaccaccgtcactccgggcacggacgagtctagcgaggacgataagtcgatagctgtttgcgtaagaaagacctagtgcccttcgagttagttcccttacgctgtcgaagccnctatgggcgtcttaggaaagcacgcggagtcgaaggaaagtgcgaagagcccttagggcgccccggacgggaagcacgacgaattcttcgagtagctacctcatacggccggcggtac

SEQ ID NO: 18608 - DNA, 636 bp, Zea mays
  Clone ID: MRT4577_116970C.1
atccggagacagcacaggcagctccccccataattgcctgtgccactggttgttggactggaagccgcctccccccccccccctgtcctccctctgcatttccccgacctactccccggactgcaatgctactgaagcacctcctccattttctcgccagcctagactatccatgatagagaatgtgtccacatcgaacacaatgaaacgattcttcggtaatactgtttggcatgagcttgtaaaacaattgaaccctagtgagctacgagtctcaacattagttttacactctacacagttccagagcacgaacccttaatgcactctctgtatcagactcacgaaacgctcgctgactttcctctagtaacatctattacatggtaccttccaagctctgtctcgagcatgaggtcattattggctacaatactgtctggttctgaagatggtatttaccatcattgacagattagatgacactcccaagttgctctctctctagaactacactagaagaccacttcgctgcgacacgatgtgtgctcactctcataattactccaaggcttcatatgaccatgcatgagaagacgccgcttcttacttgaaaaacggtcattacagccctga

SEQ ID NO: 18609 - DNA, 444 bp, Zea mays
  Clone ID: MRT4577_116971C.1
ggaatacaacagttgatattcattaatccaaaacagctccactaattaaaaagttgtcacacatggggaacacaggataggagagaagaacaggagccaaccaggattccaccatccgtaacttgcttccagaagcaaaagaccagcgtcttacaacagatactaagacagatagagacaccgaaaataccaaccaaagaaacaaacaccgctgcccaggcaacaacctggcacacgaaacagccagcaaaagaacctgggcgacccacaggcaagtaccccagcgacacaacatgatgcactagaactacccccacaactcaaattacaacttatagcatttcagaagcctcgataataggagccttgaggggcgtcaccttgctgcccttcttcttgatcccttccttttccatccccagagttgccagctccataattgca

SEQ ID NO: 18610 - DNA, 222 bp, Zea mays
  unsure (1)..(222): unsure at all n locations
  Clone ID: MRT4577_116972C.1
aggacacaccggccgggaggggagcggcgagccccgaaccccgagacgacccaagaagcagagnnacgacaagacggncaccggaaagacgaggacccgcgagggggaggccncggacaccagggacaacgacaagggcaagagccaggacaaggaaggcanacccccgggaccaagagggggggggggggcgcggggaagcagaaagaggacgggcgcaca

SEQ ID NO: 18611 - DNA, 501 bp, Zea mays
  Clone ID: MRT4577_116973C.1
tcgaggcggcgggatctcatcccctaagcgcttggaagtgcgagggcagcttgcttagctacctcctggctctcgctcgccggcgtcatcagtgaagaccggggacagcaagggcctcgtcggcaactccatctccggaatgaatctcgccgtcagcaggacgtgggcccgatccatcctgaaggcgcgcgcagccgccgtgtatggcccatcacggtcatctatatggtactactattgagctacgacgacatcacatgaaccacaggatagggggacctctactgttctgaagcgccgtcatcctagaacccgctacggagaaagcgcttcgagataatggtgctgccgataaacgagagaggaatgctgtgcaagatcctgttgttgggggtggtttcactgctggtctacagactggtgctggtgccatcgaacctgctgacgtagcttaaacggaactcagaagacatgcagtaacgctgccaggtatcaagatct

SEQ ID NO: 18612 - DNA, 131 bp, Zea mays
  Clone ID: MRT4577_116974C.1
cggacgctgggcgggacgcgtgggcggacgcgtggtcggacgcgttggggagaaattgcaaacctgtcactatccgagcatacatcgtcgagcacactcttgcaattatctccccgagttcggtttagtag

SEQ ID NO: 18613 - DNA, 419 bp, Zea mays
  unsure (1)..(419): unsure at all n locations
  Clone ID: MRT4577_116975C.1
tcgtccactcaaacatctacacgtaccatttttatgtaagtttcnttcactgttntatagttttcctacatatggagccgggaaaaantaatgttaccatctaccatacaaaattttccccgttttctgtgcttttttctgtgaaatctgtaaaatccttatataattcctatgaaattcctgcattccataggggcctcaaaatgttatatgtagaataagaattggtacacctactatttgtgttgtacatcttaagtaactgttgttagcatagtcgagaatagttggtctaaaatacatttagtccatgtttgtttgggcttcccagagactttggaccttttaaaatccaaagaactcctacaaacaaaaaaaatcaaaggctcactatactaaaagacgtttagatttttaaa

SEQ ID NO: 18614 - DNA, 833 bp, Zea mays
  Clone ID: MRT4577_116977C.1
tattatttcgcatgcacgcggcgcgtacgcttctatcctctccaacagccggccgcttttttttttttttttttagaaaatcgaaattgaataccatcaatagagacatgaaatccatatacacctaatcaatagccattgtcttgacctaacttatattgtctctacaaaacacacgtctaacccaaaagttactccaacgaaacgagcaaaacatttacaccccaatcagtcactcacgccttgtgtgtgtcctccctgtttcagctttcttgacacctgcacggttcatttgtcactcagacactcacatccctcaacctcgggttcaggctcagtactaggatgcccccatttcagacttgtagcatgtccctgtgacgccttctctgcgtgtggaattggtgacgatcgccgatgaactcacagtaatcacccttggactctccagggctccttgttgagtaacgatcgtcccattgtcttggtcacgatggtcagaaaaggtggtgccataccgccacgagatcacctgttggatggcgggttcttctcaagggatcctggagcaaacaccgggaaggactccgcagttcgtctcctctctcccccagtgccatcgttcctccttgtctccggcggcactcccgcgacagcttcattcctccgagggtcagcagcagcagcacccagaagcggtccaccaaagaatatcgactgcccagtgtatgccaacctctcggacggctgtccagatggcaacgctgaggacgaaggattcatggatgcgagagttcttccatggttgccagttactggccttgtgggcgccg

SEQ ID NO: 18615 - DNA, 546 bp, Zea mays
  Clone ID: MRT4577_116978C.1
cacctgtgattgatcaatgcgtgtcattgaccgaaacctgcctcctcagaggcttcctctcgaatcgccttcgactcctcccggacattcccatcctgcctcttcacttggctttcattctttgctcctggtcccggtagcttcctcaatccttgctgctctctagctccatcattgaggcgccacctggacaggcaaactcctgtgggaaacgcccggctgaacaaacttcacaagagggtgaacgcccgcacgacagatgttgagggcgtagcaaatttccatgaaatgtacaagatttaatccgttcattagaagaaacaagcttgcatttcaaaaaaaatggtagtcttgcctggcatctgaacttgtgaagcaacaacatcaagatccaaaattactagcacctgctaattttctcaatccttttctttccatgatctgcctcactttgtcactgtggttccagtgacctccagccgcatgcaagttggaaagcaagacgtatccaccttcttctgctgggtcaagacgaaggagttcttt

SEQ ID NO: 18616 - DNA, 242 bp, Zea mays
  Clone ID: MRT4577_116979C.1
ctcagctagacatctatcctacactgattattatacatctaggtcggagaggctacccctaccatgaacccacatatacacatacgcttatcgcccatgacatgatgagcaggcggcaggagcaccggctggatgcggtgcgatacaatccgggtttgaccttggtaatgaccgtggccacccacggcaggaaagacatggccagaagaacttatccttatatgaaggagcatggcatcgct

SEQ ID NO: 18617 - DNA, 1169 bp, Zea mays
  Clone ID: MRT4577_11697C.1
agcgacatgtcttgcattccagcttaactaaatggtcaaacaaatgacgtgggaaaacagaatggcacaaagatcagacttggcagtccgttaccaaaaaaataactcgagacccacgcggcccacgcgtccggagtctgctgacctgctatagcttcattcaaaaggaaaaaagaaagaaaaaactcaacggttacatcataaatgatccctcacagactgttccttgttctgctctgaataaaaggttggagtgatggttctcttcctaggtagtcggttattatctccaggggatcttttgagcgggttgctgccggttccctgaagttgtgaggctattccatgaatttagcgtggtccatcacgtatccaacagagccaccttttcaagattttcaggccttcgactggagggtgactttgctgaaattccaagcctgctactcgagaattggtgctatgagagtatttctctgaaaatgatgtccggcttccatcaggacattacgaaatccataagtagtgaagcttgccaatctctgaaaagaaggcgtgatttgtttgctggcctgaaaatgaaacaagagatacttttgtgccttgttgatcagataatacattcaagtgagaatgtggacattgatgacttaatcaaggatcttcaccccaaggtaatgttgggtatacctttattggaagggaccagtccagcttcaagttttcctcgtattgcctttggctatgatgctgtgtgctacagttacatatggagtgaggtgtttgctgctgatctttttgtatcaaaatttaaagatgacttgctcaatcagcatgctggattgcggttcagaaacaaggtgttggctccaggaggctcaaaagatcccctggagataataaccgactacctaggaagagaaccatcactccaaccttttattcagagcagaacaaggaacagtctgtgagggatcatttatgatgtaaccgttgagttttttctttctttttttcctttttgaatgaagctatagaaggtctgctgactgtctcgagatatttttttttcgtaacagactgataagtctgatctttgagccattctgttttccgacgtcatttgtttgaccatttagttaagctggaatacaaaagatatcgctaac

SEQ ID NO: 18618 - DNA, 204 bp, Zea mays
  unsure (1)..(204): unsure at all n locations
  Clone ID: MRT4577_116980C.1
gcgaagcttggatcctcagagcggccgttctctttttgtttttccctncnngggataattaactaaggggacttttaccgaccgtggtggattgcgccataacctcaatgggatacacagacatgccttcatggaacaaaacacgtcgcagaacctctgtctcataaaaaaagaccctctggctacctactggagcaagaccaa

SEQ ID NO: 18619 - DNA, 417 bp, Zea mays
  Clone ID: MRT4577_116981C.1
gcggccgcgctttcctttttttttttcattgaactcggggttaacccatgaatatgccaaacgcggacctaataagccctacaaaaatatagggcacagaacaaccaaagggcgaccaggttataggcccaaccagcttaaatcacctgagtttcttattaaggggggggacaaatatctgacagcattgttttccatatatcacttctccacctgagggaaaaaatgcaacctgtggcgtgcaaaactacatgcgatcacctatatggcctgtttttcattaatcccaatatagcccttgagattacggtgcggaggcaattaactggcctagggaaattaccaatatgtcgctttagaaagtccaaaaatgacaagcttgattctcccaaagaaaaggcaggaaaaccggagtac

SEQ ID NO: 18620 - DNA, 379 bp, Zea mays
  unsure (1)..(379): unsure at all n locations
  Clone ID: MRT4577_116982C.1
ccggaaatagcaacatctttcccccgggggcccgggtcggttggggcccccccccggtttttaccccggggcggggtttcccccccgattggggcggcttccccaaacaacccgactcgttgacggcccctcggggggccaaagggtccggcccgggcggggccctcacccccccaggggtccctttccaaaaaacttgggccccgcccctcgttgaggacccccttccaaacaacaattgggggggggaggcccccccattttcaagctgggctgcccccggttcgccccccgttcctaggggaacccccggaggtttcttcccccccccttttttntttgcccaaacccaggggggtgccccccccccgggatttcc

SEQ ID NO: 18621 - DNA, 1158 bp, Zea mays
  Clone ID: MRT4577_116983C.1
atcgaggccggccgggattccgtcgtcgtcgtcagcagcttctgcttgctctggggggaaggagagagagagagcgagagagatctagtagagaggctagctaggtggtcctcgaacgaagatgttggcggtgttcagcgggcaggtggtggaggtgccggcggagctggtggcggcgggcagccggacgccgtcgcccaagacgaaggcgtcgcagctggtggggcgcttcctggccgcctccgagccggccgtgtccgtgcagctcggcgaccacggccacctcgcctactcccacaccaaccaggcgctcctccgccccaggtcgttcgcggcgaaggacgaggtgttctgcctgttcgagggggtgctggacaacctgggtcgtctgagccagcagcacgggctgtcaagcaagggcgccaacgaggtgctcctcgtcatcgaggcctacaagacgctgcgcgaccgcgccctacccggccagcttcatgctcgcccagctcaccggctcctacgccttcgtcctcttcgacaagtccaccaactccctgctcgtcgcatccgaccccgagggcagggtgccgctcttctgggggatcaccgccgacggctgcgtcgccttctccgacgacatcgacatgctcaaaggctcatgcggcaagtcgctcgcgccgttcccgcaaggctgcttctactccaacgccctcggagggctcaagtgctacgagaaccccactttcaaggtggtggaagggtctactgtcctgacggcgctgcactgatctatcatcatcaggcggaggcgatgcgatgatgatgcagaactttgtacatgcgttggtggatggtggtgtaacatagtggctgccaacaagtcatgctcatgcaaaccgatgaatctatctctgtatcgtcgatctcggttgcttgctagtccagactccagacatggctatatatatatagctggtgctaataaataggagtataatcgtcatatcgatcggttgcgtgtggaatgccaatcatgtgtgtaatctgttggcaaataacaaacctctgttcctcccaaaaaaaaaaaaaaaaaaaaaaaaaaaaaaaaaaaaaaaaaaaaaaaaaaaaaaaaaaaaaaaaaaaaaaaaaaaaaaagcttgt

SEQ ID NO: 18622 - DNA, 656 bp, Zea mays
  Clone ID: MRT4577_116984C.1
cccttcctcgagtttttttttttttttttttttttttttttttttttttttttttttttttttttttttttttttttttttttttttttttttcaaaaaaaaatgttaacccccatagctcgcatccggttcctttgcataattactttcggcttgcttgcaaaaaacccatgacagaggggttgctgtcaactgtcccctacaaaggttactgccccaggattcgaaatcctgagcttttgatgttttttaaaaattttttcttttttggtttgaaaaggaaattgttgtaaataaaaagccttgcaaccaatttcccgattttttaaaaaaaaaaaggaaggaccgggaccttgtcaataatctaaatggggttgaccgaaccccataatgcagtttctggggaaaagcctataccagttagggcaaaaatgttttccggggggctaaaaaagctcgggacgtttttttatgctcccggtcccggacaattccaacccgtcctgggcagccttggaaacaacaggggggttccttattagtttgcctgcaccacccccccaaaacggtggggccaaggcaagtttacctgaaagcctgggagggggcacccgcggggggcggccgccggaaagggtccttttgccggatggcgg

SEQ ID NO: 18623 - DNA, 900 bp, Zea mays
  Clone ID: MRT4577_116985C.1
gcagcttctgcttgctctggggggaaggagagagagagagcgagagagagagagagatctagtagagaggctagtaggtggtcctcgaacgaagatgttggcggtgttcagcgggcaggtggtggaggtgccggcggagctggtggcggcgggcagccggacgccgtcgcccaagacgaaggcgtcgcagctcgtggggcgcttcctggccgcgtccgagccggccgtgtccgtgcagctcggcgaccacggccacctcgcctactcccacaccaaccaggcgctcctccgccccaggaccccgagggcagggtgccgctcttctgggggatcaccgccgacggctgcgtcgccttctccgacgacatcgacatgctcaaaggctcatgcggcaagtcgctcgcgccgttcccgcaaggctgcttctactccaacgccctcggagggctcaagtgctacgagaaccccaagcacaaggtcaccgctgtccccgccgacgaagaagagatctgcggtgccactttcaaggtggtggaagggtctactgtcctgacggcgctgcactgatcgatcatcatcaggcggaggcgatgcgacgatacagaactttgtacatgcgtggtgggtgtaacatagtggctggcaacaagccatgctcatgcaaaccgatgaatctatctctgtatcatgcatcgatctcggttgcttgctagtccagactccagactccagacatggctatatatagctggtgctaataaataggagtataatcgtcatatcgatcggttgcgtgtggaatgccaatcaagtgtgtaatctgttccaaataacaaacctatgttcctccaaaaaaaaaaaaaaaaaaaaaaaaaaaaaaaaaaaaaactcgaggagggg

SEQ ID NO: 18624 - DNA, 383 bp, Zea mays
  Clone ID: MRT4577_116986C.1
cgacccactcttcctcagactccttatctccacttcactccattccccttacctaccccaccatttacccttcagccgacatccgaactaaccaaccaacccacactccactactagcgaataaagcgtccaatgctagctattacggcctcgcagcaacaccatcaacaacatcgcctcctacgcgtaccctgagctcaacctcccccctgtcttaccgtttcacccgactgacgacgatctggtggcgcactacctctacgcacgctccatgtctcgccacccgccggtatctatcatcgtcgaagtctacctgtaccgcttcgacccctgtgacctgcctaagcgctccctcttcggactccgctagatgtacttcttca

SEQ ID NO: 18625 - DNA, 950 bp, Zea mays
  Clone ID: MRT4577_116987C.1
attccgtcgtcgtcatcagcagcttctgcttgctctggggggaaggagagagagagagagcgagagagagatctagtagagaggctagtaggtggtcctcgaacgaagatgttggcggtgttcagcgggcaggtggtggaggtgccggcggagctggtggcggcgggcagccggacgccgtcgcccaagacgaaggcgtcgcagctggtggggcgcttcctggccgcgtccgagccggccgtgtccgtgcagctcggcgaccacggccacctcgcctactcccacaccaaccaggcgctcctccgccccaggaccccgagggcagggtgccgctcttctgggggatcaccgccgacggctgcgtcgccttctccgacgacatcgacatgctcaaaggctcatgcggcaagtcgctcgcgccgttcccgcaaggctgcttctactccaacgccctcggagggctcaagtgctacgagaaccccaagcacaaggtcaccgctgtccccgccgacgaagaagagatctgcggtgccactttcaaggtggtggaagggtctactgtcctgacggcgctgcactgatcgatcatcagctggcggaggcgatgcgacgatgatgcagaactttgtacatgcgtggtgggtgtgtaacatagtgtggctggcaacaagccatgctcatgcaaaccgatgaatctatctctgtatcatgcaccgatctcggttgcttgctagtcccgactccagactccagacatggctatatatagctggtgctaataaataggagtataatcgtcatatcgatcgattgcgtgtggaatgccaatcaagtgtgtaatctgttccaaataacaaacttctgttcctccaaaaaaaaaaaaaaaaaaaaaaaaaaaaaaaaaaaaaaaaaaaaaagaaaaaaaaaaaaaaaaaaaaaaaaaaaaaaaa

SEQ ID NO: 18626 - DNA, 368 bp, Zea mays
  unsure (1)..(368): unsure at all n locations
  Clone ID: MRT4577_116988C.1
gggacccttggggaacttttggttggttttggggggaaggagagagagagagaccgggagggagatctagtagagaggctagtaggtggtcctcgaacgaagatgttggcggtgttcagcgggcacgtggtggaggtgccggcggagctggtggcgagcggcaaccggacgccgtcgcccaagacgaaagcgtcgcagctggtggggcgctttctggccgcgtccgagccggtcgtgtccgtgcagctcggcgaccacggncacctcgcctactcccacaccaaccaggcgctcctccggcccaggtcgttcgcggccaatgacgaagtgttctgcctgttcgaaggggtgctggacaacctgggtcg

SEQ ID NO: 18627 - DNA, 207 bp, Zea mays
  Clone ID: MRT4577_116989C.1
attcggctctttacaccataaattttacaaactttagaacgcataaaaacccgggggtaactatgaggttgttgcacctaaccctacttcacctggctctcgttgacagcgccaccactacgcatacaatcggggtacgcaactgaaaaccaccgcagcacattcatctatcgccagctgtgcatataacaaatacggctgacactg

SEQ ID NO: 18628 - DNA, 275 bp, Zea mays
  Clone ID: MRT4577_11698C.1
ccacgcgtaaaacactacacgacaccaattttagcagcttgttatgccaccaataatgactctcattaactgcagcatcttcaagatcaagcgcgccctaaaacacccgcaagccccctccgactaatcaccgacgaatcgtttgcatctgtccaatcccaagggccaccacgccgatttactctaactggcggccgtattcgacgtcacggtcaccacctattctgtcaaggccactatcttcgatcactaccttaagaaaaacaaggccaaca

SEQ ID NO: 18629 - DNA, 437 bp, Zea mays
  Clone ID: MRT4577_116990C.1
acgaccgacgcgtgcgcctcgtccgacgcgcgtggggatggggacctaacgctaccttccttcagcgagcgcctggggaccgcggcggcggcgtcccagtgcgccgccgagccgagtagcccggtgcaggaccctgtcacccatctctacacatccacgacgagcctaaacgacgaggggcccaagtacgacctcgagctatccaagaaagaccaccggaagcatgggttctgggggcttgtggctcagaaagccaaagtcatgctggacgaaaacggcacaccacgccctcaggctaagacctctgaatcgctctggtcctacgatcgggtccaaggatcgttgggaggcaggctggacatcagagggaagatcaaggacgttcttcagcaggagggccttgctgtggtggccgacagcacgacgcccggcaccag

SEQ ID NO: 18630 - DNA, 1834 bp, Zea mays
  Clone ID: MRT4577_116991C.1
accatacactatctcttcatacactctatctcttccttctcccaacccccgctcaaaccctagctcaacgccacaggctcgccgactttcgcccggccgccgccggggacgatggcgaagcctcggcgcggccgctccgcgtctcgctcctcctcgggatcttcttcccgctcgctgtcccactccgtctcctccggctctgtctcgtcccgctcccggtcgcgctcccgctccttctcgtcgtcgtcctcccagtcccggagccgctcccctcctcaggctaagcgcagttcgcctggagcacggaaagggcgatcaccttcaccgccccctaaaaagggttcaccttcaaagaaagtccgttcgccatcaccaccacttaaaaaggcttcaccccctaggaaagtgtcgcctcctgctgaatcagctgttctctgcattgatcatttatcaaggaatgttaatgaggctcacttgaaagagatatttggaaactttggcgaagtggtgaatgtggagctatcaatggaccgaatggttaaccttcctcgtggctatggatatattgaattcaagaagagagctgatgctgagaaggctcttcttcacatggatggtggtcaaattgatggaaatattgttaagttgagattcactcttcaaccacgccaaagggctgcatcacctatgaaagctccgccccctcctccaaaaagagatgctcttcagattgaaaaaggtgttagcagtgctgaaaaggatgcccagcagcgtcctaaggaatcatctccacgaaggaaaccagcttcacctctacggaaacgatctccaaatcgaagggctgaatcacccaggcgtccacctgacccatcacctaggcgccgtcctgattctccgcctatacgtcgccgaccagatccttctcctgtcaggcgtggtgacacacctcgcaggagaccaccatctccagttcgaaggcgttctccttctccaccacctaggaggcataggtcaccgatgcgtctttcacctaggaggggacgtggtagcccatcaccacgcaggcgctcccctgggcctcttaggcggcgctcaccacctccaaggcggttgaggagcccaccaagaaggccaccacctccacgtcgcttcagtcgctctcctcctcgccgaccccttcgctcccagatcaatttctccaagaaggggacgagggcctccattgaggcgtggtaggtcagactcatcatattctcgatcacctactccaccaccaagagaaggggccaaggagggtatcaaggagccgcagccctagaaagcctcccagaggaagaagcgtctccagtgacagccgaagcagcagttcaccttcccctagacgtggcaggtagaaggaacccgttgcattgtgtatgcggcaggtaaagccttttatcccttgactcagatcaagtgttggtttgaggagaagataaaagaaccctacggcaatgcttccagcggatctgcttaacatgcctggtgggctccctggcttgtgatttgtacccgagacagaattatctgccatgtgacatctggctcatgtacttgattgtaccccaagtatgttgaacttgtttccgcacaggagtctggatcttttttttttgcattaaaccattgtgctacttggtctaaagcgttactgggtctttcgtttcaggagtctggatctttttttttttgcattaaatcattgtgctacttggtctatattgttttgttggatagagttcctcagcattgccaccgtatgaaagatgaatctattgatcaaccaatttgtgca

SEQ ID NO: 18631 - DNA, 579 bp, Zea mays
  Clone ID: MRT4577_116992C.1
gggtacctccgagccggccgggattccgtcgtcgacgtgagcagcttctgcttgatctgccgggaaggagagagagagagcgagagagatctagaagagaggctagctaggtggtcctcgaacgaagatgctggcggtgttcagcggacacgaggtggaggtgccggcggagctggtgctggcgggcatccggacgccgtcgcccaagacgaaggcgccgcatctggtggggcgcttcctggtcgcctccgagtcggtcgtgtccgtgcagctcggcgaccacggccacctcgcctactcccacaccaaccaggcgctcctccgccccaggtcgttcgcggcgaaggacgaggtgttttttttgttccacgccctgctggacaacctgcgtcgtctgatccagcagcacgggctgtcaagcaagggcgccaacgaggcgctcctcgtcatcgaggactacaagacgctgcgtgaccgcgcgtcctacccggtcagcttcatgctcgcccagctcaccggctcctacgccttcgacctcttcgacaagtccaccaactccctgttcgtcgcatccgaccc

SEQ ID NO: 18632 - DNA, 903 bp, Zea mays
  unsure (1)..(903): unsure at all n locations
  Clone ID: MRT4577_116993C.1
attgggaacctcgaggccggccgggaatctcttccgttccgtccttccccgaactcgctcaaaaccctagccaacgccacagggtcgccgccggtcgcccggccgcatccgctgccgccgctgccgccggggacgatggcgaagcctcggcgtggccgctccgcgtctcgctccacctcgggatcttcctcccgctcgccgtcccactccgtctcctccggctccgtctcgtcccgctcccgctccttctcgtcgtcgtcgtcccagtcccggagtcgctcccctcctcctgctaagcgcagttcgcctggagcacggaaaggacgatcaccttcaccgccccctaaaaagggttcaccttcaaaaaaagttcgttcgccatcaccaccccctaaaaaggcttcaccccctaggaaagcgtcgcctcctgctgagtcggttgttctctgcattgatcatttatcaaggaatgttaacgaagctcatctgaaagagatatttgggaactttggtgaagtggtgaatgtggagctatcaatggaccgaatggttaaccttcctcgtggctatggatatattgaattcaagaagagagctgatgctgagaaggctctactttacatggatggtggtcaaattgatggaaatgttgttaagttgaggttcactcttcaaccacgccaaagggctgtatcacctatgaaagctccaccccctcctccaaaacgagatgttgctcagattgaaaaaggtcttagcagtgctgaaaaggatgcccagcagcgtcctagggaatcatctccacgaaggaagccagcttcaccaccgcggaaacgatctccaaatcgaagggctgaatcgcccaggcgtccacctgacccatcacctangcgtcgtcctgat

SEQ ID NO: 18633 - DNA, 575 bp, Zea mays
  unsure (1)..(575): unsure at all n locations
  Clone ID: MRT4577_116994C.1
gccggccggngatgcatagactccagttctcctctctccctctctctgtcttaaaaatccagcgccaacgcggccgccggacgcgcattgctctccctccccgcctcgtctcctcacttcattctcgccacatcttcctctgctcccctcctcccaggtggcgttcttggagctccagctcctcgagctgcgtctgtctacgcccgcttgggtggcggcagcccgcaatggggaggagctggtggcggcgggcagccggacgccgtcgcccaagacgaaggcgtcgcagctggtggggcgcttcctggccgcgtccgagccggccgtgtccgtgcagctcggcgaccacggccacctcgcctactcccacaccaaccaggcgctcctccgccccaggtcgttcgcgttttattatttcgcccccccccccgccgagggggtgctggacaacctgggtcgtctgagccagcagcacgaaaaaaaagcaagggcgccaacgaggcgctcctcgtcatcgaggcctacaagacgctgcgcgaccgcgcgccctacccggccagctccatgctcgccca

SEQ ID NO: 18634 - DNA, 394 bp, Zea mays
  Clone ID: MRT4577_116995C.1
aacaataaacacccaagtgggtttattccataaaaaggctaaaaaatcaacatacttcaaatttgttcacacacagagataaagacttattacacaaatttaactttcataacacaaacaccttcagccactgaactgtctgcaccacctctgcaaccaacctatccttccctcatatgttctaaagcttgagaaaactgatcggttgtacttttttgtcaaacaactatgttgccacccaatactcatctgaaacttctgatatgccatagtccacatctagtttcaaacaccttcctatgttttcaattttgttttgcatatcaactacaatttccctcctcctttgatctgccctttctttagatatttcaactaatgtttcccattgagc

SEQ ID NO: 18635 - DNA, 1009 bp, Zea mays
  unsure (1)..(1009): unsure at all n locations
  Clone ID: MRT4577_116996C.1
tgttcgactcgctcaaaaccctaccaacgccacgggtcgccgccggtcgcccggccgcatccgctgccgccgctgccgccggggacgatggcgaagcctcggcgtggccgctccgcgtctcgctccacctcgggatcttcctcccgctcgccgtcccactccgtctcctccggctccgtctcgtcccgctcccgctccttctcgtcgtcgtcgtcccagtcccggagtcgctcccctcctcctgctaagcgcagttcgcctggagcacggaaaggacgatcaccttcaccgccccctaaaagggttcaccttcaaaaaaagttcgttcgccatcaccaccccctaaaaggcttcaccccctaggatgctgtatatgggctaacggtacaaaggatcttcaaaattcttattatattggatgctgcagcttcccacattagaaagcgtcgcctcctgctgagtcggttgttctctgcattgatcatttatcaaggaatgttaacgaagctcatctgaaagagatatttgggaactttggtgaagtggtgaatgtggagctatcaatggaccgaatggttaaccttcctcgtggctatggatatattgaattcaagaagagagctgatgctgagaaggctctactttacatggatggtgtatgcattctaccctatgcgtattctgtctttttttgttgaaaagtaaatgccaacaagttttaaaaatttgcacagggtcaaattgatggaaatgttgttaagttgaggttcactcttcaaccacgccaaagggctgtatcacctatgaaagctccaccccctcctccaaaacgagatgttgctcagattgaaaaaggtcttagcagtgctgaaaaggatgcccagcagcgtcctagggaatcatctccacgaaggaagccagcttcaccaccgcggaaacgatctcaaatcgaagggctgaatcgccccagcgtccacctgacnccatcactangcgtcgtcctgattct

SEQ ID NO: 18636 - DNA, 1910 bp, Zea mays
  unsure (1)..(1910): unsure at all n locations
  Clone ID: MRT4577_116997C.1
gggtaccctcggcttcgcggcgggacttgcttcaatactagctcgctcaccactcaccagtcaccagtccagcaagcaacaacaaaggcgtaggaggaagcttgttttggaccgagcaagcgagccagccgagcgtgggagagagagaaagaggaattaattgatgggcgaggaggccagctgcgacgccgtcagcctgacggaggccggcaccaacgccaagccggtgggcaaggaggtcggccgcgagccggctgcagcccccgccgccgcggccgacccccggctgcagggcatttccgacgccatccgcgtcgtgccgcacttccccaagcaaggcatcatgttcaacgacatcaccacgctgctgctgcgccccagggtgttcaaggacgccgtcgacctgttcgtcgagcggtaccgcgggatgggcatcgacgccgtcgccgggattgaggccaggggcttcgtgttcggcccggcgatcgcgctggctattggcgctaagttcatacctctgcgcaagccaaggaagctcccaggtgaggtgatctccgagaagtacgttctcgagtacgggactgattgcctggagatgcgtgtcggggccatcgagcgatccggcgagcgggtgctggtcatcgacgacctggttgcgaccggagggacactctgtgctgcgatcaggcttctagaacgtgctggagccgatgtggtcgagtgcgcgtgtgtcattgggctcccgaaattcaaggatttgtacaagttgaatggaaaacctgtatacgtgctggttgagtctcgtgaataatcggagaaatgacaacttattctcaggtgtcagagtgatcagggatattggctgtttactccttgctactgcgattgaacagtggagggacgacatggacaaggacaagtatattcggtgcatcactaagtcttggtgaggggagagattgtagtgttttaggctgagtagtgaagagcctgtagttctgcacggaacatgatggttattagttgatgcaacagcgttgctgttctattattgtttgttgttcctgntcgcctccgagccggccgtgtccgtgcagctcggcgaccacggtcacctcgcctactcccacaccaaccaggcgctcctccgccccaggtcgttcgcggccaaggacgaggtgttctgcctgttcgagggggtgctggacaacctgggtcgtctgagccagcagcacgggctgtcaagcaagggcgccaacgaggtgctcctcgtcatcgaggcctacaagacgctgcgcgaccgcgcgccctacccggtcagcttcatgctcgcccagctcaccggctcctacgcctccgtcctcttcgacaagtccaccaactccctgctagtcgcatccgaccccgagggcagggtgccgctcttctgggggatcaccgccgacggctgcgtcgccttctccgacgacatcgacatgctcaaaggctcatgcggcaagtcgctcgcgccgttcccgcaaggctgcttctactccaacgccctcggagggctcaagtgctacgagaaccccaagcacaaggtcaccgctgtccccgccgacgaagaagagatctgcggtgccactttcaaggtggtggaaggctctactgtcctgacggcgctgcactgatcggtcatcagctggcggaggcgatgcgatgatgatgcagaactttgtacatgcgttggtggatggtggtgtaacatagtggctgccaacaagtcatgctcatgcaaaccgatgaatctatctctgtatcatcgatctcggttgcttgctagtccagactccagacatggctatatatatatagctggtgctaataaataggagtataatcgtcaaaaaaaaaaaaaaaaaaggccccta

SEQ ID NO: 18637 - DNA, 1443 bp, Zea mays
  Clone ID: MRT4577_116998C.1
gaagctggcgagcggcgacgctggatgccagctggggtccacgtcacgtcattagcccgcacctcatctccgcgcacccgcacccggccgccttcgtcttcgtcccgttccctccagtccggctatataacccgcgcgccctcccatccgccgctccattccgtcgtcgtcgtcagcagcttctgcttgctctggggggaaggagagagagagagcgagagagagagagagatctagtagagaggctagtaggtggtcctcgaacgaagatgttggcggtgttcagcgggcaggtggtggaggtgccggcggagctggtggcggcgggcagccggacgccgtcgcccaagacgaaggcgtcgcagctcgtggggcgcttcctggccgcgtccgagccggccgtgtccgtgcagctcggcgaccacggccacctcgcctactcccacaccaaccaggcgctcctccgccccaggtcgttcgcggccaaggacgaggtgttctgcctgttcgaaggggtgctggacaacctgggtcggctgagccagcagcacgggctgtcaagcaagggcgccaacgaggtgctcctcgtcatcgaggcctacaagacgctgcgcgaccgcgcgccctacccggccagcttcatgctcgcccagctcaccggctcctacgccttcgtcctcttcgacaagtccaccaactccctgctcgtcgcatctgaccccgagggcagggtgccgctcttctgggggatcaccgccgacggctgcgtcgccttctccgacgacatcgacatgctcaaaggctcatgcggcaagtcgctcgcgccgttcccgcaaggctgcttctactccaacgccctcggagggctcaagtgctacgagaaccccaagcacaaggtcaccgctgtccccgccgacgaagaagagatctgcggtgccactttcaaggtggtggaagggtctactgtcctgacggcgctgcactgatcgatcatcatcaggcggaggcgatgcgacgatacagaactttgtacatgcgtggtgggtgtaacatagtggctggcaacaagccatgctcatgcaaaccgatgaatctatctctgtatcatgcatcgatctcggttgcttgctagtccagactccagactccagacatggctatatatagctggtgctaataaataggagtataatcgtcatatcgatcggttgcgtgtggaatgccaatcaagtgtgtaatctgttccaaataacaaacctatgttcctccagctgctgctgctgttgtccgtgcgatcatgattcagaactggcgtgggcgccaataactcagaagatcgagagacttgctagtacgcattgtccctcttttgtcgtccatgcttcatgcttgtaatccaactctattatgaaaaccaaaaaaaaaaaaaaaaaaaggccccta

SEQ ID NO: 18638 - DNA, 905 bp, Zea mays
  Clone ID: MRT4577_116999C.1
cttacgcgtggggcttctgcttgctctggggggaaggagtgagagagagcgagagagagagagagatctagtagagaggctagtaggtggtcctcgaacgaagatgatggcggtgttcatcggccaggtggtggaggtgccggcggagctggtggcgagcggcaaccggacgccgtcgcccaagacgaaggcgtcgcagctcgtggggcgcttcctggccgagtccaagccgtccgtgtccgtgcagctctgtgaccacggacacctcaactactttcacaccaaccaggcgctcctgcgacccaagtcgtccgcggccaaggacgaggtgttctgcctgttcgaaggggtgctggacaacctgggtcggctgagccagcagcacgggctgtcaagcaagggcgccaacgaggtgctcctcgtcaccggctcctacgccttcgtcctcttcgacaagtccaccaactccctgctcgtcgcatctgaccccgagggcagggtgccgctcttctgggggatcaccgccgacggctgcgtcgccttctccgacgacatcgacatgctcaaaggctcatgcgggaggtcgctcgcgccgttcccgcagggctgcttctactccaacgccctcggagggctcaagtgctacgagaaccccaagcacaaggtcaccgctgtccccgccgacgaagaagagatctgcggtgccactttcaaggtggtggaagggtctactgtcctgacggcgctgcactgatcgatcatcatcaggcggaggcgatgcgacgatacagaactttgtacatgcgtggtgggtgtaacatagtggctggcaacaagccatgctcatgcaaaccgatgaatctatctctgtatcatgtgaaaaaaaaaaaaaaaaaaggccccta

SEQ ID NO: 18639 - DNA, 1121 bp, Zea mays
  Clone ID: MRT4577_11699C.1
tacacaaaacagaagctcactcgctgctcgttgccggctgcccccgcccactccaccgctgatatttgtcatcgtctcgttcctgccctcggccttcccctcgctcgctccccaactccagcaggcagatcagatacatccattcgcggaccggaagtaatcatcaggaaaggaaggggcgttgaactatgagcgccgtggcggtttcgtcgtcgctgaacccggacgcgccgctcttcatcccggcggcgctgctgcaggtggaggacttctcgccgcagtggtgggacctgatcaccaccactgcctggttccgcgaccactggtcccgcgagcgcgcccacctggacgagatggccgagcagatcgacgcggccggcctcctccccgacgacgaggacctcttctacggcgacgccccgcgggggttccgggagaaacccaggaacgccgagaagccgaccaagtacgccggcagccccaagagcaacgctccccgcgtgatccaccagcctcgctaggttcgctgggggaactcatcaggaaggctgctgcccctcttgcagccttgctcctggctgccgccgctgtcgtggtctgctctttcaagtcgaagtaacggtggttcgagctagtggatagtgccgctcacctgtagaagttccttttgtatagcaagcaagtgggggcccttctgtcgtctctttcagtcgagtgtttcgagttagtgaatagtgtggctcgactgtagaagttccttttgtatagcaagcaagtaaaaaaaaaaatgaccaaaaaatataacaaaatgcagctgtaagtttactgctgctctctaagtcgtgttcagtcatccggtgtgtctagggaaaccccataaaaaatggtgaaggtggaatcccatcccagtgttataattaaggatgcacttcttctgtaagcaaatgtatgatgtacaatggccggccggcagtctaaatgttacagctagctcttcttggtgaattcaccggtccacactgatgtgctgctatgtatcattactatccagttagggcttgttcggttattcctacgccatatggattggacgggattggaaaattttagtagacattttg

SEQ ID NO: 18640 - DNA, 301 bp, Zea mays
  Clone ID: MRT4577_1169C.1
acaaacgagttctgttactatgccagctcgtgatcaatcactagagaagccaacaccagatgattcactggagaaggtgcagccagaagctgatacacgaaccatcgcctgacttgccacagcgtcgggaggcgggtgcaagggttcgacgcaccaactgccgtgagtggtccggactccggagtcggcgtactgtcgcgtgtgtgtctcggtctctgctgtgtggggtcggctgtcgcgtgtgtgtgccttgctgctgcagtgaagggtttatgtattgtagagtgtgatctcgtgacgg

SEQ ID NO: 18641 - DNA, 609 bp, Zea mays
  Clone ID: MRT4577_116C.1
ccccctcgcaaaatctccggtcgtctccagttcccacctcgcgccccaaatccgtatccaccgccaccgccaccgcccaccaccccgccgccaacgctgacgccgcctcctccggctgcacccgtcacgccaggtgcttggacttcgggaatctgcaggttcagtagagtagacaagtgtttgagcaaggactggatagaggaatgcgctgcttgttcctagagtagcacccgcaagatccaagtcttcccgcgatggaaagcggcgccatggtactcggtgttgttcgtcccgaggagtcccctgaccgcaacggcggtgggccacgggacgatttgggcccatcgcagatgcaggtcgatggtcccgttgttctcaaccaatccgctgagctcgtctcggatgattcgatggccgtcgatgacgtcccagttcaacaaccatcaggccagccggtggaggcaacacaacagtctcctgcgacgctgattgatactatcatggaggtgcagaagcagctgaagcggaagagggcttctaatagcccagtgattgatgccgccgataaggacgctcttgttgctgggtgccggcaggagctcgaggggc

SEQ ID NO: 18642 - DNA, 147 bp, Zea mays
  unsure (1)..(147): unsure at all n locations
  Clone ID: MRT4577_117000C.1
accctcgttaaggccgccgtgtgctgnggtatagtcataagtgctgcccgattggctctccaatcagnaagaggcaatgcaggggtcgactcggatgactccccctctaacgccccaaagatgacaccacaggtaccgggaaaatga

SEQ ID NO: 18643 - DNA, 164 bp, Zea mays
  unsure (1)..(164): unsure at all n locations
  Clone ID: MRT4577_117001C.1
aacattttnngcgatcctgaatgcttgcaggtactcttcannnnatttcattggagacttcagatgccactgctgttgtagctctttgtatcgatgccagtgtttctataaaaatagcagctgtgtcagtcgtaaatgcaacaattgccaatgtgttaacctgg

SEQ ID NO: 18644 - DNA, 609 bp, Zea mays
  unsure (1)..(609): unsure at all n locations
  Clone ID: MRT4577_117002C.1
ctcgaggccggccgggnaatttcctgcccacccatttctcgacctttcatcatctcaccccaagaacgcggtcagaccccccaaccgtcagagatgcttcgaaccatatcaactgatcgtcagttctgggtcagataatgctcccaggagatacatagccacactggctgcccttcatctcgcccccaccacgtgccggataccataacccgcaccgctacctgcctggaactggtgccctccatgatatccgcaacgctcaaacaagcactcatctgtggctcaggaagctgccctctcagaggcccctcttctgaagtggacagaactgcaaaactgatttatctctccagagacctgcagcgcttgctacccatgaggctagtgagtgctaccttagctgatctgtttgaactctctcactcatctactaccgtcaaagacccctgccaccacctctccgacgaccttctctccaaggaaatcgccatcgtttgattttcggtttcttctgatccttatatcgccatgaagaccgctgacaaattgtcactgtactacttgatgcgcatccagcagcgcagggggtagtatgcgttgtgctccttc

SEQ ID NO: 18645 - DNA, 256 bp, Zea mays
  Clone ID: MRT4577_117003C.1
gctagatgccctccaatgtgaaggacggttcatttggaaggaggaagctgtttcctgcgttgctaactgcaaggacgataatcatcgtgagaagacttgctatacatcacatcgaggatgacaatcagaagatggacgcggccactacctctgctaaggagactttgctcaacaactatgatacaataccactgcgcaagtacgatagctggagcagtattaataatatgctcgtaacactctatcacttgcaaag

SEQ ID NO: 18646 - DNA, 254 bp, Zea mays
  Clone ID: MRT4577_117004C.1
tcgagccgagcgtcttatcaaagacggcatgctcctctagctcaagagagccacatctgccgcggtagtttacagaagcatctaagggaagcttgttgttgaggatgcctacgctctggagctcaaccgccttcgcatgtgactctcttccaagaaggtccagaacctgcacatagattatgcccatctgcttaaaggagcctttgacattcctctatgggctaaggcagctgaaccgacccctacttagggtg

SEQ ID NO: 18647 - DNA, 207 bp, Zea mays
  Clone ID: MRT4577_117005C.1
gagtgttcgggatatattttaaaatatttatctaatgtcttacctgtgaaggtgcaagcctgggggctgggtacaccatgagagctgtctcactgagtcactaggtcgccagttcgaagcagcctctctatgcatggcttgggaacttgtttagttaaattttggcaactgttcgcttctgtttgtacagatgctgtgagataattg

SEQ ID NO: 18648 - DNA, 554 bp, Zea mays
  Clone ID: MRT4577_117006C.1
gtaatcttttgtggtgccacagatgagaactcttcggatttaaaccgtcaatctttcagccttcattttgtctctcgtgaacaacaaggctctctgtacagaaaaaaaaaaaaaaaaaaaaaaaaaaaaaaaaaaaaaaaaaaaaaaaaaaaaaaaaaaaaaaaaggcggcccgaaaaaaaaaagatcagctaaataccacatgtttgtgaaaatcaattacatgtaatattttttttgtaattaatgaaatgagaactcttcaaagtttaaaccgtcgatttagccttaaaaaaaaaaaaaaaaaaaaaaaaaaaaaaaaaaaaaataaaaaattggaaaataaagagctagaaatggattaacaacttaaatgagttccaaaaaccttgaaaaccgtattgaaaaaagaaaagaagggtcttctgagcaagttctggggttgaaagggggccttttcttaagattaagttcattgtcccattatttgatatgctttgttctttaacggtgtaaaaaaaaaaatttctgtgtctgccttttagattggtgaaa

SEQ ID NO: 18649 - DNA, 574 bp, Zea mays
  Clone ID: MRT4577_117007C.1
gcccactagtgggcggtcgccctttttttttttttttactatgcatattattattatagtatgaatttaaatgtctatgatttcgctccaggtcttcaaatgttcgtgaccagcccgtggcccgtgctgaaaacgaacatcatgtaggcatgtagcacacacgatcagcatccgcacgtgcgggacagtacgtcattgcgcttcttcaatggcgtgagatgaagctcttgatggcgtcgatgagctctcgggttcgttccccagtggcggggtccatgtcgacggcgtacttgttcaggtagaaggagtggctcatgccgcggttgatgagtacctccacttccttgccggcggcgcgcagcgcgtcgcagtactcgaggttagtgtcgcggatgagatcgttctcggccacggacacgagcatcggcggcagcggcacggactcgagcggcggcgcctgcggacccatggggcaagtgaacgggtggtccttggtcgcgccctccggcagcgccagggcgaggaacttgtccagcatgtcgagcgtgaagaacaccgagtccgccttcgtctc

SEQ ID NO: 18650 - DNA, 215 bp, Zea mays
  Clone ID: MRT4577_117008C.1
gacattactgttcagttgtttacttagcgagcggagacggtcaatttggctatgttatgtatggactgctatcagtgacacattggccaagcatggtcatgcgttacgctagtagttcggacactgaattcattaatgagtgactgtagcttaagttaatgcgtgattgagctatgtggaagctatgcgccggagagacctgtggtcaccaagtt

SEQ ID NO: 18651 - DNA, 765 bp, Zea mays
  Clone ID: MRT4577_117009C.1
cgagggcggcctcgaggcgggactgggctccctctcctctggctgccgctctccacagtcctcgggctccaagccttgcgtaaaccccgacccccacgcgcatagatgaagacgaggtcgcagacgtcgccgaagcctctcaagacggtggcgatggctcccaggccgagcagcaccaagcggaagccgaggcccaagccggcggggaagggcgacccccgcgcacccaagaagccacccaccgccttcttctacttcatggaggattttcgcaagatctataagcaagaaaaaccaagtgtaaaatcaatgcaggaaatagggaaggcatgtggcgaaaaatggaatacaatgacatttgaggaaaaggtcaagtattatgatatagctactgagaaacgtgcagaatttgagaaggcgatgattgaatataacaagaaaaaggaaagctgaacatttgtctgttccaaattcccgatggttcactgtaactggatgaatcaatcagctgtatattacagaactttgatttctagtggaatttatagataccactattggaaccgtcagctcacgcagatatgtatcttctgtagtcgacttgcatattttgatgacaccgagtcttttactggtggttttcatctggatataatttgtgtttcgtgctaactgctcgttaaattgcttattatggagttgtatgtatgattgtgtatataataatgtcctccaacgcaaaaaaatatatatattatcacagcg

SEQ ID NO: 18652 - DNA, 419 bp, Zea mays
  Clone ID: MRT4577_11700C.1
aagagccacaaccattattctgaatatgtgtactgcgtaactggaacctaccgatgcaactagagcaacggcacctgctaatcgctctatgtactcactacttaaatatctacattgcatttacattgatataatgtgggggaccgtgtactatcttgtatacatcaggaggacctaaaaggagctgaacattgctatcaatctatgtgcaatggacaaccacatgtccatggggatactcgatgtacacaaaaacaataaatacctgagtacacatatgtaaaactaagtgcataatgtgttaactacaaatggctcactaatattaaagtgtatggaatcatgtaaaagaaaattataacagatctttacaacagaaaagaggccttgtcgcttagtgtacaaaccacaacactgac

SEQ ID NO: 18653 - DNA, 522 bp, Zea mays
  unsure (1)..(522): unsure at all n locations
  Clone ID: MRT4577_117010C.1
ttntttttttttttttttttttttttttttttttttttttttttttttttttttttttttttttttttttttttaagaaaaaacatcccgccgggacacattgaaagggacgggtggaaaggtgggtgggcgttcccattcaaaaaacacactaatttgaagcagggaggggggggacaaaccccctttttgggggggcaagtttggggactcccggaagggaaaaaggtccggacgccgggcaccttatttggggggagaaaccttaccggggggggtcggggcgggggcataatccttgggcttggcccccgggcccttataaccggggcctttcttaacgaagggggaaacggggtaggtcctccccagccccgggggcgttttgaaggggatcttggggggggcgcccctgtcgacaaacatgtgggggagggggacccaaatgaggagctccttgggtttgaccccggttatgcgccttatccgcgggtcctccaaaaagggggggaccttgggggg

SEQ ID NO: 18654 - DNA, 294 bp, Zea mays
  Clone ID: MRT4577_117011C.1
tcgtgtaacttgcgtgggtctcttcctgcgacggaagcaaacactggccgagacataaacagcgggacgtcgagatggcccaccgggaggacgcccgcgtccctcccccacggacctgtatcacaaactaccggaagaagctgcttaactggaaggaggttgaatcgggcgtcggccctcggagggaaagctcttaaaacggcaaagaagggtttttccaaggctttggacgagttaaaagctgttgagagcggggggctaattagtggcgaagtactccgacctgttgataat

SEQ ID NO: 18655 - DNA, 212 bp, Zea mays
  Clone ID: MRT4577_117012C.1
tcggccgccccccttttttttttttgggatgttcaaaaagataacggcttgaaaaacctaaaaacaggggcaaaatacttacgttccctttccacttattttacaaaggctgattattaggtggtaatacaaggtttactagtatactagccaccactctagctgtgacaaaaaaacattttcaccgttcttggagatatgaacaaattggc

SEQ ID NO: 18656 - DNA, 185 bp, Zea mays
  Clone ID: MRT4577_117013C.1
ctaatatacattgcaccgcctgtacatgagcatcatgtatcgttgttgagtttgtaaaacgcacaacaatgctggacactgtcaaggttgaaaagcaaattgaggggtttggtctgtatgacagcatagatgttgtggtcggaaatggaactaaggaacctgaagaccacctcttcaaactcaag

SEQ ID NO: 18657 - DNA, 279 bp, Zea mays
  Clone ID: MRT4577_117014C.1
agagttacggacaccggttttaggattatcgattaagggacatggttttttgaacaaagttgctggccttcttcgctcgggtggtataggcccatgcattgtgttccgttggaacgagccccataacacacgaaagccaggagctcattggccaagcgggtaaacataaatcgagcaaaacgctagatgtcgaattacatagatgggagcgtgattaaaatggcgtcgtacggggtcatgaatttttcgtacgggttaacctaagcccatttggtctat

SEQ ID NO: 18658 - DNA, 239 bp, Zea mays
  Clone ID: MRT4577_117015C.1
ttcacgcgttcgaactgttccttcaacttcatcatcgtcgtcaacgtcttcaaccagggcgacctttctgttggttatcacctggcaccctatgcatttcttgaagaactaggggatcgacgggatgcctggcacgcaatgcgcgattctgcctaacaccgacttaacgtcccgtggcagtccaaggtccacatcctcagctttttctacttcctatccatcggtgtgcaaaaggcatt

SEQ ID NO: 18659 - DNA, 371 bp, Zea mays
  Clone ID: MRT4577_117016C.1
accgatgcaactaataaatatccttctttcccttctcattttccatttcgatgccgcgcactgctcccaggctgctgtgcgcaatttacaaacgcacaggcggcacatgaactagcacagtagctctatcttgaaaggaaaccgtatttgccgtacatgaaccatgagctgctattcttgagaccggtaaaccatgtaacatgctagataatcaataaagtgcgtcatatggctttcctgctcaaaaaagcaccggggcactaggcgtgcacataagattcgtgcgctcggtcaccatggactcctggaccgaggcgcaactccgaaagatggagggcggcggcttcaaaggacccaacgcctttctcaca

SEQ ID NO: 18660 - DNA, 427 bp, Zea mays
  Clone ID: MRT4577_117017C.1
caccatcaaaaggaatgagctactcagaatataaaccatagacccttattaacaaaggctatctaacgcgcgcgcgcacgcgcacacacacacaatgaaagcgagggagaactgaaccatctgaaaccaccaagaggccacgactgccggaatatgaacaattttcataggtaatgacgcgtgatacacctataatgctaatgaaccctaaagaaaaagtagccgtcttaatgacacaagtactggtggcacatcactctacgggaccttacaagatagatccagtgaggatcatctccacctcaagcagcacgggcactaggaacaccaaccagcagtgatgctggaataaacgccctcattttgccagacggagtgaggcccttctggaacacggggagctggcccaaatagagatcgccgccaa

SEQ ID NO: 18661 - DNA, 162 bp, Zea mays
  Clone ID: MRT4577_117018C.1
acaccagcgtccatttgcttttataaaatgggatgggggggattacaaaaacgggggattgttacacagtttgtacctttttgggggtttgttggggggaaattttaatgcaacacatttataactctagcttgattgggggttcaaacagttcatttttgg

SEQ ID NO: 18662 - DNA, 823 bp, Zea mays
  Clone ID: MRT4577_117019C.1
cggacgcgtgggcggacgcgtgggcggacgcgtgggcactccctcgctccgtctaccagtaccaccacgtccctcctcgtcgacgatctcgtagcggcggcgcacatggcgagcgacggcgcggtggccacgccggcgaaggtgaccccgaagaaggccaacctcctcgacccccactccatcaaacacctcctcgacgagaccgtcgccgaggtcgtgaagggtaagggctatgtggagaacacgcggctgggcaactggaagctcctgatcgggacggccgtgatcgccatcgcgctcctcgcgcagttctacccgaagaagttcccgcagaaccgcgagttcctgctcggttgcatcgcgctgtatgtggtgatgaatgtggtgctgctgatccttagctacaccaaggagaaggatgccatcatcttcacccaccctcctgctggttctttcaataacactggccttgttatatcttcaaagttaccaagattctcagacatgtacaatctttcaatagccagcgcagatccagagtctatctctgctcacaagcccgtccacttcactaagagtgttacaaaatggtttacgaaggaaggtgttcttgtggagggcctgttctggaaggatgttgagagactcattgatgactacaacaatgagcgcaagagcaaatgaattactgacccttgtcatcattatcaggatgaagcttagtaatcgaaatagacaatgtttttttatagcagtatactgtttgaaccggtgaatgaagcaccgttaagataatatacatcattgcagtcctttttccctt

SEQ ID NO: 18663 - DNA, 160 bp, Zea mays
  unsure (1)..(160): unsure at all n locations
  Clone ID: MRT4577_117020C.1
acccacaantaattnttctctaaaactttcgcttacccnaaaaaaaaccacaacggcgcgtccnaatacctgtgatacgtgaaactcatacaacaacttcacagatgcacnntcccaccaattcacataacactattaccattccaccaaccacatcacc

SEQ ID NO: 18664 - DNA, 621 bp, Zea mays
  Clone ID: MRT4577_117021C.1
tcgaggccggccgggacggtgtgcttctcttcccactcgcctctcgctctacatgcctcgatcgttccaggagtaataaaacactaaaatggcgatggcggcggcgaggagagcgctcctggcccacctccgcgtgccggtggtccaccctgcagcggcggcagcgaccatccccgcggcagggcggctcctgtcgtcaagaacttccagaaggtcgaaccctcaaaggtgacacctagtgctcattttcagaaggaccttggacttgatagcttggacactgtggagatcgtgatggcgtttgaggaagaattttcctttgagattcctgacaacgaagcagagaagattgactccatcaagacagcggttgatttcattgcttcgcatcctcaagcaaaataagaggatttcttttttttcgtatttcaaagtgtgttttgcatccagaacttatgcgacacgggactagttttctctagcttgccgcagtagataggaagtcatttctttacctttctgaatccgcgtgtaccaaacgattgttgtgttcttgtgacctcattggtacgctaatccataaatccatttgggctcgaaaaaaaaaaaaaaaaaagcggc

SEQ ID NO: 18665 - DNA, 299 bp, Zea mays
  Clone ID: MRT4577_117022C.1
tttgctctcggtgctcgagcccgagccgagcgcccgtccttgcatatcttggtcggaatagcgaatattcaaatgagaacttctaacgccgaagaggacacaggttccatgtgaactgcacttgcacatggataacccgatcctaagggactgggtaaacccgggagatagctcgatcacgcgcgtcaaccgaaacggaatcgggatcagatttcactagctgtgacgtggcgactgactgcgacgataggaagtccggagactcccgcgggggcctatgcaagagctatcttttctgc

SEQ ID NO: 18666 - DNA, 831 bp, Zea mays
  unsure (1)..(831): unsure at all n locations
  Clone ID: MRT4577_117023C.1
ttgggacccccatggggcacctcgaggccggccgggacgttgcccttctcttccccactcgcctccgctcaccttgcctcgatcgttccaggagtaataaaacactaaaatggcgatggcggcggcgaggagagcgctcctggcccacctccgcgtgccggtggtccaccctgcagcggcggcagcgaccatccccgcggcagggcggctcctgtcgtcgacgacggagagaaagggctcgttcctcgacaagggcgaggtcgctgaccgtgtcgtctccgtcgtcaagaacttccagaaggtcgaaccctcaaaggtgacacctagtgctcattttcagaaggaccttggacttgatagcttggacactgtggagatcgtgatggcgtttgaggaagaattttcctttgagattcctgacaacgaagcagagaagattgactccatcaagacagcggttgatttcattgcttcgcatcctcaagcaaaataagaggatttcttttttttcgtatttcaaagtgtgttttgcatccagaacttatgcgacacgggactagttttctctagcttgccgcagtagataggaagtcatttctttacctttctgaatccgcgtgtaccaaacgattgttgtgttcttgtgacctcattggtacgctaatccataaatccatttgggcttcctttctgcttcaaaaaaaaaaaaaaaaaaaaaaaaaaaagccgagactagttctctctctctctctctcctcgtgcgggtgagatatatttctcaatctcagagttgcatatcagttgaatacttgaatttgaaatgcttnnnaa

SEQ ID NO: 18667 - DNA, 540 bp, Zea mays
  Clone ID: MRT4577_117024C.1
atgggggcggcggcgcgcaggccgcgcaggaaggccaggagggcgctgcgcgtgggggtgtggacgtcggggagggcgctgcacacaggggcggcggcgcgcaggaaggccgcggacacagagtctgggtgcaggacggcggcagccgctacgggggcgacggccggccaggggagagggttggccgcaagggagccgggagaaggggatggaggcgggctgacgacggcgcgacaggtgcgccgggccgttgcccgcgccggcgtggccgcgcccgcgcaagggccacgtgcacccgcgccgccatggacgggccgccacgtccgcgctgccagggggccgcgccgaggccgggcgaacgtctccatgcgcgggttgcggaccagcggggtgaaggacgccgacgacaggccgacggagcccgccccgaagctgacggtggaggaccgggagcctcccagggcgacggctgtagaggttggaggcggccggcggctgttgcgggaggaaggagccgccggctgctgcagtgggaggtga

SEQ ID NO: 18668 - DNA, 197 bp, Zea mays
  Clone ID: MRT4577_117025C.1
attttccacaagctctactacaaggtgtgtgccgcctctagcggggagagcttggtcagtggtctcaatctcccatctccggtcagaatgatatgatcccctgaacacgtataaattgctcgcgtccacgaattaattggaggccgtcttgcgatccgactgggactgctcacgtagtttggcatttttaacaatca

SEQ ID NO: 18669 - DNA, 768 bp, Zea mays
  Clone ID: MRT4577_117026C.1
tcgaggccggccgggataccaaaaacaaaacaagccaagtgaaagagagaagaaaagtcaaagacaatgtcagggatcattcacaagattgaggagacccttcatgtgggaggccacaagaaggaggaggagcacaagggtgagcaaccaccggcgctaggggggaagaggccgccggaagatccgccatgagcagcgatcagcagaacgatgctcctggaagctacttcgtaggccgtccaaccaacccgggcgacaagacggaagaaccgcacgcccgcggggaccagaacccggcgaccgcgcaaactcccggcgtagttcatgtattcatttctctggatgtataagagtacttcgttgggcgtccggcgagccatccccagaaggaacaggaagcagcacagcagcaaaccactaggcagagcacaccaagcttcttggccaaatgctgtccctgcctcgccggaggtggagctgcggaatagatcaagaactgcctcctgcagccctgctaagggcacccaacgaattgtgcgcatgagaattggagttaatctgggatggtgatctatctatctgtatctgaattggaacttgtgctctggaaactcctctctttttttttttcttttttcctcggtgttccacttttaatcgtttcttctgcatccataccactgtcgcgtagtgcgaattggtccaaccagctgatttttgtttgtttgccccccccccaaaaaaaacgatttgtttcatttcaaaaat

SEQ ID NO: 18670 - DNA, 235 bp, Zea mays
  unsure (1)..(235): unsure at all n locations
  Clone ID: MRT4577_117027C.1
acaaaccattcanacccatccttacatattaagccacagacaaccaagggggagtgggcacccatctttattcnagccaaccacggcctgaccagcattgtgcagaacaacaaaatggagaggggccagcactctaaggagctcagacacacctcagggaaccttgacgtgaacaggaaagcggatgggaacacccgatacacagacgcatgtgctgagccatgaatcaggcccg

SEQ ID NO: 18671 - DNA, 1126 bp, Zea mays
  Clone ID: MRT4577_117028C.1
ggggtaccctccgggccggccggggaccttatcatggaccgccctctatatcgcagagccgaacctgattctgctgtccaagcctctagctctttgtcttggccgtcacatgctaccaacagcactgctaggggtagtgcctttgacggacgggctgggccgcgggagcagtagttgggtaattgtgtttttgagccaaggttgcttcgaacggcacttgaacttgtgccggagctgtgaatcatggccagtctggtgacagctctgtccctctttgaaaaaaaaatactccctccgtcttcttgacttgtagccgtctgggtcgtctcctatgtccttgtcgcattcctgagagttgctaccaccggcgcttaggggggaagaggccgccggaagatccgccatgagcagcgatcagcagaacgatgctcctgaaagctacttcgtaggccgtccaaccaacccgggcgacaagacggaagaaccgcacgcccgcggggaccagaacccggcgaccgcgcaaactcccggcgagtactttcgttgggcgtccggcgagccatccccagcaggaacaggaagcagcacagcagcaaaccactaggcagagcacaccaagcttcttggccaaatgctgtccctgcctcgccggaggtggagctgcggaatagatcaagaactgcctcctgcagccctgctaagggcacccaacgaattgtgcgcatgagaaatggagttaatctgggatggtgatctatctttctgtatctgaattgaaacttgtgctctggaaactcctcttttttttttttcctcagtgttccacttttaatcgtttcttctgcatccttgtgcatccataccactgtcgcgtagtgcgaattggtccaaccagctgatttttgtttgtttgcccccacccccaaaaaaacgatatgtttcatttcaaaaatgtcaatgtgtatttatgtattattatttactttgcttgaggttattgtgaacttgtattaatcatgaattgtcataccgtttacaaatatatacatgcgtcaagttaaccttgaagctttttcaggtgactcaaaaaaaaaaaaaaaagcggccgaaataaaaaaaaaaaaaa

SEQ ID NO: 18672 - DNA, 633 bp, Zea mays
  Clone ID: MRT4577_117029C.1
aaagtttctaaccatgaaagaagagagctcttcttagagcaagtagacatgccctaatgaggggagtgactactgttgttgatgttggaagttacttccctggggcctcagctgagaaaacgtggcaagattttgcaggtattctgtaataccttcgcttgcattgcatggacaagaattagaaggattcacttgtcttgtttttatctatgaccttatttgtactcctggcatactgacacaagtattgataccactacagaaatctataaatgggctcactctatggaaaaatgattttgagagtatgcttattcttcccaatgcccacatggtctcgtgtttccgatcttattagtgaacatggtcgatcgctaagtcagtggatccatctaggtggtgttaaagctttccttgatgggtctctgggttcttcaagcgcgttgttccatgagccttatgagggtgatccggataattatggtctccaaatgacagatttagacagcctacttaatagaacactagaatctgacaaatctggactccaggttgccatacatgcaattggggataaagctaatgacatactactggatatggttgacaagattgttgatttaaatggagcga

SEQ ID NO: 18673 - DNA, 425 bp, Zea mays
  Clone ID: MRT4577_11702C.1
tcactcctatgggcgattgggttcctcgaggccggccggaatatacgccgccatcttcgcaagacaccgtaaccgaagcccgccttcgccgccgccgcctctgcgatcccctcaaggtcgcaaacatgtctaccgtgctccaacgccctacccccggcactgtccagcgcttcagccgtaagaagacggctgtggccgtcttctacaccaagccgagctgcggtttgatcaaagtgaacggagtcccgtattgagctcatcaagactgagatgctccgcctcaagggcttcgagcccatcctgctcgccggccgctccaagttcaaagacatcgtactgagtatcctcgtccgaggcgtgggccagtacgtcgcagatctaccccattcgccaggacgtcgccaaggagctcgtcgcctactacc

SEQ ID NO: 18674 - DNA, 251 bp, Zea mays
  Clone ID: MRT4577_117030C.1
gctcggaattcggctcgagccgagatagaaaacaaactcattgcataccctggcaagccattcatactataagcaaaataaagcgacacatggaagaccgaagcagcttgctactcctcttctgatagtccagcgatcgacttgtaaactcttagcttctagaataagatccatgcaaatcctgctcggaaaggaaatgtcgtacatgaaggactagacacatggacatggaccctgatccctccttatag

SEQ ID NO: 18675 - DNA, 754 bp, Zea mays
  Clone ID: MRT4577_117031C.1
aacacactaaaagcctaaccaccgacctggagagaggagagagctttagcgtcggccatagaccagtacacaagcccctccttagccattctaacagcagaaataacactaggacgacacttatcaaacacacacttattcctatgcttccaaatgatccaaacgcccaagatgaccatggagttgagacagttcttcaggtggactgcaactctagaacaactattcttccaccagttttcgaaggagagatcaacttgttggggagacagttcctgcagatttgctagcgtgaggaactcaaaccaaaattgtttggcaaagacaaaccaccagcaagtgattgatggtttccgaagcttgatcacaaagaggatatcgctctggatgagacagacctctcatagctagcctatctgcagtccaacatctgttatgctcaacaagccaaatgaagaatctacattttccaggagcccaagtattccacaccctcctagccggttcaaaatccactgacccaaagaacatagcacgataggccgagctagcaaaagatccggaggtgttaaacctccatgtgtgcttatcttgtaccccatgatgaagaactatattagagagtgattcgcattgatccaagaattctgccaacactgttacaatgagagcaccttttaaatcagcgacccactgaaaattgggtagggcctcactaaccaaccttttactaactagtcgggtaggcaccaac

SEQ ID NO: 18676 - DNA, 712 bp, Zea mays
  unsure (1)..(712): unsure at all n locations
  Clone ID: MRT4577_117032C.1
tattcggcacgagggtgatggggggcggggggggttctcagggaaagaaaaaaaaggggcatacggacgtgatctggactcaaaagcgtgtccttgatcgcgtaagcttggggaaacctttttattgggaaatcagagatgaacatgggctgttttatgcactggatcttggagggggggggggccgtgtgctgttatttcagctaggaggaaaggagaaacgtgttgtcaaacaacagtatgaggaggtgtccattccaccacatttgatgggcgggacttccatggaactatttgatttcattgctgctgcattggctaaatttgtcggactgaaggtgaanatttccaactcccagaggggaggcagagagaacttgggttcactttttccttcccggggaaccaaacatcaatatcatcaggaacactcatcaagtggacaaagggcttttccatcaatggcacgggtggtgaagatgttgtttctgagttgagcagggccatggagaggcagggactagatatgaaagctacggcattagtcaatgatacagggggcacattgggctggggggagatatatggataccgatgtanttgcagctgtaatattgggcactggtacaaatgcagcatatgtggagcatgcaaatgcaattcctaaatggactgggttactgcctaaatctggaaagaggggattaataca

SEQ ID NO: 18677 - DNA, 2231 bp, Zea mays
  Clone ID: MRT4577_117033C.1
tgtattcggcacgagggtgatgcgagagagggggggttctaatgggaaagaaaaaaaaggggcatacggacgtgatctggactcaaaagcgtgtccttgatcgcgtaagcttggcgaaacctttttattgggaaattcggcacgaggctaggccttggcctcggatccagagcgcggaacgcgtgcggcgttcggatcgacccgctcgaaggccggggggcgcgaggtaggggccaggatcggcggcgatggtgaaggccgtggtggtgggcgcggcggtcgtggcgtgtgcggcggtcggggtggcggtggtgctggagcgccgccggcgtaagcgagacgccgacctcctggggtccgccagcgggggggggaaaaggactgtcacagacttgatcgaggaggtcgccagtacccccgtggtggccaaggtggccaacgggggctttggcgatggcattgcggctgtcgtggcctcacacttgccaggagaagtataggcgcagcgcctagtagtccttagacaggtcgacatcctccccaccggagatgaacatgggctgttttatgcactggatcttggagggaccaacttccgtgtgctgcgagtccacctaggaggaagggagaaacgtgttgtcaaacaacagtacgaggaggtttccattccaccgcatttgatggtcgggacttccattgaaacctatttgatttcattgctgctgcattggctaaatttgtcggtactgaaggtgaagatttccaactcccagagggtaggcagagagaacttggtttcactttttccttcccggtgaaccaaacatcaatatcatcaggaacactcatcaagtggacaaagggcttttccatcaatggcacggttggtgaagatgttgtttctgagttgagcagggccatggagaggcagggactagatatgaaagctacggcattagtcaatgatacagtgggcacattggctggtgggagatatatggataccgatgtagttgcagctgtaatattgggcactggtacaaatgcagcatatgtggagcatgcaaatgcaattcctaaatggactgggttactgcctaaatctggaaacatggtaattaatacggaatgggggagcttcaaatccaacaaacttcctctttcagaatatgacaaagccatggactttgaaagtttgaaccctggagagcagatatacgagaaaatgatttctggtatgtatctcggagagattgttcgaagaattttactgaagttggcacatgacgcttctctatttggagatgttgttccaactaagctggagctgccatttatattgaggacgccagatatgtcagccatgcatcatgactcctcacatgacctcaaaactcttggagctaaactgaaggacatagtcggggtcgcggacacttccctggaagtaaggtacatcactcgtcacatctgtgaccttgtcgcagagcgtgcagcacgcctggccgccgcaggcgtgtacagcatcctgaagaagataggccgggacaaagtaccaagcggtggcggtaaaatgccgaggaccgtagttgccttggacggtgggctctacgaacactacaagaagttcagcagttgcgtagaagcgactctcacagacttgctcggcgaggaggcttcttcctccgtggtcgccaagctggccaacgacggctctggcattggagctgcgcttctcgcagcctcacactcccagtatcagtatggcgcgagtgactagtagtcctgaaatgggcgcggatcgagattttgagtgtagctctcatttatcttttcttttttcccttttcaaaacatctttttggggatttttttcggcttccttttgttggctattccgtggatgcacttacggctctgcattgggatgtagctagtatagagccaatgagtttggaggttatctaatggcacaaggcaggagcatggaaatggaagcagagcaatgacattcatgctctgcccattcttttttccccttgtatggtgttgtaaaccaataaaaaaatgttaacccttttttttgtgtgtgttggcaataaagagaatacgataatttgaccaaaaaaaaaaaaaaaaaaaaaaaaaaaatacctctttcttttttactaatgaatgaacctaagcttgatacatatgctcttctgatactaaccgtgggcttaaattag

SEQ ID NO: 18678 - DNA, 1768 bp, Zea mays
  Clone ID: MRT4577_117034C.1
gatgatcgaggaggtggagcgcagcctcgccacgcccacggcgctgctgcggggcatcgcggacgccatggtcgccgagatggagcgcggcctgcgcggggacatccacgcgcagctcaagatgctcattagctacgtcgacaatctccccaccggagatgaacatgggctgttttatgcactggatcttggagggaccaacttccgtgtgctgcgagtccaactaggaggaagggagaaacgtgttgtcaaacaacagtacgaggaggtttccattccaccgcatttgatggtcgggacttccattgaactatttgatttcattgctgctgcattggctaaatttgttgatactgaaggtgaagatttccacctcccagagggtaggcagagagaacttggtttcacgttttccttcccagtgaaccaaacatcaatatcatcaggaacactcatcaagtggacaaagggcttttccatcaatggcacggttggtgaagatgttgtttctgagttgagcagggccatggagaggcagggactagatatgaaagttacggcattggtcaatgatacagttggcacattggctggtgggagatatatggataacgatgtagttgcagccgtaatattgggcactggtacaaatgcagcatatgtggagcatgcaaatgcaattcctaaatggacggggttactgcctaaatctggaaacatggtaattaatacggaatggggaagctttaaatccggcaagcttcctctctcagaatacgacaaagccatggactttgaaagtttgaaccctggagagcagatatacgaaaaaatgatttctggcatgtatctgggagagattgttcgaagaattttactcaagttggcacatgacgcttctctatttggagatgttgttccaactaagctggagcagccatttatattgaggacgccagatatgtcagccatgcatcatgactcttcgcatgacctcaaaactcttggatctaaactgaaggatatagttggggtcgcagatacttccctggaagtaagatacattactcgtcacatctgcgaccttgtcgcagagcgtggagcacgcttggctgccgcaggtatatatagcatcctgaagaagataggccgggacaaagtaccaagcagtggcagtaaaatgccaaggactgtaattgccttggatggtgggctctatgagcattacaagaagttcagcagctgcgtcgaagcaactcttacagacttgctcggcgaagaggcctcttcctccgtggttgccaagctggccaacgatggctctggcattggagctgctctccttgcagcctcacactcccagtatggcgagagtgactagtcttgaaaactggtgtggatcgaacttcgagtgtagctctcatttttatctttttttcccttcaaaacatccctaatattccggctctcctcggggaatttttcggcttcctttcttggctattctgtggatgcacttaaggctctgcagcgggatatagctagtatagagccaatcagtttggaggttatctaatggcataaggtttggacggcaggaacatagaaatggaagctgaacaatgccattcatgttctgcccaatttttcttccccttgcatggtgttgtaaaccaatcaaaaaatttaacctttttttttgtgttggcaataaagaggaggacacgataatttgaccaaaaaaaaaaaaaaaaaacggacgcgtggg

SEQ ID NO: 18679 - DNA, 260 bp, Zea mays
  Clone ID: MRT4577_117035C.1
acgcacgcgttcgcctgactgcgcgctccacatgtacatttacgcctctcgcctctcgccatggcgccgggatctatgacgcgcgtatagggagaggcttacctcttgcctccacagctacaacgagccccctgcccctccgtctcaaataccacgcgccctgatggacgacgtccacgccatggatgcggatctgtggatctccaaagtcaaggagggccagaacccattcgatcacaaacttaactaccactattaat

SEQ ID NO: 18680 - DNA, 562 bp, Zea mays
  Clone ID: MRT4577_117036C.1
cataatatgggtgggggatcacgcagtgttatctcggtggccaacaacggcgtcgctcgagctgcatatagacatgccatgggatgcacaggctcatgagggatcgatagggacactgcaagcgcgcgagcttcggcatccagggagtggtggtgtgccgtgattcacatagattcgatgccggcttacggtgcactcctcgtcaagccggcggtgatctatgggtacctgaacgcgtccaacttcatgatcctgctgtggcccttgaacctgcagatgacgatggctcgccaaatgaagaagatgctcattgggctacgcacaagtcctgatacttgtacttgagccgatactgaccatgtccagggttcgagcactcgctcagaccatcgtgcccgtgctgaaaacgacgagccaccaccggtacgctggtgctcttcatgctatacatgctagagagggtgcactgagataacgacttcccccacgcaatggtgaccctgcattatacttggtactgattccgcactcttgcataatgactaactgcgaaagtcaggac

SEQ ID NO: 18681 - DNA, 1893 bp, Zea mays
  unsure (1)..(1893): unsure at all n locations
  Clone ID: MRT4577_117037C.1
atggtgaaggccgtggtggtgggcgcggcggtcgtggcgtgtgcggcggtcggggtggcggtggtgctggagcgccgccggcggaagcgagacgccgacctcctggggtccgcggaggcggagaggaggaggcgcgcggccgccgtcatcgaggaggtcgagagcagcctcgccacgcccacggcgctgctgcggggcatcgcggacgccatggtcgccgagatggagcgcggcctgcgcggggacatccacgcgcagctcaagatgctcattagctacgtcgacagcctccccaccggagatgaacatgggctgttttatgcactggatcttggagggaccaacttccgtgtgctgcgagtccagctaggaggaaaggagaaacgtgttgtcaaacaacagtatgaggaggtttccattccaccacatttgatggtcgggacttccatggaactatttgatttcattgctgctgcattggctaaatttgttggtactgaaggtgaagatttccaactcccagagggtaggcagagagaacttggtttcactttttccttcccggcgaaccaaacatcaatatcatcaggaacactcatcaagtggacaaagggcttttccatcaatggcacggttggtgaagatgttgtttctgagttgagcagggccatggagaggcagggactagatatgaaagttacggcattggtcaatgatacagttggcacattggctggtgggagatatatggataacgatgtagttgcagccgtaatattgggcactggtacaaatgcagcatatgtggagcatgcaaatgcaattcctaaatggactgggttactgcctaaatctggaaacatggtaattaatacagagtgggggagcttcaaatccaacaaacttcctctttcagaatatgacaaagccatggactttgaaagtttgaaccctggagagcagatatacgaaaaaatgatttctggtatgtatctcggagagattgttcgaagaattttactgaagttagcacatgaagcttctctatttggggatgttgttccacctaagctggagctgccatttatattgaggacgccagatatggcagccatgcatcatgactcctcacatgacctcaaaactcttggagctaaactgaaggacatagtcggggtcgcggacacttccctggaagtaaggtacatcactcgtcacatctgtgaccttgtcgcagagcgtgcagcacgcctggccgccgcaggcgtgtacagcatcctgaagaagataggccgggacaaagtaccaagcggtggcggtaaaatgccgaggaccgtagttgccttggacggtgggctctacgaacactacaagaagttcagcagttgcgtagaagcgactctcacagacttgctcggcgaggaggcttcttcctccgtggtcgccaagctggccaacgacggctctggcattggagctgcgcttctcgcagcctcacactcccagtatcagtatggcgcgagtgactagtagtcctgaaatgggcgcggatcgagattttgagtgtagctctcatttatcttttcttttttcccttttcaaaacatctttttggggatttttttcggcttccttttgttggctattccgtggatgcacttacggctntgcattgggatgtagctagtatagagccaatgagtttggaggttatctaatggcacaaggcaggagcatggnaatggaagcagagcantnccattcatgctgtgcccattcttttgttccccttgtatggtgtaatctgnatnngtcgacgagcntctngagcgnaggntagctctagcncgcncgtgtggggggccnagntggcggccgncgagnatcncatac

SEQ ID NO: 18682 - DNA, 155 bp, Zea mays
  Clone ID: MRT4577_117038C.1
tgttgcttagcctgacaatcggaagagtttatcgatatggggaggatgccatcgaagctaacaggaaacggtccagcagcacaaacatcatccccatatcgataaactgttgcttagcctgacaatcggaagagtttaaatgttaaagatttgat

SEQ ID NO: 18683 - DNA, 421 bp, Zea mays
  Clone ID: MRT4577_117039C.1
gagcttcttaactcatacttacgtgactagcctccagacagacagagataactagggtgagtgcacttgagagacagctgctccctcagccaagtatataaacctaccacggcggttaaatcacattcatgccctcgtgaggctgaccggaattactgcacatgcccaatgtgtgaaggtcgaatcgtcagcaggtccttcagccccaactgcagatgttgctgaagcacatgccccagatgctcaggacgacgactactatgatgttgacctttttggtgaggagaccgtatatcaaaagaatgctgcttaatagcgtgctgtagctgacaaggcttctggcaagaagaaagaatctgggaagtcatcagttctacttgatgtgaatccatgggacgatgagactgacatggccaaactt

SEQ ID NO: 18684 - DNA, 148 bp, Zea mays
  Clone ID: MRT4577_11703C.1
cggctcgagccttgccacgagtcgccgacactccatcccggaagagctaacgatgtgacacgccacgcgcccattggtgacagccagcactacttctccctcacaaccttcagtccgtcggggaagctcgtgcatattgagcacgcgc

SEQ ID NO: 18685 - DNA, 210 bp, Zea mays
  unsure (1)..(210): unsure at all n locations
  Clone ID: MRT4577_117040C.1
ggcagacataaaatatttgtgctcctccttatgctnnnccttggtgctttcttgcaagtgccttgctacccggcgacccagtttttcccacccaatgctcaccaaggcgtcctatgnagcttccctttctttcttctcttttcctctnnncaccaacggtgtgcttgcggtggtggtggaagaaccccaatnntcttcaaccccctacag

SEQ ID NO: 18686 - DNA, 500 bp, Zea mays
  Clone ID: MRT4577_117041C.1
tcgagcggccgcccgggcaggtacaagctttttttttttttttttttttttttttttttatttttttttttttttttttttgtttttttttttttttctttttcttttcccccctttggttttttttcctttccttgttccccgctttttggggttcctgtcttgggtgcctcctgggggaaattgtggtccttttttattccctcgcggaaaagggcccccgaacccaaaagcccaaaaccaaccgccccgaaggaaaaagcgaaaacacggggggggccaaggggggggcgcacacaaaaaaaaagggaaacccgccggggccgctttcctaggggaaaaccccacgcgccaagcggggcgaaaaaaggaacaaacccccggggggggccctggggagagggggccctctttcggttccccggccaccggccccgggtcctccgaaataaaaggcggggaaacgggtttcctcaaaataaggggctaaccccggggag

SEQ ID NO: 18687 - DNA, 858 bp, Zea mays
  Clone ID: MRT4577_117042C.1
cggccgctcgaggcggcgggccgggacttgtgctactccacactccaaagcagacaccaccaccacagcgtccacgactccagagcaggcataccgttgccaagatggagcgtgcagcaatcaccacgatgccacggaagctggtggtgctgtacccgtcgccgggcatgggccacctggtctcgatgatcgaactgggtaagatcatcgctgcccgcggcctcgccgtcaccatcgtcgtcatcgatctaccgcacaacaccggggcaagcgcaacagggcccttcctcgccggcgtctcggcggccaaccccaccatctccttccaccgtctcccgcaagtcgtgctcccgcccgtaaaatccaaccacccagagacattgaccttcgaggtcgcccgcgtctcgaaccctcacctgcgtgatttcctcgctgccacctcccctgccgttctcgtagcagacttcttctgtaatgtcgcgcgcggcgttgcctcggagctcggcattcccttctacttcttcttcacctccggcgctgaggtcctggctctctatttgcatctcccggtcctgcacgctcagaccaccgccaacttccaggacatgggtgatgagctcgtgcacgttcctggaatcccctcgtttccggcgacagactccatgctgccaatcatggaccgcgatgacgtagcatacacgaagttcgtgagtgtgtgcagcgacctgtgcctgtcccagggcatcctcgtcaacaccttccgctcgctcgagccgccgggcgtggaggccatcatcgccggctctgctcgccttccggacttccgaccccttcagtctactgcattgggccgctgat

SEQ ID NO: 18688 - DNA, 282 bp, Zea mays
  Clone ID: MRT4577_117043C.1
aagaatctagaaatgaaccacattattaatgggactccgggagcattatgcaaaatactttatcattggactattactaatgggctgtgtaaaagagggcaccaccaatgatgggttgttggtagaacactggcgggcttgtgaaagcaagttggttgaatggcagcaattgttgctgttgttagagggtgccagcgttaaggcatagactgcaggattaacggaaacaacttgtgatgactcaagaaggcagaagggctcacattaaatcgctggatgaat

SEQ ID NO: 18689 - DNA, 279 bp, Zea mays
  Clone ID: MRT4577_117044C.1
aaaaaaaaaaaaaaaaaaaaaaaaaaaaaaaaaaaaaaaagggcaagacgaaataagagaaaacaaaattacaaacacataaatgcagggggcgtaccttttttatgatccaatcttacgttcccttccctggccggtgatttacttcgtttagagtgacaaaactccagattattgccatgttattaacatcgcagatcctggcaataccctggcttgacgtattttataagaggcgcggtacatccgcttttcccaacgtttgcttaatactgaatg

SEQ ID NO: 18690 - DNA, 494 bp, Zea mays
  Clone ID: MRT4577_117045C.1
ggtgcgctaccccatatgacgtcaatttacattcgcctacaatctccgaacctatgtaactctagttgacattcaattttgtgtgaaccgaaaattgcgatgctttcgaacccagagacagagcaacaatccgatccagtatcaatccctcaaaatatctcagaagtttcttttttcaacaagcacataactgctgtagcttgtgtcttagtaataatatataagagagcagccctaagttgttcagaaatcctctcgctaggagcccctgccgaaaatcttcaagaattgcttggagatgttgcttgaaatccaatcaagcccctcatacaaccttcaccagatgtagcaaaaggtgctctgggtgtaccaaggcccgctggcgcagggaatggaagcccaagcttggtcagtaatttcagcagcattcatagcattggggaagaatcttggtttggtttgcaaaatacaagcagaacaagcgtcacgccagc

SEQ ID NO: 18691 - DNA, 278 bp, Zea mays
  unsure (1)..(278): unsure at all n locations
  Clone ID: MRT4577_117046C.1
tnctcactgancgggtgggtaaccngagcgacanaangagcannaanaactgcnacagcaatagngncagcagcagcaacagcagnggaggaagaaaaannaancaaacncgagcaagagcacgagcagaacnngcacaagacanggaagaangacngcgnncaccgaacggcggggtgacanaangagnaccaccaagcaccttttttttttngagngagggggggnggccgggggagncggagngggagggcaaggcgaagcaaaancccgcagag

SEQ ID NO: 18692 - DNA, 436 bp, Zea mays
  Clone ID: MRT4577_117047C.1
aaaaaagggaacagggtatagaaatggaacaggggggggcgcaaaattagtttggggccccccagcaaaaaaccgggcccaaatttgggacaaaggaccaaaaatccgcagggggggaaacaaacggggtgggacttaaacgttacactagccaaccgggaaaaactaaaagaaagggaggctttgggtttacccaaacgggaaaacaaaaaacttgttacctgaaaaggggaaatatgggttcggcccaccaacgtatttgaaatgcccaggtaaaaaaaggaaacacccttgggggcaacccactgggaaaagctaaggggccaggggcacttcgataatcggattatggggagcccaaaaaaaaaaaaaatcacttggcccgggggggggttttgacccattcaaaatactggggggaaacaccagttcccgg

SEQ ID NO: 18693 - DNA, 255 bp, Zea mays
  Clone ID: MRT4577_117048C.1
agagggcgtcagttagctgacaattgtatatatagtaccacacacacacacacgctgggacacgtggccacgttgtatacatgagcatatataccgatgatttttacacttccattctggaggccataaatatacgggtatatatacaccctgttcatgcgttactactggaaataaatggccagctagggcactttacacaataaacgaaatattttatttattccccaccattgtttgtacgggacaataaac

SEQ ID NO: 18694 - DNA, 389 bp, Zea mays
  Clone ID: MRT4577_117049C.1
gcacgagcgtgagcctcgcccccgctattcacgcaatcccacgggccattgctacctctaccatcggagccctcactccattcaaggaaatggccgaatcccattccatcgtcgacgccaccttccatcgacagcgacctaaatcctcggcgcccgcaccacatcgagggcgggggacatgaaccgctataaatacaaagcgcggacgcctccccaccaccatcctccttgcagttgatgttgttatcttgactacaacttgatatcaaattgacctggcgtgcctgctgctgggcgacgcagttttttatttaaagatacttagttgtggtcgtaattttgcatcatataaatataaatgaaaatatcggtaaaaaaaaaaaaaaaaa

SEQ ID NO: 18695 - DNA, 143 bp, Zea mays
  Clone ID: MRT4577_11704C.1
gcaggcgtacgagcttgcgctatcatcagtcgtagtcaagattggaatcctcagggcgacagcaggtctctgcatataatcgctagttgcacacgacctcttacacgataaaaaccagaaaatacaaccacggtaagcctgga

SEQ ID NO: 18696 - DNA, 342 bp, Zea mays
  Clone ID: MRT4577_117050C.1
ctatatttaattttttaaatattatccaagcaaataaaccccccgggacgagttaaaattaaaagactccaacccaaaaacaaccaaaccatcatatacattcgacaagactcacagtcagtcctaacaaaaacaaagaaaagatcaccccacgaaaagaaccaacagaacaagccaaagaatcacattcggtacctgatccatacacataaaagaccgttacatgaaaagcataaaccccatgtaacccaatagtaacaacctgcaagcacaaacactttccaagtacagtagcgccaaacccccaagctaatgatcacaaagagactgataccccaaccc

SEQ ID NO: 18697 - DNA, 301 bp, Zea mays
  Clone ID: MRT4577_117051C.1
gccacgttctggcaacagcacatgctacgacgacaacgggggctacaagctcaggaaacgcctgttcagtggagcatgtagagaaccttaagttagtcttgtgagcgtgatgcccatgtggtcagccaaagcgaagtacttcctgctgcatagcttctttatctgggttctgcaggcagccactatggaccgtcgcgtctgcgcaacatggatccagatacctgcgggctttatcttggtctttgagatcctgaccttaacggagttgtcaagctgctacgacgcctgtattcgtgccggt

SEQ ID NO: 18698 - DNA, 134 bp, Zea mays
  Clone ID: MRT4577_117052C.1
aacaggggatgactggcaccactgaacatgttttggcgcgagggtgacctgggtgtttcactgcaagagcaacacgctagcataggctatcgcgcaacagggattcatggtttaatgtcggctcccaaagggct

SEQ ID NO: 18699 - DNA, 3936 bp, Zea mays
  Clone ID: MRT4577_117053C.1
cgagcggaaaagcgtccaattcggcacgaggcgctgacgacacaccggcgaggcagacaggcagatcagccgcacctccccagtcccccttccccacctacgacgaccgccgcggacgaatcaaaaaagcttcctcctcccggcgtcgcctccgcgcgtggaggcgacgatccattccgccccccgtaggattttgctcctcccgatccggacgtcagatctcgagtggcggcacgcggatctgggggtttctctagaggcggcggcggcggccggaacaggggcagatggcgctctcggggatgcgggggctctcggtcttcatcagcgacatacgcaactgccacaacaaggagcaggagcgcctccgcgtcgacaaggagctcggcaacatccgcacgcggttcaaaaacgagaagggcttatcaccatacgagaagaaaaaatatgtatggaaaatgctttacatttatatgctgggttatgatgttgattttgggcatatggaaactgtctcgttgatatctgcaccaaagtatcctgagaagcaggttgggtatattgtgacatcttgcttactgaatgagaataatgatttcttaagaatggtaataaatacagtaaggaatgacataatcggacgaaatgagaccttccagtgcttagcattgacaatggtaggtaacattggtgggaaagaattttctgagtcactagccccagatgtccagaaacttcttatttcaagcagttgcctatctgttgactgaaggtaggctgctctatgccttctgcggctttataggaagaatcctgatgttgtgaatattgatggctgggctgatcgaatggcacaacttctagatgagcgtgatctaggtgtgctgacatctgtcatgagtctttttgtttcactagtatccaacaattctgaagcatattggaattgtcttccaaaatgtgtaagaatattggagagattagcaagaaatcaagatattccacaagagtacacttattatggaattccatctccttggcttcaggttaagacaatgagagctcttcagtacttccctaccattgaagatcccaacgcaagacgggctttgtttgaggttttacagcgtattttgatgggtactgatgttgttaaaaatgttaacaagaacaatgcctcacatgctgttctctttgaagctcttgctctggtcatgcatctggatgctgagaaggagatgatgtcacagtgtgtggctcttcttgggaagtttattgcagtccgggagccaaacattcggtacctcggtctggaaaacatgactaggatgctgttagtaacagatgtgcaggatatcattagaaggcaccaggcccagatcattacatctttgaaggatccagatatcagcattaggcggagggctcttgatttattatatggcatgtgtgatgttacaaacgcgaaagaaaggagttgttgcagtaccttgatacagcagaatttgcaatgcgtgaagagttgtctctgaaggcagctattcttgcagaaaaatttgctccgcaactattgtggtatgttgatgttattcttcaacttatagacaaagctggagattttgtaagtgatgatatatggtatcgagtggtacaatttgttacgaacaacgaagacctacagtcatacgctgcaactaaagcgagagaatatcttgacaagcctgctttacatgagacgatggtcaaggtgagtgcctaccttcttggggagtatggacatcttttggcccggagacctggctgtagccctaaggaattgtttgctattataaatgataaacttcctacagtatcggcaagtactgtagctattcttctctcaacctatgccaagatattgatgcacactcaacctcctgatgttggactgcaacaacaaatcctcacaatatttaaaaagtacgagagctatattgatgttgaaatacaacagagagcagttgaatattttgaactaagcaggaaaggtcctgctttggcagatgtgttggctgaaatgccaaaattccctgaacgtgagtctgcactgttgaagaaggctgaagacgctgaaattgacacagcagagcaaagtgctataaagctacgcagtcagcaacaaacatctagtgctcttgttgtagctgatcactcccctgcaaatggatctgcaccaccagttaataatctcactcttgtgaagatgccaagtcaaactgtttctgacactcaggagagtggagtaagttatgaagaagctcctaagcctcctgttgaagctcccaaagaaaatgggactcctgtcgaagtgcagaacagggacacaaacattactgaaatcaacaatgagattaaagctgaacctccctctacatcccattctacctctcccggagacctcctcctggcagatcttttgggtcctcttgcgatagaaggccctcctgctgtagagcaaaatcctgcccaaggattgaatgctaatcaaagtccagctggtgacttggcacttgctacccttgatgatcagtccaactcagttcagccaattgtcaacgtcgaggagaagtttcatattttgtgcacaaaagatagtggggtgctgtacgaggatccttacatccagattggcttgaaagcggagtggcgtgcccatcatggccgtcttgttcttttcctgggtaacaaaaatacttcagcccttacgtcagtgcgggcgctgattttgcctcctagtcatttgaaaatggaactttcgtcagttcctgatactattcctccaagagcgcaggtgcaagttccccttgaggttgcgaatctccttgcaagtagagatgttgcggttctagatttctcgtatgcttttgggacttcactggtggatgccaaacttcgactccctgttgtattgaataaatttttgcagactataactcttacccctgaagaatttttctcccagtggaaagcgcttactgttcattcgctgaaggttcaagaagtggttaaaggtgtgaaacccatgcctctttctgagatggctaatcttttcatgagccttcacttggcggtcgctcctggacttgataacaacccgaacaatctggttgcatgcacgacattcttttctgaagcaacacgtgccatgctttgtctgatacgagttgaaacagatccacaagacaggacccaactgcggctaacagttgcctcgggcgatcaatatttgacattcgagttgaaagagttcatcaaggaacatctggttgatatcccaaggactcaggttgccccacctatggcaatggtccagccacagttgcttactgcagcacctgccacatacaatgaccctggtaccatgcttgctggattgctatgagaagtaacccaaaggaatagtgttttgatgtacatgacagttatttaatacgaggatctaacatctccaaaagcatcttgctgccaagacgtacacgtggagcaaccaagaaagagctggcggagtgtagtctccagcaggattctaaaccgagaaaaagcttagattctttttgtgcggtttgaaggccccctccctctccatggagcagttcccgtattgtgtaagcgtaacttgttgtttctcattattatcatccccttttggcccatttgtataacctgtattgcccatgtctgttggtggacaatcggtagtttttgtgtgttaatataaggtgctaggttttcccaccatgccggttgtaaagttgagttggtgcgcattgcattacgatttgtacgaaatagggaaaggaaatttataggttttgttttgtgcatgttatatggtttgcatagctcccccaaattaaaaaaaaaaaaaaaaaaaaaaaaaagaaataatccgagggg

SEQ ID NO: 18700 - DNA, 379 bp, Zea mays
  Clone ID: MRT4577_117054C.1
cccatgaggaacacgaaatattgcagatcttgacattgcagcagttccttgaccaatgtacagacccttcctttcttcataatgtgcatctgattgcaagcagtggtaacaacgcagagtacgcgggcccacagcccagccatcttccttgacaggctgctcaatagcgactgacactgcaaccttatcacccttttcaacatgtgaactacatgctaaaacaccaggaacatacgcctgaacacaacaaacggaaaagatcaaaacacaagcagagatttacaacaatcaacttgtgtggtggtacggatattgcagtattacaaaaaaaaaaaaaaaaaaaaaaaaaaaaaagtactctgcgttgttaccactgctt

SEQ ID NO: 18701 - DNA, 455 bp, Zea mays
  Clone ID: MRT4577_117055C.1
ctccacatactgtgcaaaccaatgcgtataacagcacgaatgccatatcgtgtgaggttaacagcgaggatctgatctacgacctgagctcccaggtggaaacccaggcaaaggatcatgacatgggtcatgacatgagccatacaaacacgaatgcacagacacatgaccacaaacatgaggacgatgatgaagatggcgacgaagctgatgacaatgacaaggacattaaccaggcgattacccagacgtccaatgctaggaccaacgttaacgatgctcatgaggacattaatggtgacattgtggatgtcataactgatggggaaacttatggtgataccactgttcgtgccaatttctatttggactgctattgcatatggggagctatatgtggaccaatgctccaataatgctaccatgattgctgctattgcaacagggattccaac

SEQ ID NO: 18702 - DNA, 697 bp, Zea mays
  Clone ID: MRT4577_117056C.1
ggacttgataacaacccgaacaatctggttgcatgcacgacattcttttctgaagcaacacgtgccatgctttgtctgatacgagttgaaacagatccacaagacaggacccaactgcggctaacagttgcctcgggcgaccaatatttgacattcgagttgaaagagttcatcaaggaacatctggttgatatcccaaggactcaggtcgctccacctcgcgcagcagtccagccacagttgcctactacagcacctgccacatacaatgaccctgttatttaatacgaggatctaacatctccacaagcatcttgctgccaagacgtacacgtggaagaaccaagaaagagctggcggagtgtagtctccatgaggattctaaaccgagaaagagcttagattctttttgtgcggtttcaaggccccctccctctccatgtagcagttgccgtattgtgtaagcgtaacttgttgtttctcattattatcatcatccccttttggcccatttgtataacctgtatcgcccatgtatggtggtggacaatcggtagtttttgtgtgttaatataaggtgctaggttttcccaccatgccgattgtaaagttgccctggtgcgcattgcactgcgatttgtacggaatagggaaggaaaaatttataggttttgctttgtgcaaaaaaaaaaaaacc

SEQ ID NO: 18703 - DNA, 436 bp, Zea mays
  Clone ID: MRT4577_117057C.1
acctccccagtcccccttccccacctacgacgaccgccgcggacgaatcaaaaaagcttcctcctcccggcgtcgcctccgcgcgtggaggcgacgatccattccgccccccgtaggattttgctcctcccgatccggacgtcagatctcgagtggcggcacgcggatctgggggtttctctagaggcggcggcggcggccggaacaggggcagatggcgctctcggggatgcgggggctctcggtcttcatcagcgacatacgcaactgccacaacaaggagcaggagcgcctccgcgtcgacaaggagctcggcaacatccgcacgcggttcaaaaacgagaaggtcacacgcttgctccccttcctcttgctagttgccaacacatttgcgtaattgaggcgtagagcgctccgaatttgtggtgagatgacc

SEQ ID NO: 18704 - DNA, 847 bp, Zea mays
  Clone ID: MRT4577_117058C.1
gggtacctcgaggccggccgggggtccgttctctctgtctttgcctgcggctgctgctgctctgggacaggtgggagaggaggcgccacacccagacgagaggcttcccgagtccaccgccagcacgagtccaccgccggcactttgactcggagccggagattcttgcgaggaactggcagggatctgctgcccatccgcatatcatgctgcaacagtagttcactcgtcggaggaaggcgcatcacacgaacgaggtggaaggaaccggacggagcttggagagggcaagcgggcaaggggagtgagtagtggttctcggtgtcttctttaaccactctgtccgatccgctggtgtgtctgcgcgatcctgttgacgaatcaatcgccgggacggttaattaagcattccaatcctcagccatggccgtggacactactcaaccggagtactggctcaactggaggttcttgctgtgcgcgctctgggtctactcctgcatggccttggcgttcttcttgattaagaagtacgagggggccagttcaccggacagcaatggcgatgacggtggagacagagaagaggcgttaccacgtgtcagacctggtgttgtttatcttgaagattgctggaagacatgccttgagggtatccaccctggctggctgctggcatttcgcgttgtggccttcttcgttttggcttcgctgctcgtggtcgacatcattactgatggatggagtatcttcctatactacactcagtggacgttcttgcttgtcaccttgtattttggggtatgtagtttgccaatggaactttggcttgcggtttgttttggtg

SEQ ID NO: 18705 - DNA, 567 bp, Zea mays
  Clone ID: MRT4577_117059C.1
ccacacaaaaaaaacaaaagtttttttttcccctggaaatttttggttcccccaaatttttttgacaggggggggggttataaggcttttacggaaaaaacgggccccggggttaaaccccccggaaattaattttttttaaacagggccaaaaccccaatttcccaaaatctcggtaaaggatttgatggggggaaaaccttttttggaaggagggggggctttccccgggggagggggatttttcccctaaaaccccggttttttaaaaaaaagggtttttgggaaaccacgggttttaaaaaaaattggggagggccggccccccccggggggcgggaaaatccaaaaaaacccccttttttttttttttttcccagggggggaaaaaaaaaccccccaaaggaatttttggaggccaccgtttgtttttttgcaaaaaaaaaccctttgggcttttttactccccctgggggttatggagccctttttgcccctagcgggccggttttttagccccaagggaccctcctaaagaacaccccccgggagctttttttttgaaaa

SEQ ID NO: 18706 - DNA, 414 bp, Zea mays
  unsure (1)..(414): unsure at all n locations
  Clone ID: MRT4577_11705C.1
cccacgcgtccgtnggaattaaaaacaacggcttttttttccttttgtctctgctttntaagcnaattctgcacgggggttttctttctctctacgactcccatcctaaaatatcaccaaattggacctttgaaactagtatttgatccattggtcttctgtggcaaggtatcctctgactcctttttttgtcatcgattcggtttgtatgaaatatatgtcaaggatttctaatcttcttattatcgaatcttaggatgcctatgcgtggtaaatcttctaaaccaagataaccattgtatatattgtattatcgaattagagcgtttaatgtttatgcggttcttagaacgaaacaacttgaattttaggaagggtccgttgatcgaaaatgccttcgacccgctgcctctg

SEQ ID NO: 18707 - DNA, 3670 bp, Zea mays
  unsure (1)..(3670): unsure at all n locations
  Clone ID: MRT4577_117060C.1
ggttgattttgggcatatggaaactgtctcgttgatatctgcaccaaagtatcctgagaagcaggttgggtatattgtgacatcttgcttactgaatgagaataatgatttcttaagaatggtaataaatacagtaaggaatgacataatcggacgaaatgagaccttccagtgcttagcattgacaatgctttctgaaacagattcgctgtcaaaaatctggaatcccaaccaaagaggtaggtaacattggtgggaaagaattttctgagtcactagccccagatgtccagaaacttcttatttcaagcagttgccgtcctgttgtcagaaagaaggctgctctatgccttctgcggctttataggaagaatcctgatgttgtgaatattgatggctgggctgaccgaatggcacaacttctagatgagcgtgatttaggtgtgctgacatctgtcacgagtctttttgtttcactagtatccaacaatgttgaagcatattggaattgtcttcctaaatgtgtgagaatattggagaggttagcaagaaatcaagatattccacaagagtacacttactatggaattccatctccttggcttcaggttaagacaatgagagctcttcagtacttccctaccattgaagatcccaacgcaagacgaactttgtttgaggttttacagcgcattttgatgggtactgatgttgttaaaaacgttaacaagaacaatgcctcacatgctgttctctttgaagctcttgctctggtcatgcatctggatgctgaaaaggagatgatgtcacagtgtgtggctcttcttgggaagtttattgcagtccgggagccaaacattcggtaccttggtctggaaaacatgactaggatgctgttagtaacagatgtgcaggatatcattaaaaggcaccaggctcagatcatcacatctttgaaggatccagatatcagcattaggagaagggctcttgatttattatatggcatgtgtgatgttacaaacgcgaaggaaattgtggaggagttgttgcagtaccttgatacagcagaatttgcaatgcgtgaagagttgtctctgaaggcagctattcttgcagaaaaatttgctccgcaactattgtggtatgttgatgttattcttcaacttatagacaaagctggagattttgtaagtgatgatatatggtatcgagtggtacaatttgttacgaacaacgaagacctacagtcatacgctgcaactaaagcgagagaatatcttgacaagcctgctttacatgagacgatggtcaaggtgagtgcctaccttcttggggagtatggacatcttttggcccggagacctggctgtagccctaaggaattgtttgctattataaatgataaacttcctacagtatcggcaagtactgtagctattcttctctcaacctatgccaagatattgatgcacactcaacctcctgatgttggactgcaacaacaaatcctcacaatatttaaaaagtacgagagctatattgatgttgaaatacaacagagagcagttgaatattttgaactaagcaggaaaggtcctgctttggcagatgtgttggctgaaatgccaaaattccctgaacgtgagtctgcactgttgaagaaggctgaagacgctgaaattgacacagcagagcaaagtgccataaagctacgcagtcagcaacaaacatctagtgctcttgttgtagctgatcacccccctgcaaatggatctgcaccaccagttaataatctcactcttgtgaagatgccaagtcaaactgtttctgacactcaggagagtggagtaagttatgaagaagctcctaagcctcctgttgaagctcccaaagaaaatgggactcctgtcgaagtgcagaacagggacacaaacattactgaaatcaacaatgagattaaagctgaacctccctctacatcccattctacctctcccggagacctcctcctggcagatcttttgggtcctcttgcgatagaaggccctcctgctgtagagcaaaatcctgcccaaggattgaatgctaatcaaagtccagctggtgacttggcacttgctacccttgatgatcagtccaactcagttcagccaattgtcaacgtcgaggagaagtttcatattttgtgcacaaaagatagtggggtgctgtacgaggatccttacatccagattggcttgaaagcggagtggcgtgcccatcatggccgtcttgttcttttcttgggtaacaaaaatacttcagcccttacgtcagtgcgggcgctgattttgcctcctagtcatttgaaaatggaactttcgtcagttcctgatactattcctccaagagcgcaggtgcaagttccccttgaggttgcgaatctccttgcaagtagagatgttgcggttctagatttctcgtatgcttttgggacttcactggtggatgccaaacttcgactccctgttgtattgaataaatttttgcagactataactcttacccctgaagaatttttctcccagtggaaagcgcttactgttcattcgctgaaggttcaagaagtggttaaaggtgtgaaacccatgcctctttctgagatggctaatcttttcatgagccttcacttggcggtcgctcctggacttgataacaacccgaacaatctggttgcatgcacgacattcttttctgaagcaacacgtgccatgctttgtctgatacgagttgaaacagatccacaagacaggacccaactgcggctaacagttgcctcgggcgaccaatatttgacattcgagttgaaagagttcatcaaagaacatctggttgatatcccaaggactcaggtcgccccacctcgcgcagcagtccagccacagttgcctactacagcacctgccacatacaatgaccctggtaccatgcttgctggattgctatgagaagtaacccgaaggaatagtgttttgatgtacatgacagttatttaatacgaggatctaacatctccacaagcatcttgctgccaagacgtacacgtggagcaaccaagaaagagctggcggagtgtagtctccatgaggattctaaaccgagaaagagcttagattctttttgtgcggtttgaaggccccctccctctccatgtagcagttgccgtattgtgtaagcgtaacttgttgtttctcattattatcatccccttttggtccatttgtataacctgtatcgcccatgtctggtggtggacaatcggtagtttttgtgtgttaatataaggtgctaggttttcccaccatgccgattgtaaagttgccctggtgcgcattgcactgcgatttgtacggaatagggaaggaaaaatttataggttttgctttgtgcatgttctatggtttgcatagctcccatgccttgagggtatccaccctggctggctgctggcatttcgtgttgtggccttcttcgttttggcttcgctgctcgtggtcgacatcattactgatggatggagtatcttcctatactacactcagtggacgttcttgcttgtcaccttgtatttttgngcttggatcgttactttctatatatggatgctatcagtatgtttacaatactg

SEQ ID NO: 18708 - DNA, 501 bp, Zea mays
  Clone ID: MRT4577_117061C.1
caagcttttctttctttttttctttttctttccttttttttcttttttttttttttcttttttcttcctgtgaacaaccgaaagctccgtcttacctttgggcggccccacacctacatccaaaaaacttcattcttccaatctacacctcactggcccctgaaaagagggcccccccacagctgtttccatggaaggaggctgctggggtctacaaaccaaggcggccaaagggcaacaattgctgtatttgccaaagggatcccgggttatccccaaactgctggaataaaggcaccatctggccctctagcaaaaaggaaccacggcttgcttcatgacacaggccaaatggctgccatattacctgcagcaaataaacaaccgcgttaacctcggacaactacaacaatggaagaactttgtccaacttgcattgacaaacccatcaccctcctaccaacaacacatgattggtggaaccctctcttagattgctta

SEQ ID NO: 18709 - DNA, 1488 bp, Zea mays
  unsure (1)..(1488): unsure at all n locations
  Clone ID: MRT4577_117062C.1
cnnnnnnnnnnnnnnnnatttaatgaattataaattgggatggaaagagttaacatatttaggaaacataaagtaacacagttcctacaccacatccagatccagcaagtctttaagagaagatataccccaatcgtcagccacaaactagcatgacctacctgcggcacgcagagacaagaataccacacatgtacatctgtgattgtcacttattgcagaatctcacctatctacaatctgtacaagggaatgaatccacactgcattacacacgtatgaatcattataccacccccaaacaacaacataattccagtgtttattgacatctcaagcaatagtttcagcaccggcacacctgtttatctatccaggtgcgtctacactctataatggcaacaaggccttccgatttcactaattcaaacataggctgcttgtagcttggatgatatcattcttccaagtattacccttttcctcaagcagctccagcgatagtaaatcagctctgggcacactcgaaaccttctgaaaactcacgcatctgaaatcgttctaaaaattcagaaggcagtacaaagtgacggttccgacataacttctgctgattattctctatggcactcaatacatcaagttcaggtccagaaaccatagatgtagcatttgcatcgggtgtccatagctttattgtgttatcgattccgcttgttgcaacggcacagtcgaagggatgagactgtatgcagttcacaacagctccatcccctgcaagcattttaataagccttcctgttctcttctcccatatgaaccatctaccatcatcacttccactggcaatgaactccccttgctcaccaagaaaactggcttgttttatatctgtcccaacgttgcagtgtgcaacatatctctgtttcatatcaatggcaacatctgactgaaaagcataatcatcttttcgaggggactcaactgacccattctcaccagtgtgtacattggtttgatcctctctttgatgaaatcggtaacttaaactacccctgaagacaccttgatcattctctcggctttcatcaccagatactgatgtctcatagtccaactccatttcatcatcataatctgaatcttctcgcccctcctgtgatgaaccaccaacatcaggtctaaataatatctcactcaatgagcgtaattttccatgagtatcagctttggagctcccattttgatccgctctgttcttctcaagctcagctgaagcaacgcgttgcttgaaagcatccacctgctccctcaatggacaatgaggtggaagaagaccatttgccacctctgcatgctcagatgcctccttcagtcttcctaactgcaatagtgcctcagccatatgcaagtgtgcttgatacgatgtgacatcaatcttccacgttctattgcaatctcgaatcgccatgtaaacatctttttncc

SEQ ID NO: 18710 - DNA, 818 bp, Zea mays
  Clone ID: MRT4577_117063C.1
aatcttccaatccccatgtattaggaatccgtatgtattagaaataattgaacaagcctatacgggaagatgtgccccaatcgtcaaccacaaactagcatgacctgcctgcggcacgcagagacaataccgcacatttacatttgtgattttcacttactgcagaatttcacctatatctacaatctgtaaagggaatgaatccacactgcattacacacgtatgaatcattataccaccccaaaccacaacataattccaatgtttattgacatctcaagtaatagtttcagcaccagcacacctgcttatctatccaggtgtgtctacactctattcgtagcaaggccttgcgatttcactacttcaaacataggctgcttgtagcttggatgatatcattcttccaactattacccttttcctgaagaagctcagcaactccagcgatagtaaatcagctctggttacactcgaaactttctgaaaactcatgcatttccaaagtacaaagtgacggttccgacataacttctgctgattattctctatggcactcaatacatcaagttcaggtccagaaaccattgatgtagcatttgcatcgggtgtccatagctttattgtgttatcgattccgcttgttgcaacggcacagtcgaagggatgagactgtatgcagttcacaacagctccgtcccctgcaagcattttaataagccttcctgttctcttctcccatatgaaccatctacccccatcacttccactggcaatgaactccccttgctcaccaagaaaactggcttgttttata

SEQ ID NO: 18711 - DNA, 650 bp, Zea mays
  Clone ID: MRT4577_117064C.1
cattgggaccctcgaggccggccgggaatagctccaactttcttcgccgggacctgactcacacctccactcacctcagagacacacagaccatctgccgagaatggagtgctgcgacccgcgagaagctgcctcgaagggaccacaaacatcctgactgccaaggacgaatacagcgacgaccgcgatcagatcgatcaccgcaatactcaagagacccgcactattcctgaaaacgacctccccgctcctccaagatggatgggacagccgccaacgccagatgccgcgaccgctcgaatatctacaccatgaagaagagctcgccggcttcatctaccggggaggcagtgacatttccctaaacaccgacatgctcttcgacgacacgctaataacctctgcccttggacatagacaccaaggggccttcaaacagatctcttgcgagagatgtctccaaacaggcggatttctgaaccacttgactcgcatgatcaatgacaggtcacgcggggttctcgggcatccctaatacaaggtgaaccccatacatgataatactaacattctcgtgacggccctgagaaccaagctgtgcgatagaaatacctttcctacgagtctgcgtgcccgtatctcttgataag

SEQ ID NO: 18712 - DNA, 418 bp, Zea mays
  Clone ID: MRT4577_117065C.1
ctcattcgttcgatccggttggtttcagtcctggttggtttcagtcctgttcgtttcaagcaggaaagatccagtatggcaattcatatgaatcttcttgtagtagtacacagtatggcaatctcggacttcaatcacacttgcttgaaccaacgggcaagcaagaaaacaaaacaaaaaagttcgccagtagaactagaaccagcacacggacatcctccactcaagaagacgatggctcttctgatgaacgacaacaagaagacaacgcaggcggtggtcctagccgtgccccaggtgttgctgttggcgcccgcgtcagccgcgatgacctgcgtgcaggtggggtcggcgctgtcgctcggcatcccgtgcgcgagcgcgacggggagggccagcgcgctcccctccgggtgct

SEQ ID NO: 18713 - DNA, 251 bp, Zea mays
  Clone ID: MRT4577_117066C.1
tcgatctttccaaacgattccaagtaactttaattgtcaccatataaatttaaaacgaagtttacaacttgctgtaatcgttttggcatttgctttatatgcaaatgcacacgttgatgttgatatagcaaaacaacacttaggagttggatcacatggcccagctcttgtaaacacacatggtggatatggcggctggggatggggaggtgatgtacactaaggctacagagtaggatacccatatggtg

SEQ ID NO: 18714 - DNA, 241 bp, Zea mays
  Clone ID: MRT4577_117067C.1
actcatcctgcgttgtccgatatcatggatagagctccgctgctcctctcgctgctgtgcgcgtgcgccgatcgccggcggctccgccaatgcggcggcggggaggaagatggtcggcgcgtacgagctcaaggtaggacgatttctccgacggaggcaccaactggggcgccaccatcaccttcgctgtgctgccggactcggaaggtgattttgctgacagcatgcttgtctaccacac

SEQ ID NO: 18715 - DNA, 318 bp, Zea mays
  Clone ID: MRT4577_117068C.1
aaaagggccaaaaacatttttgtttaaggggcatatgatccccccccccaaagggcaattcacctgtttgacaagggggtcccgcccaagacaagacaaactggatcccgaattggccccattccccaatggtttaaaaatcccccctccccactttccaggggggggccttgaaaaaacccggattaaaaacccgggggccaaatttaagggcgttttttacaaaacccaggcggccggtaaaagggggcttaaaaaaaaatttgcccccccgggcccccccccccagggggtgggtttttttcccccgtaccaaaa

SEQ ID NO: 18716 - DNA, 752 bp, Zea mays
  Clone ID: MRT4577_117069C.1
cggccgggccatttccgatccttctgaatatcctcgctcaaatattacacggcggggagaggcttagcggcaagagatcagcaggcaattcggtatgactggccgccgcagcagcttggtttatgggactgccattgccatatgtgtgtctattctcttgggatccctagcaatgactgcacaagcaggccgttcctctcatcagctgctgagcaaggcgaggtcgtcgtccacaacaagagcgctctatatagccagcaacacatcgagcggctaccacaccgaggtgcagtgcttcgatgaggccgcggacggcggcgacgagaggaggaagacggcggagctgctcacgctgatattctgcaccgcgaagtgctactgccacagcgacaacgccgacgacatctgctactgctgccagaagccgcccacgcaggtctgctacgagacgatcaaggactgccaggcccactgccccgtctgcaaccctaagtgcccggctgcttccggaacggcgggtggatcgcagcagctgcatgctgcagcgaagaacgccaccttatagattgttataagggttgcgattgtggtaataagatatgatacaaaatgttgtaattgttagaggatgggatggagccaagtaagactttgttaacgtgaatgatgcaatcccagctcattcctttttcaaaggttgcagtagtagttttgttctacctttattctttccaagtaaaacctttctatct

SEQ ID NO: 18717 - DNA, 404 bp, Zea mays
  Clone ID: MRT4577_11706C.1
cccacgcgtccgaccacgcgtaagatccatgcctgtaggaatagattgccataacaacggttggggtcctttcaccttattagcatgcttatcgcacctaaacgacctaccgtgtacaagtctatacaaatgattacgcatggtcactatgtatgcttacctgctcactggcatcgctgatgtccttagaccaaagaccaaaaccgtctgcaactattctagacgacacactaccatagcctgatgaacatcatttgagcaaccgctagatcatagagatgctctgatacagacaccaagtattagatctactagacaagtcatgtatagtagtacatcgtagttaatgacaaccttgatctcaacttcctataaaaacaatctgtcatgattatatgtgacat

SEQ ID NO: 18718 - DNA, 678 bp, Zea mays
  Clone ID: MRT4577_117070C.1
aaatcggcacgaggcacctgccagtgaaaacttctcccccgcagttccatctctccgtcgccgtcgccgtcgcgtcctccgcgtctccggcgagtctagagagagagagagagagagagagagagagagagagagagaggaaggaaggaggtggagggcgcggggcgcggggcgcggagatggacgcggagcttctggagctgcagcggcagctagaggcggcgcagagcgcgaggtccagcgtgcgcctgtcggagcggaacgtggtggagttggtgcggaagctgcaggagcgaggcatcatcgatttcgacctcctccacaccgtctccggcaaggagtacatcacatccgaccatttgaagcatgagattaagatggagatcaagaagagaggccgtgcatctctagttgacttatcagataccctgggggtggacctttaccatgttgagaggcagtcacagaaggtcgtctccgatgatcccactctaatgctgataaatggcgagatcatgtcacaatcttactgggacaccgtgacggaagagataaatgagaagcttcaggagcgcagtcagattgccttggcagagattgctgcccagttacatattggatccgagcttgtcatcagtatcctcgagccgcggcttggaactattgtgaaaggatcat

SEQ ID NO: 18719 - DNA, 208 bp, Zea mays
  Clone ID: MRT4577_117071C.1
cccacgcgttcgatgacgagcgggactctattattggtacaccatggagacagcatgtgcgacgaattaaagaaagagctgccacgccacgaggcaggcaggctgtggatgtccttttgacactaagccatggaggaggtgacaatcggacaacaccggtacttctagaagtaaaatggttttattttgatggtaaggcgatttcaaa

SEQ ID NO: 18720 - DNA, 154 bp, Zea mays
  Clone ID: MRT4577_117072C.1
aatcgctgcccgctctccactccttcggtccttacgccggcgggcacgcgccgggcgagatggaagcgggaccatgcggccggaccttccccccgttatcggtcttctccgcggggcctagacactggcttctgatcgcgggcccggcctcgcg

SEQ ID NO: 18721 - DNA, 1432 bp, Zea mays
  unsure (1)..(1432): unsure at all n locations
  Clone ID: MRT4577_117073C.1
catcagcgcgtccgccttcacctactatcatcatcgtctccatctccggccgggcacccaaactgagatggcgtccgtccggcggtccgccgtggccctgatcgcctcctttctcgtcgtcgcggcagtgggagcccagccgatggacccgaagaaccccatctcgtcagaccccaatgtgatccccgtatacatgagccccggctcgccccccacctacgtgagctgttacaacagcacccatgggcagcaagggtcggaacccacgtgctccatcctcgcgcgccagtgtccccgcggttgccgggacacctgctacgtccactgcccgtcctgcaagctcgtctgcctgtgcgagctgaccggctcggagtgctacgacccgcgcttcgtgggaggcgacggcaacaagttcctgttccacggccggcgcgacgccgacttctgcctggtgtcggacgccaacctgcacatcaacgcgcacttcatcggcaagcgcaacgacgcgcgcgccgccgcgccggcgcgggacttcacgtgggtgcaggcgctgggcatccggttcggcgggcaccggctgtacctgggcgtccggaggacggccgtctgggacgacgccgaggaccggctggccatcaccttcgacggggtgcccgtggcgctggacgccgtggccggcgccagctggagccccgcggcggcgcccgcgctgtccgtgttccgcacgggccccgccaacggcgtggtggtgcgcctggacgggcggttccgggccgtggccaacgccgtgccggtgaccgccgaggactcgagggtccacggctacggcctgcgccccggggacggcagcctcgcgcacctcaacgtggcgttcaagttctacgccctcagcgccgacgtgcacggcgtgctgggccagacctaccgcccgggctacgtcagcgccgccggggtggacgcgggcgccagggtccccgtcatgggcggcgccggaaggttccaggtgtacggcggcatcttcgacaccagctgcgaggtcgggcggttcgctggcgaggaccacgggcccgtgggcggcgtcaccgtggaggagccgaccgacgcgctctgcggcagcggcaaggccagcactggcctggtctgcaaaaagtgacgactgacgaggccggcggtgtagtgtttttgcttgtgtgtacgtgcgtgctgacatatatatagctgctgctgcgaagtaaagtagtagtggttctatgtatggcagggggacctaataagactgtgacgtctcttgtgctgtagtcgtgtggacaacactggaaaaaatgccgtgttgctctggtgttctcgtgtttcatcactccaacaacttttacgttcaagggagctttttactgttcaagcggagccnnnnnnnnnnnnnnnnnnnnnnnnn

SEQ ID NO: 18722 - DNA, 252 bp, Zea mays
  Clone ID: MRT4577_117074C.1
ggcaccagttgatggtcggattaatccgtgacatagcgaagggcgtcaggcagactggagtgcaacgccatagcatcgactgttgccgcagttgtgtgccaccagtggaatgtaattcaatccgcatagcgttaacttttttcgcttttccagaaacttggatgcctggtcacaagctgaaaggtctgatagataaccgcatactctggaatcgataacgttctggttacattcacaactgattgactcttt

SEQ ID NO: 18723 - DNA, 2535 bp, Zea mays
  unsure (1)..(2535): unsure at all n locations
  Clone ID: MRT4577_117075C.1
gcggtttactcgatccggagcgaggaggcgacaacatggacttggtaggatccacctcacgaccaacccgctagggaggcgctgctggaagccagcagaggcctccctcctccgacgcaggaggaagatgctcacgaaatttgaaactaagagcaactgggtcaagggcttcgccttccactcgtgtggtccattgcctcgaatccggcacgcggcgccagacacaaaccacgagcgcgaggcacgacctacatcgaatcggccacgaaccaccatggcggcctcacgcgcgctcctccccagcccgcaggtgagccctgcgagcgcgcgggtccgcctggccgcggccgtgccgtcgtcgctcacgctcgcggcgcgcggcggggccggggccggcgcgcgtctccgcgtgcggtgcgcgatcctgtcgtcgcccgcgcccgtggcgcccaccgagtcgaggccggcgcgccggatctcgccgtccgcgccggacggcgcgctgcggcccaagccggcggtgctggtcgccgagaagctgagcgaggccgggctggccgtgctgcggcagttcgcggacgtggagtgcgcctacggcatgtcccccgcggagctcctcgccaaggcggcgcagttcgacgcgctcatcgtgcgcagcggcaccaaggtgacgcgggaggtgctggaggccgggcagggccggctgcgggtggtgggccgcgcgggcgtcgggatcgacaacgtcgacctccaggccgccaccgaggtcgggtgcctcgtcgtcaacgcgcccaccgccaataccatcgccgcggccgagcacggcatcgcgctgctcgcctccatggcgcgcaacgtctcgcaggcggacgcggcgctcaaggccggtaaatggcaaaggaacaagtacgtgggggtttctctggtgggaaagaccctggccgtcatgggcttcgggaaggttgggtcagaggtagcgaggcgagcgaaagggcttgggatgcacgtgatagctcatgatccctacgcccctgccgaccgggcccgtgccctcggggtagagctggtttctttcgacgaggccatcgcaagagccgacttcatctccctccacatgccgctgataccgacgacgtccaagatcttcaacgacgagtccttcgcaaagatgaagaatggtgtccggatcatcaacgtggccaggggtggagtgatcgacgaagacgctctggtcagggcgcttgactccggcaaagttgctcaggcggctcttgatgtcttcaccgtggagcccccgcccaaggacagcaagctggtgttgcatgagaatgtcactgtaacaccccaccttggagctagtactgtcgaggctcaggaaggcgtcgctatcgagattgcggaagccgtggttggtgcgctgagaggggagctcgcagcaaccgctgtgaatgcgcccatggtcccagctgagatcctgtcagagctggctccatatgtttctctggccgagaagctcgggaggctggcggtgcagctcgtggccggcgagagcggcatcaagggcgtgaaggtggtgtacaccacagcgcgtggccccgacgacctggacactcggctcctccgcgcgatggtgaccaagggcctggtggagccggtgtccagcacgttcgtgaacctggtgaacgcggactacacggccaagcagcgcggcctccgcctcacggaggagcgcgtggcgcacgacagccccgcggcggaggcgccgctggagtccgtccaggttcgcctctcgcacgtgcagtccaagttcgcgggtgccatcagcgacggcggggacgacatcgtcctggagggccgggtcaagtacggcgtgcctcacctcaccctcgtggggccctacgaggtggacgtcagcctggagggcaacctgatcctgtgccgccagatcgaccagcccgggatgatcggcaaggtcggcaacatactcggcgacacgaacgtgaacatcaacttcatgagcgtcggacggacgttcaggggcaagcaggcgatcatggccattggcgttgacgaggagcccgacaaggacacgctggagaagatcggggccattccggcgatcgaggagttcgttttcctcgaactatgatggctagcagcgagttttctctaggattgatattttgttatagtacgtactgaactggagtttgacgtcttccgctctggtctgtctgtctgtttggtgacctctacattttttatgcggggagaagggaagcaatatatattgtaagagggtgccttggcttgccccctgcctaaataagaggtgtgtgccgtttgtttatctgtaaactgtgtatgtgtatgtgcttaatgcgtgattctaattaagcacatcatcattgcgtctgaaatgaagacgaggtgtcaagtgcgtggggcgtggtgtacacctgtacgcgtatgtgcgacgagcgtgattctaattaagcaaaaaaaaaatgncaatgatnncntgctgcccnntnn

SEQ ID NO: 18724 - DNA, 1362 bp, Zea mays
  Clone ID: MRT4577_117076C.1
cgcgacgcgtgggcgagtaccttcgcaaagatgaacgaatggtgtgacggatcatcaacgttgggcatggggtggagtgactcgacgaatacgcatctggtacagggcgcgtgactcgcggcaaagtctgctcaggcgtgctcttgatgtcttcaccgtggagcccccgcccaaggacagcaagctggagttgcatgagaatgtcactgtaacaccccaccttggagctagtactgtcgaggctcatgaaggcgtcgctatcgagattgcggaagccgtggttggtgcgctgagaggggagctcgcagcaaccgctgtgaatgcgcccatggtcccagctgagatcctgtcagagctggctccatatgtttctctggccgagaagctcgggaggctggcggtgcagctcgtggccggcgagagcggcatcaagggcgtgaaggtggtgtacaccacagcgcgtggccccgacgacctggacactcggctcctccgcgcgatggtgaccaagggcctggtggagccggtgtccagcacgttcgtgaacctggtgaacgcggactacacggccaagcagcgcggcctccgcctcacggaggagcgcgtggcgcacgacagccccgcggcggaggcgccgctggagtccgtccaggttcgcctctcgcacgtgcagtccaagttcgcgggtgccatcagcgacggcggggacgacatcgtcctggagggtcgggtcaagtacggcgtgcctcacctcaccctcgtggggccctacgaggtggacgtcagcctggagggcaacctgatcctgtgccgccagatcgaccagcccgggatgatcggcaaggtcggcaacatactcggcgacacgaacgtgaacatcaacttcatgagcgtcggacggacgttcaggggcaagcaggcgatcatggccattggcgttgacgaggagcccgacaaggacacgctggagaagatcggggccattccggcgatcgaggagttcgttttcctcgaactatgatggctagcagcgagttttctctaggattgatattttgttatagtacgtactgaactggggtttgacgtctcatgtcatggccacagggaggagaggaacctgatccgctctggtctgtctgtctgtttggtgacctctacatttttttatgcggggagaagcaagcaatatatattgtaaaagggtgccttggcttgccccctgcctgcaaaaaaaaaaaaaaaaatttgtcgatctgtaaactgtgtatgtgtatgtgcttaatgcgtgattctaattaagcaagcacatcatcattgcgtctgaaaaaaaaaaaaaagggcggccgccaccgccgtcga

SEQ ID NO: 18725 - DNA, 396 bp, Zea mays
  Clone ID: MRT4577_117077C.1
tgattcacagccatggatatcccaccgcctcgtggccccctctggatcttgggtgatgttttcatgggagtctaccacaccgtcttcgactacggcaagctgagggttggcttcgcagagtcggcctaaggatatggtttggcgcctcgtccagaggcgaacgcatgcgccgagagagaagcttagcttgtttttaacttgtgtctttatgcggccggcgatgtgtgtatatatgctactacatgtttagtgatgctttcagagaccagagacaacgcccatctgttttaacctggcgcaagaatatttctggatgtattggtcatcacgcttcggcctcttgtactgaattgttgccgtgcaccctagcaacgtgtactgaagaagtattttcac

SEQ ID NO: 18726 - DNA, 1179 bp, Zea mays
  Clone ID: MRT4577_117078C.1
ccacgcgtccgctctccaggagttggtccgtgaaggggttaagatcatgctagatataatggagaactcatcgctctgtgctgagactggaacttcgcaggaaggagtgggagtgaaaaatccagatgaatgttcattggaggaaccacaatccatgaatttgttgccagaaccggcactgtattctccagatgacttcgttaatgaacaagagaaccgtagtccgtcagaaattgttgaattagtcaaaccatctgtattgacatttccttactcgccggaaaatactaatgacaaagaggagaaattgagtccacaatccgttcttgatcccattgcagaagttaccagtcctagacacaaaactccaaagcaagatgaattctccatgcctacttccagagtgctattcaaagaggttgacgccccttcagcatccccagctttgtggaatgggccacaggtagccattttggatgacagagccacaagggtgtccttcatcaaggccgtgctagaagcttcaggattgctgtctgaggaaaattcgcaaatttggtacacagaagagccactgcttgatgtatctgtattggctgaagtaggaaactcgtactgcctgacagacgatgcagtgctcttgtttgactacgtggaagaggttcttctcgagataagggacaagttctttggtaccgacccttgggttaattctctgaaacacaatgtacggccagctccagtaggaagacggctggttcgagaggtggctaagggaatcgattctcttgtaggtaaagaatttccacacactttagaacaggtaatgatgaaagacttggacagtgggtcgtggctggatcttggaggcgatactggaagtgttgtagttgagttgtgggatggtttacttgatgacttgctggaggaactggtttttgatttgtggctttgatactgtagtgctttgtagtaatacatgcagaggcatattcgactagtactgacatggggttaacagatacagaaaccttttgcgaaaggatagggaaaagtgagttcggcagactgccagatgttgtagagctaggcatttcatcaatatagttgatttccattttcttttgaatttgtgcttattgtaagtcagatcctgattgaatgtaattcgatttcttt

SEQ ID NO: 18727 - DNA, 292 bp, Zea mays
  unsure (1)..(292): unsure at all n locations
  Clone ID: MRT4577_117079C.1
tgcggcgctcgagcncggcgggctgcattcacgagtaggatactagtcacgtttgctccaccaagagtagacaacaatggccatggagacgtgcttcagagcgtggacgctgcacgcccccgctggcagcaaggaccggctcctcgtcggcaacctggtgctgccgtcgaagcggccgctcgcgccgctgaccgtcggccgcgtcgccacgcgccggccgcggcacgtctgccagtccaagaacccagtgcgacgaagtcctcgggtccggacgacaacaactgccacggct

SEQ ID NO: 18728 - DNA, 356 bp, Zea mays
  Clone ID: MRT4577_11707C.1
cgttgctgtcgaacccatcgcaaccaatgctagcatgaccacgccgcgcggcacccagcgacgcgcggccgcccctgcggcggccgcgggcggcgagccctacaacatcctgcccatccacgacctcctcgccgagcacccgtcgctccggttccccgaggtgcgggctgccgcggcggcgctccgggcggtgggcggcctccgcccgccgcccttctcgcagtggcgcgccgaccaggacctcatggattggctcggcgccttcttcggcttccagcgcgacaacgtcaggaaccagcgggagcacctcgtgctcctcctcgccaacgcgcagatgcgcctctccgacagcaacg

SEQ ID NO: 18729 - DNA, 619 bp, Zea mays
  unsure (1)..(619): unsure at all n locations
  Clone ID: MRT4577_117080C.1
ctccgctngagtgttcattggaggaaccacaatccatgaatttgttgccagaaccggcactgtattctccagatgacttcgttaatgaacaagagaaccatagtccgtcagaaattgttgaattagtcaaaccatctgtattgacatttccttactcgccggaaaatactaatgacaaagaggagaaattgagtccacaatccgttcttgatcccattgcagaagttaccagtcctagacacaaaactccaaagcaaggtaatgaacttaaaacaaaaggtttcacatctggtgcccttcatagcctgaacagtaatagaacaaaactattttgttgctgcagatgaattctccatgcctacttccagagtgctattcaaagaggttgacgccccttcagcatccccaactttgtggaatgggccacaggtagccattttggatgacagagccacaagggtgtccttcatcaaggccgtgctagaagcttcaggattgctgtctgaggaaaattcgcaaatttggtacacagaagagccactgcttgatgtatctgtattggctgaagtaggaaactcgtactgcctgacagacgatgcagtgctcttgtttgactacg

SEQ ID NO: 18730 - DNA, 167 bp, Zea mays
  Clone ID: MRT4577_117081C.1
aatgaacatacatgacacaagcgtgtcttgactgcacaaactacatcctaggagctaagctacttcaagtcaaaagtctatgacattatgcgtacatgcatgtcactcgcatggactagtataaccgaatcatggctgacctttgtctacacaacaacaaggactac

SEQ ID NO: 18731 - DNA, 517 bp, Zea mays
  Clone ID: MRT4577_117082C.1
caggaccggtccgaattccttgtttacccacctacctgaagacggctggttcgagaggtggctaagggaatcgattctcttgtaggtaaagaatttccacacactttagaacaggtaatgatgaaagacttggacagtgggtcgtggctggatcttggaggcgatactggaagtgttgtagttgagttgtgggatggtttacttgatgacttgctggaggaactggtttttgatttgtggctttgatactgtagtgctttgtagtaatacctgcaggcagaggcatattcgactagtactgacatggggttaatagatacagaaatcttttgcgaaaggatagggaaaagtgagttcggcagactgccagatgttgtagagctaggcatttcatcaatatagttgatttccattttcttttgaatttgatttctttaagctccctttgttctctgtagaggcatggaaacataaaaaataagttctcctgtatataaagtaccccagtatttatggt

SEQ ID NO: 18732 - DNA, 485 bp, Zea mays
  Clone ID: MRT4577_117084C.1
ccggccgggaccgcacacacggacgccataccctagattggagcgcaccacgggcgccggcggccggcggcccgccaccggtgattgacgccccctcctcggtccccagcgcggcgagcaggctgcgagtggcctgctccctgcgagtgacctgcaggctgcgagtgttgtgctcatgtgctgtgttggttgttgctcactcgctcgtgtgctcatgtgctgtagtgctcctttctgttcgtggttgctcatgtgctcatagcgagtggccttctccctccttcctgttcgttgttgctcatgtgctgtagtgctgtgctcatgtgctgtagaggccgattaatcgggctagtcgtcgattaatcgtgattagtcggctgatcgcccatctgacgatcagaaacgattagacgatctgaaaacatggctttgaactaataaaacaccgttaacttaaaactaaaaaaaaaaaaaaaaaagcggcc

SEQ ID NO: 18733 - DNA, 528 bp, Zea mays
  Clone ID: MRT4577_117085C.1
ctctaagcgatcattataccccttgggtgcttctgggagaacggacatttcctgaaacagggtagcgcctggcattaaattttgggtggctccaaaaaccttctttcatcaaaagtttaattaaatcaagccaaggttctggggcccggggtaaatgaactgaaccgaacatgctgaattcatgcctgccccaccccagggaaaccgagtttgcttaactggcgtcacatatcacaaacccggagcactgggcaaactggctctattgatgagagggttattcagaaaccttcgaaggtgcattcgacgccgatggccctaagatgccctctggactggcggaaaaaccactctatggctgtaatatgaacatgtcatcactggccatttcctatgcctgaactatgctctgcctgaatatttaagcaatctcataacccttgtgaaacgcaagcttgggattgcggatcatggcaccaggtgttggctcaagcttataaggacaaaggctgactgcccctctttcac

SEQ ID NO: 18734 - DNA, 335 bp, Zea mays
  Clone ID: MRT4577_117086C.1
gggatctctgctaatctgtgaaactaatcatcatcgtctccagtctccctagtccctgctgccgctgccgcttgtcgctgacgccgtcgcgtctcctccgcatctaagctgccggcggcgaccaagcccaccccgcctctcctccgtccgccccgcctctcctcctggttccctcccgtgaactcgcacgctcacaggttttataattgtttgcaaaagggctatagtacttgatgagatgaagtcaacagtgttttcagcagctgttgtttctattgggtatgcattgcttggatgggattttgcagcattatcagaagctaataatcatatgg

SEQ ID NO: 18735 - DNA, 297 bp, Zea mays
  Clone ID: MRT4577_117087C.1
gactctaccggtttctactctgcctacctcatcttttatatagttgtcttgaccaccaatcacaagtatgaggatcattacatatgggagtcgcaaacttacatttcattcactgttactcatgacacttcagggcatcagcttttaatgggcactaaaatcacactgttccttaaagactatcatctgtagtacctttacgatcgtctcctcaaggatcttttcaacaatcactctgagttcatcaactaccccatctccctgtatactgaaaagacaacatacaatgaaatttct

SEQ ID NO: 18736 - DNA, 463 bp, Zea mays
  Clone ID: MRT4577_117088C.1
gcttcttccgaattaagttaaaaacccactttccacatttttttttggcccgaacaatacaataaataccctacccctggaaaaatgttttaatttatgggtttgttcttgggcaacgaccactggccggaaacccttttttcaaaaattctcctggcccttattttggcaccatgtccatattatttgcggcaagggccctaaaaaacttgctgtgcgtggaggggcccatccaaattaaagatggtttcaaaccaaaccggccgggagatccatccctgccctgctcgttttagttttagttaccgagtcggtctgtgcatgcccctgtttttaggggtcgcttttcaactgcagcccccgggggggaaccccattttgctttttttgacgtcgtaaacaacccttaacctttgttgctgcgtgttccccatgatgggggcgcttcgggcgggccccaagg

SEQ ID NO: 18737 - DNA, 220 bp, Zea mays
  Clone ID: MRT4577_117089C.1
aataaccgggtggacgagcagctatcagtcggccgccgtccttttttttttttttgtcgtgtggagctaataactagatcaccctcaagaaccaagagaatccagaagagctcccaccaagactactccagcccataatgacggaccggaagatacaacgggtgtattatcatgaccaaccagcacgagaagcagatacaacgggttcactcattactaa

SEQ ID NO: 18738 - DNA, 192 bp, Zea mays
  Clone ID: MRT4577_11708C.1
tcggctacatattgaacccgagctgactctctttagggtgccaaaccacgttcgctagtttgcgaaggtgtttctattttatcaagtcaccatgattaaatctgctgggcgcctacatacaacacaacaactgcttaaacccttggcggaggctaatccattggctggtggcacattaccgcatttacaact

SEQ ID NO: 18739 - DNA, 116 bp, Zea mays
  Clone ID: MRT4577_117090C.1
ttgatgcgtgggtgacgctgatgtgtagcaggaaggggtggtttaatacaccaaggagttattgaagtgcactgaattaattgatgatgttatggttaatgaaacattacatatat

SEQ ID NO: 18740 - DNA, 424 bp, Zea mays
  Clone ID: MRT4577_117091C.1
cgtctaggtttttgattttagccgtcgacgctggtcatctgacatacctctgccagcagcctgcttctggccgatcgatacgatggacgcatactgcgacctccataccgacgacggcctaagggccctcgtggctcacctagccggcaaagcctatgtgtctggtgactccattactaacgatgacattaaggtgctggggcgcagctccgtcataagccgggagctgagttagctaatgccgtccgctggtaccagcaccgctctgaggctgtagaccaaaatacctggacggctgttggtgtaaatatctgggaacactctgggcattgtatgcgtgagctagagatatacctgtcttttgggatgaactgagagacaaaagcagtgagacgtgctgcgtgcaacgcttttaaaaaaagaa

SEQ ID NO: 18741 - DNA, 675 bp, Zea mays
  Clone ID: MRT4577_117092C.1
actcacaatgttcaagtcttagcatttcagccttttttgagcctcctcactcactcacctcaaccggtcaaacttcccaaagcctctccaaacatggtgcgtcgccgcaaccatccgtgatagagttcagcagcgaatctgatgagattcaggaggaatcaccggttccctctcctccgcctcgtcgttccctctctaagagaggacgcggctctagtcggatggaaggagagggatcctcaatgcccacgcagcctgctcgcgggaggcgccaaaaggttggcaccaatcgtcctcgtcgcagcacctcctcctctggatacgctccttgccaggaggaggatgaagcattcgacgacttcgtcgatcttccgccgtctgatgcaatctacatcaccggcctgcacatgcatccggcgaatgttacccggggacctaatgaacctcccgtcgacttctctctgaaggaagtggacacccttcaacgcctgaggttcactaacccttctctcactccttgtcatcctggtgttcaggaccctcggttctggaatcttttctaggctgatttctataattcagtcattttgtccaagaaacacccagtcgttaggcatcggtttattgactggggaggatgtgagaacatgggagatgctgacatgacgtcagctc

SEQ ID NO: 18742 - DNA, 279 bp, Zea mays
  Clone ID: MRT4577_117093C.1
acatcactcctgtcgttcctgccctctaattgatgcgtcactgatcaatattatgtgttacattcttttcggttgtgcccatgatgtttttgctacttaaaagctgttgccatgaacacttgccttgctagagtacttcatcgctgtgcggttgtgcatgtggcaggtattacaatacattgctttgtctctacaagcttaacaatgctgcccaaactgctgaatcattcattgttatgcggggcccttgagcaatcacatctttgtcagttggtactt

SEQ ID NO: 18743 - DNA, 334 bp, Zea mays
  Clone ID: MRT4577_117094C.1
atgatgcttagggtttccccgtccccggccgccgcggtgccaacccagctctccggtgcgccagagagcaaaaatacatttttacccaagggatccgaagcttacgaaaagttgaggaccaagagggggggggagagagcctacagcaagatcgctgccggaaacaaccccaccacaccctgcgataactcgactcacatgtcaaagaaacgacactgaacacagccagagtaagcaccagcaacctaagtcgacgacccgaaaacgcttccctttggtgagaacgaggatgctgagtaagactgcaggaaccctgagaaaatctttttttttt

SEQ ID NO: 18744 - DNA, 1543 bp, Zea mays
  Clone ID: MRT4577_117095C.1
tattggtggggtttcccagaaagcaaggaaaaaataatgaagagggtaataattctgataagggagaggaggatgaagaagaggaagcaacacgcaagaatagacttggactaactaaaaagggcatggatgatgatgaggaaggtggaaaagatctagatttcgatttggatgatgaaattgagaaaggtgatgactgggagcatgaagaaacattcactgacgatgatgaggctgtagacattgatccagaggaacgggcagatttagctcctgaaattcctgctccacctgaaatcaagcaggatgatgaagagaacgaagaagaagggggcctgagcaagtctggcaaggaactaaaaaagttgcttgggcgcgctgctggactaaatgagtcagatgcggatgaggatgaagaagacgaagatcaagaagatgattcatcgccagtgcttgctccaaaacagaaggatcaagttaaagatgaacctgtggatagcagcccatctaaaccagcaccatcaggacatgctcgaggcacacctccggcatccaaatccaagcaaaagagaaaatcaggtgttgatgatgcaaaaacttctagtggtgcagcttcaaagaaagcaaaggtggaattggatgcgaaagcatcaggcctcaaagaggaggcatcatctttggcaaaacctgcatcaaagacctctgctgcatcaaaaagtgggacaagcgtatcacctgtcacagaggatgaaatcaggagtgttcttcttgcagtggctccagtcaccacacaagatctggtatccagattcaagtctaggcttcgaggtgcagaggacaagaatgcatttgctgaaattctgaagaaaatttcgaagatacagaagacgaacggccacaactacgttgtcctcagagatgacaagaagtaaataaccgaacaaaggcgctgacatcgcaaccgttggctgtactgagataatatgtttatgtaacatgctgccttgaagataaacaagtctgtaacactagaattgtcttctaacccttgtgtacttgaattttattttactattccagattttatttatgcggctttgcactacacacctgttataaatggaaatccattgggagttcatctcgtgaattttggtagattgacataatttctctcgcttaaaataaaaaaaaaaaaaaaaaaaaaaaaaaaaaaaacaaaaaaaaaaaaaaaaaataaggccccccgataaaaaaggaatccaacataacgtacgcgaacatgcaaatggccggcttcaaaaaaaaaaaaaaggggggggccttttaaaggaaacaattttacaaccccggggattggaaaaataatgttttttttaggggtcaaaaaattaaaatcacgggccccttttttaaaaaggcggaaaggggaaaaacccgggtttcccccaatttaaccactgggggcaaaaccccttttggcaagggggcggattctaaaaaggggccctaacaaggggcctttttaaaaagtttggccccc

SEQ ID NO: 18745 - DNA, 2058 bp, Zea mays
  unsure (1)..(2058): unsure at all n locations
  Clone ID: MRT4577_117096C.1
ccctcgggtcgacccagcgtccgcacagctgcgggggcaatctcgtccgatccaccgtcatcgcgttcaaccacgcatgccacacctaccccggccgcgacggacccacgtcagctcctcttgattcctaagcagacagagacagagccccggcgacggcgagatggaagaggagcagagcagcggcggatggggcgaggaggcgacgaacaaggcgccgctgctggagccacgggcggcgtcggaccaccagcaccgcagcaacggaacatcagcaggagacggggctggcgccggcaaggcggaggcggagggatggtcggcgctgccgcttcggcggcgcgtgtgggaggagaacaagaggctgtgggtggtggcggggccgtccatcttcacgcgcttctcctccttcggcgtcaccgtcatcagccaggccttcatcggccacatcggcgccacggagctggctgcctacgcgctcgtctccaccgtgctcatgaggttcagcaacggcatcctgctgggcatggcgagcgcgctggagacgctgtgcgggcagtcgtacggcgcgaggcagtaccacatgctgggcatctacctgcagcgttcgtggatcatcctgttcgcgtgcgccgtggcgctgctccccgtgtacctgttcacggagccgctgctggtggcgctggggcaggacccggctatcgcggcggtggccgggaccatctcgcgctggtacatccccgtgatgttctcctacgtgtggtccttcacgctgcagatgtacctgcaggcgcagagcaagaacgcggtgatcacgtacctggccatgctgaacctcggcctccacctgctcctgtcctggctggccaccgccaggctccgcctcggcctcgccggcgtcatgggctccatggttgtcgccatgtggatccccgtgctcggccagctcgccttcgtcttcttcggcgggtgcccgcgcacctggaccggcttctcctccgccgccttcgccgacctcgccgccatcgtcaggctgtcgctgtcgtctggcgtcatgctctgtttggagctgtggtacaacaccatactggtgctgctcactgggtacatgaagaacgcagaggttgcgctggacgccctctcaatatgcctcaacatcaacggctgggagatgatgatttccatcggctttctggcggcaaccggagtacgggtggcgaacgagctgggagccgggagcgcgaggagggccaagttcgccatctacaacgtggtggccacctcctccatcatcgggtccgtgctgttcgtgctgttcctcctcttccgcggaggcctcgcctacatattcaccgacagccaggcggtggcggacgcagtcgccggcctctcgcccctgctggccttctccatactgctcaacagcgtccagccagtgctgtcaggcgtcgctgtcggcgcgggctggcagagcgtcgtcgcctacgttaacatcacttcgtactacctcatcggcatccctcttggagccgtgctgggctacgcgctggggcttcatgtgaagggcatctggatcggcatgctgctcggaacgctggtccagactgttgtgcttctcttcataacgttgaagaccgactgggaaaaacaggtggaggttgctcaagagaggctgaagagatggtacatggaagagaacagaagactccaggggtccagacgaaacccttaggccggccctcagctccactgtgtatctctagttttccactcaccacgagaacaaaacgagggagacgactgctccacgtacaggccgatcgaggctgaaggatcatctctgggctgtatggtattgtagacacaaataatcatctgggctgggctgggcatgcaggtaatagtggtgtgcactagttctgaggttatatctctgccttgttcatcttaattcgatctgccggtgtcttgttgatcagtgcaatcctagctagttgttactgcattgcaaaaaaaaaaaaagggcggccgccaccgcggtggaaaaaaaanttagtt

SEQ ID NO: 18746 - DNA, 142 bp, Zea mays
  Clone ID: MRT4577_117097C.1
atcatctcatgcaagctaggctcgataagtagttgaccccagcacagcttgctcatatggttcatggagagccacaagttgttcaagaatattaattcatgaaaggaatttccaacctacaagttcttggccaactccaaat

SEQ ID NO: 18747 - DNA, 478 bp, Zea mays
  Clone ID: MRT4577_117098C.1
atactcttcctttccgtcctgaacctgtttcttctctggaagcctgtgcctgcgcgcgcctcgccgttttggttttcatctcccgctctttctcccccctccctgctccggccaagtgctggaaccaagagaaggcgatgggggcggcggcggaggagcagtagcaggggggaggggatggggtgggcttcaaggtggctccgcgggctgcttggcggcggcaagaaggccggcgagcacaagccggagagggagaagaagcgctggggcttcggcaagtccttccgggagaaggacccggtgcgtccaccggcgccgccggtgcagcgggcggcgacgccccgccgcacctatgcggcgtcggatgacggcggcgacgagcagaacaagcgcgctatcgccgtgggcgcggcgacggcggcagccgtccacgacgccgttgccttttagcacgcgcccctcgccgtccctgcgctgc

SEQ ID NO: 18748 - DNA, 315 bp, Zea mays
  Clone ID: MRT4577_117099C.1
ctctcccctccactctcctcattcttcgcaggctgagcagcaagcgacccaccgcatgcggtttgagaataacgaaccgcagaaaaccaaccgccccgcgctccgttccttccaacttgctatctacctgcaccagcctcgcccacccttctctcgccggcgacatggggaggggaaagttcaagggaaagcccaccggccggcacagcggatccacacccaagagaagagaccggtggggatacttggcggcgctcgcacctctatgagaacatggcaatggaaaaaaaaaattgatcttttttatggggcgaa

SEQ ID NO: 18749 - DNA, 214 bp, Zea mays
  Clone ID: MRT4577_11709C.1
atcaattccagactatttccacatatctccagagtggcagaatgttgttttaggacttttggcgccgggccaattgccaagatcaccattcctgagataaggaaccatccatggtgtctgtataacctgccaggtgacctaatggatgtacagtacgatgtgcaagacagtccatgagcctgatcaaccgattcaaatcatggatgagattatg

SEQ ID NO: 18750 - DNA, 432 bp, Zea mays
  Clone ID: MRT4577_1170C.1
gcacaaatgagttgcatctcacatgagggaggcagccagactatactcgaccgactggctgcgatagaccccgtccgagccgaccgctggatacattgcgcgggtgctaacgactgccccgggagcgaacattatggcccgtgacctgctggcgaccctgaacgacgccacggaggagactgcatagccgggggggaactatgcgccgccttacatagaacaacacctttgtcggcggcgatgggtggatatttgacggcaacacgaacagctcgctctcgaactaatacgattgggccaacagccagaccttggacctcgctgactacctcattgtgaagacgaacaacctctgaaaattgttggagaccagcaacgccatgacattttatctttgcgacattatgtagaacctgacgaatgcgaccttca

SEQ ID NO: 18751 - DNA, 253 bp, Zea mays
  Clone ID: MRT4577_117100C.1
gttcattttctttttaaaaaatagaaattccttagaaaaatataggtaccaaaccggcactaattgcattattttctcaactcattttccttctggcacgtgcactggggaattgcatttctaccttggatcgaggcgcctggtaacaaaagaacaatggccacttccgctggaaaaaaaaaaaaaaaaaaaaaaaaaaaaaaaaaaaaaaaaaaaaaaaaataaaaaaaaaaaaaaaaaatatttaataatt

SEQ ID NO: 18752 - DNA, 144 bp, Zea mays
  Clone ID: MRT4577_117101C.1
atggatcacctccttcgagggtgcttcgttactgctgtgagctggtttctctgtattttcttcagaaggacagcagcacagcagtacaggactgcagcacaacagcatcttttgactgctgcagcacagcagcagtgcagttga

SEQ ID NO: 18753 - DNA, 295 bp, Zea mays
  unsure (1)..(295): unsure at all n locations
  Clone ID: MRT4577_117103C.1
acaagctttttttttctttgttcctatttttgatttttctttccattaagaggaagaaacttttaacaatgataaaagtgagctactctcctcggcatgtaaactaattattaggaaccttggccggggcctcgccttgggcgaattgtgcggtaaaaagggacaatggcagcacgctggggcgtgtattataggggccccaaccccccccaaaggggggcggaaaacaagtaaatgggggttcttgaaaaaaatattttntgaaaaaaatttccacaaaaaaataaggcgggag

SEQ ID NO: 18754 - DNA, 552 bp, Zea mays
  Clone ID: MRT4577_117104C.1
acagcgcagaatgcattgcagcggtaccctgacagctctaccaaaagatattatcttttgcgaggcttaatttggggagggccttagtagtaggaatgtgctgcattaaactcataaacgatatgcacatctcacaccataaaaaccctaagttttaagcataaacagtgtggaagctttacatagatgaaaaaataaatggaactgtagctcttattaacgcttctactaatactcttcacagagcatatggctgctgtcaataaattattattaatcaccagatacgccaacagcatgctgccaacgaggaggcattcccttatacaagcacctgagctgcacctatcctagcgatcgacaccctgaaagtggaacaagaaacgcaatccagcccagccttgtcgaacaaagcaaccaatgaaggctctgcaccatgttctccacaaatgcccaccttgaagttaagcctagctttgcggatcctctatgtagcaagcttaaccagctcagccactcctactctgtactagacctcaaaggggtcatgct

SEQ ID NO: 18755 - DNA, 159 bp, Zea mays
  Clone ID: MRT4577_117105C.1
ggggattcgcgacgaaggttctctgtcctaagccggccgcctggggcggcctatgtacgagaacgtcgacctgccctgcgactcgattcccgcgctgcagggccgccccccgataccagcgctcctccgaggttcttcccgccttccgggtccaccccg

SEQ ID NO: 18756 - DNA, 648 bp, Zea mays
  Clone ID: MRT4577_117106C.1
ccctcctagggttccccagagagcaaaagggtatcgggggtcagttatgcgccaccgcctgctgttcgccgatcttccccctctcgccgtcgcaatcgccgtcggatgcctcgaatgaggatccactgctgcttgcgagtaggcgaccaaataagcagctccccctttgggagctgcagtccccaatcgaatcagcaagagcagcagctcttttgggagcggctcccttttttagtggctaatcgggaatcaaagcagtcctttccggattacaatcagaagcaggtcctgttttgaattcattatccgagtctccattggtggcgggaatccagcagatatatacatatctggccgggcggacaccgcgcgtctcgcagccaatcttcggaggagacggcaactcgtgagttttcagcttccaaattcacggtgaccaaatcttctcggccctcggcggatctacgcgggagccatggggaagggcaagaaagttgataggctcagctcattgcctgatgacattctggtcaacattcttgaccgactcaatgtccgtgaagctgcaagaaccagcatcctctcgagacggtggactcggctctgcgccaagctgtctcggctataataagcgctcagcacttcctg

SEQ ID NO: 18757 - DNA, 371 bp, Zea mays
  Clone ID: MRT4577_117107C.1
tgtgcaggagaggaggacgaggatcagcgagaagctcaggaagctccaggacctcgtgcccaacatggacaaggtataactactacgtgagtagttcatctatggcgtcgcaatttgcaaaggttttcttgcgcgtaatgcatagattaattctaagagatcgaggcggcgtcgtcagaccactcagatgatacatatatagaatgatgatcactgtgcaaagcagcagttctcccttgtgtatagtttgtgcatctagctagctaatacctgcagtcctgcacgaggcacacagcaataatggagatgcatgggatcggggtatctaattaagtaactatcttactgaacactaactagaagcgaaagaa

SEQ ID NO: 18758 - DNA, 422 bp, Zea mays
  Clone ID: MRT4577_117108C.1
cgtacaagctttttttttttttgtttttttttttttatattatgtttatttctttttcttcattttatctcattggttaccaatatattttcccttcttatgctccaagctctttctcatgtgttggtaaagcgacaattttccctccctggtgacacacctcctatagctaaccttggaaccccataccttccatcaatggtgggcccagtactgtgaaaacaaaaactttttaaccatataggcctccaacaagcaatcgaaaagggggccccccctttatcgcccttgtggttgaacaatcaccagtcctataaatgaggcgggaaaaagggacaaaccatgagggcacaacaaaagggtgcgcgggttgctcccaaacttcttccaaaaaggcctaaccttcctttgtgccaaaaagg

SEQ ID NO: 18759 - DNA, 505 bp, Zea mays
  Clone ID: MRT4577_117109C.1
gtgggggggtgggttttttttttttttttttagggtatatatatatatataggatcaaatcatatcatcggggaccaattaatatatgggtacaggagacgcaatcgggtcaaccaacatgcatgtatacacacgtacatgagcacaaagactgacgccaaacatgcagagagagagatagcaaactgaagaactctggtttttttttttttacacacacaccacacaatacctatgtatgggagccagctcgggctcgcttattattggtcaaccaccaccacaaggttgatagaaaataatcatatccatgggcggcgatcgatgtgatcaacaattgcagggggggcactttgaggtggtaccccagccccaagggtgggggggctttccggacttcgccgggggcttgacaaaatcgggggcgggcttttttttcggggccacccccaggaccaccgggggctgcgcgggggggctctttttcttcagggagggggctttt

SEQ ID NO: 18760 - DNA, 241 bp, Zea mays
  Clone ID: MRT4577_11710C.1
aaaaaaaaaaaaataaaaaaaaaaattaaataaaaaaaaaaaaaaaaaaaaaaacacccgcttataaataaaaaaattttccacacccaaccaaaccaaacaaacataccctttcttccaacactcaaaactcaatttcacttgccacctaattacaactccctgaccttcatttcacaacctcaacccttctaaaaccctttcctaccccaactcatttcccctccatcacatacccctt

SEQ ID NO: 18761 - DNA, 214 bp, Zea mays
  Clone ID: MRT4577_117110C.1
gggcgcacgcgtggaccggtctataggatacaagctcactgcacggcgtgcatagctatgtcatatatgtgttatattgtcaccttaaatgtaattaactggatagctggtttacagcgtgaaatactgataaaatcataatgttacacaacatactagccttgaacatcatgcgtatatcgtgaggtgcctaattagtgaacagactcacatt

SEQ ID NO: 18762 - DNA, 325 bp, Zea mays
  Clone ID: MRT4577_117111C.1
aaaaaaaaggccgggtttaggatatatatataggatcaaaacatatcatcggggaccaattaatatttgggtacaggagacccaatcgggtcaaccaacatgcatgttgacacacgttcatgagcccaaagactggcgccaaacatgcagagggggatagcaaactgaaaaactttgttttttttttttttacacacacaccaaacaatacctatgtttgggagccagctcggcctcgcttattattggtcaacccccaccccaagcttgatagataataatcatatccatgggcggcgatcgatgtgatcaacaattggagggg

SEQ ID NO: 18763 - DNA, 559 bp, Zea mays
  unsure (1)..(559): unsure at all n locations
  Clone ID: MRT4577_117112C.1
tgtgatgaatctgcagaatcgccttaaagagtggtaacaacgcagagtacgcggggagacccttgtatttttagattgatcgacgaacttcatggggatacagagacccttgtgtttttagattgatcgacgaattttgtctcattggtttttaaaaaaaaaaaaaaaaaaaaaaaaaaaaaaaaaaaaaaaaaaaaaaaaggaataaaaaaaaaaaaaaaaaaaaaaaaaaaaaaaaaataaaataaataaagatgaaattaagagtattgggtagaggtagaaaaaaaagaatggagatgagttttataatgttgtccgatggtaagagaccgtttntgagattgtagnctaaagattaagtggtaaggctgatggtgcaaatctgcctgggggatcagatcatgcggcagctgctcctgcggatgaggctgaggacgatgatgaccttgatctttttggtgatgaaactgatgaggacaagaaggcatctgatgagtgtgccgccgatgtcaaggccgtttctaaaaagaaagaaagttgtaaatcctccgtcctt

SEQ ID NO: 18764 - DNA, 565 bp, Zea mays
  Clone ID: MRT4577_117113C.1
ggccgcttttttttttttttttttcttttttttttttttttttttttttttttttttttttttttttttttttttttttttttttttttttaaaaaggggaaaaagggttttataaaaagagatgataaacggctgttcttgtttaatacggggggtttatttagagggagacaaaaagcaggggattttgtagaaacaccccccacggaaaacaaacgcaggcttatttccttataaaagggaaggggggcatacataggtctaatggggaacccctgacccccgttggttccgaataatcctaaggccttccaccaggggtcctcgccggccctaaagggggtccccacccacggaacaaaaaggaccttgccgtcatcaacggggggggaaaccaggcccagaaaaaaaggccccggcccacgaaccaccttgccttggttgttgaacgggaacccggggcagggccaaaaaaacttgttttgggggccgttccacggaacaacccagcgggggggaggccacccggggttaaccccgggggggcccaaggttttgtcctgc

SEQ ID NO: 18765 - DNA, 250 bp, Zea mays
  Clone ID: MRT4577_117114C.1
aattcggcacgagggacctaggatgcagacaaggccaaatccacatcgatggagccaagcccgatggccgttggtgttggcggcccaaagaggaggtggacgcgcagtcggaggcggaggtgcgtatgcccatcgtcgccatctagctgcgcctccttatatgcccctccggctccgattagcttacctccatcgatctccccatcatggacgccaacgccaatgccctcggcatggacgctatcaccaa

SEQ ID NO: 18766 - DNA, 863 bp, Zea mays
  unsure (1)..(863): unsure at all n locations
  Clone ID: MRT4577_117115C.1
ctcgaagccggccgggacgacgtctatctccccgctggacggcctcttcttcctccgccatcaaccacaatcaccaccaccatagacgtagatattgacacagacactcacctgtacacacatacatcgccgccatcatgcaacgcacacacaccaccgagagcatgcgagtgccattctctaacatctccactctcaacatgaacaaggccccgcgtccaggcattgaacgcgctcccacatccaccaacctcacccgtcccatgcccatccaacgcctcgagggaaaggtcgtgatgatcacgggcggcggcggcaaagttggtgtcgaatctgctggtcgtctactcatcgaaggctgcaacgtcgccctcatcgacattgaacaaacagccctcgaggccgccgtacccgtcctcaaagccgccatccccaccggcgtacccattgaatcgcgtctcctcaccattgtcgccgatgccaccaaggaagccgacgtcgaagcgtgcgccaagaaggtcgtccagcgctttagcaagctcgatgccgccctgttgaactgctgccagcgtggtgcctcaaagagcattttcgacgttaccgaagacgactttgaccgtatcatgactatcaacgccaagtccgctttccttggcgtcaaatacgcagcaacagccatgcaaaccacatccggcagcggctccatcatcatccgctcctccatcgccggtctccgcggcttccccaacctcatttcctacagcgcctccaaattcgctctccgcggtatcgctctcaccgccgnctgaggaactcgngtcccctcggtatccgcgttaatactatccacacgagcattattg

SEQ ID NO: 18767 - DNA, 564 bp, Zea mays
  unsure (1)..(564): unsure at all n locations
  Clone ID: MRT4577_117116C.1
naaaaaaaaaaaaaaaaaaaaaaaaaaggggggaaaaaaaaaaaaaaaaaaaaaaaaaaaaaaaaaaaaaaaaaaaaaaaaaaaaaaaaaaagggggcggcgctttaaaagggggcgcggtttcttttccggggtccccgctttccttcaccctttttttttgggggccctccattttttttaactgtcccctggggtgtgagaacacttggccctgtgaaaaacccctgtggtgtcccggaaaaacccgggttttgccacaattccctttttctcccgggggggccccttttgtagaaggcgcccacaattgcggccttttccccaacctgtgcggcccttcctggcgattgggcccccccctttggggggggatttccccctgggggggtgtttttttcccccagggtgggggttttactttcgggggccccggacccctcgcctttccctttttccccttttttttttttcccctgccctggctttttcccccggagccctttaattggcggctccctttttgggtcggggtttccgttttgggggcccttttccccctaa

SEQ ID NO: 18768 - DNA, 651 bp, Zea mays
  Clone ID: MRT4577_117117C.1
ggtccgtgccccgcttcggcttccagtacttcctgccggcggcgaagaaggcatcaaccagcagatcgagctggccatcctgcgggccgacaggatgggcgtcaaggtgctcagcctcgccgcgctcaacaaggtcagcttcagctcgtctatctatctggctagctctctttattgttacaacttagggcatgtacaacctaaacactgctgcacggtagtctaagtataagacacaactaaaacacaatataatacagtggtcatgtctaaaatatgtgtcttaccatattcattgtaccaatcaaagcattcaataaattaaagtgatcaatcagctagtcttctctctcgaacatagagctaagatactgtgtctttgtcaagatacatgtcttgagtttttttacattcacccccttagacacactctaagacacaacttaagacacccattgtacatgcccttacaaggcagcagcaggctgcacccagccccatgaacaatcatcatagtatgatgatgacctagcgtcgtactagctgcgtcccatctgcccgctttgattgatcatgcgacgaccccgatgactggccttcactccgtcgcgcccatcacgtgttgcgtcctgtactctctcgttgggcaac

SEQ ID NO: 18769 - DNA, 469 bp, Zea mays
  Clone ID: MRT4577_117118C.1
aaccaaaaaacttattttttcccctttctttgttaaacagaaacagctaaaggaacttgcccactacaaggtttttgacaggctttcccaaaaaacaaagcaaacccttaggccctttcccttaaacataataaaccctaccaaaattccctttttccggccgttaaggggggggggttcggaaaaaagaaaatttccggggcacaaacaaatccaatttgccggggaaaaaaacccaaaatattttatttcccttttccaagcacactttaaggggctcgtttataaaaccaaacacccctaacatatgaggggccccctccttttaatttcacacccaaaaatcaacggttggcaggaagtcccccatgccggggccgaggtcacagccgggcttttccggaaaaacctctttgatgtcgtcaagggcaagggttaatctccatttcctggtccccaaaagtccccg

SEQ ID NO: 18770 - DNA, 541 bp, Zea mays
  Clone ID: MRT4577_117119C.1
ttttgctccattctgagacggcgacgatcccgggccgtgctccgaaaccggtgagggagaagaagagatggccggcaagggccatggcccggctatcggcatcgaactcggcacgacgtactctcgtgtcggcgcgtggcaacacgaccgcgtgccgatcattgccaacgaccagggtgaccgcaccacgccctcgtacgtcgcctacaccgacttccagcgcctcatcggaaatgcggcctaagaaccaggctcggcatgaaccccatcaacaccagctttgatgccaagcgtctcatcggcaggaggttcaatgatgccctttgccagagagatatcaagctgaggcccttcaaggccattactcgacctggtgagaagtcaatgattgttcgtcagcacaagggtgaggagaagcaatttgcacctgaagagatctcctctatggctcttatcaagatgcgagagattgctgaagcttaccttggtagcacgatcaagactgctgtggtcacagaccctgcctacttcaatgactcac

SEQ ID NO: 18771 - DNA, 873 bp, Zea mays
  unsure (1)..(873): unsure at all n locations
  Clone ID: MRT4577_11711C.1
ttgggtacctcgaggccggccgggaaccgttcgccacctaaccctagcgcgcgccactctccctggcagccgccgccaggaagcctccactccttctccctcttctctcctccccttgctcttctctggccgacgccacttgcgtgtgcaggcaggcaggccctggcgtccgcgcatcctcttctggccaggagctcccccacgcagccgctgctctctccacgtcctctattccttcccatccccgatctcccccaatccgagcagaccggttgtcgcttgctcatggcgtcaggctggttgcttcctcaaagcgagcggcgcatcaactatttatctacgtcctggataatcgaattgctttgccgtggaagcaggagaaggaagaatgcaaaacacgtagtgagttcagttgtgacacaagcaccaaactttgatgggtatcagtggagaaagtacgggcagaagtggatctccaaagcaaagcattctaggctgcaattgagtacattcattctttatcaagggcacagtctgctcgttctctcaatggtgctggcctttgtcctgctagtagatcacttagcacccaggccgccactacgtcaagcacaccacagttgaaagcacaccccatgtcaagcagccaggccaccactacgttaagcaaaacagaagacgagaagaactgatgtagccatgttcatgcttccactgttgaaatgcatattcagcatagcttactcagntcctatctgttgttcaatggtgatttaaaagagagctggtagttgtgagctatctgtaaatgatctagttgggatgatattataatgngatgctttgtgaaaatataatggggggcctttggtt

SEQ ID NO: 18772 - DNA, 265 bp, Zea mays
  Clone ID: MRT4577_117120C.1
tatgggtcttcagaccattaactttatctactccataacgcataagaacccgatcgacaccattatggtgttgctcgttgccctcgctctcctcgctctcgcttcgagcgccatctccacgcatacaatcggcggctgcggctgccaacgaccgccgccggttcgtctatggtcgccggtgcgtctgcgacctccggttcacctgcgacctccggtgcatctcccaccgtcggtccaccttcgctcgccggtccacctgtcggcg

SEQ ID NO: 18773 - DNA, 370 bp, Zea mays
  Clone ID: MRT4577_117121C.1
gtgcacaggcttttttttctaacttagacttagtcatggcttgggttaccttgggacaggcccccgggcaacaaaaaaggcaacttggaggcccaacccgggaacatcggccgggcccggcaaaatggaaaaacaagcagggaaagacaacgccgaaacgaaggcaaggagggacaaatggggcgggcagggctgaaccctggccacccaaagtcggagggaaccctgaccaaagggggggggggtacctccccccctaatggacccaaagaggaaacgagaaatggaggggcggccgccccacttgaactgggggggcaaccccaaggaggggccaagggaaaggaaagcggaaccaacccaccccgaa

SEQ ID NO: 18774 - DNA, 344 bp, Zea mays
  Clone ID: MRT4577_117122C.1
ctcattgggtgggttattttttattatttcttaatctctactttcaaaatcccctttttatttatccccattcaatctttgaaaaacaccctttttgttgacaataccttttgggttccaacggccggttttttggaaaaaaacaattaaattaaaaaatgcccaattaataggaataccaaatatatctccctccatttcaaaaggttatcgaaagcctggcccacccgtgaacactttcgtatatacccatttaagccctgaacttaaccccacttcacccccgggcatggataactgctttcctacaaggttcaatcatttaaaagggcttccttttaaaa

SEQ ID NO: 18775 - DNA, 412 bp, Zea mays
  unsure (1)..(412): unsure at all n locations
  Clone ID: MRT4577_117123C.1
tccattttcacttccaacatttcatttttcccaccgaagactcancccatgggcagagttactcttaacaatccccagcccacaataccaaaaaaagcatggatgcacactgaaccttccaggtatgaacatacgacttcataaactgatctatgatggcaacactatcgctctttaatgccaggagaacattttcctaactacaaccaaagtacctattacagacattaaacagaaatacacaaaaatcacattcactcccacacaacctgacctaaaatgaataccactacccacctaactaaatgaacttcacaatagccacccctaacaactaagtaaatcccacacaattaaacattaacttccaaccctccattcaaaacccgaaatgcttcgacacgtacaatca

SEQ ID NO: 18776 - DNA, 1072 bp, Zea mays
  unsure (1)..(1072): unsure at all n locations
  Clone ID: MRT4577_117124C.1
taaagatggctgatgataaggggacacttgtcgatattcaaaatctcgatattcggtttggacctgctgacatagaggagttagttcgtaaagcattacagctaaattgtactgcgaagcccattaaccaccccacatatgatgatccaaacaatggtgagttgttcactaattaaagaaaaaaacgctattattccttttctagaccccactcatgtgggagcccgcgacactaggtctaccctttatatatcggttgaatgaaagaagggcatccctggtgcagtgagaggctgagagctgtctcattgaatcactaggttgccggttcgaagcagactttctgcatttgtggggaaggcttgcggcttgcctcagtttatcctttctttaggccccactcatgcaggagccgccggcactaggtctaccatttttgcatatatatctgttgaatgagtgacagtgaaggtggagactgctttttattcaaagggggtgtggaggtgactagcacagtagcaatggtggaagaccaccgattgggtggggctgtatggtgtggtgatgtaccatcaaaatggttagcaagggaatgggcggcaaacgtggatctggtctggtgagggtggggcagggccatctcactggagatagagaggaggcaattgcaggcaggagatgcgtgacaatactaaaggagggagggacgatggccaattgtggatatgttcactggcaagccatgctggtaccagggatggtgatggcaaggttgtggtggcaatgttttgtaaaatgacctggtattatgtagttgatgtagtgaagggggaagagaacggacatctggatctccatcctagcgcccaaagtcttgtctgatagcttgcccagtaacctgttgacagatgcataaactgttaatattttccatagatagctttgtcaattaatgggagaatgctnattttttttcttcttgcattttactggcagtggttttttctatctgtaggcaaagcatatgctatattcagaaactaagatgctgctgatgctgcctttcaaa

SEQ ID NO: 18777 - DNA, 103 bp, Zea mays
  Clone ID: MRT4577_117125C.1
gtcatggacgtccggaccggcctgttcccagcgctcctgggcatagtcctcgccgcttggatccgcggctcgggtgcccagcagagtgccaccgtggccaacc

SEQ ID NO: 18778 - DNA, 244 bp, Zea mays
  Clone ID: MRT4577_117126C.1
gcaagaccagctagctagctcctcccactgttatcacccgggccccggccatccatctagtttaaagaaaaatcgcagccatcaaaactactagctaagggcattgcattcttcctcctggcggcaatgctggcagcccattccgtgggggacaacatctaatgctaccacgcgctcatttacctgtcatcatccctgcggtatttgtatgggaagtaatccaaacccagcaagagcagcaaca

SEQ ID NO: 18779 - DNA, 249 bp, Zea mays
  Clone ID: MRT4577_117127C.1
atagaaagctaagttgcctaataaggcgtagcctacctctcatcagtcatcggaaaggacagcatctaataggcctactactaagactagcgtctctcgcttgtccgagcacaaaagtgaatgccatcaaataccatacctcagttcttgagatgcttccatttgaagaaacacaacagcgtgaaaaaaactcgcgcaggatcccaaatccatgtagtacctgctccatttgctgttctttcaatgact

SEQ ID NO: 18780 - DNA, 283 bp, Zea mays
  unsure (1)..(283): unsure at all n locations
  Clone ID: MRT4577_117129C.1
tgntttagaggcaggggacggacacccccggggcattcattggaatacgcatgtgttgctccgccatggagccaccatcagcggggccgctccaaacttaagggaagcgtaaaacgggtccaaaccggatgtacagatagtataggaggcagacttgacgtaaagggtgacaaaggagagcacaggacagtgcaacgggtcttgaaataagaactggagcggacatgatgaccagcgtgaaaaacatcagccacatataatccaatccttggagcggcaaaac

SEQ ID NO: 18781 - DNA, 370 bp, Zea mays
  Clone ID: MRT4577_11712C.1
ctccctccccctttctctctcttgtctctctaccgccccaggcccccccgatctcctcctcccactccgatcgcccgaccgatcgccgagcttccctgttccctccccgcccccgcgacgccgcgacgccatggagccgccgcacgctgagcaggccgtcgccgctgtagcagcaggaggagagggtggcactgcaagcccggacaccggcctcgaaggtgctgcctgcttaacgtttttttgtttcgttcagatctccggccgggcgtacagccgcgcggatctctggtaaccgcgtggtacgagaacgtgtggcttttgcagggccgttgcttagcgcggtggctggacggcggtggggaaggggagg

SEQ ID NO: 18782 - DNA, 270 bp, Zea mays
  Clone ID: MRT4577_117131C.1
acgcccacgcttaccaccacgcgtacccccacttttaccgccacgcctcccggcctttcaattcgggttaatttaaaacactaaaaagcctttatttgctatcttccaacttgatttcttgttcattgtatccaatttacagaattccctcctgacccacatttaaaaaattaaaatccttgctttctgacttaacaattggtcttctacacccataagaagttgaaaaaatgcttaagccccttttattacttggcccaatgaccttga

SEQ ID NO: 18783 - DNA, 523 bp, Zea mays
  Clone ID: MRT4577_117132C.1
ccggccattggcccccatctccccctcacgctgtttcctccaccgcgcctctccctggacgccgcccgcgaaagctcgccggccgtccttgctcttccttccgcgtcggcgccttgtcccctcctgctcgcctcgacaaggtcaggtccggccgtcacttccccatggccgctcggatctcgcctagcgagctcggcctcccatcacgccgttcccccacgcactgctccaagtccggccgccggtcgtgctccttccctcgacgtcggactgcgtcccgtgccatgagatggaagatggtgtggtggctgatgtttctgttggcgggtcgcgtccgcctcgtgtgcatcatctgagcgatcgtgttgggccggaccgaagaaagtgagctgttgggcgtctgcgtgcgccagaatagctaggtctggtttggcagcttgtaagcaagcagtatttatgcactacctgaccgaagaaagtgaactattttctccctgctaaaaaaaaaaaaaaaaaagcggcc

SEQ ID NO: 18784 - DNA, 725 bp, Zea mays
  Clone ID: MRT4577_117133C.1
cctcgagccggccggcctcctcaccagcatcggctcttagtcttcaccatggccgccgcccacctcctcgccgctttgtcctcctccaccgccttgcgccctcctctccgcctccgttctccacagcatccaccacatatccgcttcaactgtactgggaggcggccgttcccggtggtacgcgcggctgagaccgacgccaaaaacgcgaaggcgaacgccaaggccccgaataaggcacccgcggcggatggctccagtttcaaccagctgctcggtatcaagggtgctaagcaagagagcgacatatggaagatccgtcttcaacttactaagccggtgacatggcctccgcttgtttggggagttctctgtggagcagctgcctctggaaatttccactggacagttgaagatgtcgcaaaatctattgtatgcatgataatgtctggtccatgccttacaggatacacacaggtttacttttaaattctctttgtcagccttcatttataccttcagagatgctgcgtgggagactatttctactaataagtatgtcagccaaacattcttgcttgtagacacttaatgactggtatgatcgagacattgatgcaattaatgagccttatcggcctattccatcaggtgctatatcagaaaacgaggtaataacccagatctgggtgctattgctaggagggcttggattgggtgctttg

SEQ ID NO: 18785 - DNA, 561 bp, Zea mays
  Clone ID: MRT4577_117134C.1
tgggtacctcgaggccggccgggcagcgtcgtgattgtcgtcgtcctcgcgtctgcctacccacccccgttgtgcccttgggcccggatctggcccgacgaacaacgaatccctctcgcgcgcgcagcgccacagtcgtcgatcgcagtggcagccgcctagccagacgattgagccccaccgctgctgccgtccgtggaatggagctgactgccgacgagttgagccgctcgtggaatggaactggcagcctcctcctcctcctccgccgccggctgtggcgacctcgaagtgcacgacgccaatgacgctccggggaacaggtcgtatctgatgaacaaggcgcgagcgttcctggagctcttcttcgcgatgtggttcgtgatgggcaacgtgtgggtgttcgacgcccggctggggtcgctccagcgtgcgccgaggctgtacgcgctctgcgtcagcctgctggcctggaacaccgtcgtctactcgctcacgttcctgagtgctgcatctgccttgcgtcatacggggcagaacgaggaggttccggcagcctgc

SEQ ID NO: 18786 - DNA, 365 bp, Zea mays
  Clone ID: MRT4577_117135C.1
atattattatttttacatttttttcagttttctttattttttattttttttagggggggcgacggcagaataagcctaaacaccgaccccaaaaaaaaaaacaccagataacttggaagggcggaaaccactttttggttgagtgaaggcacccatactattattaccaccccaaagactggggtccatcgaaaaaaaacgggggaaaaatttgggccccatactccttgcaaaaacggccttgaccaaaaaaaaacagtggacagaaggggcaaaaaaaaaaagtttgtcaaaccaaaggggttgaggcaaccccaaattcccgtaacaagaggtccgaaagggcccttgccaaaaagagcggg

SEQ ID NO: 18787 - DNA, 387 bp, Zea mays
  Clone ID: MRT4577_117136C.1
gggcgacccacgccttcggtccatgacctcgcattggtatagttgcaaggttatgtatgcatgcttacggatgttttcatggcttaatggcgccgctaggaaatgacatagatatgcctgtttatctcctatcatccctggtttgatgacaaggggataggagaggagaggaaatcccttgctattcaaaaaattttcttcaccatggatcccctctaattctcttgtcgccaaactagctctcggttatcaggttgccacttgtgcataatgttgttcagttgtattgtgctggaaatcgcaagtaaactgctcatccagttctatgaagaaaaaaaaaaaaaaaaaaaacaaaaaaaaaaataaacaaaaaaaaaaccccccccc

SEQ ID NO: 18788 - DNA, 423 bp, Zea mays
  Clone ID: MRT4577_117137C.1
aattccctatagctgcgcctcgatattttttctccctctgctcgtgcacctcggcctgatacatccgatgccggctgcgccctggctgacttcgaggacgaccacattctgaatcccgcggcccctctcctgcaagaagggcatacatctacgcctgcaccaccgtatgctcacgcgaccctgacaagatacggctgacataccgtcatacgagcaaccgtgacctgcaagcgtgcgcaaggtttctgcctcacaaactgtaaagcatgcgcaccgcacatgtctggttggtcacctagagctacttcatgggcaaaatcttcaagaaagtgaatcgtcgtcacaccactgagacgttccatgtgcgcaccgaacttgggaacccgtgcctgtgaattctaaagatgcgtctgaggaacgtct

SEQ ID NO: 18789 - DNA, 332 bp, Zea mays
  Clone ID: MRT4577_117138C.1
gggccccaataatcgggccgggtgttcctaataaacccggggggggctttaggggattgccccccccccgggggggggggggcccatggcatccccccctccctagaaaacctcactttgccggggggttcaaaggaaagcatggtttttggggggggggcattccaaattaagcaagggggggccccttacccttttcggggaaaaaaacgcccaccctaggggggggggcaaaaaaaaacaaccccttccaaatttggaaaaggggggacaatggggggcgggagctgggggggatttttttttaggggcccttgggcccctctttttgg

SEQ ID NO: 18790 - DNA, 574 bp, Zea mays
  Clone ID: MRT4577_117139C.1
ttttttttatgaataaatacagaaagtaaatgtgtttgtacagcatcagaaagaacagacgacgcgttcgtacagtgggaagtgagatgtcctgagccatgagttccacttgagttgattcactcttgccaaaccatcctcatttaggctttgtttgtgtactgtagtattgacctcaattcacatgtaaaatagtttaagttacaccccaattcacctcaatacatatggattgggtcaatattagaatacccaaactagccttagtcattgaagcccagcatgccttccagttgtcatcagcacaactgatgcctttttgttctcgtgccatcagtattcttcagcgacagcttcttaaactggaattgttttttcaaacatcaccgtttttatcattatgcgattgcacgtcaattgttttgaactacgtatacctttgatttttccaagctctttctgattcactgagccatattgttgagctgtacatgccagctgcaacaatacttctcaagccttcatctgtaaaatatgttattcttcggatgacattatgatccaaatagcccac

SEQ ID NO: 18791 - DNA, 395 bp, Zea mays
  Clone ID: MRT4577_11713C.1
gtggtgcatcttgagcgagaaaatcgcaggctcctgaatataggcggtgcaaccagcccaaagcacccattaaaacttttacacgtcgggttcaacacatgggtttcaagttctgaagcaaaaagctaaagcgcataaatcaggccttttaaggaaggacccatttttttgatgtaggaagtcctccacagcgagccagtggccttttcaacggcccttgatgaaaccaatggccttggcggtcctggggaagcactggctgtaccacatgagcccgtcctttctgatcacaccgtgggggttctcccaaacccggcaaacccgggagccagggcccgaggttttagggtgccagagcgctcctgggtcaacccgggaatttcggaccggaacct

SEQ ID NO: 18792 - DNA, 202 bp, Zea mays
  Clone ID: MRT4577_117140C.1
gtcctttctatgagaaaggtgtgtgttctgatgtctgcaataaatgatctggacttgagaagcaatgcaatgcaacacagcagtatttcatttttaccccccgatggaagcaggcggctgacacggccacgaccggcagcttgtcaccgtaacagcatcggatggcgaggagccgccgatctgacctgttcctacttctact

SEQ ID NO: 18793 - DNA, 433 bp, Zea mays
  Clone ID: MRT4577_117141C.1
gggctgcaaagcaggcagctgatattatgtatcagcatagagaggcaaaacacgtgattatgaacgagcatactgtccatgacaactctaacgccaacatgccaaagatcatattgaccactggggctggaaagagttcaatcaaatagaaaggttgtgcatccatggcaaagggagcatgtatgccaccatgaaccacactggtcgcttgaaaatatcacctgccactgatggagttggacagacaacggatcagacctaatactacagtcggacaagcatctgctaaagccaccaaccacgcgttgaagacggtcagcaccatggtgtcgattgcagcaaattttccaaataacatcatagaaaacatgcgtatgccaaacagctgaggcaatctccatgagcacacggacacatggcaacaggaggcacc

SEQ ID NO: 18794 - DNA, 342 bp, Zea mays
  Clone ID: MRT4577_117142C.1
cctttcatcccatttcgtctggccgtctaatccgttggacggcccgttctgtgcgtggtagcgctatgatctgctctgaaggagttttgagaagcatacatggatccgaaagttgctcctgtcaagaatgttgatgccaaggtcaaagtcttggatgtggccaaggtcgtcatgtttgaggcaggcaaggagaagagcaaggtcattcgtacatctgtcgcagttcaccagatcacaatactaaatatcgccaaggatacgaagttatcacgcttcaatactactgtcatcaacatactcgatcagtatcatatcctcaaatatcctctcaacacataatct

SEQ ID NO: 18795 - DNA, 548 bp, Zea mays
  Clone ID: MRT4577_117143C.1
ccacgcgggcggggatgcaaatctttgtgaaaacccttactggcaagaccatcactcttgagggggagtcttcatataccattgacaatgtcaagggcaagatccatgacaaggagggcatcccgccggaccagcagcgtcttatctttgccggggagcagctggaggatggacgcacccttgcggattacaacattcagaaggagatcaccctccacctggggctgcgcctcatgggaggaatgcagatcttcgtgaatacattgaccgggaagaccatcaccttggaggtggagagctccgacaccattgataatgtgaaggccaagatccatgacaaggaggggatccccccggaccatcagcgggtgatcttcgccggcaagcacgtggaggatgggcgcaccttgggtgactacaacatccagagagagagcaccctccatcgggggctccgcctgaggggcgggatgcagatctttgtgaagaccttgacctggaagaccataacccttggaggggtgagagctctgacaccactcgacaac

SEQ ID NO: 18796 - DNA, 305 bp, Zea mays
  Clone ID: MRT4577_117144C.1
gggaaaaaaaaacccggagtttttatgttaggtccaatgggaaacttggggtttttaaaactacagtttttaaaaaccgtttttccaaacgggccctaggtttttgcaattcttaagtttaaaaaacatagtttttttttagatgggcaaacaacatttgtgttttaaaaccggagttttggggaatactacagttttttaccaaaactgggcttagacccccccgaagttgggacaaattttaaatttggggggcccaaaggggagggggaagcctccgttttattttttgcccaagggggggg

SEQ ID NO: 18797 - DNA, 324 bp, Zea mays
  Clone ID: MRT4577_117145C.1
gtggtgtgcagatctttgtgaaaaccgttactggcaagaccatcactcttgacgtggaggcttcagataccagggacaatgtcaaggccaagatccaggacaaggagggcatcccgccggaccagcaacgtcttatctttgccggcaagcagctggatgatggacgcacccttgcggattacaacattcataaggagagcaccctacacctggtgctgcgcctcaagggaggaatgcagatcttcgcgaagacattgactggcaagaccattaccttggaggttgagagctccgacaccattgataatgtgaatgccaagatcc

SEQ ID NO: 18798 - DNA, 1090 bp, Zea mays
  Clone ID: MRT4577_117146C.1
ccggccgggaacgccttactaacaaacacacaccgcacctaccccggacaggaccggcaggcaatacagcatggacctaggccctcctagtagaaggccctgctgggcctgttcgacgaggctgatggtggccatcgccgtggccagctgaccgtcaagcgttaccgtctaccaccggggcccccgggcgcccccgaggtgggaaactggctgcaggagggcgacgactctgaaccaccgtattttttttgtcatggggaagcggttcggcgacatcttgctgctgcgcatggtacgtgcgcacacccggaggtggtgttgaccccggagctggccaatgaggtgctccacacgcagggcgtgaagatcggttcccgcacccacatcgtggctgtgagacatcttcacgggccacgagcaagacatggaggcacggagcacggcgaccactggctcaagatgcgacgcatcatgaccgatctcttcttaccaacagggggggcgccagaacactgcctgctacatgatgcagaccgagtgaccgtgcactaggtgatgaagcgcctacgggggcatggcgaactgttgtcaagaccttgactggcaagacaatcacccttgaggtggagtcctcagacaccattgacaatgtcaaggcaaagatccaggacaaggagggcatcccacctgaccagcaacgtctcatctttgccggcaagcagttggaggatgggaggacccttgctgactacaacatccagaaggagagcaccctccacttggtgctgcgtcttaggggtggtatgcagatctttgtgaaaacccttactggcaagaccatcactcttgaggtggagtcttcagataccattgacaatgtcaaggccaagatccaggacaaggagggcatcccgccggaccagcagcgtcttatctttgccggcaagcacttggaggatggacgcacccttgcggattacaacattcataaggagagcaccctccacctggtgctgcgcctcatgggaggaatgcatatcttcgggaagacatttaccggcatgaccatgaccttggaggttgagagctc

SEQ ID NO: 18799 - DNA, 3799 bp, Zea mays
  Clone ID: MRT4577_117147C.1
cttcggtgcagtttagcaaaactatgaattaagctgattggacggaaatctttgggagtcattgcctcatctttcttttgggattaacgtgagataagtaggattcagtaaccaaagcttcgtagtattcttttgttgtaacatgatgatggcttccatgaagtccgatttaattgttggccaacatgccttgtagaaacgcctagtgaatccatctggacccagcgccccatcagcaggcaattcttttattgttgcccaaagctcttctgtcatgtccctagtcagctccaaaagattaactctttacctatgaaagatttccaggttcagagaggacgaccgttcggaaggactcccaagcagattattaaaataagagaacatgatatcttgtttctcatcatgcgttgttatccccctgccttcatgaaccaatttagctacaaagttttccctcttcctaaaaccagctgcctatgaaaggaggtattagcatctccatcttttaaatacctaatgcgtgagcgaagcctaacaatggttctctcaagagatgccagtactaagcagctctttttggcttctcttctcagcccttcacccacagaaatctgtctactgtcttgggctatttccaatttgtggagaatctttcttgcaatcccaagctgtgatttgacatggccaacttgtttctgccccttagattgaagaacacgggctaatctctttagcttgatcgaaattcgctccatgggacaaactgccactaccgattcattccacaaattcgccactgtttcgaggaagttaggcaaatccatccaaagttcaatcactgtttttctagaacattttttcagcaataaagattctctgtgtatgtctaaataaaactatagttgattggttacttatgagtcaggaaatatttggcacatttcagctgtaagttctttaaaaagcacacttctagaattcaatatcttcaatatcacaatggttgtgatatcacaatggctgtgtatgtagacagtttgatagcagaacttgtttaatgttacacttatatttcaaataactgtagtttgtgttgaagtgtataagtccattgtccaattcttcttgaaagcttaagtttttaagttgaactggttggtgtgtgcaacttaacatgatatcaaagtcataggtctcgagttcaaatcctgttagaagcaatttaagtccttgaccccttttatttctacgtttgcgcctctctctggatgcatgtgagtcacatttgtgtctctctggctgcacgtgagtgggtgtgttgaagtgtgtaagtgcattgcccatctcttcatgaaagcttaaactatttgattgaactggttagtgtgtggaacatgacagtttggaggctcagaatttccaaaacatctacgtttgtcttcattggcataatacatttctgttttaattcatggatggtctgctcataggtaccatttgtgtgcaaaatttcaaaaaactacatttgtgttcatacaataatcttctggaggaagtaatagtaatacccatgctgctctcaagattatagaagctgaataatggagatatgataatcttatttcttttttcgtcttagcatagctaagcaagcttcccagagtaaaggagtcggaacatgtatccttgaggttgtgggaaggcccaaggcctgtttgttttcctatggctttgtgaggggcggtttggcagttggtggcacttggcagtctggcgttttgtcagtctggcacttggcagtctggtgttttgtaaactgtcttgagtaggtggcacttggcagtctggcgttttgtagtgtagaccagtaggtagagttccgtaatattctctattaaaattttgaaagtttcaaataatttttgttagctttttaatactctaattaactttacttgtttgttattccattatcctgtttcagaaagaagtggtaagagtgtggttgaattgccacccgaactgtgcatagttgtcatgtcaccaatgtccgcaattactttgcgcagcttcacatttattccttctataatgtatcggatccagtgtatgctcctttctatgaatttgaaaatgcaattgggtccaagcatgcagcagtttgatattccagcactaaagattctggaagcacttacaacaaagaattgccaagaggaattttcgcaggaatcattagagacacttggggactcttttctcaagtatattacaacccaacacttttttgtcaaatacaaacatcagcatgaaggcatgctaaccaagatgaagaaaaacgtgatctcgaatgcagctttatgtcagctggcttgcagtaacaatcttgtgggatacattcgaagcgaagctttcaatcctaaaacatggatcgttccaggggttggctatgacatatgtgataggagtctgaggaagctgaaaagtaagagaattgcggattcagttgaggccttaatcggggcgtatctcagtactgctggtgagcaggcagcatatattttcttaaaatctttaggaatggatatagagtttcacaaaatgccaattgagagggtaatcacaatcaaagcagaagagttcattaatgttaaaagtttggagctattgcttgactatagtttcaatgatccttcattgttgatggaagcactgacacatggttcatatcagattgctggcactactccatgttatcagcggctggagtttcttggggatgctgtattagatcatatttttactgattatttctaccatcagtaccctgaatgcactcctgaactgctgacagatctgagatctgcttctgtgaacaatagctgctatgctcatgcagcagtaaaagcaggattacataagcatgttcttcactcgtcatcagcactgcacaaaaggatggccgactacctggacaagtttgagcagtcattttcaggtccatcacatggttgggaagcaggcatcagtctgcccaaggttctaggtgatgtggttgaatctatcgctggtgcaatttacatcgacgccaagcatgacaaaggggtcgtttggagaagcatgaaacggatactggaacctcttgtgacacccgacacccttcagaatgaccctgtgaaagagctccaggaattctgtgatagcaaaggttacactttggagtacacggtaactcgtgacaacggtgtatcctcggtggtcgcagaagtgcggaccgaagggactacgtacaaggccactcggacaggcttctctaagcttgacgccaaaaagttggcagccagttccgtgctccgtgatttgaaggctgcggacacaaagcagtactctgcaaatggtatcagttgcacttaaacttcatagctctatggtatatacttttgtacaaaatcgtcgaatcagtaaggtgtgcaggtgcctaggcacgctaccctacttttactgcatctacgtctacggccacactaaagcagtacgtgcaacaatgttttgttttggtcatgtctcttgagagtgaaagtgtagcgttatttttattttgattcgcatttttgggataggcctggtggtgcaccagggcaccaagcgagtatgtggtccgtagggtttttagattactcttgtttcgagatgattggattaaattcttgtagagctgattggatggttcaatatcttggtttttagaatggtcatacgagtcttaatcatatcgagagctataatttttatacac

SEQ ID NO: 18800 - DNA, 905 bp, Zea mays
  Clone ID: MRT4577_117148C.1
ttcggagctgcgctgcatttgctgctaccaggcatgcacgatatacagacatgactgagaccccaaatgtgcgcacagcgcacgctggcgctgtgttctcacacaccgtcgacactgtgaacgcatagcattcacgacaaggggggcatcccacttgaccagcagcgtctcatatttgccggcaagcagttggaggatgggaggacccttgctgactacaacatccagaaggagagcaccctccacttggtgctgcgtcttaggggtggtatgcagatctttgtgaaaacccttactggcaagaccatcactcttgaggtggagtcttcagataccattgacaatgtcaaggccaagatccatgacaaggagggcatcccgccggaccagcagcgtcttatctttgccggcaagcagctggaggatggacgcacccttgcggattacaacattcagaaggagagcaccctccacctggtgctgcgcctcaggggaggaatgcagatcttcgtgaagacattgactggcaagaccatcaccttggaggttgagagctccgacaccattgataatgtgaaggccaagatccaggacaaggagggtatccccccggaccagcagcggctgatcttcgccggcaagcagctggaggatggtcgcaccttggctgactacaacatccagaaggagagcaccctccatctggtgctccgcctgaggggcggtatgcagatctttgtgaagaccttgactggcaagaccataaccctggaggttgagagctctgacaccatcgacaacgtgaaggctaagatccaagacaaggaggggattcccaccaaccagcaaggtttgatcttcatcggctaacagctggaggatggacgcacccttgcagactacaa

SEQ ID NO: 18801 - DNA, 2369 bp, Zea mays
  Clone ID: MRT4577_117149C.1
cgggattagccagcactagttcagagagaggtgataaaacagaaaaagcagaagatgtagccaacccatccgacaaggtgttgccttcagctgcatcaacaacactgaatgcacctctccattttacatctgtggcatctacttcgagcctgagcaatggcttgtcatactcaccaccaaagctcacaactcctccacctactgataaacctgctatcagctcagctgtttccacttccatatttgccgtatccagtagcagtccagctatttcatcgtctcctgcatttacgggatttagtttttcttccagtgctccggttggattgtcattggtaacatcagctaaatctgatggcacaactgctgaaaataaggcagctagcaccttatcatttggtatagggggtacaaaagctgaagtgaaatctgttgcaccagatgcaagcagcaaggcatcatcggaactttttatttcacctgtgtcatcaagtattgcaagcttttcaagttcccccgccacatctacgcctactttcaccgcagttgcaccttcaagtgatgctgctggaatatctgtggctgcaccatctagtacttccactgcaccaggtttacagtctgcttcaaccccttcatttacatttccgagctctggaaacaacctttttgggttcagctccccagcccaatctactggcctcagtacatcgtcacttgctggtagtacctctcaaccaccagctgctagcacactctttggtagtaagccgacgcagtcagacggaacaatacaacaaacatcccagagttcaaaaccacaatctggctcaccattcccggtcatgactcctggagttggagcatcctcgtctggacctgggacgctatcttttggacttggagcttcctcaactggttcaggcactgcatcttttggtgtcggagcttcatcttccgcacctggaactttatcaacttttggtgcagcagctcactcttctggacctggagttttctcttttggggcaggaacttcctcatcaggacctagcactgcctcttttggtgcagcaacttccacatcagggactggatttggcaattcaccatttggaactggagctacttttgcgaatccatttagctctagttcaagcactgggttcacattttcttcacctagctcttctgctggtgcatcaacagcggccagtacgagtgtatttgccagcacctctacagcttcttcagcctcagcttttagcaacccttttggctcaagttcatccccacccagcacatttacatttgggcaatcaggttcttcaggcaacacttttgcatttggagcgcagccagctccaacgttcccatctcaaccatcacttttctcatttagttcagccaacactagcatgaattcgtctccacagcctgcatttggaatgataaataccaacacagccttcagcatggcttcccccggaaatgatcagatgaacgaagacagcatggcagatgacactagtcaggcagcacctgcgccagcgccagtatttggttcatcatttggacagcagaacaactcatctgctgccccggtatttggtgctcccgcggtccagccaggtggtgtttttcagttcgggggccaacaaggttcagcacagcagaacccgtccttcccagctgttggcagtctagagtttcagggtgggaacttttcgttgggcagcgggggtggtggcggtgacaagtcgaaccgaagagtgatcaaggtcaaaaggacaccaaagaagagataagggtgcgccctctgttggaatcttcctttgatggtgtcatttgtgattggatcgcactgcttgggaacgaagtcaagtacgacgaggttttatggccacgcagatttccctgcagcagggcgatagcgctatatatctcatggctggcttgtaaacgcatccaccaaggtcagtgtagtctcctgtgcactcaattcatttcctcatcggggccggcggcctgcatgttgtgtaatatgcctgtgctcatggggtgtaaaatagaacaaaaaagtgttgtaatttttgttttcttgcctccaaatgccgacttgatttcttatctgtggtttggctacggtatatttgtatcggagtgtaacgcactgttgtatttttgtttttgggtttattacattcaacaaggtcagaactgtatcgtagaatacctgtccatacttaatcctgcctacgcattaattataaaaaaaaaaaaaatatcgaaaaacttccccggtacccatttctatattttttttaaaaaattacaatcttaatttcaatattaaataaatacttaat

SEQ ID NO: 18802 - DNA, 1227 bp, Zea mays
  Clone ID: MRT4577_11714C.1
ggccgggccggggttcccacctaaccctagcgctctccactctccctggcagccgccgccaggaagcctccactccttctccctcttctctcctccccttgctcttctctggccgacgccacttgcgtgtgcaggcaggcaggccctggcgtccgcgcatcctcttctggccaggagctcccccacgcagtcgctgctctctccacgtcctctattccttcccatccccgatctcccctaatccgagcagaccggcagagccggggggggcggcgatggcgctgcgacgggcgctcctcagatcggcagagacctctttcgaacgcaaggtccgacccccctcctccccccctcttctctgtatccttgacattttgttcggttggattcagtagccgggagattcggaatcccgcacgcgagttggtcctggccagctggcgtcgtagccacactatgggacatgcgaggttcaattgtgaactgagagtctgaacctggtgtaaacggggaagagccggtgggcgaggtggagcgggtcgtcgtcctggatgtcgtcgaggacatccggttgtcgcttgctcatggcgtcaggctgattgcttcctcaaagcgagcggcgcatcaactatttatctacgtcctcgataatcgaattgctttgccgtggaagcaggagaaggaagaatgcaaaacacgtagtgagttcagttgtgacacaagcaccaaactttgatgggtatcagtggagaaggctgcaattgagtatattcattctttatcaagggcacagcctgctcgttctctcaatggtgctggcctttgtcctgctagtagatcacttagcacccaggccgccactacgtcaagcacaccacagttgaaagcacaccccatgtcaagcagccaggccgccactacgttaagcaaaacagaagacgagaagacctgatgtacccatgttcatgcttcccctgttgaaatgcatattcagcatagcttacttagttcctatctgttgtttcaatgttgatttaaaaaaagagctggtagttgtgagctatctgtaaatgatctagttgtgaatgatattataattgtgatgcttttgtgaatatataattgtggtgcttttgtgtttatgtgatagatctatgcctgtggtatactgattaactgtgtatgtctttatgatttgtgtataaaaatctgtgatttgtggtgctt

SEQ ID NO: 18803 - DNA, 112 bp, Zea mays
  Clone ID: MRT4577_117150C.1
agagatgccaagcgcagaatcctgtcaactttgctcatgaccaaatcggtcaaggtcgcccatggatggaggtcacaggatgcaagcctccgccgcggtcaccgtcacgcaa

SEQ ID NO: 18804 - DNA, 322 bp, Zea mays
  unsure (1)..(322): unsure at all n locations
  Clone ID: MRT4577_117151C.1
gtcgccgcaggaattccagcgggcgggaggatggaggggacgaaatcggagcaggaggacaaggacaagcaggcagctagccgcaaagatgccgtgcatccaggcgtccagccccggcggcatgccgcaccagcacggtcgttggcgggtcctcggcggcggcgtcnggtgcgcggggggggggggcgcggccgtcgcggccagctccggggggatgcggtgcggggcgcaccactgcgaggtgccggctgnggctgcgcgtctcctcttgctctctgtggttgggtccgggcggtgtctcttcgtggtggtgcccctcgtg

SEQ ID NO: 18805 - DNA, 685 bp, Zea mays
  unsure (1)..(685): unsure at all n locations
  Clone ID: MRT4577_117152C.1
gttttaattcttttttttttttttttttttttttttttttttttttttttttttggggtgggggttcgctgtttttttttttttttttttttgcccggccctaattaaacttttaaaaccccaaccacccaccccaaaaaaaacccccccctaaaaccccaaaaaaaaacttccccaaaaccccaaatttttaattttatccggggaacttggggggggggccctttttnaaccccgggcggggcccctttttaaacccttgggcccacccaaaccctgggggaaattaaacaaaaggggccctttccggccaaaggttgggttttaaaaatcaaaaggttttaaaacctttccctaaaccaaaaaccccacccctttggggggggttcaacccgttttaaaccccccaaaaacaaccccaattttgaaaaaaccccccccccccccctaaaatttgggggggaaaaccccccaaaataccccccccccttccccccccgggttaagggccttttaaagggggccagggagcttcctaaaaacccccccctttggggggcccccaaagcccgggcttnggaaaaatttccaagggggccccttcccttccccctttagaaaaacgggggaacccccacccttcccttgggggggcccccccccccctcacctcccgggggggggg

SEQ ID NO: 18806 - DNA, 253 bp, Zea mays
  unsure (1)..(253): unsure at all n locations
  Clone ID: MRT4577_117153C.1
gcagggtcaaccccaccagggggttccaaaattggcggtaggcgcaccccattggaaaaccaattattggagttcaccaggaccttctggacaccatgtgggtcgaccaccaggtgcattgtaagggccggttttggagnnnaggtttttttttaaacatatgtttattcttactttcacacacacgcaggggaggggaccacacaaggggcttggcaacgctgggggacacacatgtgtacattttggcagg

SEQ ID NO: 18807 - DNA, 508 bp, Zea mays
  unsure (1)..(508): unsure at all n locations
  Clone ID: MRT4577_117154C.1
ccaaccggcaaaaagctcgaggcctcgagcaatagnaagaaccgacagancncgggagctgcctctccagngngcnctgaagcccgcgcagancagagangcctacggcggcgaagacggcagcggcgggnccggcgaccgggccgggcagccgcgggacccggnncgccaagncgacggcggcgacggagacgcccgngaggccgggcgagacgcacgcgcngncgccccnggacaacgccanggagcggcacacggngcacgnggagggcaacccccgcgccgcgccgggcccggacagggagcagcccaaggagncgcccnccgaggagcngccgcnccacccggccangaccggccgggacacgcgcggcgaaggcagcgcggacgccgaacccgcgcaccggggnaggggcgggaagggcaacgacgccggcgagcgcacggaggaagccaaggcggacgncacgcacgacgagaggcccgccacggcgaccggcgacgagga

SEQ ID NO: 18808 - DNA, 340 bp, Zea mays
  Clone ID: MRT4577_117155C.1
ttatgctcttcatgggactatctttccccgtctttcaggcccactaaacggaaggacgcccgagcagtttaacacatgtatcgagcgcgagcaagggcgcgcgcgcacagaacaccttctcttccacaaagctttaccccaagactgcagaggtaagaagctgccctcgcgccttaacattgggcccaagcacgtaccgcgtttggccacgctagcacagtccagtacggtcagagcgagcaggcagtgcaggctcatatgctacttttactccgcgctcccgcaggtcactgtctagaggaagggtttttttttgcgaggtctttttgccgctgattgt

SEQ ID NO: 18809 - DNA, 558 bp, Zea mays
  Clone ID: MRT4577_117156C.1
tacgaatttttgttttctccacaccaagcttccgccacccgaaaccaacctcatcgcgttctagacctcttctaacttatcgcagcatccttcatgttcctcatcttgcgttacctgctcttgacctggtgattatagcaaggctgagctcacatatgttcatcacttacgatgggggttcatgtgaagtgtatgactgatcaaggaaaatggttaaggctgagcattgtttttaataagttagtcaaaatgttattagcaattactaagtataagtagatatcaaccaaattaaataatttatcacaatgatgaataaatctcacaatgtgaaagtcgcctagaggggggtgaatagggcgtatctgaaatttataaacttaagcatagctacaagccgggttagcattagaaatataaaccagtgcgatagagaggattaaaaacaaatcgcgggcaaataaagagggagacacgatgatttgtttaccgaggttcggttttaaaaacctacttcacgttgaggtggtcacaaagaccgggtctttttcaaccctt

SEQ ID NO: 18810 - DNA, 498 bp, Zea mays
  Clone ID: MRT4577_117157C.1
ctcctgctcatgctatccttgcaccatgtatactcaaggaagcaggctgaggatcttgacgtgcattcttcaaaactcagcagccggaagacatatgccaatggcacatgcaactatacgctcacgtaatctgcacggaggatcgatgagcttatctggcactgagactacaaagctcgtggctacgcagtgcactctgtttgcaatggccgctctggctgaacatcgaatccccaggtctttccggtggcaactcactacaaatctctagagcatcaccaacacatcttgcttgcttcttagggcctggctcgatcaatatttaaatacttttacactgtcaagccacaggggccaagctatcaagagatcgcgactaggtgcatgacacgacaataactgacaatcaccttccacttacttgtacacatgtatttcgatcccgtggcacttttttcctgcggaggttctatttccagaattgccgttccatgtgcc

SEQ ID NO: 18811 - DNA, 942 bp, Zea mays
  unsure (1)..(942): unsure at all n locations
  Clone ID: MRT4577_117158C.1
ttttgagacaagtgcaatgataattacatttgtgttgctcgggaagtatctcgaggtgcttgcaaaagggaagacatcggatgcaattaagaagcttgtagaactggtcccttctactgctgttttggttctgaaagacaaagaagggaaacatgttggtgagagggagattgatgcacggttggtccaacctggtgatgtcttaaaagtgcttcctggttcaaagattccagctgatggtgttgtcgtttggggaacaagtcatgtgaatgaaagtatgataactggtgaatcagcacccgttcctaaagaagtatcaagtgtggtaattggggggacgataaacttacatggtatccttcacatacaagcaacaaaagtaggatctggtacagttttgagtcagataatctctctggttgaaactgctcagatgtccaaagctcctattcagaaattcgctgattatgtggctagcatttttgttccaattgtcatcacattgtctatagtaacattttctgcgtggtttttgtgtggatggttggatgcatatccaaattcttgggttgctgaaaatagcaattgctttgtcttctctctcatgtttgccatatctgttgttgttattgcttgcccttgtgcccttggtttggcaacaccaactgctgtgatggtagcgactggaattggggctaatcatggagtacttgtaaaaggcggagatgctttggagagagctcaaaatgtaaattacgtggtttttgataaaacagggacactaacacaaggaaaggctgttgtaacagctgcaaaggttttctcgggaatggacctangagatttcctcacactggttgcatcagcagaggcaagcagtgagcatcctcttgccaaagctattgtggactatgcattgcatttncatttctttggcaagct

SEQ ID NO: 18812 - DNA, 189 bp, Zea mays
  Clone ID: MRT4577_117159C.1
tttaaatgaaggaattccaaataactcacctactgatttttagcacaaaaatagccattgtacagtgttataatttacgataagtattctattggggaggacaggtaactctgatctcagttacattttttttttcctttttaatttcattattttgggtttttggtttttgcagtcctatttatctgc

SEQ ID NO: 18813 - DNA, 822 bp, Zea mays
  unsure (1)..(822): unsure at all n locations
  Clone ID: MRT4577_11715C.1
ttttttttttttttttgtttattcaatatatgcatgcatatgaaagaaggaaataatgaacattcacaggggagccggtcaaacaattatagacatcgacgacagcgttatattggggcctcgagccggcctaaaaaaaactgcgaaaggatgcatgcacagagcgccctttgcacagtcggcggcaaggatgatcagaagtccacgtcgcacctcgtcccgagcgtcgtcatcgccgtggagttggcgttgccgccggcagcgggcacgggcagccgcagcacgcaggtgatcttgctcttgaagtcatggcggcggacgaccctaaccctgaagctaaggtccgagtacaccttcaccgtgacgtagtagaagccctccccgctctccctccggtacgtgcgcagcgcgtcgccgccgtcgtccatcaccgccgagccgctgaacgtggccgtgacccgggcgtcgctcctgcggcccaggtagaagggctgcagcgggtcgaacccgaagcggtcgccgtcgtagaacgcctgcgcctcggcgtagtcgtagcggatcccgaagcggttggggttgcgcacgcggatgtccacggtgaggttgtactggaggagatccccgccgccgccgccgccgctgccgaggtcgaagcgggagagcgcggcggagtcggcgtaggccctgaggttgtccgggcggaagatgagccagagcaccaggatggccacgccgagcgcgacgacgagggccacgacggagccgagcaggcagcgtgagcggccgcttttttttttttttttttgcanaccattgctgttt

SEQ ID NO: 18814 - DNA, 361 bp, Zea mays
  Clone ID: MRT4577_117160C.1
tttttgtcgtgatcagtaccaatggaaggcgcagtgtgtatcaggacgtgtctcgtcggtgtgcgggaccggtcgcgggcgggttcgtggccttgtgtgtcgttttagcgctcttctcggcggcgggcgatacatgtgtcatggctccgtccgtgatccgggcgacgccgagaacgcgcacgctggctgcgatggacggggcctcctaccggatgcgcctgttcagggccgaattgctccactacggtagccaggcggtggccatctccttgtgtgacggcgttttgcacgtcgcgtccgcagtccccatgacctatccaataggtgaccccgatgtagagctgctcgctgcggccgcgac

SEQ ID NO: 18815 - DNA, 295 bp, Zea mays
  unsure (1)..(295): unsure at all n locations
  Clone ID: MRT4577_117162C.1
cgccctagcgacgccgggctacttaaaacacgaagccgagatattacaactcancctctcctacctcacgcccctgtcactgaggtgcgccgtggagcttggcatccccacggcgatctaccgccatgtcggtgctgcctcagccgctgagctggtcacggcgctgtctctcccctccactaagctgccgatcctccgccgcctgctgcggctcctcaccgcgtcaggcgtgttcaccgtctacaagcagagcacttatgatgagcggtaccgcatcagccccgtttcctacctc

SEQ ID NO: 18816 - DNA, 332 bp, Zea mays
  Clone ID: MRT4577_117163C.1
ctgacgcgtggggctcctatgatccctcgctcgaacgtgtcctcgcccccgtcttccctctaggtggtgcgacctttctcccacgtagccatttcagagcaaggtggcgcgcgccgtctactgatcacacggtctcctcgcccgtcactgcgtcacatcacatggatgccttggcacggccgactccttcaactacgcgttcgtagttttgttccatgtcgcatgattgattgaatctacacgccccccttgttcaactaccccttccactatttcatttcatttcattccccccattcaagaaacctgccaccgggcctgagcgaaccctt

SEQ ID NO: 18817 - DNA, 312 bp, Zea mays
  unsure (1)..(312): unsure at all n locations
  Clone ID: MRT4577_117164C.1
cgaccactggaggcgtcgggatgggcttgacgacgggggagccgagcaagtgatgttcaacatcaaccaactgtagggcgagggcatccgtcgtgttgcgctcgtgctcttaggcgagggcagcatcacgttcgtgttcccgagcagcggcaacagtcaccgtggcaacagtgagggccatgaacaaggtggagcgagcggtacgancggcggaggagaggggcgtcgcaacaggggcgggggcgctgggaacgcactaggcgccaacgtggaagggaaacggtgccatccatgcaggcgcaaacgacgcat

SEQ ID NO: 18818 - DNA, 207 bp, Zea mays
  Clone ID: MRT4577_117165C.1
agaattcccttctctacccactcttcctcccactctttctaaaatatattcattaattatcaagtctttcactacctaaactagatgactattatcaaagctcaaagtcctcatccatgctttccacctctgccttaattaaattcgcatatccctcattcacttcaattcctcacatattagtatatcatatacaatcttatataa

SEQ ID NO: 18819 - DNA, 630 bp, Zea mays
  unsure (1)..(630): unsure at all n locations
  Clone ID: MRT4577_117166C.1
ccggccgggcatatctatgggtttgggaatgatgagtagagttgtttcttcagtcaagttatagggaaaaaatcagacacaattagttgcataggaaatgggatcgattgctcgctccccagacccgcccctgctttagcacgaagtggtggaaggagttggtggacagcggcgcggcgaggaatgacggcatgaagaagcaacgttctgaatcaactgatccaaccatcgaaccaggggaacctagccatctctatttcattaccaatgtcgcaagcaccattcaccacaacagcgcatccgccattgtcaacttcgagaatgccacacccatagctgcaccccgccgagggtgctggcgtggcggtggcgtggtcggcgggagaatcgccgcggtggacgacctactgtgttggtcgtggactgaggacatcttggaccggccaccattcaccacaccaatgcatccacatgacaaacgttgagaaggccgcctccgtggctgcattggccgagggcaacagggcacgagctgcgatgtagccaatgggagaattggcatggagcggcacgacatcttgacgggggaggagggactgccgacgtgggtgagtggggtgnggggtgaaa

SEQ ID NO: 18820 - DNA, 326 bp, Zea mays
  Clone ID: MRT4577_117167C.1
gcgaatcctgctagccaacaacgccgttagttaaagcccatgcgccatggcgacacaggaggataaaaaaaaaacaaaggcagcaaaaaaaaaacataccaaaaaaaaaaaagacacccagaaaacaaaaaaacaacctaaataaagcaacacaattcaacacaaacacacatatacaccataacttacatctaacaaaatcgacctacgcatccaaaaccacagcacccaatcagaccacagcaacggctgcaacccctgctagaacgccacgaaacacatacccatcccggctgccaaaaacacccgcggactaacactccacg

SEQ ID NO: 18821 - DNA, 749 bp, Zea mays
  Clone ID: MRT4577_117168C.1
atcatgtttatacctatccaaccaaactgcgggatgatcatacaacattttagtgtactacaagaatagcaacaagtatcacaaagccaacctatagaatagccaatataagcattgtgtgcttatgtagtttgcaagttgcaacagaaaacaaccaccggatgcatgaagttacgaagatgtatttgaataagagtggccaattaaccggcaagggtgtaccaggagctcagaacatacagatgcatctagacgtggatctagaaaactagcatgtggcttttggtggcatgagtgcatcggcggagctggtgaattttcttgagcatccaaatcacccacatacccaggggcgaagccagaatttgagtttgagggggtaaatcagattgagggggggctattaagaggtattttatattatttacatggtaattagctaaaaaagtagtagctcttatggaatttggggaggattaggggggacgttgcacccctgtgcccctccctggaatcgcccctgcacataccaagcccgatcccgagctcctgcggacctggccgctggtgccttgcccacaccgcaacggagatgccggcacgccgctcggcgcttacggctggccggccaggcgggcagccgcccaccccagtgcgcccggcgcctcccaaccggacacggacagcccctaggtcgctgcctgctggattgatgcggcggcagacggcgtggagagggacggacggcg

SEQ ID NO: 18822 - DNA, 519 bp, Zea mays
  Clone ID: MRT4577_117169C.1
ttaggtgacactatagaaggcggccgggaaaaaaaaaaaaaaaaaaaaaaaaaaaaaaaaaaaaaaaaaaaaaaaaaaaaaaaaaaaaaaaaaaaaaaaaataataataaaaaaaaaaaaaaaaaaaaaaaaaaaaaaaaaaaaacccccaccacggcccccaaaaggggtggatttttcttctccagccgcgatttttttggtttctggaaattttggggcgcgtaagggcggcaaggggcttggcaagggccggaccaaacccccccagaggggggttggggcacatcttcggggggttccgaaaccggcttttcctgttgttgccaagggggggcgggaaaacgccatttttggggttatttaacggggaaccccggggggggcaaaaaattttcttaaaaaacgtattcgggaggcccgtacctttctcgggcaccccccgcgaaaaaacctcccccccctgggttttgttttcccccctaaggcccagggcccgacccttttagggtttggggg

SEQ ID NO: 18823 - DNA, 646 bp, Zea mays
  Clone ID: MRT4577_11716C.1
acttgaggtattcaggaacaactcagatggtacaacagaagggtctctgttccaaattatgaacaatacatgcacatcttttgggtctagattgcttagaaactggttaacacgtcccttatgcaatagacatctgatttgtgctcgtcacgatgcggtatctgagatttttgaatcaatgggaccacaacattcagttaacaatctgcaggatggaggggatagatcctgcacagcttcagtgcttagtgatttgtgtattgtcctttcgtcagttttggcattgctgggaaggtcacctgacattcaaagaggaataagtaggatttttcattgcaaagctacagctaaagagtttgttggcgttatccagtctatcctcacatctgggaagcagctacagaagcttgttcttgaggatattggcattgtctcgtctccgcataaatctgtgcactcccctttgctaagaaggctaataaatacagcttcatcatccaccatacttaatagtgctgtgaaacttctgtcttgtcttaacaaagatgcggctgatcaaggagatatgctaaacctgttcattgcatctgtggatcagttcccagaggttgcagaaggtcatgtaaatgtaaaaatggctgaacat

SEQ ID NO: 18824 - DNA, 499 bp, Zea mays
  unsure (1)..(499): unsure at all n locations
  Clone ID: MRT4577_117170C.1
ggccgcttttttttttttttttttcctaaaatcaaattaacaatgccaaagggttaacatataggctcttacagggatgcttggagtggcaggagaggggaagtgggcannaanntaccccaaataaatactataaaantccacannnctaacannacttcaacannttcacacaattaacanncaacnnacccacaaaccaaaacttgntaatgnatnaaaaactannnntattnctataancanntcccannnatcnncatcattttctttcttnnacantcannccttnnntacaccttnnaccnccnncttnnnntccctttcttctccacacttcttnnataanctccaacanncaaccnatctnncctcaatntcacnnnacanncaannacctaccaannnnannnatacctctnnanaatnnntctccaccaccatnnnnncttnntnnnntanntcatcttcaccattaccannncatcaccnnttcttc

SEQ ID NO: 18825 - DNA, 201 bp, Zea mays
  Clone ID: MRT4577_117171C.1
ggccatttcatcgcagttggtctccaacggttctcctatttgatctcttatccgaccttctattctaaactctactctataggcaatgttgtctacggtgtaaaaacagtattttgtactctactctatatacagagttaatttgtactctactctatacagagttgtctacaatgtagaaacaatatcttatacggtcat

SEQ ID NO: 18826 - DNA, 906 bp, Zea mays
  Clone ID: MRT4577_117172C.1
ccggccgggtcgacgagcagaagaggagcatcatggtgtctaaactgtcttgttttcttgaaggaatcggcgtttgcgagcagctcatggggatccctatccctctcgcatacactagacttacttcaaggttccttgttctgtggcatcttacactcccaatcatactctgggaagaatgtaaatggattgttgttccagctacctttatcagtgctgcatcgctattctgcatcgaggaagtgggtgttctaatcgaagagccgttccccatgctagctcttgatgccctgtgcaagcagctccacgacggtattaaggatgtgatggagatgcagaactcggttcactcgcgactagttgccaagactgctacggaccacaggggcagtaggcgcgagaacaatggttggcctagctccaaaagagaaggagccaagattgattgagcacgcaaggtcggtcgggtcgttgtgaatttatttgaagatagcattgcaagcaatctgtggcaaccagatatccatgaacgaactggagaacttgtggaccccatttcctcctgcaatggtatgtacctgtcctatgtaaaatgcactcgctactgcttggatagctactaaagccgggagcgagcctgggattgggattgggattggtgtagggaggagttgcatcagcacgttggtgtacatgtggcgatgagtagagcagatttattatgtgttgtaaataataaaagaagaaagagacacaaagctagcttatgttgttgtacgtagctgtgtgtgtctatagatagagataaattagatagtagatcgtagtcgattgaaacatacgtaatggtgtgatattttgtcccccctgcaactgcaagattgcttgcccacttgcccctgtcag

SEQ ID NO: 18827 - DNA, 637 bp, Zea mays
  Clone ID: MRT4577_117173C.1
tgccgggaacgggacagccttgacttccccgtctaccctgcctcgtcccgtccgtgttcgtcccaatcggatccacccgcccgagatcgactataaactctgcctgccatccgtctctggaggggcgccgggttactacgaacagccaccgattaggggggtcgggttacgtccgatcaccagtcacccgttgccagttgattggtcaatgctacctgcctgcacggtcgaacccatttcaatgatttggaccatggcagtacaaagggaaggaggtgcacggggccgtcattgaccagtgcaccacaagcacccggtatataatctacgagcgtcaggccaaacccgtctgatcggaccaacgcgcgatcatgcaccactacccgaaggcagggcggggtgagcatgacactattgccaagatagagactgctaaagagtgaaggaaagaagcggtcgacctagacagaagatgggaaacacaatgctgacagatggagcgaaggccatggggatcacgaaatagagggagaccaatggtaagcggagacaaatgcataggaccgccactggataatgctacagcctggagggatgcatcgacagaccgtgggagtacaagatagcgatatgagct

SEQ ID NO: 18828 - DNA, 650 bp, Zea mays
  Clone ID: MRT4577_117174C.1
aattcggcacgaggcacaggaattcacggctgccgacctgccgtcacgcgcggtcgctggggcgtgggcgactgggcgtgccggatctcatctaacgccgccacttgctgccacgacctcccccccccccgcacacctctgacctccctccgtccatctcatcaacatctttgtccctctcgcgcaattcgccgaacacaccgcgcgcgcctcgcctcccagcgacggccgcctcgacggccaatgctggcggcgggatgagcgtggaggaggaggtggagcgcggggaggaggacctgttctacgagtcgctcgaccgcatcctctcctcgtcgggctcctccacctctgcctcggacgacgacggcgccgaccgcccgcgccaccgccgcagctgcgatgcgccagcggcagcggccctcgacctgtggacctcccagccggcgcccgtccatgagcggcggcgccggctgctccatctcatggggctcaccggcgatccttccctcgccggatttgagattgcccggtccgcctccggagaagccgcgggaccgcccccggcctctcccgtctccgtggtccaagtcaggcggggccgccctgggctccgccgggaagccggcgctcgggggcgggccgtctgcgct

SEQ ID NO: 18829 - DNA, 400 bp, Zea mays
  Clone ID: MRT4577_117175C.1
gttttgagagttcggagacccaattgacacaacatgccaagttcgataaccgttgatgcattttactctcctaacttaaatagctaagcaactctaacgaaccctatctggtcggtactgttcacacactacagtacccgctcgcggctgacctagcactgtgccgtgggcctagtgctcataacattccacccctccaaaacagcttgtcaacgagctatagtccagaagacttgatccatactaaactagcacttgatgactctcaatactaagtcttttacatctcagcttaacatttttttctcctaaagaaattgaaccacgtcgttagacacatcagcgtccggatctatcggaggaggacgcgtcaacagccagattgaccgacgacgagcgc

SEQ ID NO: 18830 - DNA, 343 bp, Zea mays
  Clone ID: MRT4577_117176C.1
ccaggtctttctcgtcccataaagcaaatatggaggctgagcactgatctgctcaactgcaaacatggcacagtacggcatacatacactacatagcatgcggtgcctggctgcggcattattgaagaggaaacagcacagacatctatctactctcaccgacctttctaatcaattgcacgatattttgaccgtcctaaagacatagcggcagattatatactcacgttatgcgcataataaaaacgatacattttgaaaaaccaaaacgactcataatttaaaataaagagatacttactattcttatcatgattattattagaaataatattattcatac

SEQ ID NO: 18831 - DNA, 281 bp, Zea mays
  Clone ID: MRT4577_117177C.1
tgcaagcaaaccatggtctcagtgtcaagcatcgaatagaactgacccatgtcagatcatcaccgaagaacatatatgatatggtgcatagggcagatttttatcttttctatggtgtgggacacagttgcaacctttcagtgattatctttctttaaatttgtgatgctttacgatgctgccaatgttgtaagctgtacagagggtgctgcagttagaaagtatattggtattttctctattgtcagccaaagtttacagtgatgatggaaatacagaga

SEQ ID NO: 18832 - DNA, 436 bp, Zea mays
  Clone ID: MRT4577_117178C.1
tacgtttgattaaaaaaatcatcagcacaagatcgaggaggctttatttgaacaagggagatggcggactacgtgtatgggccggggcggaaccacctgttcgtgcctgggccggtgaacatcccggaccaggtgatccgcgccatgagccgtcagaacgaggactaccgctcgccggcggtgcccgccctcaccaagaccctacttgaggacgtcaagcagatctttaagaccaccaccggcacccccttgctgttacccaccaccgggacgggggcgtgggagagcgcgctgacgaacacgctgtcgccgggggacaagatcgtgtcgttcctgatcgggcagatcagcctgctgtggatcgaccagcagcaacgcctcaactttaacgtggacgtggtggagagcgactggggctactgagccgaccttgccg

SEQ ID NO: 18833 - DNA, 371 bp, Zea mays
  unsure (1)..(371): unsure at all n locations
  Clone ID: MRT4577_117179C.1
nntttatttttttttttttttttttttttttttttttttttttttttttttttttttttttcttttgggggggtaaatccccaatagatcaaatttttttttaatacatttaaatccactccaattacactcattactagagtttccaaattagactaaagggttgggggccccaatcccttgtttcttacacccccttttccccgagatcaacaaaaaaaattttcaaatttaacaaaaaaaaaaggggaggcccgggatctacaaaagattcaccccagttcgggcccacaaaatacttggagtagactgttttatcgaagctttaaacataagctttgggcacacttgggaggacacctgttgcatgg

SEQ ID NO: 18834 - DNA, 372 bp, Zea mays
  Clone ID: MRT4577_11717C.1
ggggaaaaggaaaccaatcaaaggaatttcgggaagggcgggttcgggtgggccaaaagaggtaggggcctataaatggggcccccccctgggtcccaacaacaaaaccaggggctggggcccggggaatttccatccgggggggggggcatgggattcgacaggaaagggggggccggccttgccgcccctaattttaaggcccggcgaacaggtttcggccgcccccccgctgccttgattttccaggccctcgccaacccaccggcttgagggcccaagatctccccttagcccaggggccttcccattttcggatgggtatgccccattctcggccccgggggccgacccggggatgcggggccgggg

SEQ ID NO: 18835 - DNA, 508 bp, Zea mays
  Clone ID: MRT4577_117180C.1
ctaaaagacggggggtagcgcatataaaaactctgtattttaagttgtggttttaccataatttaaaatatcgtggtatgccttttggtattggtaaaataatggttttcaaatatagagtttttagatgtattctaaaacatcttttggtataaaatgctataggatgctaaaaagctatggtattgtcttgagactaaaaaatattatttttcaaacaggccctaaatgatgaggtagaggagagagaagagaagcgcgttgtaaatttatagccagcttcaacacaagaaccaagaaagcttgtgagagacaagtgaagttctacattactactgaagagctaactattatacaaatgaactaaatagcattctagccagctgttggctctattgttaaacttgctctaaagcacgctgcaatcgactcccaaacaagaaccgaccagctttgtaagagagacatgtgggatcctactctaacactaaagaactaaccactattc

SEQ ID NO: 18836 - DNA, 274 bp, Zea mays
  Clone ID: MRT4577_117181C.1
ggcatcaccctctacaggagttttcttcaactgggtgctggcctgagtgtggggctgagtggcctggctgctggctttgccattggcattgtcggagatgctggtgtccggggcactgcccagcagcctcgactgttcgtgggcatgatcctgatcctcatctttgcggaggtgcttggcctctacggtctcatcgtggccctaatcctctccacaaagtagtctttttccaccaccagtcacaggataggatgtaaagatcaccccctctcat

SEQ ID NO: 18837 - DNA, 435 bp, Zea mays
  Clone ID: MRT4577_117182C.1
cgaggccggccgggccggggttatatactaaggcacttggcgtgctcaagtgtggtcgatggagttgatgaagatagcagtcaagagccagaatgcataaggaaagcaattttcctacctcctcggtcaatgctattgatgtcaggagaaggtcgttatgcctggcatcactatataccacatcataaaatcgatgccgtggatggtcaagtcatcaaaaggaattcaagacgagtttctttcactttccgaaaggtgaggatggggccttgtgattgcgaatacaagcaattttgtgatgctcatagcaagagatgttaagctgggacggctgatatgttcaaaattacctgctgctacaaccattggcaagtctcataacaatctatcgggattttgtctcccacaattaaaatggtccaggaccccccccat

SEQ ID NO: 18838 - DNA, 155 bp, Zea mays
  Clone ID: MRT4577_117183C.1
gacgtcaccctatcaattaactcatcgacttccgactggcaaactcgacacgcataatgcgctgatcgtctccttgctcacggcgtcgctctagcgccgacttcactcaagccgttggtgtggctgacacacaccagcgcatcatctaccgcctc

SEQ ID NO: 18839 - DNA, 689 bp, Zea mays
  Clone ID: MRT4577_117184C.1
ctgccgagccacaagccatcagcagcgcactgccacgaccctaagctctctccctccagcgccaccccaccaccatggggagaaccaccatgcttctcatggcgctggccctcgccctcaccgccgtcgccctcgcgacgcctcccgcgctccggaggagccgcttccttgccgacaagaccccgccgccgctgtcctactacgactgcgtcaggaagcccccgtcggtgtgcctggagcccgggagccccgggaacacctgctgcaagggcacctgcaccaacaccttgtccagcgtggagcactgcggcaactgcaacaggaagtgcaagtacggggacacctgctgcgacggcaagtgcgtcgacctcctcaaggacaagaagaactgcggcgagtgctccaaccagtgcgccaactccgtcaagtgcgagttcggcatgtgcgactacgcggggtgatgccgatccggcgacgccggccatgcccgccatgcgtacgtgtggtgtgatcggcggccacgcatatacagttctgcacccatcatgcatgaccaacaaataaaatcggcagtacgtatatactacgtgagtgcatcttaagaagtccaaattgtttaaggtatttcaattgttgatctcctcgatcatatgtatacaaaaaaaaagggtacagatgatttatacgtc

SEQ ID NO: 18840 - DNA, 620 bp, Zea mays
  unsure (1)..(620): unsure at all n locations
  Clone ID: MRT4577_117185C.1
aatcaattttttttgttttttttttttttttttttgcaaaagttttttttttggtcggagaaataacatctttaataattgcaaaagttttggttactgagaataaaatacacactaaattacaacaaggtatgcaatacttttgagagctacgcacgacttattcaaatatcaaatataaaaaggagcacaacttgcttgttttaactttaagggtgctcctagcagatgtgtctctaaatgcttgcaatagcttattcttcaatgggtggtgtggctggtcactatgctaatgtttgtccaatgaggaaccccaacacatcggctcgtggtaattctcagggctttatggtttagggtttagggtttagggcaagcagacacagactccaggcagcaactatggttacagcattgccagagttaaccaaattaatgttgaagctactaaggatggtcctaacattgtcattggtacatttttcattaatttcgtacccgctactatactttttgattctagagcnttgcattccttcatatctgctcgntatgttcatgcaaataatctaccttaccttgcactgcatagacctatgacagtcattacacctaaaggg

SEQ ID NO: 18841 - DNA, 506 bp, Zea mays
  Clone ID: MRT4577_117186C.1
acaagctttttttttttttttttttttttttttatttttttttttttttttttttttttttttttttttttttttttttttggggggaaaaaaaggttggtttttgcccaacaaataacaaacaggatgggattcccacccccacccgaccgaatgaccaatattcccccttttattaaccccccccttttatataaaaccctggttgggggttgggcttacaaacaacccgaaaccgaggaaccaaaaatgaatcatccggttgcaaaaacaaaaatttgtgggccccccttttgttaaccccccttccccaaaccctgggccctgggccggaacaccctaagggggaaatccaacaaaacggggggccgtaataaggggacccaaccccggacccaacttgggggaaaaaaggggaaaagcggttcccgggggaaaatggtattccctcacaaatcccaaaaaaaaaacaacccgaaaccaaaaagggaaaacccgggggggcc

SEQ ID NO: 18842 - DNA, 256 bp, Zea mays
  Clone ID: MRT4577_117187C.1
aacgaggccatctatgacatctgccgccgttcccttggcattgagcgcccaacctacaccaacctcaacaggcttgtgtaccaggtcatatcatccctgactgcctccttgaggttcgatggttgggacatacttgttgaagaggccggggcccatgtgggtgcatgtctcttatcctcgcgccttacaagaggatgcacttcatgcatttcctcctatgctccagtcatctctgctgagaaggcctaccatgagc

SEQ ID NO: 18843 - DNA, 133 bp, Zea mays
  Clone ID: MRT4577_117188C.1
gcggaaacgtgttatgatgtgtatataaaaaacgtagcatgtgctgcatgagcttcagtggttagagctcctacaggacgttgctgcagcacatgctacgttttttatatacacatcataacacgtagcatgt

SEQ ID NO: 18844 - DNA, 433 bp, Zea mays
  Clone ID: MRT4577_117189C.1
cacactttgagcattcttgatcattctcactccgactttgcgcactcgtttgacagtcttagtgatttgagctccgttctagtggtgaactttgtgatactcatttgagctcaattcttggctgtgtgtgtgcgtatttgctgtggatttgagtgtgttgcttccctcccttactctagtgctttcactttgattcttattgtaagggtgagagactccaagttgtggagattcctcacaagcgggaaagagtaaagaaagaagaacaccgtggtattcaagtcgatcattggatcacttgataggggttgagtgcaaccctcgtccgttgggacgccacaacgtgtagtatgcaagttttgtacttggccgaaccacgggataaatcctcgtgtctcttgtgctagatctcactatgtctattgtatttcac

SEQ ID NO: 18845 - DNA, 642 bp, Zea mays
  Clone ID: MRT4577_11718C.1
ggcgtccgtccgcgcgtacggcagcagcggggtcgtcgctcgctggccgagcccgtacaccgtcgccagcggagccctgctgctggcgtccctgttcgcgccgctgctaccttccctgcgctggctggccctggcggcggcctgcgccggcgcgccgccgatggtgctcagggcgctggccgcggggctcgccctggacatcaacgcgctgatgctcgtggccgtggccggcgccgcggcgctcggcgactacgcggaggccggcgccatcgtgttcctcttcaccaccgcggagtggctggagacgctggcgtgcaccaaggccagcgccgggatgtcgtcgctcatgagcatggtcccgcccaccgtcgtgctcgcgcagacaggggaggtcgtcggcgtgcgcgacgtcggggtgggcgccgtcgtcgctgtccgggccggggaggtcgtgcccgtggacggcgtggtcgtcgacgggcagagcgaggtcgacgagagcagcctcaccggcgagtccttccccgtgcccaaacagccgcaggcggaggtctgggccggcaccatgaacctggacggctacatagccgtgaggacgacagctctggccgacaactcgacagtggccaggatgcagcggct

SEQ ID NO: 18846 - DNA, 644 bp, Zea mays
  unsure (1)..(644): unsure at all n locations
  Clone ID: MRT4577_117190C.1
tccgaaagacccgggttcgggtcccggcaacggaacccaataaacatatgcagcataactcagaggagaatacatacaagaattttgaagtggatggatgttcaagtgcatacgctgaggtacgaaatcatccatctcgaaaactccaaatgatctgatcatgcagacaaatacacatttgagaacaaaacaaaacaaaaaaataaactaacaactaacaaaaataacgggtatttatgtaggagacatttgggggatgcattgaagccggtgcatctaaatatggtgaagcagtataccacagagatctctttgaaggaatgcatgtagaacaactacctgattgtgcaccaaatgtagatggaagggcagttgaaacatcaagtgctcgtgaaaactttgatgctgcagaatttaaaaaaacagatggaagtgaagaagagttaacagaggatcagatcgatgccttcattatgagtgaacagataactgcattagaaggaaacaatgcaccaatagacaacaaatatacacctcaagttgngatggaatttaagaccaggggagatgcagagcacttcttattcttctatgggtttttggctggttttaaaccagcaatcacccacactttcagaacttcg

SEQ ID NO: 18847 - DNA, 731 bp, Zea mays
  unsure (1)..(731): unsure at all n locations
  Clone ID: MRT4577_117191C.1
cactctatgctgtcaggaaaactgaacgctcaaagtgtgaggtacagtactggctttatttgacaccatcacatgctatgtttatcctatgccttttctacgccttattgatgaagtgtttcttaagctatgcatttttacgaacaaagctgacatgtcatgttttctactgacaagatccttgctatgtcactttccatgatgaggagtggggagttcccgtgcacaatgataggtatgcaaactgaaaatttctttgttcatctttgctatttatcttctgtgaaaacggaatcaaacattccaaggatatttggccatggtcattcaacaggagattgttcgaactacttgtactatctggtgcattagctgagcttacgtggcctgaaattctcaagaagaggcaacttttcagggaaattttcatggagtttgaccctgctgctgtctctaaaataaatgagaagaagcttgtggcacctggatgcgttgcccattctcttttatcagagcaaaagctccgagctgtacttgagaatgctcgccagatactaaaggtttgtagtgcctactcgatacaccaccaatttggctggcacttctgttggtatggcttttgcctganactacaggtttgtgcaatccgatgcagatcgctgacgaatttggatcctttgatcggtactgctggggttttctgaaccacaagcctatagtaagcaagttcc

SEQ ID NO: 18848 - DNA, 4473 bp, Zea mays
  Clone ID: MRT4577_117192C.1
atgtcgggcactgctgttgtacacgctgcacggcagcatacaactgcacagacatcccggactccttcgagggcagctctgggagcgttgtcagcagccagggagttgctgcgacaccctccaagctccacggcctcaccaggggccatgaagcagtggcgggacgacgttgaccgactgctcggtatggcgcattctaccttgaccaggtcgaggtcatggtcatcccgacgccaacatgaggcgtcgtcgtctgtgcgctcaccctcagtaaggggcgcacaaaccaacgacctccgggccgaacttaaccgcaggcgtgcgggagaggacgcctggatctctttggaaagggcgcgcgagcgccgccaaaacatcgagggccgcaacctcgatcaagacttcgctgtggtagcaccgcaggccccaacgggtacctggtcccaagcgggagtccccttggccggcgtgggctgcgccactcttgcggatcatctccgtgcgacgtcatggccacccaagttctggccgcacctgctggagaagtacgacggaacgtcaaatctgtcggaattcctgcaggtgtatgtcaccgctatcacagcagccggtgggaacatcgctgtgatggcaacatattttcatgtcgtcttgtctggctctgcccgtacttggctcatgaacctcgccccagggtcaatctactcctgggaagagctctgcgcgcggttcgttgcgaacttcgccagtgcttaccagcagcacggtgtggaggcccacctccatgcggtgaggcaggagcccggggagaccctccggacgttcatctcccgcttcaccaaggtgcgaggtactatacctcgcatttccgatgcttccatcatcacggccttccgtcagggagtacgtgacaagaaaatgttgaaaaagttggccatgcatgacgtggaaactgtccccacactcttcactctggccgacaaatgcgctagagccgccgagggccgtgcatggcactcggccccgcagaccagggctgcccagtcgggtgtcgtctcccaggacagcaaaaagaagaagaagaaccacaactatgacaggccgcagtttcccgctccgattgtcgcagccgcgactagaggacggggcgagcgcaataagcgcccctggcccttgggaggcaacagcggctcgtgcccagtgcatcccaacgctaaccacagcgcctcggaatgccgcgagatcatcaagctcacgaaacgcgtcatggccgcgggagaacgagaactcgggtatcaatcacccgagggggacctcgaggacgtcttcactagagattccgactccagggatgacagcgaccatcgcaataagttgtacgtcatgtacgacgggagctgggaacttacctcccgcaggaacgtcaagtccctacgccgtgaggtcctatcggcaactccaggggtcccgaaggctgccccacatcaacgatggaggagcaccaccatctccttcggggcacccgactgccccgacaacatggcaggggctagcatactgccactcatcaccgcccctgtcatcgccaacatgcgactgcaccatgtgttgattgacggtggggcaggcctcaacgccatcagccatgctccattcaaacagctgcaaatcccggggtcccgtctgggaccctcacacccattctccggagtgggcccacagtcggtgtatccccttaggagcatcacactcccggttacattcggaaccgaggagaacttccgcacggagaacgttgttttcgatgttgcggacgtcaacctccccttcaacgccatcattggcaggccgaccctgtaccggttcatggacattgcccattacgggtatttggtcctcaagataccatccccgactggggtcctcaccatgcaaggtgatcgtgccgccgcacttgcagccgtagagaagctgctcgcccagacgacggagggaggaatccttcaacctccagcaaatgccgacgtgttcgcatgggagccgtcgcagatgcctgggatccccagggaggtgatcgagcactgcctgaagattaaccccgacgccaggccggtgagccagaagcctcgcagacagtcttttgagcgacatggcttcatccgaaaggaggtccggaaactgctagacactggcttcatcgaagagatgtctagggaagataggaagcatactgcttttgtaacagtggatgggctttactgctatgttgttatgtcgtacggtctgaaaaatgccttgcctacatttgtgcgggcgatgagtaagactttcggggacctgattagggacaaagtagaagtctacgtcgatgacatcgtggtcaagactaagagagggtcgaccctagtggaagacttgaccctagtcttcgacaagctgagagcaacccgcacgaagctgaacccagacaaatgcgtttttggcatttccgccgggaagttactgggattcctggtttcgtaccgaggcattgaagcgaacccggagaagatcggggcgatcgaggcgatgaggccctcggcccgagtcaaggacgcggaacaagccttccaggagttgaagcagcactttgtgtccctaccaatattggtagctccggaaccagaggagccactgtatttatacatcgcggcggccgcagaagcggtgagcatggtgctggtcgtcgagagaccagcaccagaaagccaggaacgtgaggactcaggaccggctacaagggtccgaaccattcaaagcccggtctactacatcagtgaggtccttcataaggcgaaaaccaggaagctacgccattatttccaagcgcacaggattgtggtggtgacctccttcccattaagggccatcctccacaactctaacgccacaggcaacatcgccaagtgggccacggaactcgctgagttccagctggacttccaaccttgccacgccatcaagagtcaggtcctggctgacttcatcgtagagtggacacccccctcaagcgtccccgagggtctgggtcctgattcggaccccacacctgtggagcccaggggtccgatcttcaccgagacccattggacgctctacttcgacagatctacccgccaacaagttggcggggccggggtgatcctcaccgatccaagtggagatcaagtgaagtatatggtgcaccttgagttcaaggccaccaacaacatggcagagtacgaggcactgatcttcggcttatcggcagccctatccctggggatccgccagctcctagtgaagggagactcccagctgatcatcaagcaagtccgtagagagtgtagctgcaatgagcccaggctcacagcctaccttcttcatgtgaggaaactggtgaaagacttcacggccctggaactacaacatgttcctcgggctgacaactcagtggcagatgacctctccatgaaggcatcaacttgggcacctgtgcccgagggtgtcttcgaaagacggccgctgagacccaccgcccagcctgccgaactaggcgaagggggcgagactagcacctcgaagctagcggtcctggtagagacccagtacccaccaaagaccagtggtcccgatgcatggatctccgagatccgggactacctgaaggaaaatatccttcctaaagaccatgtgtccgcagagtgcatagtgcggttggctaagcgttacgcggtggtggaaggggatctctaccgccgtggcgccaacggcattcacatgcgatgcattacccaggaggagggccgtgagttgctcacggagatccatggaggagagtccggaagtcattcatcatctcgcacattggtcggcaaggccttccggcatggcttctattggccaaccgctctccaggatgcagctgagatggtgaagtcctgcaaagcgtgccctgcaaatgattccaccctcttggccattcgccgtatgggggtggatatcctgggaccatttcccagggccatcggcgggtaccggtacctcttcattgccatcgacaagttcaccaagtggccagaggccacctctgtggtcaacatcacccaaggtgccactgtcgccttcctcaagtccattgtctgtagatttgaggtcccaaaccgtatcattacggacaacggaacccagtttacaagtcggatcttccaggaatattgcgagggcattggcacccagctctgctttgcatccatggcccaccccagaagcaatggccaagcggaaagggcaaatgcagagatcctcagaggactcaagacgcgcacctacgactgcttgaagaagcatggtgtgaattgtgtcagtgaactacctttcgtgctatgggggaaccggacaacacccagccgagccaccagggagaccccgttcttcctggtctatggggcctaa

SEQ ID NO: 18849 - DNA, 218 bp, Zea mays
  unsure (1)..(218): unsure at all n locations
  Clone ID: MRT4577_117193C.1
ccaacgcgtacggttctcctaacttggggcaaggagggaggttggattacagtgcactgagtancgatctaaatgtgactcctgctgggtcgctcgtggtagaatgtattgcgcgaagtcgtctactgcgatcaagaggtactctcggcctgtccagcgtacgtcatggatgccgatcgcatcatgcgcgtactcgccatcgatctcgagggggcgcg

SEQ ID NO: 18850 - DNA, 370 bp, Zea mays
  Clone ID: MRT4577_117194C.1
ctagctcctattctatagagcgccctcccttttttttttttttttttatttttttattttaagggggaaaaaacaatccaaggggggtaaaagaataaaagccaatcctccttgcattggccaagaacttgataatctgtattcccgaccaacccctattaaggtaaccgggactgctcaaaacccaccactggagtctatttttttaccgaagcatcatccttcccatgggaagaagaaggattttctcggaaccgatgataccactcaagtctctcacaagggccacaatggcttaccagactgtttttcgaacttaaccagggatctctcaaatattgccctcctgcactttccccaaggttagaca

SEQ ID NO: 18851 - DNA, 223 bp, Zea mays
  unsure (1)..(223): unsure at all n locations
  Clone ID: MRT4577_117195C.1
cctcgaggccggccgggacttttcataaatccgaaacaggcgagccgccgccgccgcgacctttcctcgtcaggcttgcagcgttgttgcaggctccgcctccgatggcgctctcgcgcctctcccaccgcctnncctgagcccaacggctggtcgcccgccgnncgcacttccccataaacctaaaacanttcaaccccatggggccgcgacccccctttca

SEQ ID NO: 18852 - DNA, 821 bp, Zea mays
  Clone ID: MRT4577_117196C.1
gtcgggcttcagcgtggccatgcccaaggtgcccgcgttcgtggccgacatgcggcgggtgcgcgacctcaacccgagcgccttctgcgggatggactccaagatgggcgtgctgatgcgctacgtgcgggcggcgtcggcggacctgggcaaggaggaggactcgctcgactgtcgacgtcacctactaccggagctacaacgaaggcacaccccgcatgcacgccgacgtcttcgacgagctggagcagatggcgctgcgcaagtacggcgcgctcccgcactggggcaagaaccgcaacttcgccttcgacggcgtcatcgccaggtaccccgcggcggcgcggttcctggaggtgaaggacaggtacgacccggacggcatcttctccagcgagtggagcgaccaggtgctcggcatccggggcagccccaacgtggtcggcccggggtgcgccatcgaggggctctgtgtctgctccgacgacctccactgcgcgccggagcaggggtacttctgccgccccgggaaggtgtacacggacgccagggtatgcgccttggagcgacgacgcacacgcctcgtcgacgagctgtgacgaatctcggaaacaaccacattattgctagcttgtcttggatcttgatctgcctcggctttggatttgattggtgcacgtagatctcgtagctgtcagaaaatttgataggtgcatacagtgcagggtcgcacacggtatgcgtatttactatactatgaaataataatataataatgtggtttgttaaaaaaaaaaaaagtcgacgcggccgcgaattcg

SEQ ID NO: 18853 - DNA, 546 bp, Zea mays
  Clone ID: MRT4577_117197C.1
acaccccaaggcccccaaacttaaaacttttttaactataacaaaagaaaccccgggaaaaaaaacacaagcgggggcccgggccattggggggatcaaggtcctcccttattggaggaagcccaaaaaaagtgcccaacaggaaaaacccccgtttaaggggcaaccaatccttaaaccccccccgggactataaaccaagaaaaaaattaacggggaaaccaagggctccaaggggggggaaaaaaaaggcccccccatatggggtaaccacaaccacccctaagcccgggggaaaccgggggggggggggggacatctttcgtccaggggggcaaagggttcaaggggggggaacccaggcagccccaccggggcctggccctgggacggggaaaggggaacctcaacatggcattccttggggcccccccccggggggggggggggggggggtcctaaaaaaaggggggggaaaataacccctcctttagtgggggaaatccccaaaaacccccaaaaaaaaagccggggggaatagggggg

SEQ ID NO: 18854 - DNA, 488 bp, Zea mays
  unsure (1)..(488): unsure at all n locations
  Clone ID: MRT4577_117198C.1
aacggccgccagttctcgtggaatcgccctttacaatcgggggggggggggggggggtctcaccatcggtgtggtggggctgtgaaaacccacttcttcaacccttccggatccaacaggcattctcagctggcatctttcctttatcacccttgctcctccaacaatcatcacccctattacaacaattacgtgggggggggggggttgtctcttaacatcngggcacatcacctacatcaacttgtgctcgctaaccttgctgcctactctcaccatccgctgtttcttctcttcagccaacttgctgcattgaactctgcttcttatttgctcctccctcgtccattcatcctgctagctgctggctgcgcccagcactttcttcctttctgccaactggctgcattcatctctcctgcttatcttccgcctcctctcctcctaccattcagccagctagctcttgtaagccctgctgcctgctt

SEQ ID NO: 18855 - DNA, 158 bp, Zea mays
  Clone ID: MRT4577_117199C.1
cgaagctcggaattcggctcgagcggagatttccagggaacgttttataacacgttagacagcatcatggacccgggagacgttcggaaaggccttggggacaacggaacctgcacaaaaaccaaacacatggacccctgcggggcctcacttgtacc

SEQ ID NO: 18856 - DNA, 410 bp, Zea mays
  unsure (1)..(410): unsure at all n locations
  Clone ID: MRT4577_11719C.1
actgacctcagcggacaagccagtgtaccagacgagnagatggtatcgcgccacgtgcatgcacatcacccgctcgccggacgataggacggcttcctacaagcgggggacgtgtgaggtaccaatacggtcggactggcgaccatgcctacgaactgtcagcgggtcacggatacagacgtggacacactggcggtgggccatgctaggcgcgcccgggatcatgactacggacgctctgggcctgatcaacttggaaagaggcgcaggagaggactacgcgtccccggaccgcaggccacgtacactaacacgccccggagccacgggtaacactgccgaccctactgatgatccaccaccaacgactacgattcggccagcaccaccgcaccatggaacaggaccca

SEQ ID NO: 18857 - DNA, 282 bp, Zea mays
  Clone ID: MRT4577_1171C.1
cggacggtgggctttggtgtcgtgtttgccgatgtgcttggcttgttttttccttggaggcttcttgcgttaataggtaatgaaaccctgatgcattaataatacctgatgctgctgttcttagcatgcgtttcaactctctgatctgatatcttagctcgcacgatcagcaactcctaaagagctcagatagtacaaatgcagtagacgaatgtttttggaattcagtccctactcgagataatttctgtcgtgaagcgtgtgaaatgccacacttgcggg

SEQ ID NO: 18858 - DNA, 109 bp, Zea mays
  Clone ID: MRT4577_117200C.1
gacaactggcgaggagtatcatgagcgcatgggggagggcatgatacccctcgccagtacacggctgacaccccagtccaatgtaaaactcatcatgaagcagctgctc

SEQ ID NO: 18859 - DNA, 226 bp, Zea mays
  Clone ID: MRT4577_117201C.1
ttcattgagcttgactggcggcacccctaggatcaagatcgagctatgtaactcgagcagggggagacgtaagcccgctggcgctatatcaaggactaccaatccatggccttctctctcaacatatccattgagtaagctctcgaagattatgacaacgatgaactctagcattttttaagctagaacctcatttttcttatctcacagcgatgggttctccatt

SEQ ID NO: 18860 - DNA, 357 bp, Zea mays
  Clone ID: MRT4577_117202C.1
agcagtggtaacaacgcagagtacttttttttttttttttttttttttgtttttttttttttttttttttttttggccttccgatccaacgtgaagaagcccgaccacagactccgatttctacaaatgactcaacccatagcgatgaactcgactctttctgaaatgacacaacccagagcgatgaatctccttcttgcttatcacactgattatccttctccataaactgatgttatacgtagacgccagacacctaatagtcaaaaaggtccacacagacacacgccataattagctgcctggcttgtgctgcgcccttcggccatatgtgtaacgctttggtccctcgcgccc

SEQ ID NO: 18861 - DNA, 637 bp, Zea mays
  Clone ID: MRT4577_117203C.1
gtgctttgttcttggttctcgtatagctttagtgtgtatagttaaatgcatcacgatgcatatggaatataatacacgccacgtaattcaccggcacgcctaaatttagatgaaactcttgtggaaacgtgcttaaaatccataatatggtaagctcacacacatccaacctagcggcttgtttatttatagagtttcacagcttctgttggtcaagcacaacattcacattcaatatcaattcttgctgtgcatatctattaggatcagtcatgaaccgcaaaacagaactggaactgtaggaaatgatctctttgagcttcatttgtaggtacttgatgtaattaagatgtgttttaacttagaaaagactcgctgaagctttacctgtatataaaaatgatggtcatgtcacatatgggaccagagctaattagaaatttccacggagctggtggacaaactattcatcgtttcctgattagagtacagtagatgcagttatcaaaaagagtagacccagtgctggatgctcccacatgaatggggtctggtgaagggataaaccaaggcaagtctttccctgcaaacgagctgctaataacttagtgggacagttctcaccactgcactagac

SEQ ID NO: 18862 - DNA, 215 bp, Zea mays
  Clone ID: MRT4577_117204C.1
acagctataatatcagggtccgaactaacggaaacagaaataataagtcagaatgaagaaacgataactgtttactgagagggtatattaggggaggtgttagctagcacctctatgacgaatatcgctacgatgcaaggaagaatgaatacaacttgcttcggtggtgactgtgcctcggtcggcggcagtcaatgtacgctgtactcccacca

SEQ ID NO: 18863 - DNA, 308 bp, Zea mays
  unsure (1)..(308): unsure at all n locations
  Clone ID: MRT4577_117205C.1
ngatctcacctctgaaagcgagcacacgcaacgcagatacgcaagcacgtcagtgttctgcgtttctgtctccgtcgatcgaggtacccaggtggcggcaatggagagaagaagggtggccccatcgttggtggcggtggtggtgccgctgctgctgtgctcgtgcttcgtcgccggtgacagggncgagccggcggnnnnnnnnntcnnacacnaaccanntgngngngannnanngngnaacgngnccgacgaactgcacggcgncgccgccgacgaaccngccgaagaccgcgccgccgccgccg

SEQ ID NO: 18864 - DNA, 462 bp, Zea mays
  Clone ID: MRT4577_117206C.1
acaacacaagatttccttttctggggtaaagtgatacaaaaatgagtgctttgagtaagaaaaaggaaggaaaagaattccaaaagggaaaatgtgagaggtgcggaggggataaaggatatgaagaatctataaagaaacatgaaacacgttgctacttggttttcagggcaacagatttgcatataggacaccggttcttctgccgaagccagtgctctatgcaggaaaggtggtagtagtgtttacacgccatcttgcccacatcctcacccgataaatactcctcctggcatatgctgcattttgtttcacaatcttcatgagaccctggagctgtgggcatgtagaggctcctatttaggcacgtggacaatgcatcgtctgaaagacctgtttttacagtaccaatccgctctcccaaagcaagcaactcttcgtaggacatgccgtcgatatcca

SEQ ID NO: 18865 - DNA, 418 bp, Zea mays
  Clone ID: MRT4577_117207C.1
attcggctcgagatctgacaatccgagtgctagaatgttctcgtaggactatgaagccaatgcaacaggacaacgctgaggactgcatccttcgcagcaattgctgaccttaaagacccgtatcgacatattcttgtcagcaagattggtgatatttgatatataattaaagtaagtctgacgtagctcattcgatggtaagtctagtctctaccataacatgaaagatccactaaccaatcgatttgatggacttgatcctcctcttaacgtagagacatgcatgtattcctacaatatattagtatatttgtttgatgaaacaagagggttgaaaagcccctattgaaatatattataataaatgtcaaaaaaaaaaaaaaaagttcattattcatcttattatattatttcttta

SEQ ID NO: 18866 - DNA, 442 bp, Zea mays
  Clone ID: MRT4577_117208C.1
agaggggtcgacccacacggctgcttttatcatccgttactagacaaatatctatcgagataaaacggtactgcaaatactgtatgtaacatacataactactcaactctcacaatataagtatcaacaatgtgcagctcgttcgacaagatcgtcaggatgaggtgatgatcatcatgaccactacactatctggtgactgccgaagaacagaggcacttgatgacctgaatgatctaatgttggggcacacccacgtagcaggacacagggcgtacatatatggaggatgaccaggacgcagtccttgcaacatggagaagctgctgcttacagcaaagcgtagctcataggacttctacatggacacgactagtttcagagccaggtgcctctcagtgaaaatggtacatgagatgggccagcatgagctccatgggct

SEQ ID NO: 18867 - DNA, 277 bp, Zea mays
  Clone ID: MRT4577_117209C.1
gtctgttgattgacttaacgtcacacatggtggactagttgagttattcgtttttgaactcttcccaccccacctcattactctcgatggctagtgcggacccgcttttttagattgttgctatctatttctctatctaggattagaaccatatacttgataataataggaacgggacattatggcagaaaaacgctagattcatagggagaagaagcgtcacaaattagaacaaaactatcatttgattcgaccatccttaaaaaaaaatactgat

SEQ ID NO: 18868 - DNA, 253 bp, Zea mays
  Clone ID: MRT4577_11720C.1
ccatgaaccctaacctactgtttcactttttttcttttatatcccacaaccggtggggggtgattccacaaacccatggctctccggccagctagcctgcacctacgccattcttatcctcagcgacgatggccttttctttaccgaccagataatcgtcacgatctttatggccgtcaacattaatgtagattactacttggacggtgctcttcgtcaaacttcattaaaagcgcaacgtcaagaacctcat

SEQ ID NO: 18869 - DNA, 325 bp, Zea mays
  Clone ID: MRT4577_117210C.1
tctaatcttaatatctcctactactaccattatctgcaccaacgggctcttcgggggagcgctcctgctcgccgttgccttgctcgccgcctcctcttactaataagcccatgcggccatacaagataagaaggcgtaggtccaacactggcacggcatccactgctacccctagcacagctgccacgacagctgatgctaacttgagcacggatgttgccgttgatgatgatacccgtactgtcggtgtggctgctgcaaccgcgggtaccatgacgtctgcctgagctgctcccacccttatcagattccagatcatatgtac

SEQ ID NO: 18870 - DNA, 1092 bp, Zea mays
  Clone ID: MRT4577_117211C.1
atggtctgttggtatgacctcgctgaggttgttgccctcaccgagagcatcggcaagccgctcgccgaggtgctcaaggagctcgggaagagggttccagactcccttgtgaagacccgcatcgaggatgatggcttcactatcaaattttatttcgcttgtgggcaagtgaaatcatatgagagggcaataatctccgtggagcaactgaatgctattcttagacaggcttctaaaaccaaggaaaaggaagatctcaggaagatagataactggcaatatattagttgtgtcaccctatgggttcggtttctgtgttgtcactataaggattacaatctccatcccttattttctcaagttcttcaattgctctttgactgcctagaattaagagaagtttctcagaaagaacaaacacaaagaacaaagatcaacttttcgtctttgttgaaggtgccaaagaacctgctgaaaccaagggattttcaagaggagtgtattctttcagcgattcagattctatcagcacattttgcccagtggagttaccatgtttccttcctagaagtagccaccattcctcttgtcctcttgaagaggctacatgagcagacaacagttgaatcacttcgccatcctattaagtgtttgatagaccaggtgacggagaacaaggattttatagaaaggaaaagagaggttgtatccttttcaccaaatgataaggcgtcagttgatagcttccttcagtcaattgcttcacatttactattcaacatctggcctgctgagtttgctgaaaaacatattactgttgaatgcaggaggagaagtccacacagaatgtcggacagggacgccgtggcccccgcgggcggcggtgaccggaaggcggccaagctcgggagctggagcagcatgagcagcaactacggcaacaagaagcggaagagcagcagcagcagcttcgggaggagatccacatccacctgcgaggaaaggcagggggtcttccgcatgctcatgagctggaaccaggagagccggttcagcaacaagatcaagacgacgacgagcaaagaaagatga

SEQ ID NO: 18871 - DNA, 266 bp, Zea mays
  Clone ID: MRT4577_117212C.1
gggtttcaagatcttccggtttagcattctagcaaaggcagcatccatgtgggtccgcgtactttaccctaaggccgaggatctcaacaagttgtcagctcttcacatgaacatcaacaccgccaagggccttcatgacttgctcaagaccaacctcttccccaaggtcaccatcaagatgcttgtggttggagctggttacctgaatcttactaaagatgtgaacaccctcttgaatgaaatgcatattcataacccaacttcaa

SEQ ID NO: 18872 - DNA, 2405 bp, Zea mays
  Clone ID: MRT4577_117213C.1
ttgggtacctcccggccgggccgggcaaaaccccaccgccgattctccctattgcttcgctgtcgcctgggagacgccggaggcggcgatggcgaagaagctagggaagaaggcgcgcaagttcgcgcgcaagaacctgcagtctgccgccaagcgcaaccgcaagatccgcaaccagttcaagcaccgccgaggaccccgcggaggtgggagcgccggccgggaggatggggacgagcacgtgctgcagcgggtcctcgatcccaccatggttaccgacgatgctgctgctactttgatccacggtttggagtttccagaggacgatgctgaactagatgctgatctgtctgacagtgatggttatctttctgaggatcctggatgtccatactattctgacagtgaggatgagaaagctgccaaagattgtatcatggaagaaggtttggacagacagaatgatgacatgaatcgagatatcaagaagcaaaagaaaaagttgaagaagttgctggataaggaccctgaatttgcaaattttctcgaaaaatggcagtcggagttggagagctccagaagtaaaggagattctgatgaagagggtatggattctatggatgatgacgatgactccaatgatgggaatttaccaaatgctaaggtccttacaagaaagacgataagtgaatggtgccagttagtgtcaaaggaacctaaagcacctgccttgcgtaatctactaaatgcttttcgagatgcttgtcgatatggtgttcactctgatgggcccttgatgcagagatttcaaagtgccagggtgttttatcaaataataatgtttgttctttctgagtcggacaacattttccgtgctcttttggaaattcaagatgacgttaacaaaggaaaaattatgaacctgagaaattcaaagaaatggctaactgttgatcctctcataaagtcctacttatcaagttctcttgatcttcttagtcaacttacagacaacaagatacttgcctttgttttgactcggttgagggtatcagtggtccttttttctgcatatccatcaacatcaagtaggcttgtcaagattttatttcgcttgtgggcaagtggtgatcggagtttgtctctgtcggcatttcttatgatccgagaagtagcttcactgttacctgactgtttggatcactgtttaactaaatcctacaatacataccttgccagtaccaatcttgtgaatgacagaaacacaaagcatatttattttctgatggactgcctggtagagctgtattctcttgatgttcagaaatcatatgagagggcaataatctccgtggagcaactgaatgctattcttagacaggcttctaaaaccaaggaaaaggaagatctcaggaagatagataactggcaatatattagttgtgtcaacctatgggttcggtttctgtgttgtcactataaggattacaatctccatcccttattttctcaagttcttcaagtaataagaggagtggctcacttattcccaggcacaaggtacttaccgttgagactgaagcttgtgcagatgctgaacgagctttccacttgcagtcagatgttctatccaattccatcgttgctctttgactgcctagaattaagagaagtttctcagaaagaacaaacacaaagaacaaagatcaacttttcgtcgttgttgaaggtgccaaagaacctgctgaaatcaagggattttcaagaggagtgtattctttcagcgattcagattctatcagcacattttgcccagtggagttaccatgtttccttcccagaagtagccaccattcctcttgtcctcttgaagaggctacatgagcagacaactgttgaatcacttcgccgtcctattaagcgtttgatagaccaggtgacggagaacaaggattttatagaaaggaaaagagaggttgtatccttttcaccaaatgataaggcgtcagttgatagcttccttcaggaggagggtcagcagaaccgcttcattcactcggttctatgcatccgtagctgaaaaccgtcaaccaaaatggagaaaaacactttaaaataccaagggaatttctgagagacatctggaattggttggtttccaagtgagggccacgaagaaccacatcaatgtagaacattttagtgcagatatacgccgaggcagctattgtgtaacctctagtgagactgattcctacgagtcctcgagtgctcaacaattttgtacgattgtaaccttaattccgaagtgagttgtcaagtggtgaatgaaatttgctgttgcttttgaatctgttgtcactgtgcccgtactacagagcaaaaaaaaaaaaaaaaaagcggcc

SEQ ID NO: 18873 - DNA, 3102 bp, Zea mays
  Clone ID: MRT4577_117214C.1
cctccgtcggcgctctccagcctcgcctacatggacagcgtctgcgccgcgcttgcccagctggatggaatcgaggtctgactgtgtaattccgtggcacgcaccacgggaagggcgagacgacccgccgcatcggcttttgaccacggcttctctgggacgatggatcgcatcttagacagtgccagcatgaatgagaaatgggcgtcgcaggtcagtaagcgtttcgaagaggttgactgctagggcactagacacacatcccaggtcgacgtttgacccgcaaaatggacaaaaaaataacaacaaaaagtgtttgggggtcgtattcctatcagctgggaacaatgccgctgtttgaggcctccgctatgttgcactcctgtggcatgcgcgcccttgttgcgccgttaaatatgcccactcttggccaaaagagccttatgcctggaagcgctggcgtctaccattggagcgggtcggtgctgagcgaaaatgcaccgacaggattactttcgatgagcagctccagacgctcgacaccacaacggtcgagttgtcttctgagttgacgttagggggattttcttcggataagcccttgtaccttctacgaacagaagttcccccgatggccgtaagcctcgcagatccagtatcttctggcgagcatatctgctaccgcacactgggtctttgtttatatgagactggggctctgtacatcgccgccgcctacatcggcttattcaaagtcctccgcgaggccggtctggccacggtactcgcaacgaaggccgagggcgtgcgcttcaacttcaccaacgacctcgacctcgacctcgacgacgagggcaacatctacttcactgactctagcattcactaccaaagacgtctgtgatcccatgccctcgctctcttccctctgctttgcgcgcttggttggatgctcacatgtttcctacttcccacgggagtggtgctccacggagtgatgacatcacttggttcttgtgcttaatattgatttctgctgaatatggtcaatttaaaaacctaaagtaggcgaattcctgccttgagggtcactaccctagtctcgtgatccttgctgtcgattgaaagatgaccactgtaatccgaccacttcagtcctcagacccaatatttttgctaacttaatcttctactgtactcttttttagctcggagatgctgatggggggggctcctgtaacagcttaaagaaaacccaatgcaagagcaccatagcagataaggaagacgtgcatagtgtctttactatagtgataagttgtgtccaactactgtgaagctctatcttttgtgccaagagttaggttttggcgccggtgcatgcaaatcatataccaggtgtattcaaacacgctctccttagaaagaattaaaaatttgtatgactggacatatattacttattgtcaacttatggttctgggtttcggtgttttcagtgtagaacatactaatatccatcactgtttttttcaaattcttcatgtaaatagtcggttggtctgacctcgctgaggttgttgccctcaccgagagcatcggcaagccgctcgcggtggtgcacaaggagctcgggaagagggttccagactcccttgtgaagacccgcatcgaggatgatggcttcactatcaactcgagaagagggttccagactcccttgtgaagacccacaactagagaaataggatggagagggaaatttactaagagaggacgtgtaacaaataaggccaggaattattagaatgaatggaaaatgtcctcatacacctttggagattttatttcgcttgtgggcaagtggtgatcagagtttgtctctatcggcaactgtttggatcactgtttaactaaatcctacaatacataccttgccagtaccaatcttgtgaatgacagaaacacaaagcatatttattttctgatggactgcctgtagagctgtattctcttgatgttcagaaatcatatgagagggcaataatctccgtggagcaactgaatgctattcttagacaggcttctaaaaccaaggaaaaggaagatctcaggaagatagataactggcaatatattagttgtgtcaccctatgggttcggtttctgtgttgtcactataaggattacaatctccatcccttattttctcaagttcttcaagtaataagaggagtggctcacttattcccaggcacaaggtacttaccgttgagactgaagcttgtgcagatgctgaacgagctttccacttgcagtcagatgttctatccaattccatagttgctctttgactgcctagaattaagagaagtttctcagaaagaacaaacacaaagaacaaagatcaacttttcgtctttgttgaaggtgccaaagaacctgctgaaaccaagggattttcaagaggagtgtattctttcagcgattcagattctatcagcacattttgcccagtggagttaccatgtttccttcctagaagtagccaccattcctcttgtcctcttgaagaggctacatgagcagacaacagttgaatcacttcgccatcctattaagtgtttgatagaccaggtgacggagaacaaggattttatagaaaggaaaagagaggttgtatccttttcaccaaatgataaggcgtcagttgatagcttccttcaggaggagaaggtcagcagaaccgcttcattcactcggttctatgcatccgtagctgaaaaccgtcaaccaaaatggagaaaaacactttaaaataccaagggaatttctgagagacatctcacatctggaattggttggtttccaagtgagggccacgaagaaccacatcaatgtagaacattttagtgcagatatacgccgaggcagctattgtgtaacctctagtgagactgattcctacgagtcctcgagtgctcaacaattttgtacgattgtaaccttaattccgaagtgagttgtcaagtgatgaatgaaatttgctgttgcttttaaaaaaaaaataaaaaaaaaaaaaaatattggggcggccgctct

SEQ ID NO: 18874 - DNA, 396 bp, Zea mays
  Clone ID: MRT4577_117215C.1
gaaccctcctcacgccttcctcgcagccgaggatcctaggagctcggctccggaacgtcctctcgtgtcccgtcgccgcgtatccgaagctttgcctccgatcgccttttctcatcactggacgatgcgtccgcctctgctgcggcctccgcggccgagaccgactatgtaacagagccggacgcacaggaggagtcaggacaagaggaaactgagggcgaggtcgatgagcggggggacaggtcgatcgtgatcccaccggtgccgcgcgcgaagctgagcgaggacgaaccgaaggatgtggcctcctgcgctcacggagctcgatgaagagctccagtcgcaacaggacggaaaagaacggcgtcagaccgggaccttgtactgcaggcttca

SEQ ID NO: 18875 - DNA, 410 bp, Zea mays
  Clone ID: MRT4577_117216C.1
aaaaagaaacagatttgcccttttatattgattattgaaagaaaaacttgtttgtttgtttcaactttaaagttgactaataattgaaacccaatggaaacctttggccggtttatttggacgacctccccgaaacgggtgaatttcacccaaagtgattcattttggggtgaatcccaaaaccctgtggggggggaggagttacaaagtttttttacaatggaacgctttacttccactggttggcccaaatgtcagcgaggtcgacaaccctttgcgagtaaccccactctttgtcgtaccaggagatgacctttaccatttcgccccccatgaccatggggagggaggcgttcattgtggaggaaacctttgagcaccttaagttcacggacacaaaccggacccgt

SEQ ID NO: 18876 - DNA, 741 bp, Zea mays
  Clone ID: MRT4577_117217C.1
attttcacatagcgccggcgcctccatttcgttgtcctcactctctcctccagctcacgctccggcgtggaagggaagggaagatggacaccgcgaggaagaagatccggaaggagaagggcgcttgagccctccgagtatgaggactccgttgcccaggatttctttgatctggagaacggaagccagcagctcaagagggacctcaaggatctgtacatcaacaatgctatccagatggatgttaccggtagcatggaggctgactgtcagtccatcgtgcgccatacgcgccatgcgctaagcggcttcagagaagatgccatgacaggactccgtctagagcagcatgacataacgaagttcgagcagggaagtgatgtcgtcatattgttgctgacaaggagagattgtgaacggcacctcacagaagggttacaggctggtcagtgcacctcgcatcatgactctgactgctgttcacgatgggatcttggacgatgttgtctacccagctgagatctgtgtggaagcgtgtcagataccgtctggatggttccaagattatcaagatgtttcgtggacccaaaggagaggcacaacactgtatacaaggtgaagacctgcactgcggtctaccgcaggctgtgtgggaaagatgtgatctttgagtaccctatgaccgaagatgcataaacatgatgccctctggagatctccgctctatgtccgatattctga

SEQ ID NO: 18877 - DNA, 290 bp, Zea mays
  Clone ID: MRT4577_117218C.1
aaaaaacaaaagaaaacaaattataaaaaaaaacaaaaaaaaaaaactaaacaaagagaaggggaaaaatacaaatacatgatacgcaggcatctctctgggacccattctcgccttagcgccctcctacggggcggcggcgccgttcggaggcgccgagtacgcaccctgcgggaccttctacggccctgtcagtgccagcgggccatcggctgccgactccctggcgtatggcgccagcgcctttgccagaggtccgactgctgatgctccggcgactgcgacagcgg

SEQ ID NO: 18878 - DNA, 123 bp, Zea mays
  Clone ID: MRT4577_117219C.1
cccacgcgtccgtgatcttgtaatttgctatagggcagtatggcaatatctatggtatactcggatctaagataaaagcgagctgaccaaagcattaaagcagagatggacctataactgaat

SEQ ID NO: 18879 - DNA, 370 bp, Zea mays
  Clone ID: MRT4577_11721C.1
ggggggggcaccataactggacgggcctcactgcgacacctatcgactcgccttctcagggaccgttagcgatgggggcagaggcatataccgagggccgcttcactgcgaggtaagggagcgcaggaacagagtggagttttgcacaatgcccacgagggactaatgctatgcatccatagctgtggcttctacgagatctaggtgaccatgaacatgcagctcgtagagcccacagacatgatcacgaagcaggatcaagccaagcaggatgagctcgtgtatctactgctatcgcgatcgccagagagggcgacatgtgccaagcatgagggcggaacaggcacgacagcagctgctgccacagagc

SEQ ID NO: 18880 - DNA, 594 bp, Zea mays
  Clone ID: MRT4577_117220C.1
agctcggaccacgcatgctgcagacgcgttacgtatcggatccagaattcgtgataattcctattgagcaatacaaaccacatgatcgtattcgcgtattcattacgaaagtagaaaaaacgacaaaaggaccacatatttacgtatcacgtacacatgctggtcttttaaaacgtttattcgaaatggaagttcctgaaatctatgatggaactgtagaaattcgttctgtagcacgtgaagctggcgatcgctctaagatctctgtatatgcagagaacactgatgttgatccagttggttcttgtgtaggaccaaaagggcaacgtgtacaacgcattgtagacgaattaaaaggtgaaaaaattgacatcgtccgctggtcaaatgatccagttgaatatgttgcaaatgcattaagcccatcacaagttgttaaagtacttgtagatgaagaagaaaaagcgacaacagtagttgttccagaccaccagttatcattagctatcggtaagcgtggacaaaatgcacgtcttgcagctaaattaacaggctggaaaattgatattagagtgagtctgatgcgaaacactt

SEQ ID NO: 18881 - DNA, 130 bp, Zea mays
  Clone ID: MRT4577_117221C.1
ctcttgtgatccactgacacctgcttgtggagacttactacgactagagctattgacgacaaagtccctcgtcacgtgcatcaacgtggtcgaccccttctccctgcgagctctggcacccctctcgaca

SEQ ID NO: 18882 - DNA, 187 bp, Zea mays
  unsure (1)..(187): unsure at all n locations
  Clone ID: MRT4577_117222C.1
atttttatcttgaaccataatgcttacgggggggggttttttttatttgacgntatgaggcaagacgagggagattacctggtccatgggaaacagtttaggcaaacttcattacaaccggagcagaccaccacacggctaaatctagagagatgggaaaaaaaacaggattgcactagcttaaaaa

SEQ ID NO: 18883 - DNA, 241 bp, Zea mays
  Clone ID: MRT4577_117223C.1
acgcgcacgcacacacgttgaagcattaactgccgtaacagatgcaccttatgtggccaggggacctacagtactgcttctgattgatccacaatagccatacgctacaactcatgctgcaccactctatgacgcgattaccgtatacgagccgaggtactcacaacatagtatcggtaatcaacacgcccttatgtcaacgagccatctacaagctagaccaacatcattatgctcaacc

SEQ ID NO: 18884 - DNA, 393 bp, Zea mays
  Clone ID: MRT4577_117224C.1
ctcggctcctacaaggtgatgctggcgcctgcacgcgaggcctccacgtcaaggcctacaagtgctgagttgcttttttttgcctgcccgttttgagaactcctgcctacgagctagggaggggagtgtggcttgctcggtagagcttattttcggacatccaaaaaacattcttcctatgtgcagatgatgggtctgtttatattggaatataaattacactctttggtgttaaatcccgtgttagttgctcctgacgatggagaatcgagcagccccctttttttgttctatcaactatgctgtaatgctggttatgtgtcggaaaaaacaatgtatatgctgagttggagtcggtcaacttgagatgatgaggtgtttgagggaaaataa

SEQ ID NO: 18885 - DNA, 1790 bp, Zea mays
  Clone ID: MRT4577_117225C.1
gggtacctcgaggccggccgggccctggttgcatgaactggctccctgccgcaaccgctttaacgacgcacggcgccacggccacggcacggcaccacgcgctcagacgtccacgtgctaccaaccccagctcaccgcactcaacccattgctgccacggcgatcacatcacccacccgcgcacttctctcatcgcgccaacgcaaacaccacagcgcagcagcaagcgagctaactggagtacaaagcaagccaattcgctctgtgcctgtgccgctgcctaccgtcgcgcgagacgggcgagctcctctcccggccgccgacgccgcgggggattccttttccccggaatgctctgccgctccgtccgggcggaagaggagcactaggcggcggctcggatggggcgcccggggtacatcacggtgccgatactctcggtgctcgccgcgatcggctatgtctactacaccacggtgttcctggcgatccccgcgtggctggggctctccacggcgaccgggctcgccaacgccgcggccttcaccgcgctcgccgccgcctgcgtcgctacctacgccgtcgccgtatcgcgcgacccgggccgcgtgccagcgtccttcgtgcccgatgtcgaggacgccgggagccccatccacgagatcaagcgcaagggtggtgatttgagatactgccagaaatgttcgcattataaacctcctcgagcgcaccattgtcgtgcctgcaaaagatgtgttctaagaatggaccaccactgtatatggattaataactgtgttgggcatgagaactacaagatattcctagtttttgttctgtatgctgtaattgcaagcttctattctatggttctcattatagggggtgctgtgcatttacctaaagatgaacaaccaagcagtgattcttctagaacatctattgttgtttgtggggttcttctgtgccctttagcattggcactaatggtcctattgggttggcatgtttacctcatcttacataataagactactatcgagtatcatgaaggagttagggctacatggttggctgaaaaggctggaaacgtttatcatcatccttataacctgggaatctatgagaacctagtttcggtgctaggtcctaacatgttgtgctggctgtgcccaatatcaaggaacataggaaatggtgttcgtttccgcacatcatatgacactccactatcaacttcagcaatgtgatgcacaccatataagggtacactcatgttggatatctgctaactcgcaaaagaaactcaggtgcccacacaaagtgctaggtttgctattcttcacagttctaatttttagcatttaaccaaagcgtttgtctatccttaaaaggagagtgttttccaatgcttgaacttttgtagtaagggtgtgctacatcaaatccagcgtgtttaggatactgctacatacatgaagaggagctttaggattatttcctaaagcctcctggaatctgtcattaggaatttttagagatgctgacataattagatttttctctctttttggggacattcttgatcaaataagtaattattgcttgtgtagtagactagagtgggctgtattaacacactcaaaaaaaaggggaaagaaaaggaaaaatgtactcgtggttgttctgttgtaaagttatgtccaaactgtcaaccaaatactattttatgtatacacttgttgagaaatacacgttgatatagctgtttgcacatatgggtgtaccat

SEQ ID NO: 18886 - DNA, 756 bp, Zea mays
  Clone ID: MRT4577_117226C.1
cctggcgatcccccgcgtggctggggctctcctcggcgaccgggctcgccaacgccgcggtcttcagcgcgctcgccgccgcctgcgtcgctacctacgccgtcgccgtatcgcgcgacccgggccgcgtgccagcgtccttcgtgcccgatgtcgaggacgccgggagccccatccacgagatcaagcgcaaggtacactctactcacggcccctgcctccctccgtctgaccgtctgggccatgaaccactccagatctcgcgggcgcccccgccgcgtgctgtgaagtttagatctacgtagtgggatggtagtcatatgtgtaggatcagaaactttgttaattgttactagttcagatcttaggattagatttcgagcaggtattgcctccaagcaaggtccggcgccgcgcgcgagatttggattttaatagtaggaatcacgcgaatgctcctatacctattggagcgccgagtgcctcggtgttgcgatcatttggtgggcgaggaactgtgtatatgtgtgcgttaagccattaacataaaaaatgtgagaaaaggaaaaatgtactcgtggttgttctgttgtaaagttatgtccaacctgtatttttttttgtcctgaaagctcgtcagctcgtgtattgttttgtcagatagtacataggagtaatgagtgttaaggaccaatcaaccaaatcctattttatgtaaacacttgttgagaaaaacacgttgatatagctgtttgc

SEQ ID NO: 18887 - DNA, 549 bp, Zea mays
  Clone ID: MRT4577_117227C.1
ggggaccccggggaacccataattttggtttttccctagcccaaaaaaaggcaacctcctccgggggaaatcatgcccattaacccttttacccggggggggggcccaaaacaaaaactatttttcaggcaaaaaaaaaaactcggcctcaagcgggggattccctctaaaaagggaaacccatttacggcccgcacaattttaaagtttttggccccgaaaaaaaaaaaaaaaaagggccaaaatgggaccagaacccgggttccctcccacccctattatttgccccccaccccgaattctgtaaaaccccgggggccctaataccaaaacagccacttcaccccttaaaatacttcaagccccaaattggccccttaaaaggttcatcgcggggggccctccctcctttttcgggagccctcagggggcccaaaaccaggggtttcaaatacccctcctttgccaaaaaggtttggggggaggcttctgcgggtttttgcggagcccttttagggcaaaatcccgattccagaaccttcccgatta

SEQ ID NO: 18888 - DNA, 1591 bp, Zea mays
  Clone ID: MRT4577_117228C.1
gcaaacaccacagcgcagcagcaagcgagctaactggagtacaaagcaagccaattcgctctgtgcctgtgccgctgcctaccgtcgcgcgagacgggcgagctcctctcccggccgccgacgccgcgggggattccttttccccggaatgctctgccgctccgtccgggcggaagaggagcactaggcggcggctcggatggggcgcccggggtacatcacggtgcccatactctcggtgctcgccgcgatcggctatgtctactacaccacggtgttcctggcgatccccgcgtggctggggctctcctcggcgaccgggctcgccaacgccgcggtcttcagcgcgctcgccgccgcctgcgtcgctacctacgccgtcgccgtatcgcgcgacccgggccgcgtgccagcgtccttcgtgcccgatgtcgaggacgccgggagccccatccacgagatcaagcgcaagaacattgcagggtggtgatttgagatactgccagaaatgttcgcattataaacctcctcgagcgcaccattgtcgtgcctgcaaaagatgtgttctaagaatggaccaccactgtatatggattaataactgtgttgggcatgagaactacaagatattcctagtttttgttatgtatgctgtaattgcaagcttctattctatggttctcattatagggggtgctgtgcatttacctaaagatgaacaaccaagcagtgattcttctagaacatctatagttgtttgtggggttcttctgtgccctttagcattggcactaatggtcctattgggttggcatgtttacctcatcttacataataagactactatcgagtatcatgaaggagttagggctacatggttggctgaaaaggctggaaacgtttatcatcatccttataacctgggaatctatgagaacctagtttcggtgctaggtcctaacatgttgtgctggctgtgcccaatatcaaggaacatcggaaatggtgttcgtttccgcacatcatatgacactccactatcaacttcagcaatgtgatgcacaccatatagggagtatctgctaaatcgcaaaagaaactcaggtgcccacacaaagtgctaggtttgctattcttcacagttctgatttttagcatttaaccaaagcgtttgtgtatccttaaaaggagagtgttttccaatgcttgaacttttgtagtaagggtgtgctacatcaaatccagcgtgtttaggatactgctacatacatcaaatcctaaagcctcctagaatctgtcattaggaatttttagagatgctgacatacttagatttttctctctttttggggacattcttgatcaaataagtaattattgcttgtgtagtagactagagtgggctgtattaacacacactaaaaaaaacggaaagaaaaggaaagatgtactcgtggttgttctgttgtaaaattatgtccaaactggtttttttttgtcgtgaaagctcgtcagctcgtgtattgttttgtcagatagtacataggagtaatgagtgttaaggaccaatcaaccaaatactattttatgt

SEQ ID NO: 18889 - DNA, 358 bp, Zea mays
  Clone ID: MRT4577_117229C.1
cttggttcatggtacgctaaaatcaaaacagaacaacacactgggtggcaggcgatgcgcagcacattgattttaaaacgcaacagggacaaaaaccccccaacggaggggagacccggattcatgccaccaaggtaaaccgccaacagctgagacgggaaacgatgactaggggcctacaaattgcggataaggggaatgtcataggagaaccccaattctaggaagaccgagcccccgaccactaagttggacaggggaaggccaaaactggaaaatgggccggaaacaaactggaaaaccaggccccggttcccgttggtggggattcccatgagggtttgctctttgagggggg

SEQ ID NO: 18890 - DNA, 840 bp, Zea mays
  unsure (1)..(840): unsure at all n locations
  Clone ID: MRT4577_11722C.1
ttgggtacctcgaggccggccggggttgcattccatctccatagacaagtaatcccaatcccgtcctacctggatggttcctgcctgtctgtcgcctcgtgacgtctgtccaagaacactcgctccccacctgttcgctgcttcttcttcttgccaatctgctccttcttctagctagatcttggatggagctggggatgacgatggaggtagcgaagatcatcgagttggtggttagcaaatcccaccaagcaggaagcagccgcgagcgagccatggccatggatcccgttctgaaggtggccctngggctcggcggcgttcgccgtgttctgggtgctggcggtgttcccggcggtgccgttcctgcccatcggncgcacggcgggctccctgctgggcgccatgctgatggtgctgctgggcgtgatgagcgccgacgacgcctacgccgccgtggacctgcccatcctgggcctgctgttcggcaccatggtggtgagcgtgtacctggagcgcgccgacatgttccggcacctggggcgcctgcttgtcgtggcggagcccagggcgggcggggaccctgctggtgcgncacctgcgccgtgtccgcgctcgcctccgcgctcttcaccaacgacaccttgctgcgtcgtgctcaccgagttcatcctcaagatcgcgcgccagaacaacctgcccccggccccttccttggttgggggctggcgtccagcgccaacaccggctccgccgccacgcccatcggcaaccctcagaacctggtcatcgccgtgcagagcggcatcttctttcggcggcttcgtcttcggcatcctc

SEQ ID NO: 18891 - DNA, 200 bp, Zea mays
  Clone ID: MRT4577_117230C.1
ttttatagactgcgcatcctcctaccaattttcgctctgtctgaatggaccattaccacaaactaaattacacaatcacctattatatgctaaacattatacctgactaatcactacacctataagctcatgaactacatgggtatattatccaactattttacctgctacattagcttacctttcatttaagcctaaaa

SEQ ID NO: 18892 - DNA, 300 bp, Zea mays
  Clone ID: MRT4577_117231C.1
caaccaatcgacttacaatttgggatgctcctgttctttgactaaaacaactcgaaaaaaccgctgaaagggaaacctttttgctccgggccttatttttgggaacatgtgtccagctgaaagggctttaacgggctgtccagtttaactgacaatcctatttatttttctcacatgtaaatttgtccacgggtttttttttaactattgttccactggtttaagaacttttacgaacatagcggggggcaaagggcctaaggctgagcttgcagcacccagtgttttgttcagcagctc

SEQ ID NO: 18893 - DNA, 1099 bp, Zea mays
  unsure (1)..(1099): unsure at all n locations
  Clone ID: MRT4577_117232C.1
agaaaacctgttgtggaacaatgataatttgacatcaataagttttgaattctgatgattcagattctgtctataaatctgttgaggatggcatggaacatatctttacttcaacaacacaactccgatttggtcatgatttgcgcttgaatgaagtttatcctttcttttgagtcagactgtctttctgaattactggattgcaattgcaatattgcattgttatttgcttaataataatgttttggttcttacttccaatcgtgcaagccttttttgctttatttctatgattttatgcttcatgtatttttgtgacaggaacactctggcttgtgtaagtcacattagtctgctgtatcttgtttcattctttatatgtctgcttaaaattctgtaatattcttttgattaggttagacgcctcttatgctcagcaaggcctgtgcctatacaaacacctactaatcctagcgtgtcggatcatcggcaccatcagcaacaattatggaattttgcacaaaggacaactgctttaccttttgggcgtggagcttttactttagctacaacgtacacctttgttgacagaggttctggtgttcccaaagcttgtgttggctggtcgattgcctgcacagcagaacgcaacagtaaatcttgatctaagtagtagaagtgtctcagaattcaaatcttgggctgagtttcataatggtgttgctgctggcctgaggcttgctccttttcaggagaaaatgttgagaacttggatacaatacaataggccttctgaacccaattttnactcatgctggtttgcttctagcatttggcttgcatgagcatctaagagtcctaactgtgactgatgcatatggatatctctcacaggagcatgatataacaacancttggtttgttactttggtttggcagcatctcataggggaacaaatggatcctgcaatatcaaaggggaaatggaaaaatgtacctccaacagactcctatactgatctctcttaaagtcccgcacgcgcaaacgttctgttttcgtgcaccaaatgtttcgctgctggccaggctcccaatccac

SEQ ID NO: 18894 - DNA, 497 bp, Zea mays
  Clone ID: MRT4577_117233C.1
acatactgcaaccctaattgtatttttgtatgtatcggctacagtcccagtgccacggtctaattttgagtcacctttttcccccatcgcgtcggtttgttctagtatctacaacattggcggatatcaattgccttcctctagcgtctagattctgtattgcacgtctaacacgtggcacgagggccctaggttgcgggtgaagctaatgtcatgtactgcttgcgttcttgatgaaaagatatatgtatcaggaagatgcaaagatggcgactccatgacgtttcaagtgtttgacacaaatacacaaacttgggatcctttgtctgtcccttgcaccgagacacaacacgactttcactacaaaatctcaaggtttgacggcaaattgcacctggtgagctacaaaagtgtggatgctcacaatttcaacgaaggtagatgggacctggttacaccaagcatagaacataataagtgtttatatgattgttatc

SEQ ID NO: 18895 - DNA, 750 bp, Zea mays
  Clone ID: MRT4577_117234C.1
aatttgcatcatcgtccccgaccctgagccttcctcgaccaatccctgaacctttcacagggaaatcacaatgcggttcggccggtgcccctactgccggaccatggtctaccagaaccctcaagcggtcgtcttcttctgcagcaaatgccgcaccccgatcagaggcaagaacccttcgtcgacggaaggaatcgaccaggccctgagcaggcttgagatcctctcggtggacaacgcgtcggtgttctccgatgagctcgatgcctgtcaggacattgttgcacctccccgttcctcctcgccggcaccacatggaggattcggttccatgtggcggggtcatcctgctaccaatggcgcacctgctagtgctggatgtgacgatagtgtcgttgactcagacgaacaagataggatccggctgttctcccgacggacgagacgcacgtcgggctctgattcgagcgttctgcgctacggtatgctgatggcagcggattcggagacggaggaagggttctcttcgccgaggaacgcgtgcgagcggcagcggcaccgccgccggagatcgctcctgggatcgcaagcgttcgagacatcgaccggacatgacccgtacggcgtcgcgccgtctctgctgagagacccgtccttccacaacgagctggtcaacgcgctggacaacctcccgaggctggtcgccgctatcgagccgtcctcgagctcgagcggcaggagagcgtctgc

SEQ ID NO: 18896 - DNA, 1175 bp, Zea mays
  Clone ID: MRT4577_117235C.1
ccggccggggtagcagcagcacaactgcacgacccctcgccggccatggaggcctccgccaccggcgccgcggatccgcacttcccgatttacatctcctcggacgaggaagacgggcacgcctatttcatcgagtcctatagccccgaggaggtccagattcagcagaccattcttctctccctgtatacctctcgcgcccagacggccgccgcctgctccgcttcctcctcttaccctactggtgcctcctccacccctaaggccggtacctcctccacccctaaggaaactcctatcgatcacaaaagaaagcgcaagcttaaactagaagacgacacgaacgactccaaaatgaagcggtccacgcgcaaccgcttcaactgcgccatctgcttcgagatggttctggctgcggagaagtttgttgtgagtcactgccctcacgcgttctgcaacagttgcatcggaaggtatgtcgccggcaaggtagccgacaacgtagccgtgatcgggtgccctgaccccgcgtgtgagacggggtttattgagatggatctgtgtcgggatatcatcccgcctgaactatttgaccggtggagtgtcgtgctgtgcgaggagctactgggtgatgataagttctactgtccgttcaaggattgctcggcactgttactaaatgatgattcggcgaagatcagggaaacagagtgtccccactgtcacaggctgttctgtgctcgctgccatgtgccatggcacgatgggatcgagtgcaaggaatttaggaagcttggggatgacgagaagggggagaatgatttgatgcttaagaaacttgctgacaaggagaaatggcagaggtgccccaagtgcaggatgtatgtttcgcgaaaatctgggtgcttgttaataaattgcaggtgcaaacagtacttctgttaccattgtgctgcaccaatggatagggaaactcactattgtgagaattgcaagcactagagaagtagattaaggtctttttagataatgagtaggtaaagctcttagttaacaatgcaggctccgtgcgcagtcgtaggtgatacctaagtagaattttatccccttttagtggaagtaagttccacctttctgccatcgtgatattgttgagctatagagttgatgtgctg

SEQ ID NO: 18897 - DNA, 334 bp, Zea mays
  Clone ID: MRT4577_117236C.1
acaaattccatatcttcaaagaaagacaggcggggcgatgtgtccatatcataacatggagatccattatttctacttaataggccctatctgtgtaaccaacagaaaatagattggaatttctaatggaattgtaatttcacattcttccgaaataagggggctaaaatgtccatttatcaatcccaatgatttgttttcttactaaaaaaatcctcaacccaaaaggatatacatccgaattacttgtggaattccaatcacacatactaaagcaattgtgttgtccaaatctttatatattacgtagaattcatttgattctatactagcc

SEQ ID NO: 18898 - DNA, 490 bp, Zea mays
  Clone ID: MRT4577_117237C.1
ccttctttcgttgagccttattatggtttttgctttttgttttttttttttttttaacaaggggcaaacacagccttttttttttttggtgtaaatgttaggtccacccttccagttaaaagaaaaaaaggggggcctccattgttctctactaacccatacgggtgttccccgggggggggggaggataaatttgttataaagtcccccctgctcgcatgggttaaccccctccatgttttgggggccttccattccccagggggtggcatcgaaccccctttaaatagtggaagccccctgggccaactttttttccttcttttggacaaaaaacccatcttgcgcttcttcgcaaaagatcctttaaaaaaaattgctttggaaaggattgtgaggccctcacaggaaaacgccctgttttacttgttgcctaatctacccccttttaaaaaatgctcccccccccccgagtatgggaccttgcaag

SEQ ID NO: 18899 - DNA, 207 bp, Zea mays
  Clone ID: MRT4577_117238C.1
ctcgtttgtctagggccgaccacagttgttccttatggcacatgggctgaagaactggttcctggcgctgtctacagagcaactggtggatgcatccagcaaagcaactggcgtgtcgtgctcgttcgttcataccaatccctggaagcgcacaccactcatggaatacatgacactgagccagctggtggcgtgactttactggaa

SEQ ID NO: 18900 - DNA, 877 bp, Zea mays
  unsure (1)..(877): unsure at all n locations
  Clone ID: MRT4577_117239C.1
gatgcaacggaacggtctgcaccagcacaaaaaacgtggagtaacattgacttgacatgcccatggcgagagcaggagctcaacagcgacgccgtggcgcggacattgtgtgcctgtcactgcctcactggttgcccgattgctgccgcgcgccggaccagcagctgtcccaactcccaatacacgcgaggcaatggcgaacccccaacaaacgcagcgaggacaaacgaagcctcaagaagaaaacaggacagatgaacaacaattcatcgggccatggcagtggcagaagggacgggagacgacgagacgagacgagacgtactaataacatggcataccatacggtgagaatagacagagggagagagtgatcaacgtgcctactgagacctgagagctaattaagcgacacgcgtatcgtacggataggccggcacatgattaacaaccttggcgtggcgtaggtagacgacgtatcggagtgctagagactgaggttgaggtcgagctccccggcgtcgtcgtcgtcgtcgttgctgcttccgccgtcggcggcgccggcgcaggaggtggtgagcgtggtggtggtgctggccggggacgcggctgtgacggcggccgaggcggtggtgccgtgggagcccctcctccagttgagcatgtcatcgcggccggcgccgccgggctgctcggccggctggtgcgtggcgtagcgcgcgcggggggccagcacggccacgccgccggcctcggccgtccccgcccccgtgcctgtccctgtccctgtccctgtccccgttcccgccgacaccgccgctgnctcgtggggcgcgtagtagttgtagtgcaggccgctggagccgtgcgaggcgat

SEQ ID NO: 18901 - DNA, 653 bp, Zea mays
  unsure (1)..(653): unsure at all n locations
  Clone ID: MRT4577_11723C.1
tttttttttttttttnnnnnnnnnnnnnnnnnnnnnnnnnagcattcaaaagagacatcattacaacattcaaaagagacatcattacattcatggctcagcttaaactgttcttagccctcagattacaaaagagatatgcaaccaccttttcagggctcagcttagactattcttagcccttagattacaaaagagacatgtcatagcactcgaagggacatgctcctcggcttcaagcattgaacttgatcttctttcttgttgcaagctatttccttcttagggggagcatcaaccattgaactgggaccgtcttcttgcactgacatgttcacttcaactcgtggtggttccaatgttagtacccttcttgtggatacctataattctgcttccttggctgcttgctcagcctctagtgccctcctagccttttctcttgcagcttgtgcccttgttcttggagatggttcagctagtggttcagcttgtgcacctgttgcagcttgtgggtgagctagtgcacctgttgcagcttgtgggtgagcttgtgcacctgttgcagcttttgggtcagctgctgcacttgagcagcttctggttcagcccccttagctntcttcctctctccagttgtcttggtctttctg

SEQ ID NO: 18902 - DNA, 454 bp, Zea mays
  Clone ID: MRT4577_117240C.1
cttactgcttcgatctaccattcacatctctcaacagcacccttcgcccccactgcgcatcgccatctgtttcgggaattctctctgcctgcaaacatgggatgcttcactcgcaagacgcacgcagccgcacagccaggagttaacaccaccactgggaatgccccccacgacatatattccatgcagacccggccaacgtttggccagtggatcaaacacacatggcttgaccttttgaccatggcaatcctgggcgctattggcctcggagtctacatggctcgtccagttccttctcgatcctttgccgtcaccttctcagatggcgagatcgtctaccccgattttggctaccctttgcgcaaagagctcgtccccatttggctcgccgccttcctggccgtccttgtacccgttctgggtttcctgatcatgcagattcgcgtccggt

SEQ ID NO: 18903 - DNA, 537 bp, Zea mays
  unsure (1)..(537): unsure at all n locations
  Clone ID: MRT4577_117241C.1
taccctccnggttttgccgggntatgtatgtatagtcaaagaaagaaactgtacatttcgaaaacgaaaggaggttattatatgtgtaaaaaaaaaaaaaaaaaaaaaaaaaaaaaaaagaggacctaaaagctccaaataaaagaaaacctaaaaggaaagaaaaaaagaaaaatagcccgaacccgtgccccagagcaggaattcctgcttctcctcccgttatccccccaacagttcccgcccccctttcctccccggcaggcgaaaggggtgaaagacctgatcccccctaacttagggaccccttggggagattcccctccccccccgcttacgggcccgctttcccggcgccgaccccctgctttggccccccgcctcattgggtggaccggggcgcggggcgagtcgttttttgttttggacgctcgtccgctacataaatcagttggttccaacggtcgggggcccaggttttggcagcgtcataagaggactggcgcgtggccatgcccttttccaattaagcggggg

SEQ ID NO: 18904 - DNA, 560 bp, Zea mays
  Clone ID: MRT4577_117242C.1
cagcacaggacagccgccaaaacaaaacctaccggttttctcgtgtctgtgtacgcgtctaaattcgcaactccatcaccctccgcaacagcgagctccaaccatccccgcgcaaagcagcaaaacccaatgcaaccagacacaagcgagcacaaagcagtttgcggctcctcgtgccaactgccgggttacagtcaagcgaaggaaggaaggaaggaagcgagacgagaagcgagcagattaggaggacgcattaccgtcgccggcgtcggtggccgcgctcgcccgccgcggcaatgcggcagcggcgaccagcagcaggacgaggaccggcgccgcccccatcgctcggtcggggggccgggctctctcggacgaccagctagcagcgcagcaccgcctacacggagcagcacggacgcaccagccgtcgccggcgtagatctggagagggaagagacgaggggaggggaggtggattctcttgttttcccggcgcacgattcttctccctctgcgctctgctcccgttcgtttttttgtttggcttctttaatcta

SEQ ID NO: 18905 - DNA, 336 bp, Zea mays
  Clone ID: MRT4577_117243C.1
aagcaaaaggcaaaccttttgtagagttctatccgttttctatccaacgcgccaacaacgtttttatgtttgacacaaacaccgtataagcggctctattcttacacacacaatctttagggtggtgggcacccccacacaaagcgtgatctatcgagtgggccacggtggacactcagattactgtgcggacttcataaacgggggctctctgcctctactttagagaagtaatcactgtgaagaacaatcgctagagcaatgaccactgcccttgggtgcaaagtgaagtcgataaaaacatgcaggttttcgacatatactacgggagcacac

SEQ ID NO: 18906 - DNA, 1108 bp, Zea mays
  Clone ID: MRT4577_117244C.1
attgggtacctaaatcgcgaacaaatattttaaagcggatagataactcgtgcacgcaagagcttggccactccattttaccactccttgtctcactctccgccacaacgtcagccgccccgcgccgagcagacctcctccactagccgccgggccgcacaccaaacgctcctgggaatgccgacgccgacgatggtcaggccttttccgctcttcttcttcatcgtcgtcgtcttgctggtccggtcgccggcgggtgcggcggccgacggcggcgggaacgcgacgacggattcctgcccgctagatctgggctacgtgcggacattcccatgggaccctttgccgtgcgcgggaggcgcgcccaacgtgacagcctgctgccagacgctgctctccctgttcggcatcggcctcgccgagcgcctccgcggcacgggccacttccgcctcccgtccgcggcggcctctacggcctgcatcgagagcttcacggacctcatctccgccgcgccggcgagcctctcgggttcctccttggtggcggaatgcttcccggacccgagccagttcgccatcacctcgtcctactgcgccggcgtctccaccgctacggagttcgtggccgccgtcgggaacgactccgcccaggccctcaactcctcctgcggccccgacctcgcctcgccggcgacctgcgcgctctgttacagcgccggcgtcgccgccaccgcgcatctcaccagcgccgcggccaacgatagcaagtcgggctcctgcttctacctcactgtcctgtacgccgctggcatctccaactccgccggccccacctacccacccaccgccgcctgcgctcttggacttggcctcttgtcccctgcccccacgccgtcgaagtccagccacgccgccgtctacgccgccaccatcccaatcgcattcgtgctgctcgcatcgctcttcggcttctttctttggaggaagcgaacgcgtgccaatagcaagaagaagaagaaccataagatcttgcgaggaggggtcccggagaccgccggtcgcacccgcggccaaaacacagggtcggttttcttcgacattgccgacc

SEQ ID NO: 18907 - DNA, 214 bp, Zea mays
  Clone ID: MRT4577_117245C.1
agcaggggtaacaacgcacagtacgcggggagtcagaatccaccaggttggccggtgtgactggcgaacaacaacgctgggacttgcgtgaggaagaagaagagcaagtgcttcgggatttcacagctcttcttcttcttcttttccggaacaataataattgtcctcgacgggagagaactcgcctttaacgatctcgcatatcattggtggc

SEQ ID NO: 18908 - DNA, 810 bp, Zea mays
  Clone ID: MRT4577_117246C.1
ccggccgggaagccacagctcgcacgctaatcccttccttttacactctgccgcccatttcacactctgcacctcgcttgcctgcctcagaccagtggataccgctttcgtcgtcgtcatctcgacgcacgacgctcctcgaccagtctccatggactactacagggtgagtgttctattacgttctgccagtcagtcctcgcaaaatggttttcgagagctgaaaacatcgagaggcagtgacgcgtaccatgtactcagcagcagccctactgcatcatgaccctgaggatgagcatcgactgcaacgggtgctaccagcggatcaggagggcgctcctccagatggaaggtaaacaacactccagctgagacctcggcctcggcctcggcctcggtctcggagacatctctggaccttctccttctggacttcttgcagggctggagagccacctgatcgacaagaagcacggccgggtcgtcgtgtgcggcgccgccttcagcccgcaggacgtggccatcaagatcaggaagcggaccaaccgccgcgtcgagatcctcgacgtcagcgaggcctcgccggcagcaccagaaggcggccccggccacatgccctcctgaaggagtcacgccgccgacacgtgctctgtagcggcggaagaagcctgcttgctattcccctaaacgaaacgaaagcatgtgcctggcatgttttgcctgcttgtaacttttggaatccttgcaccattttgttctgtaactgtaaaggattgttgaagtagccagaaaattccaagaccgtgttct

SEQ ID NO: 18909 - DNA, 707 bp, Zea mays
  unsure (1)..(707): unsure at all n locations
  Clone ID: MRT4577_117247C.1
ctacgagaaagacttggngctttgacgacaagccaaacgatgggacagcggcgcatgtcatctcgagggggggacccgtcgaacgcgggcagatcgacgaagagggcatccgagagggcgaagaccttcaccgagggttgaaagctcgacagattagtatgattgccatcggtggatctatcggtactggactcgtcattgggtctggttcgggactggcaaaaggagggcccgtcggactgctgatcgcttatgtcatcatgggagccatgtgcttcggagtgatgtgcagtttgggagagatggccacttaccttcctcacaagaaaggattcggaggatacgcctctcgcttcgtcgacccgtcgatgggattcgctctcggatggaactacctcatgaaatacctcgtcgtcacgccgaacaacattaccgctggtgccattgtcgtccgctactggaccgacaaagttccaattggagcgtggatcacgatctacattggtggttgcttcttggtcaacttgctcggtattgaagttttcggagaggttgaattctgggcgtctttcatcaagatcatcgttctcgctggattgattctcctcggaattatcatcgatcttggaggagctgttgtcgaccgcatcggattccgatactggcgcggacaacccttctctcactacattttccaaaacgacacc

SEQ ID NO: 18910 - DNA, 859 bp, Zea mays
  Clone ID: MRT4577_117248C.1
tgcaaagtaaggtcagcattgcccggggggaattggaacaggcccagtccaggttacgggcggccaaggaaaaccgagaactggcggaatataaccaccgcatcaccatttcccgccgagcggaggaagaaaatcaggtggccattaatgtggccaatcaaaaattagaccgggagttcaagttggcccagctccgggagcaattatccgctgtggaggaaaagctcaatggcattgttcaaatcaaaagtccttactctggcactattcgccgcattaagtttgaccgccaaaccgacggtaagctggccgttaccctctacctcgacactactaacccaaatccctagtgccgagattgaagaaccagaactgcgggaaccggaagaggacgataccccggagttgatggaagacccccagggacaatctaatcctttcctggcccccgaactggatgagttggtggacaacaaaattagcgaggacgtttggcaacaaatgttgggggaattgccctgctccgtcaccacggaagattgcattaatcaactgcaaaatgtcgctgtgcaaaattctcgattactggcagacctccaggaaaaaattgacgaagcccaaaatgcagtggacgaagcccgacgcaaaaacttggattccattgccattggtaatttttcccctttcatccaaacctttctctactccaccctggggcccgttagtaatggggtggaaccgccggtcaataatccctttcgcctcatccttggtaataccctatctgcctttctcggtcagggtttgggggctttattcaattggtcagactacgccgccaacgattcccagcaacaac

SEQ ID NO: 18911 - DNA, 790 bp, Zea mays
  Clone ID: MRT4577_117249C.1
tactcgagcctcctctgatctgatacttcagccactctccctaatccctatccggccgcttaaccaaaccccggcggatcgcgcggggccggttgcctccctccctcttctccggcggccgccgcgttgcagagacgtttcggtatgaggaagggcgccgagctcttggtcctgctggtggcgtcgtccctctgcctgtccgctgcgattgccgcgcaggaaacctgcccggccgacatcgacgccaagtgcggcgatgccacttccgatggctgggagggcgagttcttccccggcattaccaagatcagatatgagggtccaaccagcaagaagccgctttcttacaagtggtataacgcggaggaagtgattcttggaaagaaaatgaaagattggttgcggttcagcgtggcgttctggcatactttccggggtactggaggagacccttttggtgcagccacaaagaactggccttgggaggatggcaccaattccttggccatggctaagagaagaatgaaagctcacttcgagttcatggagaagcttggagttgagaggcggtgcttccatgacagggacatcgcccctgatgtcagacactcgcggaaacaaatgctaacttcgatgagatagttgagatggcaacggaactccagagtgcgaccaatatagagccattgtggcgggactgcactgactgttcgtgcatccacgttacatgcacgaggctgctactaccccagacgggccggcgtatggctatgctactgctcagagaaaa

SEQ ID NO: 18912 - DNA, 2778 bp, Zea mays
  Clone ID: MRT4577_11724C.1
agcggcctgactgactgatgagtgagtggctcacatcacatggcagcagctatcagcttcgtctccgatgtcacgcagaaattttatacaaggaaaatatcccaggccatgtgttgctgttgcattccatctccatagacaagtaatcccaatcccgtcctacctggatggttcctgcctgtctgtcgcctcgtgacgtctgtccaagaacactcgctccccacctgttcgctgcttcttcttcttgccaatctgctccttcttctagctagatcttggatggagctggggatgacgatggaggtagcgaagatcatcgaggtatgtagagtacgcggctgctagttagttcaccaggccagcaagcgagctccagcttcgtccgatcgatagatgcgagctgtagcagcgtggcagccattcatcagttgtcagatcttagattccccccatccccgctactagttggtggttagcaaatcccaccaagcaggaagcagccgcgagcgagccatggccatggatcccgttctgaaggtggccctgggctcggcggcgttcgccgtgttctggcgtgctggcggtgttccccggcggtgccgttcctgcccatcgggcgcacggcgggctccctgctgggcgccatgctgatggtgctgctgggcgtgatgagcgccgacgacgcctacgccgccgtggacctgcccatcctgggcctgctgttcggcaccatggtggtgagcgtgtacctggagcgcgccggacatgttccggcacctggggcgcctgctgtcgtggcggagccagggcgggcgggacctgctggtgcgcacctgcgccgtgtccgcgctcgcctccgcgctcttcaccaacgacacctgctgcgtcgtgctcaccgagttcatcctcaagatcgcgcgccagaacaacctgcccccgcgccccttcctgctggcgctggcgtccagcgccaacatcggctccgccgccacgcccatcggcaaccctcagaacctggtcatcgccgtgcagagcggcatctccttcggcggcttcgtcttcggcatcctcccggccacgctcgtcggctccgtagtcaacgccgccatcctgctcgccctctactggaaccagctggacggcggatgcaagcccgccgccggagcccaggaggtggtcgccgtgcccaccgaggtcgtcgaggaggaggacgtcacgtcgcaccgcttctcgcccgccaccatgtcgcacctcctcctccgacgcgcccagtcccagcaggtgccggccggctacgacgacgcggcgaatcaagaccccgtcaagccgcccaacggcgtccaccacagaaggaaagcagcggtgaacggcgattgcgacggcgacggcgaccgctactactcctccttctcctccacgtcgtcgtcgacggaggaggccagcgccaaacaaccagaagatgacgaagaagaagtagaagaggagtggcagagcagggtgtggaaggtgtgcgtgtacgtcatcaccctgggcatgctggtggcgctgctgctgggcctcaacatgtcgtggagcgccatcaccgccgccctggcgctcatcgtgctggacttcaaggacgcccgcccctgcctggagaaggtgtcgtacccgctgctgctcttcttctgcggcatgttcatcaccgtggacggcttcaacaagacgggcatccccagcgcgttctgggacttcatggagccgtacgcgcggatcgacacgcccacggggacggccgtgctcgcgctcgtcatcctcctgctctccaacgtcgcgtccaacgtgccgacggtcctgctgctgggcgcgcgcgtggcggcgtcggcggcggccatctcccccgcggcggagaccaacgcctggctcatcctggcatggacgagcacggtggccggcaacctctcgctgctgggctccgccgccaacctgatcgtgtgcgagcaagcgcgccgctcccagcagtacggctacacgctctccttcttcagccacctccagttcggcttcccggcgacgctcgtcgtcaccggcatcggcctgctgctcatcagaacctactgatgcgtaccggaagggatgtctggagggggaagaagaatgtggattctttctcagcgccgtgtatcgcgtcacaggtcgttttgtttttgttgttgaatttgtgcaaggattcgttcgattggggggatatcatatcatggtcgctgcctcctgtcctgtaaaatggtggagaagcgtagcaccagagatagatagatagatcagcatggtgctcgcttgctcggagctggaggcgttttgggatgcacgtacatacatacatacattcattctctgcttttagtaagaaatctgtgcattatggagtagcacaccatgtatgtatatatcagacataagaaacaaaacaacaaaaaaaggaggtgtatatcatcgtatttctacgtgtaataagccagtgtattcagatcgaataatgttaggaatcgggttaatcagagccagaaccgatggggttcttattcttcaaaaaaaaaaaaaaaaaaggcccctacttacataatgatgatgattgtgtcagccatgatcgaatggtccagctgctgtttgtttaggtcagttttagtagttctatcagggctttatgtatgtattaataaactgttgtataagctttttttctcgcgttatagcaacagtttttatgagtttataataataaaactctcttgcctcttc

SEQ ID NO: 18913 - DNA, 345 bp, Zea mays
  Clone ID: MRT4577_117250C.1
tctctagatttttcctgactcgttgtctgctggcacttcctctgctcttcgcaaggtcaatgtaacctccaaccattagcatttagactaccaggactatcacaatggctattgtccagttcgactgtggcaaggcatcaccactctacaccgtacctacaagcttgtaactgtagccacacaaggtgcaacatcaccctttgaactgacgactgtgccaccaacaccatggctaatagctgctaatgagcgaatgtcaagctcaagacttatcgttagagaggtacaaccatttatatcactctgtgtaattcatacatccccaaatagctacagaattgtaat

SEQ ID NO: 18914 - DNA, 592 bp, Zea mays
  Clone ID: MRT4577_117251C.1
tttttttttttttttttttttttttttttttttttttttttttttttttttttttttttttttttttttttttttttttttttttgattaggcatcaaaagacgagagccccccaccccgggggtgggtccccctttttataaggataaaaggggcaaaaccctcggcccccaaccccaatcatataccacacggaaccttccttttcaaggaacaacattacaaggaaggggtaaaaaaaaccggcatctcctaggaaaaatcgaggggtatgggaatctggcatattttaaaacggacccctataccggttattcgaaccattcaaaaaaaaaggggtccacaggccccacccaattaattggttcgagcccaaaaaaaacgggtccccaaataaacccaaaaaaaaaaattgcctattttgttggcaaaaaaaacatatcgaccccaaaagggtagcaagcatcaatatgtcaagcttgggggtcactcaaaaaaaacggacaagcattagggggcccccaaaggccaaaaacataaacaatttccggtgcttcaggggaaaactgggggccacatttgttacccttgg

SEQ ID NO: 18915 - DNA, 1366 bp, Zea mays
  unsure (1)..(1366): unsure at all n locations
  Clone ID: MRT4577_117252C.1
gtgtccttagactatactttgcaacattgattacacatcttcgcaggtgccatttaggataactgcaacaggatgggttcaagaattcaacaatactgccagaattgtgaagaagataaagctcacaggcacaccatgcaagatatttaagaagactgcactaatcaagggaatgttcacatccgatttagaggttgctaggtttgaaggtgctgccattcggactgtaagtggaatccgaggacaggttaaaaaggtaatgagtaaataccatgccttgatagtttatcacggttaaatgtaactgttaaacgtaagcatgcaaatagtttcttgttcattacaggcagcaaagattgagccaggagatatgttgaagagaaaaggggaaaatacagaaggaatcgcaagatgtacatttgaggacagaattcttatgagtgacattgttttcctgcgtgcctgggtcaacgttgaagttcctacgtactctaaccctgtgaccactgctctgcaacctagagagcagacctggcaaggcatgagaacaactgctgagttgcggaaggcacacaatatccctaccccacacaacaaggattcagtttacaagcctatcgagcggaaaccacgcaagttcaatcccgtcgagatccccgcaaagctgcaacagttacttccttttaaatctaagcctaaggacacagcgaagcagaagaaagcaccagttgaaaacagggtgcctgtaatcatgcagcctagtgagaagaagacacacgcagctatacaacagctaaggctgataaaacacgagaaggcaaagaagaagaaaattaaggaacaacagaagaaaaaagcatacgaggcagagaaagccaagaccgagctactgacgaagaagcgccagagggaagagaggcgtgtgagataccgggaagaagataagcagaagaaacgtgcacgcagatgagtccagtgaggcgaggaaaggggtatgtgcaccaggaactcagcagcaaccgggcatgctctcttgtgcagaacatatgccaaaatcttagttcatagacggagagctataaaaggtgcagtaccacccatctgggcgaagaagcatgtcaagtcataaccagggcgcggagatgagcaagttaggttgcttgtttaagttatgtatcggttgccctaacgcggaatattgtctgaatgtttggcaaacgcatgtggtctttaactcccaattaaatttggagtcataattttggagtgtatactacctcaggtaccgaatgttaggcaaacgcatgtggtctttagcccccaagtaagccccgtttttatggncccaaanaaaaaaaaataatta

SEQ ID NO: 18916 - DNA, 445 bp, Zea mays
  Clone ID: MRT4577_117253C.1
tttagtattccctggctccgatggcgaagctggtggcttcatcaatgttgaactggggaaaagccacgccctgctaatgggacctactggctctggtaaaactttactcgcaaagacattacctcgttctgcgaatgcaccatctgtgactgctgatgcaaccacctccactccaaggggttacgtcggagaggctgtatcttctatgttatacaacttactcacagaggtagattttaatgtgcaagcagcacagcatgggatggcgcacatagaccaggatgatatgagcacacatgaggctgaaaggcttaacatcagcatagacacatctggtgaaggcgttcagcaggctttgctgaaaatgcttgaatgcaccataggcaccacacctgaaaaaggagcaaggaagcatccttgtagagttaatctacagatagatacc

SEQ ID NO: 18917 - DNA, 264 bp, Zea mays
  Clone ID: MRT4577_117254C.1
gaaggggagacgtgccacttaattttgggaaccaaaacaaataaaccttcggggtcgtcgacaatacaggagctgggcaaaccctggaaaaatccaggactggcacccatggttactaactaaaacggcagttgttagaggtcaaatccaaaaaccttcttaggcggcatatattaccacacttaaaactcagggccccagggaaaataaggaaccttccattaagctagccggcacctcccaaaggtttaatgacccccttcc

SEQ ID NO: 18918 - DNA, 738 bp, Zea mays
  Clone ID: MRT4577_117255C.1
atgccttgtcaacaattgatggctacagcggttgtggagctgatcaaggtgaaaagcatttacaaaactacactcaaatccaagagttcaataaatgaggtgaatcaggttgctcagctgaggatcatcataaaaccaaaatcctgcaatggtgttgggctattgtgcactgcacaacagattgagactgaaaagctgctagcccagttagttgagactaagatgaacatacgtttggatatggcatgtgcatttttgtataaaaaggtgcaatggattacagagaccccactgactgggccaaactcaatcattggtagagctgttgttgttcacgctgctcctgatgatcttgtaaaggagcagctctttttaaagttcccctccaagccgacaccccatccaccatcatcatcggcgcatcgtgccttgttcgctgcttgtgatgatcaccgttctcttcaatcgcttcgacgacggtttatttcagaaaggaaaacaactgagataaatcaagttgctactcaagaaaatgaaatcagtcagaatggtagacctacatctaaaacatgctcagcattaccagaacctattctagcttactggagtgtgaactcagaccatgttcatagggaggctgttggaacaacatcactgagggatggacggttcgaggatcccgtgtctgtggcagaagaggccacgttctgcaatgttgcactgaacataaccatctag

SEQ ID NO: 18919 - DNA, 401 bp, Zea mays
  Clone ID: MRT4577_117256C.1
gacccacgcgtccgacaattttttttggcctgcgcacccaatgcggacttcgaggagtgtctatcagcggatggggagagccaaggcctagagcgactccccggagctctttcagcacatacgaggcctggaatgatcctgaaatccggaaacagaataacagccccatccaaggtagaaaaacaagaacccacagatgatgaatccaactatgacactgagtacgaggactagcctcatggatccgatgaccagagggaacctattggagagacaagtacatccagaagatttgagagaccaaatgagcctgatggagcacaggaccacacacaacaagatgtgaatgccggcactgacccataacaaccaacactaccccgacaaacacacccacagaa

SEQ ID NO: 18920 - DNA, 157 bp, Zea mays
  Clone ID: MRT4577_117257C.1
cttccacatcactgaacacgtccttactgaacctcacctcaatgggccaggtgcaccctacattgttcccgcatatcttaaaaagctaaaataaccctgaatgaagaggccaactactcacacatctatcatgaaagcgatcctatatccttaacac

SEQ ID NO: 18921 - DNA, 344 bp, Zea mays
  Clone ID: MRT4577_117258C.1
aagggcacatctttactatataaaaggggttctatccaaaataaataaataattcccttataaggggacaacgggccagcaacccaaagttgactgggaaacgatggcctaaatctttcacgaactcataacagcatcctccatgcccctaaacctgggggacctgttcttgacctgggggggggggggagacagcaagagggagctcacatacgttcatggctcaacaaggtggggggaataatgggcatgaaccccccaaaggggggagctcacgggaagggtaaggcttaccaaagaggatggttagagttgaccattgcttttaaaggtggcaaaaattt

SEQ ID NO: 18922 - DNA, 269 bp, Zea mays
  Clone ID: MRT4577_117259C.1
tattaagcaaaatgtaaagcacttttttttatagctatggttataaacaggttttagattgttcaaattacttgtccactgaatgtcacttgaccttgataagaggccgcctgcacacagagcccagttaattctccgcacctcggttgtgtgcttccgaatgggctcactcccgtggtggtgtttgagagccaacaacactacctcatagaccggtctttgggaaactttgggtctcactgttgcctggcttgagcactttggtttat

SEQ ID NO: 18923 - DNA, 502 bp, Zea mays
  Clone ID: MRT4577_11725C.1
gccgggtcgcagatctgcatcaagggtgggctggactacctcggtaaccctagcctgatccacgcgcagagcattctcgccatttgtgcctgtcatgtcgtgctcatgggcgccatcgaggggtaccgagtcctcggcggaccagctcggagaggtcgacgacccgctctaccccggcggcagattggacccgttcggagctacccgtcgaccctgaggccttggcggatctcaaggcgaaggagctcaacatcggacgcctcgacatgtcctgcatgttcgggtactacggacaggccatcgtcaccggcaagggccctgtagagaacctctctgaccacctagaccatcgcgtagacaacaaccaatgggcctatgccaccaactttagggcccggcaagtgacgacatggaggcgctaccgatcactgtgcaccagtgcagatatttatgtgaggggatgcacgtcatcacgcactgctgccagtacgtaccatgatac

SEQ ID NO: 18924 - DNA, 302 bp, Zea mays
  Clone ID: MRT4577_117260C.1
cgtaagtctttgggcaagctgctggacatttacgagcagcgccttggcgaggagggctgactggccggaggcaaccttacgcatgatcgcctgttccacctgcccaacgccgaccgccttggcggtgaaccccaatccgcacgcctaatgcagtcatacatgaacgtcagtaagcaatggtacaacgggtatcgacgagactcttgggtcagggaactggagttgcagcacctgtcgcccgatgaggcgcccttgttatgtcgatcgatcgtacattaaggatggagacttagctcaagcct

SEQ ID NO: 18925 - DNA, 410 bp, Zea mays
  Clone ID: MRT4577_117261C.1
acctaaattttttttttttttttttttttttggggttatttattgaagttttggggggtaataaaaacaatgtcgtacttgattatttacaccttcggtctgggaaaagaccccaaaatattgggcaaaaaggccaaaaggggcataacacacaaaaaaaccctgttaagggaaaacccccatttaaaggggaaaagggccaaaaaacgaacaacggaacaagaaagttgccccattacaagggggcccccaccaaagggggacctgcaaaggtcccacaggaaggaagagccccaacccaaggggggggccccataaaagaggaagccacaaaaaaaggggcgacccatattaacccttacacaagttttatgggggggggggagcccccccccggggaaaaagggaac

SEQ ID NO: 18926 - DNA, 315 bp, Zea mays
  Clone ID: MRT4577_117262C.1
aaatctcaaccaattttttgatttttttttggaaacacatgccggtttgggggccccattttcgggtccattttattttttatctaaaaggatggcccctccaacggtgggttgctgcctcgccaagacagggtttattaaagagaaccggttgtttggcaacaattgttgcttcttttggaaggcagccaccaatgggttagccactgccaatggattaaataactgttgtcgcttttgtaggtccccaacaaaattcgacataattagttggttgaatggaaacaacttttgcaagtaggcaacagggtttgc

SEQ ID NO: 18927 - DNA, 241 bp, Zea mays
  Clone ID: MRT4577_117263C.1
cagaccagcactgcagatagtgacctcaaagaagatggaatttcctcccggaaatcaagtggcagtgctgttggaggaaagggaattgctccagccagtcccatgcttgggaatgcaagtaatcctaataaggcggatattcctgaacgcaagataagctccactgtctctagtagtaacacagcatctggtggaatgacacgacgaaatacttatgtttgcagtgagagaactacagctg

SEQ ID NO: 18928 - DNA, 255 bp, Zea mays
  Clone ID: MRT4577_117264C.1
atgagcatgaccgacttgccccgtacccgcgtcaacgagcgtcggtcggctcgcggctgcgaccgtgggcggggcagtagattggggtggaagaacatgacgaaggctggaaagacgaacgggacgtccgacgatggcgaaaacgatgccactgcgcgagtcagtgtcgggattggtgtcggacgaatacggggaggaggcgcctgctcctacgccctctgccgagaatggggtggtgcggaggtggaggcatga

SEQ ID NO: 18929 - DNA, 330 bp, Zea mays
  Clone ID: MRT4577_117265C.1
actcctccacggtgccgtcattgcgcactgcggtacaagccctcctccgcgcgacagtaaagaccgacacggatcgctcctacatctacggaggacacggtggctacgacgtggacgactcgtcgcccgtctaccactgcctgcgtgcctaccacagcccatcgatgcacccctcgcaacgtgatggggctggccaccaactccgccgctggcgcagcagctgccgtatccggcgcggcgtcatcccagacgcatcgcgcggccgcgatcctcccggtgaagaggggcgccatctccgccatccacgccgccgacccgtctaagaacaac

SEQ ID NO: 18930 - DNA, 1139 bp, Zea mays
  Clone ID: MRT4577_117266C.1
gcattacatccgcgtcacgggaacgccgcacggttggaatgtggctttctacttcttccagctggtgaaaggtgtcatcctcttcgcggtgatgccggccgtcggcacggtaaccgacacacttcccactcatctcgtcctcatcctccgctccccacccacccccgtgatcccgctccaggtcaccgcgaacatcgccgccgcggtcattggggagaccgggcccttcatgcaggggtgggtgacatggaaccagatcttgctcttcgtggatgtcgtgtgctgctgcgcggtgctcttcccggtcgtgtggtctatccggtcgctcagggagacgtccaagaccgacggcaaggcggcacggaacctctccaagctcaccctgttcaggcagttctacgtcgtggtgatcgggtacctgtacttcactaggatcgtcgtgtatgcgctcaaggcagttgccagctacaagtaccggtgggtgagcatcttggcagaagagatggccaccctggcgttctatctgttcatgttctacacgttcaggccggccgagaagagccactacttttctctcgatgacgatgaagaagaggccgcagagatggtgctccgagaagaggaattcgagctatgaagagatgcagcgactcacaaagagtctccatgccacgtcactccctgtgatcttgatcatacctcaaatgcccggacacagctcatagtgttgtatgtaccgaagggatgtgagatcgttttgtccgtcttctagaattcagattttagtattttactgatgaaacacagattacttaacttataccatgttcaagaagttttcttgcttgcaatgcaatcagagcagcaactcctgctttggcttagtttgaaatatgctactacgtattttgtggttacatctttctatttttaaccatcatctcttaattccttttatattttcctattacttttggcctttcattggtcatacattctacttaatttatttattatattttattactttaaaatactcattttctataaatttttttttatatttttcatttctatccttcattttcttttctttttttattttttcttattcttcaaatcttataatcgttttatta

SEQ ID NO: 18931 - DNA, 346 bp, Zea mays
  unsure (1)..(346): unsure at all n locations
  Clone ID: MRT4577_117267C.1
ttcacaaattccgatattcttgaaaccacttacccggctnctgccaanattctacttgtttacggnatagnaaaccctcctattcctataaacactgattttcttgggaaaacatataaatcatgtgctgtcaccactttattcaccagttgtagtgacttaacacctacaaccattttcaaagccttgtgattaagacaaatccacgtttacaatgatgtacatggtctgttgacatttgatcctaatatatatgcaaatgctatacccatgccctacttaactattgatcatgctcatcagctttactactttattacacactttttacataccctaccaatac

SEQ ID NO: 18932 - DNA, 165 bp, Zea mays
  Clone ID: MRT4577_117268C.1
aacgagcccaagctttttttttttcttttttcctttttttttttagaaagacacataagagggaagacttgattatataagcaaataaacaagtcacaccctgatgacctgtctacacattaatacggtacctaaggccgaaaaaacctcttagggcgggcgggg

SEQ ID NO: 18933 - DNA, 312 bp, Zea mays
  unsure (1)..(312): unsure at all n locations
  Clone ID: MRT4577_117269C.1
cccacgcgtccgcccacgcgtccgcccacgcgtccgccccaattgtatgctgatcgtttcagttggttcgtgcaaagtcagatggctcagtgataatttgcatctatctgatgacttgaatcatgctgaaccaggctttagttctgctagcagtctgtccagtttcaataactacgtttatttgttgatagcatttccattcatttttcggtatcatgccttggtttcttgttcaaaataatatggtttgcttgcatgaagtacatgtagtgacagtnactagtaagagttaaaccatgtgagtatttttta

SEQ ID NO: 18934 - DNA, 414 bp, Zea mays
  Clone ID: MRT4577_11726C.1
acaaaatggggtggggttgagatatataagcgcacagattatgataagaagcaaatacctggttattgccacaaggaggaggtatgtcatccatggtggtctagaaaacttacagtacaccgtccttatacatgacgaacagcaaaagactccagcaatgcatatccttgaacggacacggatctggtggtatataccagaacgccaaaccttccttacttcaatcaccaaaccataaaaaaactacaacaaagaatcatgcctgtttcaaaaagataatttatatttttaaccaaaaccaacagagagcaccatatatttgaaacaatgaccaatgtatgattcaaattataatcgatgaataccttaattaacggacttactgaactgaacataaccatgacactatcgatc

SEQ ID NO: 18935 - DNA, 131 bp, Zea mays
  Clone ID: MRT4577_117270C.1
cccacgcgtccgtgaatccctggtcatacttatatttgtctcatgaaatttggtacaggggggaatgctttaaaacgccctgaatcattttataaatcacatatgtctctattgctgttaaaaaaaaaaca

SEQ ID NO: 18936 - DNA, 127 bp, Zea mays
  unsure (1)..(127): unsure at all n locations
  Clone ID: MRT4577_117271C.1
nggagtnctggggtgaggactgagactgcagatcgagggtctggcagcgggccgtgcagttgttaattgccactgaaatacgatcgaatctgacagggctgatacagctcgattcggcgcaaggtat

SEQ ID NO: 18937 - DNA, 472 bp, Zea mays
  Clone ID: MRT4577_117272C.1
ggtcccatataaacgagcggttctcacacatattgcgggtaagcatggaaacgaagaagcacttgatgtctcacatgatgctgaacctatgcgaacccaaggcacgctttatccacgattatatcagggtatacacagatcaacatccgtcacatgataagagggcgggactattccattgtactaggcatgggctatgcatttgtgtcatgcaggcaagcacacttactggaaccattctgggtgaagcacggcctcaccatctaggggatgcgtgggctcaaagatatcattgactcgctgcttatgagcctcatcatagatgtacacctgggtccactcgaaaagctatcttgtttagacttcatcctttacaaattgtgggacatcttggacacggaagaatcaaaggccctttatcttgaagggaggctcacattctataactagcatgtgacgaaaggcgtactta

SEQ ID NO: 18938 - DNA, 279 bp, Zea mays
  Clone ID: MRT4577_117273C.1
actatgtgtattggggggactcaattatgcagcaatccggaaactaattatggcgctgatgtggtcattgggacaccctggagtgcgattgatctgctaaaaagaggttctcttaagttgggagagatccgctttgttgttcttgatgacgcacaccagatgttagtctgttggttttgcatccagatgtctgaaacaattttgaaagagggtgtctccgcaacaatcagactttgaagctttcctgcaacaatgccaaccttgaatacggcagctcac

SEQ ID NO: 18939 - DNA, 535 bp, Zea mays
  unsure (1)..(535): unsure at all n locations
  Clone ID: MRT4577_117274C.1
ccgtcctcgcgcaggatcaaggtgaaaaggagaaccccatgcgggaacttcgcatccgcaaactctgtctcaacatctgtgttggggagagtggagacagactgacgcgagcagccaaggtgttggagcagctcacagggcagacccctgtgttttccaaagctagatacactgtcagatcctttggcatccggagaaatgaaaagattgctgtccactgcacagttcgaggggccaaggcagaagaaatcttggagaagggtctaaaggtgcgggagtatgagttaagaaaaaacaacttctcagatactggaaactttggttttgggatccaggaacacatcgatctgggtatcaaatatgacccaagcattggtatctacggcctggacttctatgtggtgctgggtaggccaggtttcagcatcgcagacaagaagcgcaggacaggctgcattggggccnaaacacagaatcagcaaagaggaggccatgcgctggttccagcagaagtatgatgggatcatcttcctgg

SEQ ID NO: 18940 - DNA, 110 bp, Zea mays
  Clone ID: MRT4577_117275C.1
cgatgtcagcgcatgactgccggttgtcgcaccagtcgtctgtggaacatgctgacatggtttgccaagaagttttgcgtggacgatgcaatcgcgtagcatgtaggtac

SEQ ID NO: 18941 - DNA, 994 bp, Zea mays
  unsure (1)..(994): unsure at all n locations
  Clone ID: MRT4577_117276C.1
aattcggcacgaggaactgcccttgctgcacaaccgaatcccacgccttctcttccttttcccttgctctctccagcccctgctgctcctgccgggcgctgcctgccgccgctgaccgcccccgctctctctctctctctctctctctctcgtcccccaatcaccccaattgccgggtgctcctcttcctgtcacccccatgttgactgctgcccgccaggccgccagagagggaggattaggaaaggggggaaagagagacggacggcttctcgggagtgggtaagactcacatgatgcaattacctccatctttccctcttctccttttgcgggcatactcttctcctccgcctggctagatccttctttcctcgtcccggattagctcccaatctcgccaatggtccaggttgctggccgtggaacatttcttcagttgggcccactctctgtgccggttccatcgggttttgacgcaagagtagaggacttggaacccgtaaaacccatccggagaattttccctgcgcgtcccatgattaggagctgcggctggacagtgccctacgctctggagttttagtgcgaatcgttgccagtttcagtcaacttttgatggagcccaggtgttgagcgccaatttgggagttccagctgacgctgcagtctgcattcttctaaggccatcagtgaggaattttcgttccttggtggcagatgggttcctccagctctaaagtggacaatgaggagcccgtgaggcgctccaaggacaggaggcggctcatgaagcagctggtgcgccgccgcccagagcttgcagctgcgcacattgcatacctgcacgccctccgcaacacaggagccactctccggcaatttgtggagctggagtctgctttgtcacagcagcctccggtaggccttgcggngccgccctcgcctactccacagtcgctgccgcagccgcagcccccgccacctcctgaac

SEQ ID NO: 18942 - DNA, 834 bp, Zea mays
  unsure (1)..(834): unsure at all n locations
  Clone ID: MRT4577_117277C.1
cattgggtacctcgaggccggccgggacacctaatccacgccttctcttccttttcccttgctctctccagcccctgctgctcctgccgggcgctgcctgccgccgctgaccgcccccgctctctctctctctctctctctctctcgtcccccaatcaccccaattgccgggtgctcctcttcctgtcacccccatgttgactgctgcccgccaggccgccagagagggaggattaggaaaggggggaaagagagacggacggcttctcgggagtgggtaagactcacatgatgcaattacctccatctttccctcttctccttttgcgggcatactcttctcctccgcctggctagatccttctttcctcgtcccggattagctcccaatctcgccaatggtccaggttgctggccgtggaacatttcttcagttgggcccactctctgtgccggttccatcgggttttgacgcaagagtagaggacttggtaggtcgttgtgttgtgactcattgttggagagcaggaccgatttcagattgaggacaatttcagccaattttgcaggaacccgtaaaacccatccggagaattttccctgcgcgtcccatgattaggagctgcggctggacagtgccctacgctctggagttttagtgcgaatcgttgccagtttcagtcaacttttgatggagcccaggtgttgagcgccaatttgggagttcagctgacgctgcagtctgcattcttctaaggccatcagtngaggaattttcgttccttggtggcagatgggtttctccagctctaaagtggacaatgaggagcccgt

SEQ ID NO: 18943 - DNA, 521 bp, Zea mays
  Clone ID: MRT4577_117278C.1
agactgagctgctcgtcaagacgcccgcgcagagccggaccagcatcgtgtacaagttcgccaccgacgacatcctcagggagcagtaccgggacccctggaacgaggtgcgcatcggcaagctgctcgaggatcttgacgccctcgccggcaccatcgccgtcaagcactgttcagatgaagacagcacaacaagaccccttttggttgtgactgcttccgttgacaaaatggagctgaaaaagccaattcgtgtggacactgatttgaagatagctggcgctgttacttatgttgggcgttcatcaattgacatacagattgaagtgactcaggttgataaagcgatggcgataatcagtctgatcccattgcattgaccgctaacttcacctttgtcgcacgcgattctaagactggaaaatctgctccggttaaccgcctttcacctgaaaccgaaagagagaagcagctatttgggagaaagtgaagcacgcgataagatgcagaaaaagggaaga

SEQ ID NO: 18944 - DNA, 1980 bp, Zea mays
  Clone ID: MRT4577_117279C.1
gagccccgcatccgcggccaagtacccatgacgacgaggctgacagcgacgttgttgctctccagaaccctcgtccgccgcgtaacctcgcgaaccccgacacccctcggccctttcggtctcgaaccatccgcaggaatccccatctcctggtccagacgcgcctcctcgaccgcctcgggagatcggggccaggaaccgccaccggccatggattcgcctatcaaggtggtttctcacctggggggcggacgaggaggaggagggggagagggagagggagagggagagggaggggccgcagcgatcgacgcggggaagtcggcacggaggccgctcagcctgtggcccgggatgtaccactccccggtgaccaacgcgctctgggaggcgcggtccagcatcttcgagcggatgatggacgctgggaacggcgcttcctctgccgagcagcggccgcagactgagctgctcgtcaagacgcccgcgcagagccggaccagcatcgtgtacaagttcgccaccgacgacatcctcagggagcagtaccgggacccctggaacgaggtgcgcatcggcaagctgctcgaggatcttgacgccctcgccggcaccatcgccgtcaagcactgttcagatgaagacagcacaacaagaccccttttggttgtgactgcttccgttgacaaaatggagctgaaaaagccaattcgtgtggacactgatttgaagatagctggcgctgttacttatgttgggcgttcatcaattgacatacagattgaagtgactcaggttgataaaggtattattggttcagttgaaggtcgacctagctcttcattgatttgaacagaaatgatgcttatggtagattttgttttctgcttttctttacctgactcatttcaaatgtggttatattgcagcagatgcggataatcagtctgatcccattgcattgaccgctaacttcacctttgtcgcacgcgattctaagactggaaaatctgctccgggtgaccgcctttcacctgaaaccgaaagagagaagcagctatttggagaaagtgaagcacgcgataagatgagaaaaaggaagagagaagaacagaagggaggactcgaaaatgggatacataggctccgtgccgaggccgagaggctggacgtgttgctcgcggagggccgtgttttctctgacctgcctgctttggccgatagagatagcatcttgctgaaggatacccgcctggagaattctcttgtctgccagccccaacaacggaacttgcatggtcgaattttcggtggtttcctgatgcaccgagcatttgagcttgccttctcgactgcgtatgcttttgttgggcagagaccttgtttccttgaagtcgatcatgttgacttcttgaaaccagtggacgtaggggacttccttcgattcaaatcatgtgtcttgtacacccagcttgacaatccagagcagcctctggtcaacgtcgaagttgttgctcatgtaacaagacctgagctccggaaaagtgaggtctccaacaccttccatttcaccttcacggtctgtagtgacacgctgaagaacgggttgaagattcgcaatgttgtcccctcgaccgaagaagaggcgcggcggatattggagcgcatggaggcagagggtttatgcaactaatctttccgcagatccacttgtttcggagttcggacgtgctttacttgatatatgtctcacttaccgttccacggtaccagctaaaacggggggatttggcgacgatttgagcagcagccagcagctatcataacacgccggcaatagaacggcatagctgtagctccatgcctccatggtactatttgtgattttttttacagagaccgcatgttgcgtataataacatactcctcgagactcaaaatgttcttttgagaaagcctcaaagcccttccgtttttttt

SEQ ID NO: 18945 - DNA, 317 bp, Zea mays
  Clone ID: MRT4577_11727C.1
attgagaccaactagcaacttacatagcacaatagagtaccaacaatggcggggaaaatataaaagctgcttaagctccttggactttctgcaagtgctgctacgctgaccattttggccctagggtcgcaagccattatacaaggcgttgttgagccgcacatgttacaagacctgcattgctggtgtgagaaccaaaatatccacctctactcgagccaacaggaactcgaccgtgatataacacgtggatgagtcttgtgcctgctacagtgaggaaccgtactacaaaagctgcgctcgcagcatctacagga

SEQ ID NO: 18946 - DNA, 469 bp, Zea mays
  Clone ID: MRT4577_117280C.1
aaattctcccggggaaaacgcaggtcttcgaagaaaccaaacgacggaagaaaaaaaaaggtttaaaaaaccggaaggggggggggaaaaaacgggggcagaaaaacgcacacggggggccccccgggaaccgcagaacggacccccccgggggggcagccgcacgaaaaaggagggggaccagaagaaggcggaatccgggcaaaaggggggccccgtgcgaaggggggatccgatgggaagagcaccccacagccgaaacggggggctaacggaaaaaaaccggggggcccaaagagggggggaaccaacaggaaaagcgggggggccaacggccggaatgaagccgggaaaacagggggggcagccggcccaaaaaaaaggccaaaaacccgtgagaagcggggcaggaaaaagggcccaaagggggggggcttaaccccctggaaacgggcaacaagggaaaggc

SEQ ID NO: 18947 - DNA, 299 bp, Zea mays
  Clone ID: MRT4577_117281C.1
attcggctcgagctcgacccgacttcggatttttgtagatggctaccgtcatcatgggattggggctacaatatgcacgtctgctgtcgccgacagttccgactatcttaatgctccagaccggaggacagcgtgatcatctgcggcaatggccgacgctgccaaccttgttaggtggccagtaccaccaactcgaatacacctcagcgatcagacaaacttcgttagctacatggttagctgccccgagaggagccacctagtggtccagcataaccttggcagacacagttctttgc

SEQ ID NO: 18948 - DNA, 255 bp, Zea mays
  Clone ID: MRT4577_117282C.1
ggaaatataacttcttatttgtaggaggccacctacatgagccaaaaaacttgattatgggaatgacaactaataagcaatataaaggagggcaccgccgatgatgtgtggtagggagaaggatgctgggtatgtcaaagcaagcagggacaaagccagcgtctagctgcaaatgtgaaatgcgtgctggaggcagccacactcttgctagcaaaacaaaaggaatatgttccatgggtcataaaaggagaacag

SEQ ID NO: 18949 - DNA, 383 bp, Zea mays
  Clone ID: MRT4577_117283C.1
tgtttttttttcttttttatttttttgtggggtttttttttttggggggttttttattggaaatcgatttattccccgggcaaactccggggatggccggagcctgaaacgggacaaaacatcttgggtctcccctccctggtttccctcccgggtggggcacaatacaatttcatttacgccggagctggactgcactgcactgaactggacgagagactggtcggtggctttggactgggcttccttggtttccacccaaaggaaaacccaacaagaacccgagctcccttccaaggcccaacccctgtatgtacaggccatcggagggttttctttgggcccgtcccggcccggccggtcagtttcggagcgggacgggg

SEQ ID NO: 18950 - DNA, 268 bp, Zea mays
  Clone ID: MRT4577_117284C.1
ccacccgtccgcctactcgtacttggacgcgtgggcactctaatgaatgttcttccctcgattgggcggcacgaaacccgagatcggtaccatcatcaatacccggacccgttaagcgcatgcgtatgtctctgtaaagaccgcgcatttcttgcgtgccgtgttcacgctcgcgcgcggtggcgttaaacttgttagcgccacatgaaggaagaatgaaaaataattataaactcgtcctatatcgatttgaaccatccgaggaggc

SEQ ID NO: 18951 - DNA, 367 bp, Zea mays
  Clone ID: MRT4577_117285C.1
ggggtttggggggcaaagggggcacctttgtactggggttttttctccccattttattcttcttcttaatacaaaaatacgcagctctcctgcgtattcaagaaaaaaaggagaaaggggggaagcccttatgacacactcacacactcataccaaagactcatacaatagattcttaattcacaccctctttttagacaatgacattatacatacacacaattttgaagacccttcagatgtattcattatttaggtgcttccgcttttagatataccactgctgctgctaaattatttactgtcaggcgtgctaacatgaaggaattttccagggcatttatctaatttctggtatactaagcta

SEQ ID NO: 18952 - DNA, 387 bp, Zea mays
  Clone ID: MRT4577_117286C.1
aaagaaaaagaggggggggggcaaaaaaagtaaggaaaggcaaaataaagggggaccaaaggataaaatgaaagagcggggacaaaaaaagagggggggcccaaaaaaaggaaaaaaacggtcaggcttaaggggaggggggcgcccacttttttttttttttgtggggggagggggcaaattttgaaaaggagcctgaaaaaaaccaggccgtccccaggggagggggaacaccaccggaggggaaaacggccataaaaaacccaatgcgcgaaattgggggcccaaaaaaaaaaaaaaaccatacgattaaaaaagataacctgcccaaaaagaaaaaccccccgagggagcttcttggggggggaaaaaaaaaaaaactgtttg

SEQ ID NO: 18953 - DNA, 704 bp, Zea mays
  unsure (1)..(704): unsure at all n locations
  Clone ID: MRT4577_117287C.1
cggcgccgactccccggcagagtgcaccgacacggatccgtcggtcgcgccggacacgagcttcccgcgggagatgctggcgctgatggcctccttcagggacagcgacggcttctcgccgtgcccgtcgtggtgcttcgccttgggggccgtgcgcatctgccatttcttgttgtgctccacgaggtccgtggccccgtccggcatggtctccagctccctgatgaggtcgagcgcgaactccgtcgggttctcgttgccagggatgggcttgccgaagtcgttgaagaaggacggcagcgcgcctggcgggccgtagtacaccgtctggccgcgggagaggaacaggaggcggtcgaggaggccgaggatgcggtagctcggctggtggatggacatgaccaccacgctgccgctctgcgcgatgcgctgcagcaccttgaccaccatgaacgcgctggtggagtccagcccggaggtgggctcgtcaaggaacaggacgatgnngggtcgtggatgatgtccacgccaatggacacccggcggcgctccccgccggacacgccgcggtggccctcgtcgccgatgatgggttgttgcccgcgttgcgcaggcccagctggtcgatgagcgcctgcacgcgcttcttcttctncttggttggcagagagcggggcaagcggaactcggcggcgaacatgagc

SEQ ID NO: 18954 - DNA, 531 bp, Zea mays
  Clone ID: MRT4577_117288C.1
ccggccgggggtaacccgcagccgcacctcctctccagctccagcgccgcagcgagctcacccgcggcctgcgcctcctgctcggctgctcctgccctcctctgtcctctccagcggccgtgccgcgcctcctctccagtgtccagcaccgcgccacagcgtgctcacggccagccacccagccaggcgcgcagcgcagcgcagcgcgctcgaccgcccagccaggcactgcagcagccagcacggccacacgggagcaccggagcagcgaggctcaagctgtgttagagccttagaggtgctagagaatattagtgaagatgcaagtgacggggaaaagaaaaacacaagcctcagtgattatgaacggacatgccttatggaccaacttctcttattcattggtgagggtagaaatgatgatggatttagagattggaatggtcctggacaccttgctacaaagatgggtaaaacagatagacacatatggttcaagtcagtggatcggcttggtgagcctgcattaat

SEQ ID NO: 18955 - DNA, 116 bp, Zea mays
  Clone ID: MRT4577_117289C.1
tgttgggcaatcagacttcagggctattaggttgtttccagcaaatcgtacatatgatcgtacaaaacacttcttttagaagatgaaagagtgaacggtgcccccagggggagagg

SEQ ID NO: 18956 - DNA, 105 bp, Zea mays
  Clone ID: MRT4577_11728C.1
aagagacttccggtcgcactgaatgcggtgttagcgcatgtacacgccgagggtcagggcgtgcaacatgaggcgcgctggcttgcgtgcgaagcgcaccagtca

SEQ ID NO: 18957 - DNA, 512 bp, Zea mays
  Clone ID: MRT4577_117290C.1
cccttcgaggcccggcccgggatatagaaatactacttctttgctacatctttgagccgccgccagatcgccttctagtgcttcgcataccgctgagcgggaacaaccgatggctgtgaagggcagacggccactggctattgctattgatctggggacgacgtactatagcgtctgcgaggggcaccatcgaccgctacaagatcattggcaagcgagccaacgtaacacgtagccacgccctccgacttccctcttgagcggcttcgagcgccttatcgtagattcggtcatgaacctggtacagattgacccataacacctgtttgatgccacggttcatcgaggaggtacgaagcgtagccagatgaataaggtggtcctgatgaattctgggctgggagaaccaatgattgccgctcgcacagggtgaggacaacaggttccactgaagagacctctctatggctcttatcaagatgcgtaacattgctgaagcctaccttggtagc

SEQ ID NO: 18958 - DNA, 257 bp, Zea mays
  Clone ID: MRT4577_117291C.1
tgcacccacacccacacccactccctccgttcctcctccatcctcctgcccccaagtacggccgctgccgccgctcaccggatccaagaagaacagccgaggggttcggtctccctccctcgtggtgcaggttcagctcatctttgaacactgtagccattattccagctagctcgcgatgtttctgctcttgcttgctcgggggatctcttctcgctctctcgagttcttgctcggttcctcctgcggccatggcg

SEQ ID NO: 18959 - DNA, 519 bp, Zea mays
  Clone ID: MRT4577_117292C.1
aaacacaaaaggcctaaaagccttcttgttttgcaaaaggggaaataccaggagggccccaaaaaaatagataaaggggcccatgctaacagatctcaacagttcacccgaaacccgcaacgatcccaaacaaaactggggggggggaaaactaggttttgctaaagcaggcccaggaccccattattttttttgggcaccccccttggcccccttggccccgggggggccctttttccccaccctttggaaaaccccaacagcacccggttgttttatggcccggccagcaaacccaccaggggggggatcccctgaaaatgcccccccccccaggggctggggcgggattattttccccataccagcatccccgtttttaaggaacttgggctccttctaaagctccttgccaaaccgcctggggattttgggaaggggcccaccaaacttgacagcaaggggggggggggggcaccccaccccgggggcatagccgttgccaatcggcccaggggg

SEQ ID NO: 18960 - DNA, 631 bp, Zea mays
  Clone ID: MRT4577_117293C.1
acacgcgttccccattcctccgacaccctctctcttgtccatctcctcatcctctgccttgctgaggatctatcatgctctcctactgtttcaactactaggatgaactcatttataatgctgcctacatcgccactcttgctacgggcatacttgctgatgacgaccgcactggcaccattggccagcgcctttccaccatcaatgcccgaaatacgcgaaaacaaccgacttcccctccgtgagctcctattctgctgccctgttgctctcacaaacatcagacaggtgatcctctgtcgaggagaccctgaaccagaagaccgacgatgcaagacttttgttgatgcctcaatgagtgagggtcctccctggcatcaaaagtttacaagacctgccattagaacctgttgactactgataaggataccaccgcccaatagatagactaacttgatgagcgactacgccaagtactacgatccactgcgaccgctgtgccacaatagcacggtgttctccagaatgctcccatatgaggcatgctcagattgtcatgcgactctgaacgactcaggtgtctggcatctatatcccatcatctgccagtataatgccctgatgccaattg

SEQ ID NO: 18961 - DNA, 391 bp, Zea mays
  unsure (1)..(391): unsure at all n locations
  Clone ID: MRT4577_117294C.1
agaacgaggcgttactgttgccgtttgctcacatcattaaattcgtgggcgtgacatgaagcaaggttatgtactaaaaaaaaaaaaaaaaaaaaaaaaaaaaaaaaaaaaaaaaaaaaaaaaaaaaaaaaaaaaaaaaaaaaaaaaaaaaaaaaaaaaaaaaaaaaaaaaaaaaaattttaactttagtggggagcacccttaagggggagatttgggaaaaatccaaaaaactgggggggggttggggttgaatttagagggcccaaatgcccctttggggggggggtttacattctactgggccgggttttnaaaacccggggggggggaaaacccccaggccccccctttatnccgctgcgggcaggcccctttcccaccggggggg

SEQ ID NO: 18962 - DNA, 441 bp, Zea mays
  Clone ID: MRT4577_117295C.1
ggggccggggcgcaggaccaaggcacttcacatacctatctgaacacaagagcttgaccaatctaaagcgcagagaacagatatacatcgactgtaactataggaggccttgcaagactgggacgctgcggcagcactttgacccctgagcgctttcagtcactactagcgaatgtgacaccaaccttacgtgctagatgagcgcaaaagctgtcaggacactcaagaccgatgacgaggggtgtacctacaccagggagatacttcataaggtttatggtcacacaacacatctggtggcaaatggtgcttctgacacggtgcctgatcccccaccactctctggccgaacggctcgatataaaggtcgaactgtggggcgatcgagcatgcttctagagggtccagcatgcattataaggagccaattcacactatact

SEQ ID NO: 18963 - DNA, 429 bp, Zea mays
  Clone ID: MRT4577_117296C.1
gccgttcggaggcagctttctcatatccacgccctccatgtctgaatctttccagaaggccgtcgaagactccaagaagcttacctctaagcccaacaccgacgatcttctcaggctctacggactctacaaggtcgccaacggtgaggacttctccgctgctaccgcccccggcatgttcgacctcaagggcaaggccaagtacaacgcctggaagaaggctgccgaggaggagaagctcacccccgatgccgctcaggccaagtacgttgagctggttgaggagctcaaggagaaatgcggctacgatgccaacaaggtccccgaggccgttggcaactaagtgtccaaatcaccacttcgaatagacaagcctctacgacagaacaactcaggagcaggaatatctaaacccatatgagacaacac

SEQ ID NO: 18964 - DNA, 212 bp, Zea mays
  Clone ID: MRT4577_117297C.1
gggggtctaaaaaaaggaaaaagggccttaccctttcattaaaaacacatggcaacccaaaggaaccccaaatgtttaaacattttttcccccccccgtggtagttaaacaagctctattaacaaagggtccggggggttcaaacaaagcgaaagccccggtaaacccccgttatggggggtctaaaaccttgcgtgccctcaagggaaaat

SEQ ID NO: 18965 - DNA, 327 bp, Zea mays
  Clone ID: MRT4577_117298C.1
ggggggtgtgtgttttaaaattaaagagccgggcccgcctcagaagttggacacaaaaaattccgagggggaacaggaaaacgccgaaggaaccgcccaaaggagagatgactgactggaactaaaaaagggcgaaaggggcagacggggaccaaaaaaggaggcaaaaagacgaagaggcgggagtccaacggagaggggaacacgcaaaaaattggggacgagaacggggcggaaaaggggatgcgcaactggacaaggcacgcccgggaggaagacaagaaaaagggcgtgagagctgaaaacaagaaccggccaaagagggga

SEQ ID NO: 18966 - DNA, 359 bp, Zea mays
  unsure (1)..(359): unsure at all n locations
  Clone ID: MRT4577_117299C.1
ccgattctaaacaccctccaacccacaccagttggtttttgcttgtgtttagtgggagaacccaccaattcataccggattgcggtatgcccaaatatgattattctgttctaacatagtctctcctaaattagacacataccaacnaggtttttggatattcctacagaaattgctgaccgttgaatgtattcctttcctgttggctggaatggaggagctcaatgctaactacctgnaccaattaaatcagcgttacttggaaaaggccacaatactttggtgtacgcctgtgccgtgatcagtcaaggtacaaacccaatttttgaataggaagagctttatctcaaaacatttca

SEQ ID NO: 18967 - DNA, 246 bp, Zea mays
  Clone ID: MRT4577_11729C.1
actggcccgacgaccccggcgggcctgatcggggcggtttgttgagcacgcgttggctctgctcgcggcggtgtcggtggtcgcgaacatacttgggcgggcacgtgaaacttagccgtgaccttaggcgcctttgtgggcggcaacatcaccctgttacgggggctcctgtactgggtggagcaaaaagttggggtccatcgtggcgagcttactgattcgattctcgacgggcggtcaggtcac

SEQ ID NO: 18968 - DNA, 1041 bp, Zea mays
  Clone ID: MRT4577_1172C.1
ggggtaacaacaggttgaactggacgctgcaaaatcagaaatcgagaagttgcattgagcctttcccagcgtgctgccggcaccttcaggtgacataacaaaccgggaataagggatatggttcatcgttgcactgtggcagaagaaaacaaactggaaggagcgctaggatctgaatgaaaaaagggaggcagcgttaatagaaacattggcatgacgagagcaggagattacagaactgaagtctgcagttagagatttaaaaacacaattaaggccaccatcaatgcagacaaggagattattgcttgatccagcaattcatgaggaatttacacgtttaaagaatcttgtggaggagaaagagaaaaaaataaaggagctacaggacaatgttgctgctgtcaattttactccatccagcaaactggggaaaatgctaatggctaaatgtagaacattgcaagaggaaaatgaagagattgggacgatggcatcagaaggaaaaatccatgagcttggaatgaaaattgcagttctgaagtctcagaacaatgagctcaggaatcaatttgatgttttgtacaaacacatggatggtgtaacaaatgatgtggagagatcaaacgaactggtgtccatcctgcaagaggagttagaagctaaggatctagagctgactagattgaaggaggtgcttgcccagaaaggagctactcaggacgcaccggtggagaccagtgacgacgctggaaacggtcaggaggcagattcagatacactgcaagtgaaggcggaaagctaagggagtttaggctttgaagtgtgtttgttgggacttgtgggaaaagtaatatcatgttatgcggtctcatagcatgtctaggttattatatagtaggggaatcactgcacaaaaacatcggcaaacttttatctatgatcgtacatatggctttacaaaagattattttgcattgtagacaacactattatagtgtggattttgaaattagatatataataataatatagatgagt

SEQ ID NO: 18969 - DNA, 534 bp, Zea mays
  Clone ID: MRT4577_117300C.1
aagctaagcaatggcttcttgatattcaattcaaagaaacgcgatatgtcacttgtacgtgtgaagaataccccgaaatacaacaatggccacaatatcacatacaacctagaactatggtgatgtgtatcggactaggaataccataccacatccctcttttcccttctccgcctagacttggaaacaaggtgacaatttctaggcatgacacacattcggccagccatttacagaaatggacaagaacagctcgccttgcaatctacatgtcatcatccaactcggtctgctcatcctcatcttcctgggcgccagcgtaatcctcgtcctcgtcaagagccttgcgcctgatgcgcttctttgcaggctgatccacctcctgctccccatccttggcatctgccttggctttttttttggcaacattgttctcaccactggccttgccattttcgggttgagccttgagctccggggccttttaaacgtaagggttttttttctcgtctggcatggacttccacttctccc

SEQ ID NO: 18970 - DNA, 1277 bp, Zea mays
  Clone ID: MRT4577_117301C.1
atcatccacggcgagggctcgtgggaggtgacactgtaccagaagctcgacatcaccatggacgacgtgctccgagggctgacgtccgcgaacatgatcggcaccggcagctcaggggccgtgtacaaggtggacacccccaacggctacaccctcgccgtgaagaagatgtggtcgtcggacgaggtgacgtcggcggcgttccgcagcgagatcgcggcgctgggctccatccgccaccgcaacatcgtgcgcctcctcgggtgggccgcgaacggcggcacgaggctgctcttctacagctacctccccaacggcagcctgagcggcctcctgcacggcggccgcgccgccaagggctcgcccgcggacgagtggggcgcgcgctacgagatcgcgctcggcgtcgcccacgccgtggcgtacctgcaccacgactgcgtgccggccatcctgcacggcgacgtcaagtccatgaacgtgctgctcggcgcgtcctacgagccgtacctcgctgacttcggcctcgcccgcgtcctggccgccgcgagctccatgctcgacaccggcaagcagccccgcatcgccggctcgtacggctacatggcaccagagtacgcgtcgatgcagcggatcagcgagaagagcgacgtgtacagcttcggcgtcgtgttgctggagatcttgacggggcggcacccgctggacccgacgctgtccggcggcgcgcacctggtgcagtggctgcgcgagcacgtgcaggcgaagcgtgacgcgtccgagctactggacgcgcggctccgggccagggcgggcgaggcggacgtgcacgagatgcggcaggtgctgtccgtggccacgctgtgcgtgtcgcgccgcgcggacgaccggcccgccatgaaggacgtggtggcgctgctcaaggagatccggcgccccgcggcggtggacgacgcgaagcagcggccacccacggccgccgcgccggtgtcgccggtgagcgcgcactcgaggggccaatcgtcgagctgctccttcgccgtgtcggagtactctgcctgacgggacgcgaatttttgcgagtgtagtgaacctagtaaattactactaacatcttagcgagccgtaaacagtgttgattagccaaagatgtactactggtaatgttgtacttaggtgtaatctgccattgtacattactctcgagaatgtcggtttttgtagcagccttttggcctaacacatctgccaaatctcaacctgtgtgttgatatgct

SEQ ID NO: 18971 - DNA, 259 bp, Zea mays
  Clone ID: MRT4577_117302C.1
tagtgcctgaccactgttgaataacttaagttaactagggtcaaatggcaattcaaatttctgttgacattagcttttcagcttggttatggaacatgtagggcatatctgttttcttaacagcatcagggcttcaagttacagagccctcagaatgccctgttttgtcaagttaacagcattgcgagtgtgtattgttgggctgttggctgatggattgatacttttgttcaaacagcttcattcatttgacttgttt

SEQ ID NO: 18972 - DNA, 489 bp, Zea mays
  Clone ID: MRT4577_117303C.1
tttgaaagttcagattttgatcactatgctgttgaagaatgtgcagcagatagaagttttacttctgcgcatctggagcgcccctcaagaagtttgcaacagcagcgatcctgcactaaaagtgagaagccaatagatgtgctgcgaagagtgtgtgggaatgataaatgtgctgattgtggagctcctgaacctgattgggcatcactaaatcttggtgttcttgtttgcattgagtgttctggtgtacatcgtaaccttggtgtgcacatatcaaaggtcaggtctcttacattggatgttaaagtgtgggaaccttctgtcataagtttatttcagtcacttggaaatactttggccaactcagtctgcgaggaattattacactcaagaagtgcctttcagcttaagcacgtctgataaaccaatgatgttcttcatcaccaaaccttgtcaatctgattctctatctgtgacggaaaagttcat

SEQ ID NO: 18973 - DNA, 616 bp, Zea mays
  Clone ID: MRT4577_117304C.1
cagttaactggttgggatatcacttcatggccattaagccatctggagctagagaagttgcaaggaaaccatggtcacaacttacatgcaactctacatgcatctctacatctgccgtgctgtgacgctgcagaaatgaaaattgagaagctctgctgcttctcctagagagcaagagtaaatccccagaaatgcccgcaagacccatcttctttagctctccttctccaatacctgctgctgctggaggaaataagccttgctgacaaacctccccttgacccgaggccggtagtaccgactctgcttattagaagggaggggagcgcaaggcttctgcttgcgctgcatcttcagaatgttgccttccctgataacagcgctgataccgttctttgggaagagatcactatcactgtcttcatgtttaactaccacatgagcagaagacaacggcaagtcagagccattgctatcagcgaacacagagcctctgccgcaccacgccttgagcaccccgccagtgttcaagctcagccccaatcctgtctctggcagtgccaaactccagcgtcgccattgacagactcaggaaccccctcctcgtacattgtcc

SEQ ID NO: 18974 - DNA, 311 bp, Zea mays
  Clone ID: MRT4577_117305C.1
ccattttggtggttggtttttaacccaaactcagtgcattttttaaaatagttaagaatccaagtcgagaacacttgaacacacagaagggagaccccgcctagcatagatttgcagttacggcctggatgccagtcgccagcccagctgttcccctcgggaacatgaggtggtggtggcgcacagactgcgatcaattctgcatggtcacagtagagatccccgcaactcgcttgtccttgggtcaccctgcattccatagccatgtgcttgtccctgtgctcccacggttcccaggggccaggctggga

SEQ ID NO: 18975 - DNA, 419 bp, Zea mays
  Clone ID: MRT4577_117306C.1
ggccaaaaaagggggaaaaggggggggcccctattaatttttttaaggggcgggggggggccccaagaaaaaaaacccccaggcccttaaaattgggaaaaaatttaaaagaaattaaaggggggtaaaaaaaaatttcccccttaaaggggggtttttttttgggtaaaaccccaaaacccccttgggaaaaatttggggtttgtcccacccttaaaaacccgggggctttttaaaacggggattttgaccaaagcccaaaagggccaaattcaaagggccccgcccatgttttaaaccccaaaaacatgggaaaaaaatgttttgggggacccttggaagccgaaggcccccaaaacgggggaaaaggtaaaaatttaaaaaaggggttcagggtaaaagggggaacccttttgggg

SEQ ID NO: 18976 - DNA, 411 bp, Zea mays
  Clone ID: MRT4577_117307C.1
aaaaacacaagcgcatatgattatcgccaaattttccaaagttcatgtgccagcatgtaggatgtaaatccagtaggtccacatgaaaccattgcacatggccatcctgaacagaggatgattcaggaggccatgcccctgaaaaccactatcattttgtattgggctcaattacaggtcaatgctgtttgttccttgagccagtcctctgaaatgttaaggtcaatgctgtttcttgggtcagtccttactgaaatgcctagcaagtcaaaatccaactgatccttcctaatctccttcaaccaccatggaatggagaataaactgtcattgccttatggggcacgttgttgtacaaagccttacattctcaatctcacttttaccaacaagggtccatacacaaacaac

SEQ ID NO: 18977 - DNA, 1852 bp, Zea mays
  Clone ID: MRT4577_117308C.1
cctcgaggccggccgggaacaaagtctggcgctgaacctggaagagtttttccggctatcgttcggcttatctcttcccaaggagagacccaccgcccattatccaaccctactacttgcttttgtctccactctcagtctcctctccaaatctccaaccctacttgttccagaaaagaaaaagaactatccatcccgctgtgagccaagccagcccagctccggcgactggcagatgtttcagggtccccgtccgtttgccgcaggttccctgatatcggtggccagcagccgactttgtggttagtccattctcttccggcgggatacgttgcggaccacttcgctcagctgctcgcgacggcggcttgtaccctgatttgggtgtggttcttgtagagcggtcgtgtcgtccgagcgttgatctgaaccagcgcagtttatcagggacgtagcactgtagcagtgagttggggaggatgcctgatatccagctgggatgccacactataaggtcccatggtaccaaagtggcaacattacacatgtatgactggattatacttttatgtcttgctgtacttgatggactgttaaacataatcgagccctttcaccgctttgttggacgcgacatgatgaccgacttgagttatcccctcaagggcaacacaatcccattttgggctgttccactgattgcgatcgtgctacccttggttatctttgctgtcatttacttcaaaaagaaaaatgtctatgatttacaccacggcatactaggtatcttgtattcagtgcttataactgctgtgatcactgatgcaattaaggatggtgttggtcgccctcggccagatttcttttggcgttgttttcctgatggcaaacctaattttaataatataaccaccgatgtgatatgccatggagaaaagagtgtcatcaaggaaggtcataagagtttcccaagtgggcattcttcatggtctttcgctggtctaggttttcttgcatggtacttggctggaaaacttaaagcttttgatcgcaagggtcacattgcaaaactgtgcttagtttttctgcctctacttgtcgcgtcacttgtggctgtttctcgagttgatgattactggcatcactggcaagatgtctttgccggcggcatcataggtcttacagttgcttcattctgttacctgcagttcttcccatatccctttgacaatgatgccctatggccacacgcatacttccaacagctagctgagacacacagtaatggtaatgcaaactcaatcaacataagacctacagagtttgaagatgaaccagatgaccatggtgacattgtcctgagggacaccagccctatcttggagtcaatggagtctggcaggagaccatgaagaagcatgccactgggtttgtccaaggtgccctgaagcgtgatgagttttgtggtttcatcatgtagccgtccaacgtaaaaacagtatggaggtatatctaccaccacctgatgatttgatgaaccacagactgtcgtggttagctgtaaatgacagcgaatgtttatgtttctagtgacaatgtgaatatttggttttgcacggctgtgatatggaaagtttgtttcgaggttaccctttggctgtaatgaaattgtcggacgacctgcagatggattgcaaacggtctttagggggtaatcactccatccaagataatatgagttggtgtattatgggtctatttcttaatgtttatgtttctagtcacaatgtaaatatttggttttgcacggctgtgatatggaaagtttgtcccccggttaatgtcttttggt

SEQ ID NO: 18978 - DNA, 1489 bp, Zea mays
  Clone ID: MRT4577_117309C.1
cctggccgggccggctatcgttgtgcttatctcttcccaaggagagacccaccgcccattatccaaccctactacttgcttttgtctccactctcagtctcctctccaaatctccaaccctacttgttccagaaaagaaaaagaactatccatcccgctgtgagccaagccagcccagctccggcgactggcagatgtttcagggtccccgtccgtttgccgcaggttccctgatatcggtggccagcagccgactttgtggttagtccattctcttccggcgggatacgttgcggaccacttcgctcagctgctcgcgacggcggcttgtaccctgatttgggtggggaggatgcctgatatccagctgggatgccacactataaggtcccatggtaccaaagtggcaacattacacatgtatgactggattatacttttatgtcttgctgtacttgatggactgttaaacataatcgagccctttcaccgctttgttggacgcgacatgatgaccgacttgagttatcccctcaagggcaacacaatcccattttgggctgttccactgattgcgatcgtgctacccttggttatctttgctgtcatttacttcaaaaagaaaaatgtctatgatttacaccacggcatactaggtatctttgtattcagtgcttataactgctgtgatcactgatgcaattaaggatggtgttggtcgccctcggccagatttcttttggcgttgttttcctgatggcaaacctaattttaataatataaccaccgatgtgatatgccatggagaaaagagtgtcatcaaggaaggtcataagagtttcccaagtgggcattcttcatggtctttcgctggtctaggttttcttgcatggtacttggctggaaaacttaaagcttttgatcgcaagggtcacattgcaaaactgtgcttagtttttctgcctctacttgtcgcgtcacttgtggctgtttctcgagttgatgattactggcatcactggcaagatgtctttgccggcggcatcataggtcttacagttgcttcattctgttacctgcagttcttcccatatccctttgacaatgatgccctatggccacacgcatacttccaacagctagctgagacacacagtaatggtaatgcaaactcaatcaacataagacctacagagtttgaagatgaaccagatgaccatggtgacattgtcctgagggacaccagccctatcttggagtcaatggagtctggcaggagaccatgaagaagcatgccactgggtttgtccaaggtgccctgaagcgtgatgagttttgtggtttcatcatgtagccgtccaacgtaaaaacagtatggaggtatatctaccaccacctgatgatttgatgaaccacagactgtcgtggttagctgtaaatgacagcgaatgtttatgtttctagtgacaatgtgaatatttggttttgc

SEQ ID NO: 18979 - DNA, 644 bp, Zea mays
  Clone ID: MRT4577_11730C.1
ccggccgggaacggccagcccattatcccgtgtcgacatcatctatctccgagcacgatgtttcgctcttcccctcttctgagccttgcactcggcaccctgtctgctgtcggtgcacaggagttgcccgctgtgctgactgcagacattatccaaggtttgggtaataacaccctcttcaccagatggcgcccgacctaccatttcagtgggcccgctggatggctaaatgacccatgcggtatgatgtacgatcctacgacaaagacgtaccatttgcattaccaatggcaccccaaccacgtgaactggggcaatatctcttggggccatgccacctccaaggatatgatcacgtggactgatgttggaggttgggaaaatgaccaagctcagtctctcggcactggacccaaccctgactcccgaaactcgagctactacggtttgggcatcttttccggcagtggccaaccgtacaacctccatggtgagcaggacggtacgctcatcaacttctacacttcggtgcagcatttgcctaccaactgggctatcccttatatcccaggaaccgagaaacagagcattgccatttccaaggatggggggtgagacttgggagcagtatgctggaaacccca

SEQ ID NO: 18980 - DNA, 572 bp, Zea mays
  unsure (1)..(572): unsure at all n locations
  Clone ID: MRT4577_117311C.1
cggnacgcgtggngtcaanaaaaaaaaaaaaaaaaaaaaaaaaaaaaaaaaaaaaaaaaaaaaaaaaagaaaagaaaaaaaaaaaagaaaaaaaaaaaaaaaacgcaaaaaaaacaaaaaaaaaaggctagtggtcgttgtgaacgtctcaagtccaattctccggggcgccggtttttcgagggtcctgttcctgtggttacccgtggactccccccatcattggcccggcttgcgtgcccctccccctttttggtctgggggctggtcgttgccaaagtgcccgtgcctgggggcaccttcccgcttttcccctcttggggtttggcgaaaggggcccgccctgtccgggtttgttaagcgcggagggcccggagggtacgcgcgtcgcgcccgtggcttgggccataacgcctagggggcgctggtttttatccttacccttactgtctcgctttgtggggctttttcccccggtccgctctattttgggcgctcccttggggcccccttgggggggttttcccgctccgtttatcacaaaatgccggcttttggcgctgggactccta

SEQ ID NO: 18981 - DNA, 460 bp, Zea mays
  unsure (1)..(460): unsure at all n locations
  Clone ID: MRT4577_117312C.1
cctcgaggggccggccgggnaaggcctcgactctgctagtcttgcagagttagatacaagacgaacgaaacgaacgaaaaaaagaaccataaagcgctagctagctgacgaccgtggcgggcctctcctctgacggcatcaccggcccttgcttcacggccgcgcccgctcgcgcagtggtcaggaggaggttctgcaccgggcgtacctctgtacacaaggccactgccaccgaacgtcgaggccgcggcccccagcgacctgcttgccgaccggggagccaagggccaaaacgggcggctggccaaaggggaaacttgccgacgataaatgccgtagcgctaactgccacaatgcaggagagaaaacccgtggagcggcagctagtaatttaggggcaacaccgcgttcaagggcactgacttactgagcgggttagcgggttcctggaactcggagg

SEQ ID NO: 18982 - DNA, 357 bp, Zea mays
  Clone ID: MRT4577_117313C.1
gactagaccttgagaggaggtggacaggtcttaggacacatgctgagatcagtctgtatgcggcgatgtctcttacggacggggctacatcgccacgcttaactagggccgcgcctacgacatcaagaactgtcaaaacagtgccgttcaggaatttaatagcgtcttagccgatcacattgtgatgatctgcaagcttaacaacgagtgtttcatggatctcctatggtactgcttgcacgacgtgaaccgaatgctgaactatcagtgctgcacaacgggatgcgcggacaacatactacacacgaacaacggagtccatggcgtggagaccggtctagtgctcaactggtttta

SEQ ID NO: 18983 - DNA, 444 bp, Zea mays
  Clone ID: MRT4577_117314C.1
gttatttcatggtacataagagtcttcttttaaaaaggaaataacgcaccatgctgagtttcccacttgaacctggaaaatcccttggattctttaccatccgtatgcctatcgctgagggtattgcagacatacaatatgaggtaaaaaacatatcagccaagattaagtaccatgaaacacatattctatcgagcgatatctatattgacttgttggaaaacggaattctattatggtttgaaccgaacagccaaaggctacgaaagattgaaatcaaagagcccaggaaaacatgattaagttatgcaggaaacgaattctgttcaccagatgtatgagccgacctttgcaataatctataaaagattcggaccttttactcctgggaattatgatccaaacaaccatctttatgctttgcactacccaggtgtttctttt

SEQ ID NO: 18984 - DNA, 168 bp, Zea mays
  Clone ID: MRT4577_117315C.1
tcgcctgctgtaccgtccgttattcccgtttctacccactcttcctttgttctttttctttgctcgttatttctggtctgagttgctcatgccttttggtttgcaggactttcctcctaggacagtttttataatgatttttatcactgatggagtttctatatttgc

SEQ ID NO: 18985 - DNA, 453 bp, Zea mays
  Clone ID: MRT4577_117316C.1
tttactttagcaaacctacaaaattgtagtttattacttccctgaacatgttatttgtacatacacacacgtttatatgaactaaaaatatggatttaaacatcagtaccaaattttcaaaaaaaatcaggattttttattttgattatagagcagaaaacaccagaattctagacggggcttgtatatgcctgcatctacatgtaagggccaaaggcccacggatcagaaagacgaatccgtggtagagtaggagcgctcgctagccgtcatcgtcgtggcggccggcgcgcccaggtgcctggcgaggtctttcttgaggagggcgatctcatggcatacctccgtcatggtgggccggcccgacggcgcgtgctgcgtgcacacgaccccgaggtcgatcagctcggccatgaacgtctttcaaatgcgctcgtcagccacggcggacgc

SEQ ID NO: 18986 - DNA, 1223 bp, Zea mays
  Clone ID: MRT4577_117317C.1
cctcgaggccggccccggggcgacatccagccagcagcacacgcacactgttctttcgacttccatctcggccggagcagaagatggaggtggctctgggaacggccaagtatctccttggccatgttctcaataatctccccgacgactggatgaaatcctacgtgtccagcgccgagctcggcaccaaccttaacatgatcaaagagaagatgcggtacgctagagcgctgctggacgtggccaaggggagggacgacgtcgtcgccgggaaccccaacctgctggagcagctcgagattctcggcaagaaggccgacgaggctgaggatgctgtggacgagcttcactacttcatgatccaggacaaacacgacgggactcgagacgccgcaccggagttgggcggtggcctcgcagcccaagctcaccatgcccgccatgctgctcgccacactgctggtaactggctctcatgcttctctggctgctgtccccgaccccgagacgatgctgctgctaccgatgccatgtctggtgacggtggccatgttggaaagttgtcatttaatcgagtggctatgtccaacaaaatcaagctcctcatagaggagctgcaatccaactctactcctgtctctgacttgctcaagatagtgtcagacactagtaaccctcaagacagtagctcctccactaaaaggtccccgacaagctctcaatcacacaagacaagttgtttgggagggacgccatctttcagaaaactatagaggatattatcatagccaaagatagtggcaaaacccttggtccgttcttcctatatttggcctagggggcaatgggaagactaccttcacccagcacctatacaatcacacagagtttgaaaaacatttcactgttagggtctggatatgtgtatcgactaattttgatgtgcttaggctcaccaaagagatcctgagctgcctacccgcaactgaaaatgcaggagataaaatagcaaatgacacaaccaactttgacctgcttcagaaatccatcgcagagaggttgaaatccaaaaggtttctgattgtcttggatgacatatgggaatgcagcaataatgaggagtgggagaaactagtagctccattcaaaaagaatgataccactggcaacgtgattctggtcacaacccgattcagaaaattgcagatttggtgaaaaaagaa

SEQ ID NO: 18987 - DNA, 193 bp, Zea mays
  Clone ID: MRT4577_117318C.1
tcattcggcaggacggagacacgtcctaaaccattaaggggcccgaggcctttgactactatctctacagccgcactgacttaaaacgcatcttatgccccacagcatattgcatctgcattaagggactccgcactatcgctgctccggctacgtgggctaagatgacaattgcttttacaccatttactac

SEQ ID NO: 18988 - DNA, 430 bp, Zea mays
  Clone ID: MRT4577_117319C.1
ccccaaaagaaggattaaattttggaattggccaaacaatttttggagggggggaacccaggggcccctaaatgggttggcatttgggaaaaaccaaatggttaaagggaaacatgggggggggggggggcccttttttgggggggggtccaggactccattttggggggcctttttttcctaagcttttcactaaacagttaaagggcaaatgttggctggggggggccccccactttaaaaatcaagcggggtttctactaaaaacccctttgtttttttttggaggggcatttttttcccaaagtggttgcttacccaattgggtggggggcaaacccggcaaacaaaagtattaaacttccaaaaaaaaggggaatttgtgtgggggaaaacccttttttgtaacaaacttacaataaggggaaaa

SEQ ID NO: 18989 - DNA, 785 bp, Zea mays
  unsure (1)..(785): unsure at all n locations
  Clone ID: MRT4577_11731C.1
gcanatgaaaggaacccgtgcgaagaagggaatcattgcaaagttgagtgtttcatgggcccctgatgtatatgaccctcctattacttctgactctcacactgtgagagggcaccataggagttcaatgaagagcaactacaaatacaagtcctccaagagcagtagccgcagtaccacgggaagcaaaaaggacaagaagcattctaggcacagtagcagcagtggtggcggcagcaaaagggacaggaagcattcttcccacagtaccagtagtgccagcagcagcagagctgttaccagtggttctcaatatcgtaacacatactgtggtgacgggatcagcagcagcagaactgtgacatgtgttcctgagtctgccaaggtatctccattggtgttagctgaaaatgccgcaccgcaagagccggttcctgtactcaagacactggaaccaatcaaatgtgctaccagctgcagcaaagagaagccatttgccttactgtcacgccagttttctcctgcaaggtacaaggggatgttttccttttggagccaaaaccaactggcttcttgataatctgctatacggaagctcacctggaagtcttcgttgcaaattatgtcgtaccagtgattgtttggtatcattcccttcgttaccatgtttgtttcgcctgtgtctgaaacttcagaggtcacgttttccaaagttgcccggcaaagtgcctgtatatttgagtttccgttattattatttcctcactgaatcgtgtaattttttt

SEQ ID NO: 18990 - DNA, 158 bp, Zea mays
  Clone ID: MRT4577_117320C.1
tgtatttttgtcgcgggccaacatgactgtaacagaggaataggtatgcacccaaatatcacaagatgttgagatgaacatgagtgatacggcctggcaagacctgtttaaactgttcttttggaaggcttcaatgctcctgctctgcttgagggccc

SEQ ID NO: 18991 - DNA, 199 bp, Zea mays
  Clone ID: MRT4577_117321C.1
cttacctcctacctctatctatatctccgtccggtggtatcttgacttttctgttcttcacatcacccatcactctctctctatgacacacacacaagcatcgacttggtaacagttctgctctcaggacagaatgacctaagacaaggaagccaagcctgtcaagatccataaccatgccctgtacacgaacatacac

SEQ ID NO: 18992 - DNA, 267 bp, Zea mays
  unsure (1)..(267): unsure at all n locations
  Clone ID: MRT4577_117322C.1
aggtcttcccgccggatctagtctatctgtctgacatgctgtgactcttctctcaaccttggccttctcacctcttctgagctagttggttgaatgctgtctaatgcttaagatctgtctttatctttgcacatcatcatttactcgaagattccactgcacagcgtctccaaaatataaaccttccaaacaagagagaagctctgngagccccttcccccacaacaaatctaactctngttgttatatttatgcaaaatttgtagt

SEQ ID NO: 18993 - DNA, 511 bp, Zea mays
  Clone ID: MRT4577_117323C.1
taggtaggcggcggacgacacgaattttagatagtaagcggcggggacccacccgcacctgcaccactacgccagtaccactagctagcttgggtgaggacacgccgctaccgcgccgtggcacccttgttccacttagaccacgtcgaaagacacggtggacaatctcccctccacagggtccgcaccgttactcgtcagactgtgttatgcgcgacctaaggagccgattatatctcggttaagtacatttcgtctctccgtcgcaatcatcgtctcaatgcactctacctctaggagtatcctcgccttcgactccgacgtaaacacccaccagggttagtagtgtacggataaagccagaattatgagaatcatcgtaatcgttaacgtaattactatcttaactatcttaatacttatctgaattcttctcttgtatatgctaatgatcctcttcctgctttaggttaaggtagatgtaatccggatcgagagggggggtttgggt

SEQ ID NO: 18994 - DNA, 373 bp, Zea mays
  Clone ID: MRT4577_117324C.1
ttgacgagctgactagctgagctagccggccttcgtcctttttttatactaactcatctttttttattaacgacaaattcaaatggattcaggtcacttctaatacaagactcacgctttcacaactgattaaggattctggttccgtgaattacccattcatttaatacctgtaacagtactaaagcacccatacggtccttaggtagagattctgtggtgaatttcaatgaaagtcaaccccttcttactagaacgatagagcaaagtgttacgcgccttattcagaccattggggtgttttactgactcaaatgtggtctactatataggcgggactggaacgttttagagcggccaaacaaacctgtta

SEQ ID NO: 18995 - DNA, 142 bp, Zea mays
  Clone ID: MRT4577_117325C.1
caaaccattagctttatctactccagagcgcattgcaacccgggcgacaccataaggcagctgctccgtgccctagctatcctggctctcgctgggagcgccacctgcacgcatacacgctgacattgtaccatgcagtcac

SEQ ID NO: 18996 - DNA, 281 bp, Zea mays
  Clone ID: MRT4577_117326C.1
aacctcttaaattccttacccttaccttcagtcttacaaaatttccaaaaaaccaattaaataaaaccttgccataacaaagtaaaaaccagtacccagaaaaaaaacattatcattaaaaatttcaacacaaaaaccaacccaaaaccaaaaacagaaaaccctgacataccaaacaagtgaccaaacaaaaaaaaatccaactgaaataaattcccacaaacaacatgcaaaacctatcttccaaactaagttaaggaaaaggccaaaacccataaaaa

SEQ ID NO: 18997 - DNA, 187 bp, Zea mays
  Clone ID: MRT4577_117327C.1
cttccccaccgagcctcagttcgcatccacgcgcaacgccgccatctcgccggtcgacgctcaccgagcagcatggcggaacagactgagaaggctttcctcaagcagccaaaggttttcctcagctcaaagaaatctggcaagggtaagaagcctggcaagggcggcaaccgattctggaagagca

SEQ ID NO: 18998 - DNA, 1842 bp, Zea mays
  unsure (1)..(1842): unsure at all n locations
  Clone ID: MRT4577_117328C.1
tcgccaccatgtgcatcagctccgcctcgtccgcgggcgccatcaccaccatgttgggcaggcacgccatgtacgccacgtcgaaggcgccgcagtgcgtgggcccgtctgtgcccaccagccacgactggtacagcgcgaaccgcacgggcagccgctgcaggtccacgtcgtgcaccacctggtcgtacccgcgctgcaggaacgacgagtagatggcgcagaacggcttcnnnnnnnnnnnnnnnnnnnnnnnnnnnnncgtcaccgcgtgctgctccgcgatgcccacgtcgaagcaccgctccgggaaccgcttctggaagtagttcagccccgtgccgccgcccatggccgcgtggatggccaccacctnnnnnnnnnnnnnnnnnnnnnngatcagggactccgcgaagtactgcgtgtacgacagcgtcggggacttggacttgagctgcctccccgtagccggctcgaacttcaccacgccgtgcatccggtccgccgccgcctccgccggcgggtaccccttccctttctccgtcacgatgtggatcagcacgggccccggcgccggcatcgacttcaccttctcgaagatggtcaccaggtcctccacgcagtgcccgtccacggggccgatgtagtagagcccgagctcctcgaacagcgacgacccggaggcgctgatcatgccgcgcgcgtactcgtccaccttggcggccacctcgtgcgtcggcccgccgatctgcttcgtcacggacttggccgcctcgcggaggcgccggaacttggtgctggactggagcttagtcagcgcccggctcagcgcgcccacgggcttggacggcccgtccagcgtggccgtcgggagcgacacctgcttgttgtcgttcagcaccacgatcatgttggcgtccaggtagcccgagttgttcatggcctcgtaggcctggccggccgtcatggcgccgtcgccgatgacggagatcacgtggttcttgcgccccaggaggtcccgcgccacggccatgcccagcgccgccgagatgctggtggagctgtggccgaccccgaacgcgtcgtgcgcgctctcgtcgcgcttggggaaccccgccagcccggaggtctggcggatggtgtgcatccgcgaccgccgccccgtcaggatcttgtgcgggtacgcctggtggcccacgtcccagatgatcttgtcctccggggtgtcgaacacgtggtgcagcgccaccgacagctccacaacgcccaggctggagctcaggtgcccgccggtcttggacacggtgtgcacgacctccgcgcggagctccgccgccagctgctccagctccaagatcgacaggttcttcatgtggagcgggtagttcacggtgtccagcagcggcgtcggcggcttctcgccggagaagtcgatcttccacggtcccgacgacgtggccgccgccgccggctccttggaaaccatcatcttcccaccatcggctccgatgctgctactgctgctgccgccggctacctgagcgcgcacctggaactgacgccggcaggaagcgttggcggtggccgggaccgcacggaacgcggaaggcgacgacgacgatgcctggagcgccattattggagacatgcgcgcagcgagttcctctagtttagctagcgtgcaagatgccgcttggtacagctaagctgtgtattaatatgaactgcgtgctccagtagctggaactgaagctcgagtaagtagctcgacggcgatgccgcgcgcgcgctggggcgaggagagatggaggagaggaggaggatgaagcctcgtgccgaatt

SEQ ID NO: 18999 - DNA, 229 bp, Zea mays
  Clone ID: MRT4577_117329C.1
attgatgtctttttttattttatatttattgtacacatgcttattttttttcacattgggacccaatgcaaattgaattacctggaaaaaaaattattttctccctcaaagcaacatacagaggaaaccttggcttaagctactaaaaaactggtaaggggcaaaaggctattcttcatgaacaggtagttcgcaacacctttagcctaaaatttggggccaaaatcaa

SEQ ID NO: 19000 - DNA, 313 bp, Zea mays
  Clone ID: MRT4577_11732C.1
cgacgaacaatggggtggccatcccatttggggggctaaaacgatttgacagattggaacttgttgaaaataaccctgagagcataatattccacatttttaaatatgtgatccgaaagcacggcaacctgggggtagtagaaagggttcttctgcagttcaggggcagccatttaaatgctgccctttgagtcacgcaacagttgaactttgcccttttatccaaataaaacaaacttggtttctttttgtggaccagatgtcaatttgggaagggccctggtaactttcactgatgttgaattaataccac

SEQ ID NO: 19001 - DNA, 156 bp, Zea mays
  Clone ID: MRT4577_117330C.1
cttactaattttatcaaatggggaagtgtgggtatattatatacgggctaaacccagagcatccagggcaacccccatatagaacgcagaaaggagagaacgcaacacactttaacgtgcacatggtcccaaactccaccttacaacaggggaggg

SEQ ID NO: 19002 - DNA, 515 bp, Zea mays
  unsure (1)..(515): unsure at all n locations
  Clone ID: MRT4577_117331C.1
gatctagaggggctgctcctgtggattatatgcaaggggtacacggactgctaggacctgctacaaaggggactatgacactgcttgctcatcatggctcgttcgctnggtacacatagcggcgaattccgacacanatatatgcgcatcatcttagaaagaatgtggtgggtcattcattgtggcatacgaaaaaggactcgatagtagctgcagcacagttcgagatccactcggacccaacggatgcagaccaaaacatggaaatgatagttagggtgcatgaacaccaacctggtactttggcatccctttgtaaggacaataacgctacagctcttgctgattactgcagggacatgagatgcttgatgaataatgtctgacacaagataatgtatggggcagcacataatgacatgattttactccccactgatggagaaacggtgacaacaatgcccgtgcatctgaacatggcatgggaacacagagtgaagcatgtgaaggaatac

SEQ ID NO: 19003 - DNA, 215 bp, Zea mays
  unsure (1)..(215): unsure at all n locations
  Clone ID: MRT4577_117332C.1
tctgcgcatccacgtaagcgggcaccatcatgcccaggacatcagctcgcccgccgagccgggggagcgccctagccatctgtccgggatctgatgatgctanttaccaacaataggctgattagcggccctggccggatccggtattttggattccggtgcagggaaaacagctttactaatcctgaaaaaaaaaaaaaaaaggggggggcccc

SEQ ID NO: 19004 - DNA, 266 bp, Zea mays
  Clone ID: MRT4577_117333C.1
atcgctcgaagaactgctgtatcgagtgctgcttgaagtgctaataatgttaaagagcattaagaatgtgtgataatattcaaatggcattgtgtcctttgtcaattgatcggtggagtgcaacagatattgctgctatattgtttgtattagtatgggttagtacgaagttgtgacaatgttcacatttgtgaattaagctggaattatgatgggagctataggagcaggtttatttggcttaccacagggttatggcgggttct

SEQ ID NO: 19005 - DNA, 252 bp, Zea mays
  Clone ID: MRT4577_117334C.1
cctgcacctgctgtttgtgcatgtcacttcagttggatgacgctatagattcataactatttcagacagcattgatgtagatatcctctatgatattctaccaggatagaactctttacgggcgtctccactgtcgcactttagtatgtctagtgagactttcaagatccactggcttgatatagtgtcaagagaagatgtgtcgatatatatacctacagatagcatacaggcgaagaacactgatatatc

SEQ ID NO: 19006 - DNA, 337 bp, Zea mays
  unsure (1)..(337): unsure at all n locations
  Clone ID: MRT4577_117335C.1
cagccatccagggngtctcgaaaagggctatggnatcttttattttaaaaaggcattgatgggcaagcttgtcactttgngaaagaacttctatggcagctctagtgtgtgatgccagaatanatgcaacagacttgccaagaccttttttacaattgntacttctcaaagcacggtacgccctatcagtcatcggcgggcattctttcatattgatccctaggctctccagacaatctctcttgtgaaaacttaagcccaaagagagtacccaccccacttccttggcncagtactggataagtgagccctatgtttcataccctgatcgctgctt

SEQ ID NO: 19007 - DNA, 856 bp, Zea mays
  unsure (1)..(856): unsure at all n locations
  Clone ID: MRT4577_117336C.1
ccggccgggccgggagtagtcctttctacgacagctccccacccctgccaaaacctcagttcaatcctaggtttcaaatccgcgtgcctaccccagagctgagcagcatgcgggaggcgctggaggaggccaaggagaacgcggtagtggtcgcggttgccaaggagaaggcgctcgtctccaacaacggcaacagcggtggtggtggcggcaacgacaaagtgccccgacagtccgaggaggagacggcccgggagattcaggtagtgagggaggcgtaccggcgcgagacggccacgccggcgtagtggcgtacgtcatacccgaggagccgccgaccatggtggagctggtacatctacgacttctgctcctacttcctctgctgctgtggcacccatgggaacatctagcctaactagataccatggacacccatggcgtggagcaaactcaaatgcttcttcatggcttcacttcctctgctgctgtggctgcgagagctatttgctcctcccccttgctctcttctatcttactaccttatccacctgtattttatccccaaaacaagattagttctagagttgagtgccttcaaaacgcaaagaaatggaccagtgtaaggctgaaatggtcttcaagattagttcttttcccctttctcatgttctcaggcgtataagttctcagggctacactactacattattgtgctataataggtcttgcagcttgaaatgtgttgttnactcgtgatttgtgtggccatggatcattggtttgtttcggggactactttctctatctaaattttttcactttaaaacaaaaaaaaaaaaaaaaggcccctagg

SEQ ID NO: 19008 - DNA, 415 bp, Zea mays
  Clone ID: MRT4577_117337C.1
aaaggaagaaggaggaaagagcccagaaaaagaaacaaaaagccaaaaacgaagaaaacaagaccggtacgccaacaccaacgggcggggcaaaaacaccccaccagggacggaggacaaaaaaccccggacggggaaaaaaaaaaaccccggcaagctagggaccaggtatggggaggggggggttagaaaaaccagacaagcgacggccgtataaaaggggggcgtacaaaaggggcacggaacaacaggggcggaattaccaaatccgacggaaaaaagccccccccaaaggcgaggaaccccaagcaagcgccactgggggaaggacccaggcaggacgaaaaaagggggaggatctttcccgttatacaaatcaaaaaccaaaagccaaacagggacgccctatccacga

SEQ ID NO: 19009 - DNA, 746 bp, Zea mays
  unsure (1)..(746): unsure at all n locations
  Clone ID: MRT4577_117338C.1
ctctccctgatattcttcatcgcgcggagctctctccaactccggccggatctcctaggcgctcggcctctatttcttctgcgggagcacgcccagccgagcggctcttccccacggcgttgttctccctgcgctcgcacggccttgaagctcccatggcacgcaccaagccacccctccgttctcctcctcgccacgatgctccatggcgctcctcgctgctcgcacagccatcttccccttccccatgggcgcggcctccctgcaaggatgcgagccggtgcccaacccggccgctcgaccctgccagtccctgtgtgccgcgcgcagcttcctagtgctcggactgcttctcagctcgcccggccggagcgccctgctcgccctcctgcgtcgaactccctcgctgtacgtgccgtcgaagcttcccgggccatgcgcttctctgtcccgaccaccagcatccaattccagtattctcgtcattgaagaacaatccccgcgctctgcgtcctcgccgcgtttgtttgcttcatgtgcgcaacatgccatcgtcttcgtgtttttagtaagtcagcgagcgctcgcgctcgccatcctctgctcgacctcgttgacgagcttcgccttgccggtcattctagctgcgacccgtcgtgaagctcttatgtggnggtgtgcgtgaagctcgtatagtacctgtcaagcgcttgataaattgcctggatgagaaaatcattaccggc

SEQ ID NO: 19010 - DNA, 160 bp, Zea mays
  Clone ID: MRT4577_117339C.1
cttctacaccgtgaacctggatagtatctccatcggcgccgtcaagacgcccggaactgggagacacggcataatcttcgactccggcaccacgctgacgttcctggcggagccggcctatacgctggccgaggcggggctcctgtcgcagacgacgaac

SEQ ID NO: 19011 - DNA, 319 bp, Zea mays
  Clone ID: MRT4577_11733C.1
aagtgcttaagtcgccaaatgcatttattattagggtatcacaagggaagcaataacactttcaagtctcaggctttcgcattagcactctggaagctacagcctttgccaaagaaaattagcgcacaccctcaatggtgccagagctgaagtaaaccgcagatctttcaatgggagaatgtcaagggtgagtgtggtcagaggaaaatgccatctctttcgccgatccagccgtgccgctcttcttgctatgttgagaccacgacggtgccctcaggaagagcagggatgtgcagaacgggagtatgcgattttaatg

SEQ ID NO: 19012 - DNA, 1047 bp, Zea mays
  Clone ID: MRT4577_117340C.1
ttttacaaataagtggagccctgttcttactattattaaaacagtttgcgtttagaaaattttgttttctgcgaaggacatcagctagaccttaattggccaaacattctcagcttgtaggcagcattgtgaccttgattggccaaacaatctcagcttacagattatgggattcaccatacattctcagcttacagattacgggattagctagatattctcagctagtcagcctacgtattatgtggttggccaaacattctcagcgttcaggttactggaggtcaagactgaatacaagctcgtagtatttttgcgcgaaacagaccaattactctatctcatcgttgcttggcagtgatgcaaagtccacttaccaagaaaacaatatggaggcgcacaatcagctacattgttaccggctcacagcagcagcccgctgatcaaaaagccccctggcctctaacaacaaattatggctattaattggcataaccgagaccgagagttcacagaaccttattcattttattacatgtacaactatgcccacgctctttacctcctatgaaaaacttgcatcccgaatcaccagaaattgcattcctcaaatgaaactggaacagcagttctgatcatattgatgtcatgcattgattcctgaccaaatataatgcgccgataagctgcacttgactgatcattctttggacattggcgccacatcctaaatttctgatagagatggcatccaccaacttgacatgtgagatgttttcagtggcaaaatagccaaacaacattggattaaacagagaatgaacacgatatacagcaacaaatgggtggtgctgagggcctcctcttttaccttctctgtggtacccaatgccgccattagtgcaaacccatcctcaagcttgtcagatcaatgtgacctcaccaagccagcagctttgctccagccagccatgataaagcttgcagcacatctgtgcatggttgagcaactcagcctatatccttgggctcttgcctggtcccgaa

SEQ ID NO: 19013 - DNA, 849 bp, Zea mays
  unsure (1)..(849): unsure at all n locations
  Clone ID: MRT4577_117341C.1
aaaaggcatgctgttttcatgatgaagctgatgcattctgttggagccctcgagtccggatatgagcgaagctcagcggagtgctctcaatgcattattgtttcgaactggcgaccagtccagggatattgtccttgtcctggcaacaaacagaccgggtgaccttgatgctgctatcactgaccgcattgatgaagtcatagagttccccctgcctggggaggaggagaggtttcaactgctcaagctatacttgaaccaatatatactcaaggaagagggcaaaggatcttcttggagtgcattattcaagaagcagcagcggaagattcaggtcaatggcataagcgatgatttgctcagggaagctgcaaggaagatcgacggtttctctggcagggagattgcgaagctggtggctagtgtgcaagctgctgtttatgggcggcctgactgtatattggacccccagttattttcagaggtagttgactacaaagtgactgagcatcaccaacgcatcaagcttgcttcagagggtatggtttgatcagtaagaaatatttacctcccactgactctagtagtgcatgttttggatcccgtgggagtgggacattttgtagcccccgtctattcccaccagttttgttccatgtgctttgcctgcagcaagggttggtcccggatggacatccaaataggccggttgtggtcaattgaatttagggtgtatttggttcagcttcctaaattagattncgccgccaaaaacaggaatctcaatncaaacggaacgacaatagaatagatttatgaaaatttatagatttcctctagntctatccc

SEQ ID NO: 19014 - DNA, 413 bp, Zea mays
  Clone ID: MRT4577_117342C.1
ctgctgtcattaacacacatacacacatactacacttttactaaaaccaaccttctatactagcaaccaagtacttctaccatatgtaggctgtcatcatgtctgatgagaagctcaagcctgtcttaaccaccaaaaggatgaccaggtgcagctcgccgggcattacctgtacttcgatacccttgtgaatactgccaccaacgatgtcgagacctatagtttctatacagtggaggatgagcacaagcacaagcacgctcttctctaggtccgggccgtttgcagcggcatcttttgactttatattaaggatcaggcctaaaacaaacagactcaccctcgcaagacactagatcaagtttgaagttgattgatccagacgcgacgttgttccctgctacttttactaa

SEQ ID NO: 19015 - DNA, 583 bp, Zea mays
  Clone ID: MRT4577_117343C.1
caggcgacgaggacaatttgggagcctccgcgttcggccgcgatccggagaccctggagcgcatggcccgagcgctgcgggagatcaacaactcaccgctcgccaagcaggtgtttgaactgatgcggagtgctctcaatgcattattgtttcgaactggcgaccagtccagggatattgtccttgtcctggcaacaaacagaccgggtgaccttgatgctgctatcactgaccgcattgatgaagtcatagagttccccctgcctggggaggaggagaggtttcaactgctcaagctatacttgaaccaatatatactcaaggaagagggcaaaggatcttcttggagtgcattattcaagaagcagcagcggaagattcaggtcaatggcataagcgatgatttgctcagggaagctgcaaggaagatcgacggtttctctggcagggagattgcgaagctggtggctagtgtgcaagctgctgtttatgggcggcctgactgtatattggacccccagttattttcagaggtagttgactacaaagtgactgagcatcaccaacgcatcaagcttgcttc

SEQ ID NO: 19016 - DNA, 2349 bp, Zea mays
  Clone ID: MRT4577_117344C.1
ctgtgcggcgctcgaggcggccgttcggggagaaccccttcgcggcgcagctcctttcttcctccttgcgtctcttttcccagtcgacgcaccgccaaaaaccctgggtgactgggtttctacgcctccgtcgtcatgctgcgccgcctccgtctgcgctctccggtgtccgctgtcgccggcgcggccgctgcaatggcgtcgctcaccaacgtcgcctacgccgatggcctcttccgccgccagtccccgccgtcgaatccaggcgacgaggaaaatttgggagcctccgcgttcggccgcgacccggagaccctggagcgcatggcccgagcgctgcgggagatcaacaactcaccgctcgccaagcaggtgtttggactgatgcggaagcaggaggagacgcgtcttactgagctggaggccgagaaggtccaatacgccatctacgagaagctcagggacatggagaggatggagaaaaaagctgaagattacagaaatagtttgcaacaagaagcacaagtaaaagctcaagcattacgctttgaggatgaattagctagaaaaagaatgcagacagagcatgctgcacagaggcaacaggatgctgaacttgtgaagatgcaagaggcatctgccctcagaagagaagaagctaggcgtgcaacagaacagaagattttggaagaaatgatacagactgagaaggaaaaggctgaaatagatcaggaagtaaacagagctaaagctttagcagaagcagaagctcgtgttcatgaagagaagcaatcagaagaagttacaaaaagaatgatgttggaacgtatgaagggtgaaaaggaaaagtggctcgctgcaataaatacaaccttttcacacattgaaggtggattcaaagcactgttaactgataggagcaaactaataatgggtattggaggagttactgcactggccgctggagtctatactactagggaaggtgcgagggttacatggagttacatcaataggatcttgggtcagccttcactgatccgtgaatcatcaatgccaaagttcccactaccaatgtctaggttactcaaacagaatcttggatcagccttcgctgatccgtgattcatcaatgtcaaagttccccctaccaatgtctagggtactcaacccctggtcagcatctctgcaaatacaaagtctcatggtgcaccattccgcaacatgctgttttatggtcctcctggaactggcaaaactttagtagccagggagatggctcgcaaatctggcctggattatgccatgatgacgggaggagatgttgcacccttaggatcagaggctgttaccaagatccatcaaatatttgactgggctaagaagtccaagaaaggcatgcttgttttcattgatgaagctgatgcattcttgtgcgagcgtaacagtacccatatgagcgaagctcagcggagtgctctcaatgcattgttgtttcgaactggcgaccagtccagggatattgtccttgtcctggcaacaaacagaccgggtgaccttgatgctgctatcactgaccgcattgatgaagtcatagagttccccttgcccggggaggaggagaggtttcaactgctcaagctatacttgcaccaatatatactcaaggaagagggcaaaggatcttggggtgcattattcaagaagcagcagcggaagattcaggtgaatggcataagcgacgatttgctcagggaagctgcaaggaggatcgatggcttctctggcagggagattgcaaagcttgtggctagcgtgcaagctgctgtttatggccggcctggctgcacattggatccccagttattttcggaggtagttgactacaaagttactgagcatcaccaacgcatcatgcttgcttctgagggtatggcttgatcaataagaaatattttacctggaagccacaggtttcaagctatcaaagatcgggtttggtgatgagcgacaaaactgacaatcacctcccactgacttgtagtcatgttttggatcccgtgggactttttgtaggcggaggttctatttccagaatttttgttccatgtgccttgcctgaagcaaggtctggtcccggatggacatccaaataggctggttgtggtcaactgagtttagtttaactcatttagtaggtttgcgctgtgttttaacttttccttaagtctctcgtgccccattcttggtagcatctgtacgcttgtttatgccaaagaaaaggatcaaattatttaggtgataattctttgtccattttttaattaattggcccctagcgattttttt

SEQ ID NO: 19017 - DNA, 1157 bp, Zea mays
  unsure (1)..(1157): unsure at all n locations
  Clone ID: MRT4577_117345C.1
cagcagcagcagcaagcaggccagcagcagcagcagcaagcagcagagcgcgccctgttcttgtgccgaggaattatttattgccaccgcatcgagatttatatagtacggggaaattgattgctcattcccctctgcttcctccatccactgatccaccccatgctgcgatattttcctccactcgccgccggggcagcatttgctcgcgatttataacctcccctcgccttcgcctctcctttctgcttgtctttttccccagtggggaggttagcacccggcacaagcaaagcgccgggttcttgtcgcagtttctgcgcgctcgctcgctttttgcccgtaagatctgatacaaagaggagagggagagccaagagaggagaggttctcgtgtggaattcttcggcgatgaggtccgacgcccgtctggattcggtggtcttccagctcacccccacccggaccaggttcgatttggttctgatagcgaatggccggaaggagaagtttgcatctggtttgctgaaaccgttcgtcgctcacttgaaggccgcccaggatcagattgccaagggagggtacctcggccgcgaccacgcttgaaccaagctcagggttcgatgtgccatggtttacgagaggcaccgtggagagatttgtgcgtttcgtgagtactccgtaggtttctttgagcgagtcagaacacttgagtgtggatgagaagttctcgcagcttccgagggattgccatttgcttattccagaagnncaacgatttagtcttttggattttaaaatcttgtnncgaagaaccattggnaagaaaagtttgacttgataatgcaatgggagggtggnnacgtgcaaattatttgatcctttgattcagcnnncacagcaattttgttgtctttactaagccttggaatcaaagatgccaatcgcgcactaaaattgtcagatattgataacagtctagcactatggaggganngaattctaaaagttgcaatttgcttcaggaggtgctttgataactccgcaataactattgttatagaaatagagtaggcttattgggtttttgctttcgtgcttgtagcttggttgggttttgacatttgacaacttttgggttacttttgatcgcattt

SEQ ID NO: 19018 - DNA, 241 bp, Zea mays
  unsure (1)..(241): unsure at all n locations
  Clone ID: MRT4577_117346C.1
atgggatgcaatacgaattgcagggtccctggtctctttgggagctatgctgccgccaaggctgattgcttggatgagctggctgttgtaactacacatgatacgagcacaacgatataccgtctatggtgagaagatgttatccgtgcacttaatcagctgaacgttctatataacaactgcacctagatggtgaaactgcagntgttgaagacaatggctgcagaagctgacctatgga

SEQ ID NO: 19019 - DNA, 471 bp, Zea mays
  unsure (1)..(471): unsure at all n locations
  Clone ID: MRT4577_117347C.1
ggtaccctcgggtctcgnccgggagatacaccacacccgcgtatagagaaggaaaaatttccccataccctagcttcggatctcgatggggaacccccgcgttttcttcgacatgaccgtcggcggtgccccagccgcgcggatcgtgatggagctgtacgccaaccaggtgcccaagaccgcggggaacttccgcgcgccttgcacgggctgagaagggcgtgagccatgtcctgggaagccgcttcactacaagggctgtaccttacaccgtgtgatttcccgattcatgtgccaaggcgggtgacttacccgcggctacgggaccggcggggaggacatctacggcgagaggttccccgacgagaaaggacggcggaagcacactcggcccggggtgcgtctacattgcccacgccggccccaacaccacacgggctcaattcttcatctgctccggggagaccccct

SEQ ID NO: 19020 - DNA, 316 bp, Zea mays
  Clone ID: MRT4577_117348C.1
ggggggccccccaaagataacctgaaattcatttgggttttgaaacaaaaataaaatttgcctgggaacaaaaaaacaaaaaaaagggcccttaaaaacattgtttcacgaatgttttttccaaccccatgggcttttttggtccataaatgccaggaattttttaaaaaaacttcccgcattggcatcaaatagttataaaaaaggtttaaacccccccaaggaattttcccccaccggattttagttactttttggaggcccaaattggtataaaacgttttttccaacaataacgggattgtttttttctttt

SEQ ID NO: 19021 - DNA, 295 bp, Zea mays
  unsure (1)..(295): unsure at all n locations
  Clone ID: MRT4577_117349C.1
cttcatagttcagtgtgtcgcataaaaatgtcgcagttgctggataaagccaagaacttcgtgtcggagaaggtaaatgatatggccaagccgtagggatntgtcactgacgtggacttcaagcgcgtgagcaaagataatgtcgagtacttggccaaggtctctgttcgtaacccttattcaacttccatacccatttgtgagatcaactactctttcaaaagcgcatccagggagatagcatcagggaaaattccagacccaggatcgttgaaggcaaaggacacaacaatgg

SEQ ID NO: 19022 - DNA, 361 bp, Zea mays
  Clone ID: MRT4577_11734C.1
gcggagatgattaagaagcaaaaacttttgtgcgtcaagttgatagggctgctgtgtttcataatgcaaggacacaatgctgtgatggggctcggattgaactgggggccgaggttggcataatcacaaggcgcatacatactctttgtcctgtgagcgttgaaacgctcttaacagcacactatatcatgcgaggaagtgggcacaaggagaatggagacaagaatgttgcatacagctataataaccttaccttacaatgaggctagaaaagagcttggccatgatacttgtctgtccagagatgattgataaatacatcaggcaggaacatataatggtgaactattaccattgagga

SEQ ID NO: 19023 - DNA, 502 bp, Zea mays
  Clone ID: MRT4577_117350C.1
aaaaaaaaaaaaaaaaaaaaaaaaaaaaaaaaaaaaaaaaaaaaaaaaaaaaaaaaaaaaaaaaaaaaaaaaataaaaaaactttcttgcccggtgcggtccgggtaaaaaggggcggatttctcaacacccgggttgccctttcctgggtggttgccttcctgggggcccatttcttgcccttttcggggccctcccttgtttcccgggggaagtttttatcttggcccatttcccgcctcttgcggcccctgggtttaattttttggccctggggggctccctgagtggcctccctcacattttttgtgttggcccctttgccccttttccagggggcaaccccgttttgcttggtgtttttttcactccccctccccccggggagaggcgtttggccttttgggcgttttttcgctccctccctccttgactgggtgctttcgtttttgcggttttttccagcttttttttctttctcaaggggggttttccggttttc

SEQ ID NO: 19024 - DNA, 471 bp, Zea mays
  Clone ID: MRT4577_117351C.1
attgaagttgaaccaaaatcctccttagctgctggacaacatcaagaacattgtatggacttgtcttgaattcctgccaataaattctggattggagtgctgatgtcataggtggagcgcaactttgcagcgaaggtaatgcagactgcagcagctatatgagggggcttgaactgaagccatagagaacttcgtaccccttcattgatcatattccaagccatattaaacagaacagtgtgtgagactcctacttcgcccataacagaagataggaaaacatgtgggtgagctaccttcgagatcaaaatcacagtggtgaaagtatgatgcgcgccgcttgtattacactctctctaggctgtgcaaaccagtccccacataccatggcaggaagaacatagactccctgattatgacaaacctcacatgaggccataagaacagtattcaaaaggcgtgttgtttctt

SEQ ID NO: 19025 - DNA, 783 bp, Zea mays
  Clone ID: MRT4577_117352C.1
ttgggaccctcgaggccggccgggaaaaaattgagaatcgagggaacgcatttacggacgcaagactggatctgaagaggcgctgacgaattggagggccgcgcaagcctggggatgggaaggctggtcgtcgcggcggcggtggccgtgtgggcgttcccgattgcggctttggtgaactccgtagtgccagagccctacatggatgagatcttccatatttcacaagcacagcagtattgccgtggagatttctggacatgggatcccatgatcaccacccctcctggcctgaattggagaaaggaaggcaactgcctacgctattcttgtagcattgtatcctgttcactggttcttcacttttctttattacactgatgttgcatcattagctgcagttcttgcagtgtacctattctgcttgaagaaacagttctggatcagcacaatgtttggtgttttttcaatactttttcgtcagacaaatgtaatatggattatattttttgctgccaatggagctatcacatacgtaaaagacttgtatcccaaggataatgcttctcatgagaacagtgaaccaatacatcagtcaaaaaaagcttctgccagggataacaaaactagtgttcaaagcttgagaagacggcgaatcaatagtcccataaataaggtcattgttttgtgaatctgctaaccctttacacagtcttacagaggaagtgtgtgacatcagcttgaagttatggaactcaaagtgtgaaattttgattgcatttg

SEQ ID NO: 19026 - DNA, 402 bp, Zea mays
  Clone ID: MRT4577_117353C.1
atatatatatatatatatttatatatatatatttatataaatatatatatatatatcacaattgggaggggcgtggcaatgtacagaggggggctttattatggggggtgggaatatgccacagagttggaaaccaaaagaaacgaaactaaaaagttaaacatgggagaggggtaaacgggcgggattatccggaaacagatttatggtacctacgtacccctttttcgcacggggcgtacaagcatacggtgttatcaatccacattggggggggtaaacgggcggcccatttggttatgggaaaaaaaaccgtagtttttgagtaggctccaaaagacccaaaatccgggtctattgttaccctcaaactggaccccggtaatcggacaaaggcgccgg

SEQ ID NO: 19027 - DNA, 2211 bp, Zea mays
  Clone ID: MRT4577_117354C.1
aacttcggaatcgagtctgaagcacagagccatcagagactgaccagagccgagaccaaggatcctgtctcctgtgcactccggcggccggaccacggcgagtccgggacgtagaagtcgccccgcccctccggatcgtgttgctcgggaaattgcttccgagtagttcccgacgccgcgggcctctaagccgctgcctccgacagtctcgtgagtccttgactcttgagaatcgagggaacgcatttacggacgcaagactggatctgaagaggcgctgacgaattggagggccgcgcaagcctggggatgggaaggctggtcgtcgcggcggcggtggccgtgtgggcgttcccgattgcggctttggtgaactccgtagtgccagagccctacatggatgagatcttccatatttcacaagcacagcagtattgccgtggagatttctggacatgggatcccatgatcaccacccctcctggcctgtattatgtttcactagcatatattgcttctttctttcctgttgcctggatgtttcgggtagcaaaaacatttgatgttctttgctccacagcagctctcagatcaactaatgttatcttggcaatggtctgcgctgttcttattcatgacctgcttttgtgcatccgaccaggaattggagaaaggaaggcaactgcctacgctattcttgtagcattgtatcctgttcactggttcttcacttttctttattacactgatgttgcatcattagccgcagttcttgcagtgtacctattctgcttgaagaaacagttctggatcagcacaatgtttggtgttttttcaatactttttcgtcagacaaatgtaatatggattatattttttgctgccaatggagctatcacatacgtaaaagacttgtatcccaaggataatgcttctcatgagaacagtgaaccaatacatcagtcaaaaaaagcttctgccagggataacaaaactagtgttcaaagcttgagaagacggcgaatcaatagtcccataaataaggtcattgtttgtgaatctgctaacccttacaacagtcttacagaggaagtgtgtgacatcagcttgaagttatggaactcaaagtgtgaaattttgattgcatttgcaccatttgtagttgtcatggcggcattcgtagcattcataatctggaatggtggtatagtactaggtgctaaggaagctcatgttgtttcgccacactttgcacagtttctgtactttggccttgtgtcagctgctgccctccttccatggcatttcactcccaaccgagtattggatctattccacttgtctggaaagaacaaaacctgtggttctctggcagtattaatgggtcttggtttaagctttgtcgctgtacattttttcaggcattgcccatccgtatcttcttgctgacaatagacactataccttctatatttggaggaaggttatccaagtaaactggatgatgaagtacatgttgattccactttatgtgtactcatggctctcaatcatcaacatcttagggaaatcacagacaaggatttgggtgttatcatttgtgctgtcagttgcactggtccttgtacctgccccgctggttgaattcagatactacacaattccattcgtgatactggttcttcactctccatcaattggcaatggcaaattgcttgccatgggatcgctttatgcagccgttgacttgtctaccctggtgatgtttctgttccgaccattccgttgggaacatgagcctggaacacaaaggtttatgtggtagtttaggataaagcacgggaagttgggaatagagcaaaaccttcattgtaccgtcgttttggttcgaacttctaacaggacgattaagcatacatgtgtcaggcttatttggatccttgagtgaatttaatggtaggagtcaaaacaatagcgctgagtatcgtcattttctttttgccagcctttatgtattctaggcattctaatcaacgattgcacaagtcaaaaataggcagtggatacattgtttgatcacacggcttttaagggcaacagcaattatatggattgatattgaacaggaaaaaaaaaaaaaaaaaggtgaaaaaatattcgagtaatattctccaattcaatgtcgtaattgaagaaatgtttcccccgccc

SEQ ID NO: 19028 - DNA, 574 bp, Zea mays
  unsure (1)..(574): unsure at all n locations
  Clone ID: MRT4577_117355C.1
gtccgaaaagccaaacagnacctctagctggctgactgctactacccagcaaccacctgggactgggagtcgagctcgctccagcgcccccttcaattccgtcctgatacgctcgagcacgctagcctagccaccgatcgacgacgacacatggcgaaggtccacccggaccgccaccccaacgtgctgccgccgtcgccggctgaggagaaggaggaggaggcgacgtcgctgacggtgtggcgcaagtcgctgctgttcaactgcagggggtacacggtgttcgacggcaggggcgacctggcctaccgcgtcgacagctacgacgacgccggggccgacgccggggccgtgctcatggaccccgccggccgcccggccttcacggtggcgcgccggagccgcctcctcggcctgctgtccggccagcagcggctcatctacgcgggcgaggacacgcggcggcccgcggtgtacgccgtcgtcaggcgccgcggcaaggcgacggcgcgcgtgacgccgtgcgctgctgcaggcgccgcgtacgaggtggaggggtcctacgcgcgccgcc

SEQ ID NO: 19029 - DNA, 341 bp, Zea mays
  Clone ID: MRT4577_117356C.1
gaaggaagggcgtcattccagggattacctatgcgatagcccccaccattgtcgccctcaccccgctctccatcgaaggacgggcgccattccagggattacctctgcggcagcccccaccattattgccctcatccgctctccgccatcctcacccccacccgcccccgccatcctcctcctacgcgcaagtcttcggtgcccttctcctgcccctgccatccccgcatatttggatccagggttcgctcaggttgcctcacaagggccccaccacgcgcggtcagggagcatggtgggagcttcgctcacgtgcgtggttgctgggagctttgttacca

SEQ ID NO: 19030 - DNA, 307 bp, Zea mays
  Clone ID: MRT4577_117357C.1
ttaacaagtaatcatggggctgaaccaaaaaaagttcttggttcttatggagggccagaacgagcacactgcagctattattatggacatagaaggtgttgcgcatggtcaggcccatttgccatgtactcatggcggcgttcaacatggtcccgcacttagcggcctttctgatctcgactgcacgtagattgctgatcctgtgcttgccttacttgaacacgacggggacgctcgcggattcctgttgcggcccgctcaaggacgccgtacagaacgaccttaagtgcctttgtgacctttacgt

SEQ ID NO: 19031 - DNA, 961 bp, Zea mays
  Clone ID: MRT4577_117358C.1
tagctgcctgactgctactacccagcaaccacctgggactgggagtcgagctctcgctccagcgcccccttcaattccgtcctgatacgctcgaccggtagtagcccggccggaacaggttgatcgatcatcatcagtcgagcacgctagcctagctagccaccgatcgacgacgacacacatggcgaaggtccacccggaccgccaccccgacgtgccgccgtcgtcgccggctgcggaggaggaggaggaggaggcgacgtcgctgacggtgtggcgcaagtcgctgctgttcaactgcagggggtacacggtgttcgacggcaggggcgacctggcctaccgcgtcgacagctacgacgacgccggggccgacgccgaggccgtgctcatggaccccgccggccgcccggccttcacggtggcgcgccggagccgcctcctcggcctgctgtccggccagcagcggctcatctacgcgggcgaggacacgcggcggcccgtgtacgccgtcgtcaggcgcggcggcaaggcgacggcgcgcgtgacgccgtgcgctgctgcaggcgccgcgtacgaggtggaggggtcctacgcgcgccgccgctgcgtggtgtacgacgccgagcggcgggtcgttgtggcggaggtgcggcccaaggaggcggtcggcacggacgtgttccgcctggtggtgcggcccgggttcgacgtgtcgctcgccatggccgtggtggtggcgctggaccagctgtttggggggaggccgtcgctcctcaggagctggtccacgacgatgtagattcatgtacatgttctttgttcagttcaatctagactagatagagttttgcccctggacttggggttgtgacttgtgagttatcactggatatgatgatgattcttcaatctgcctggttgtcgtgggcatcggagccatttctgttagagcaactcc

SEQ ID NO: 19032 - DNA, 318 bp, Zea mays
  Clone ID: MRT4577_117359C.1
ttggggaatctccttgctgtgacttaaacaagcatgaaacgtatgcttgcatattcgtccatagggcaaatcggatatgtaattattggaataattgttggagactcaaatgatggatatgcaagcatgataacttatatgctgttctatatctccatgaatctaggaacttttgcttgcattgtattatttggtctacgtaccggaactgataacattcgagattatgcaggattatacacgaaagatcctttattggctctctctatagccctatttcttttattcctaggaggtccttattggcctcttgtgcta

SEQ ID NO: 19033 - DNA, 150 bp, Zea mays
  unsure (1)..(150): unsure at all n locations
  Clone ID: MRT4577_11735C.1
ctgaggatctagagtaaaccatactgtcancaggatggttaatctactaaggcaacttcaggcatcattgactgcataagtattagccgctgcatggtcctgtgtacaaccacatctacaggtgcctatacagtccatggtgggagcata

SEQ ID NO: 19034 - DNA, 191 bp, Zea mays
  Clone ID: MRT4577_117360C.1
gccacacgtccgcgtactcctaaactatttctaacacatttacccaaataactagggcaatcaattaatatgtctattatttctacgctccaactattcatctaatccatttcagtaagaacactctcaggatgtatctgtcaatacccaattaattccgttcatcgcacccttcatgggctgtataatct

SEQ ID NO: 19035 - DNA, 439 bp, Zea mays
  Clone ID: MRT4577_117361C.1
aaaatgggaacaaaggggggactttttttcttttaatttaaatgggtcattcagggggggggtaaaactgacactgccacccagggggaggcgggacaaattattactaaatcatcgccggtaaaggactaaactagctagctagccaggggttatactaaagcaaaaagttttttaagggggggacacccccggcagaaacgtaggggcatggagtcggttgttgaaggcccaaaattgccgtaaggtggtgggttatttgggccgcaaaaagccccggaacctggccgttttggggctgctgctgcaggatggactggaggaccaagccaaaaaacgcctggaaccggggctgggggtccacctgcctgagctggtggaaaaactggtgccgaaacgactggcactgaggggagacatagggggtccccgtcgggct

SEQ ID NO: 19036 - DNA, 284 bp, Zea mays
  Clone ID: MRT4577_117362C.1
aaaggtctaccggaactgggagattctgctgtgactcaaaactccagctccagctccagcttacttactgacatcaggctgcacgccattccttcaggcagtcctgcaactcctgcagccaagcagttttcctgcccttcttgttgctggtattcggttgtcatcatcgcgtatcctgcgggcagatgctaggcttcctgttgtaccaccacctcgaccaacccgccttcaacaactgcctctgactcctagttcaccagcagcaccaccacaagaggcgcacg

SEQ ID NO: 19037 - DNA, 236 bp, Zea mays
  Clone ID: MRT4577_117363C.1
gcgccgcgctcaccgacgaggacacctgccttgacggcctctcgtcccgcgccgtcgacgccgggacgcgcgccggcattcggggcaaggtcgtcgaggtcgcgcaagtcaccaagaacgcgcttgcgcttgtaataagtcggcctggtactaacacggagggaccaagatcagccagccagcagcaaaccaccgtttaagctaggctactagggggttgcgaagtgtgtgtgggg

SEQ ID NO: 19038 - DNA, 694 bp, Zea mays
  Clone ID: MRT4577_117364C.1
ctctcgtgttttttttttttgttgtgtttagggcagcaaataactgaatctgtgctctagctcaacagcacgaggacatacgtaatgtacatgggtcagcatatgattttactttttacagtaggaaatgctagaaaagacttagctagcctaaactataatgtacagcggcaacaccgatggtgtggtatcagtaattctcgggtgcataagaagctgaatcaagctgccccatctgctcagtgatctgatcaacattgtcctggagacgaggacagcagcggtctacggcagtcttcacatcctcttttgcttctattgcctcgcttttaccctcggcggcgtctgtgagaaaccgctcccagaatacatcgttcactttggccggcacatgggaacctccagtttcactggtggtatcatcttgcgaggtgtcgccggttgtggtgtcagagttcatatcgactccagcagctgtcctatgggcatgttcatggagctgtgccatcggcagcatcgggctctgggcgtagtagctcgggggttctgccaacggagaagacgactggtcttgccctgaggtcgaagcgaaggggttctggcaagctgatggctgcagatcgatctcggtatccattggtgccgagagcatctcgcctagagccagagcagggctgggttcagcaacaccagc

SEQ ID NO: 19039 - DNA, 288 bp, Zea mays
  Clone ID: MRT4577_117365C.1
tatgaaaccaaatttaaagctgcaagtaataactagaaaaactgatttgacaccagtgacgtttaaacttatcaaagggtgccacttaggcccttgaactttgtaagtgctttttgggtccctaaatgtgttttatggtgcactacacatccctaaacttgtaacatggtgcatcacagatctatttttttggaccataccgaccattgtggtacacacttaacaatttatggggcctagaaatgtgttttcaaagtttatgggaccaaagtggctcctcttaacgac

SEQ ID NO: 19040 - DNA, 192 bp, Zea mays
  Clone ID: MRT4577_117366C.1
acgtgttattacttaattattttgcatcgaaggacaaacactacataattacacaaatcggggcggcgggcggtcggtttagaacatccacccttactgaggcgtccatgctacaacataggttttttatagggtcacttatttgaaatctactgaccgtggtgttacagacatttgattgggagggccctg

SEQ ID NO: 19041 - DNA, 684 bp, Zea mays
  Clone ID: MRT4577_117367C.1
cccacgcgtccgcccacgcgtccgaagaaatcttacatgccatcccagagaaaacaacgcaaattctgcaattgcccagtggaaatggccaagaaatcctacaaagatgcttgcttttggtgtccacaagcatatgccaatgacatggactcctcagaagaggatgaattggatgacaatttgaatgatatttttggccttaatgatgatggcattacttcgtctgtttctgcctccagggaccagctaaagtataacctcatatcttgcaaacaaatggttggtatttttgtcacagtctgggcaaagaaagaattaatgcagcatattggacatttgagaacgtcctgtgttggtcgcggaataaggggatatcttggaaataagggatgtatatcagtaagcatgacactataccagacaagcttttgtttcatctgcagccatttggcttcaggtgagaaggaaggtgatgaattgaggcgaaatttagatgtgttagagattctaaggctcacacaatttcgaaggatttgcagaagagctgggcgaagaatccctgagaaaattcttgaccatgagcgggtgatatggttaggagatctgaactaccgaatttccttgtgctatgaagataccaaataacttctgactgtaaagggagcctttgcccaggacagtcca

SEQ ID NO: 19042 - DNA, 289 bp, Zea mays
  Clone ID: MRT4577_117368C.1
tcgcccacgcgttcggtcattagtttctttgatttggatcagaacattcaaggatgcatgttgagcgactataaagtggtcgatgagctacaatagtacatgaccagtgctttcgaacacatgaatgccatgttcaattctcaggactgcgaccttaggatgtgagcctgtaccttaggagctaacagggttgatcgtgccatccttttgataggctgggaagcatgatatcattgaccgagcattacagattctacaggtgcattcaataattcttgtgcaacaacgt

SEQ ID NO: 19043 - DNA, 266 bp, Zea mays
  Clone ID: MRT4577_117369C.1
tgtccgtctctcaccacaactcctcctttccccaagaagaccacaagagatacgggggccctttttcatggtacggccgtagtccccgcaaacctcccagctaagaatgtgagaccagtgactgactctgctcatactgtcctacctggcaagcccccacatgtccgattctcccactcgaacaacccaattggataccaacataccaatgctcacccatcatctacagaacagtgactgatgcaccaactggatttctcttggtg

SEQ ID NO: 19044 - DNA, 1862 bp, Zea mays
  Clone ID: MRT4577_11736C.1
catggtgagggacgagccgagctttttccaccagtggcagtccgacacgctgctggagcagtacacggagcagcagatcgcggtggcgttcggccagggggagccggtggaccacgccgtggcggcggccctggcgacggcgatgcccatgcagctgcagcagcccgcggcggccgagcagccgcaccaccgcccgcgcaaggcggccaaggtcaacaccagctgggactcgtgcatcacggagcagggctcccccgccgcggactcctcctcgccgaccatcctctccttcggcggccacaccgcgttcgccaaggccgagccgacgacgcaccagccgcccagcggtgcgccgggtactacggcgccgccgccgccgccgcgaaggcgccgaagcaggagatgatggacgccgccgcgatgccgccgttccagcaggcgcgcccggccaagcgttcctacgacgacatggccgcggtggccgaggccgccaacgcgccgtccgccaacacgcgcccggcctcccagaaccaggaccacatcttggccgagcggaagcgccgcgagaagctcagccagcgcttcatcgcgctctccaagatcgtcccgggcctcaagaagatggacaaggcatccgtgctcggcgacgcgatcaagtacgtgaagcagctgcaggaccaggtgaaggggctggaggatgacgcccggaggcgcccggtggaggcggcggtgctggtcaagaagtcgcagctgtccgccgacgacgacgagggctcctcctgcgacgacaactccgtgggcgccgaggcctccgccacgcttctgccggagatcgaggcccggctgtcgggccgcacggtgctggtgagggtccactgcgacaaccgcaagggggtgctcatcgccgccctctccgaggtggagcgcctcggcctctccgtcatgaacaccaatgtgctccccttcaccgcctcctccctcgacatcaccatcatggccatggctggtgacgacttctgcttgtctgcaaaggatattgtcaagaagctaaatcaagcgttcaaatcacccttctgatgggattagcttaatctatgtcaacttttttcccattagccttaaggatttgaggctaatggttaggttatcaggtccttccttgcctttgcttccgaagagagttgcttgcagtccccaagagtccccccacacaaagatagccatttccactggttttttgctacatgggtgcagagattgatcacctagctagttacctacttaccatcccattttatctgtctctccagttttttacatggtttgatgttgtcactccatgtttttgggagagagcagattgtaaaaaaaaaacagcctttttttctagggctttgctatataggcctggggagtttgacttttacaaacctaatttttctttctccccttcgcccgtatgttgccctttaattcaccttgttttttccatgagaggatggtgtttttcaaacaccagcacctaccttcgccgtcctctcaaccttgatcacactgctcccagaaaaagcttcagttgtggagaaaatggcgccgtctttttttttaatcagctctgagggggactttgcaagccttgatttggaagtactgtagggatgcctcacttctattgtttctgttttttttgagggtcctacaagttggccgccacttgaaacttgatggagcctttgcctatagttttcacatgtgagttttgttgtcacaggacaggatgaaggtgtagttgttgtcatctcttgtttactctcatagaagcataaataaataaatgtgctcgtttggtaccttggtaacaa

SEQ ID NO: 19045 - DNA, 367 bp, Zea mays
  Clone ID: MRT4577_117370C.1
aaacataataccacaaatttaaataaatacttaaagttattatatcatcggagtaaacattgttcttgttgcaaccgaaattaactaacggtaaataagaagtgaggcgaagcctggaccatcactcttcctgatcgtcacctgctgaggcagggttctactcgactgtcctacccgatggcagggtggatggccaagtcaacccggaaaccatatcctcctcgaaggtacctggaggaacagtttggcacacgctggtaccaccatgatttcccatgtgagtctgttgaacaagaaatagacaaatggatatatgttatccaaaacaaattagatgcaacctcttgggtagaacacacagaaagag

SEQ ID NO: 19046 - DNA, 758 bp, Zea mays
  unsure (1)..(758): unsure at all n locations
  Clone ID: MRT4577_117371C.1
cattgggtacctcgaggccggccgggatcactctgtcatccgccattctccgctggcgacgatactccctcgtgctattttctataatagccctctctgccatccccctttccctcctgcttgatacccatactgccctttcccacgcactgcgctctccatacgcagacaccgccatcatgccacaggacctcaagaagttgatgccccaggcaaagacatacaggaccggcccctacacctgtgaagcccccaatgcccaaaaggtagacggcgagacggtaccgcgccgcaacaacgcggccaaagatggcctcatcctgaagccccacgaagacgtctcgaccctctacgacatcctgcgacactcggctgccaagtttggaaatgcaaaggccgtcggtgcgcgccgcatcgtcaacgtacacgaggagacgaagaagatcaagaagatggtcgacggcaaggagcaggaagtcgacaagaagtggcaatactttgagcttagcccctacaagtacaagagttttatcgagtttgagcaaatggctctctcagtaggttcgggcctcaagtcactgggcttcgagccacaagacaggctgcacctcttcgccgccaccagcatgcaatggctggcttctgcccatggtgcgctttcccagtcaatgggcattgttactgcctacgacacgctcggnagaggagggcctcaagcactctatgcttcagacaaagcaaggtcatggttaccgacc

SEQ ID NO: 19047 - DNA, 334 bp, Zea mays
  Clone ID: MRT4577_117372C.1
acacccttccgttccaaatccacccacaaaacctttaggagccttattttttttaattcgtaatagcgcggccgggagtttccgaatttggatggggaaatgcttttcctgaattgaaggatgcttttggttccgatgatcccagactccaaaggaaagctttaaatttaatccaatacttgttgaacaactccaaggcaaccaggagtgttgccacaaagcttggttttccaaagctgatgatccaccttgggtccagcgatgattccttagggcgtgaagctgttttaggcggcctccttgatttgccccggaccaggacatttgttaaccc

SEQ ID NO: 19048 - DNA, 318 bp, Zea mays
  Clone ID: MRT4577_117373C.1
ggagcacgcatcccccggctgaaaacttgcctgtatggttggcccataaaaagacagtttggaataagtttccgggcgcaagagggttctcccgttttacagacaattccccccgttggggctgccttccatgctttgtttaacccaaaccaaaacctccaatggggagggggtcctcacaactggaagaaagcccccccctttacttgggttgcttaaatatgggaacgaccccgccacctccatatgatcaagggttgtttgcaagccatttcgggcaacagccggtttggccgctttaaaaccccccccggttgc

SEQ ID NO: 19049 - DNA, 260 bp, Zea mays
  Clone ID: MRT4577_117374C.1
aaaaaggaaacaagccacatttttttgcctttgttaaaggggacccgttcacattaacagttttgggggccattgtggccggccccacagagcagcaacacatttttaaacattccaaagttgccggcgacaagattgtttttttgttgacacatttattacacgacacatttcccagcggtttaacaacggaaattagcgggggactaaaagttcccccttggccctctgggggaacccccaagccggggggggggggg

SEQ ID NO: 19050 - DNA, 278 bp, Zea mays
  Clone ID: MRT4577_117375C.1
gcagcagcgagtccgtacgagggatatatacctgcacaccccaaggcatttggaagaacgaagaggatggagagaaaatgccccggtgtctgccagtatgtgggaagcctgtcaaccccgtgacacagaagcagcgcatcatcggagggctgaaagccaatccgggcaacttcccctggcgagcattcaccaatatccacgggcgagggggcggggccctgcttggagaccgctggatcctcacggcagcccacaccatctaccctaaggaacacaac

SEQ ID NO: 19051 - DNA, 430 bp, Zea mays
  unsure (1)..(430): unsure at all n locations
  Clone ID: MRT4577_117376C.1
cccgggttcnacccacgcgttctgtcccacggnacagtatggtctccctgggtggcggtctccttgcttgcgtcttcccgggcccctctgcgtgcctgcgagcgacgcataggcgcgggcgctcgcaccaagccgatccggtggtctttatgcgctcccgctcaaagctttttctggcatgggagttgctcctaacattgggggggcgtgggtggggctccacatgaagaagaccttccgtattgtgatcttccaaatctccttaaatcaagggcaggttcatggtgagactacaggggcccctactcgctgcttgatgattttgtggcctctctcccatataatggctgcccctatgcgctgtatgattgtgattttcctcccccggagaatgtgcctgaaatcattattttcttcattgcccggtccc

SEQ ID NO: 19052 - DNA, 629 bp, Zea mays
  Clone ID: MRT4577_117377C.1
accaaagtgcaaaagcatccataaacactacaactataaaagaatattataccggctacaatttgatcagtttggcaactcaagcaactgaatcatccaaagaataaataaacaggtacaagcagcaggttcatcacctggaaaaaaatgcacggtgcttattaacgacacttaaccaatgagttaggaaaagaaatgttttcagtccatcgaaaccgatctttttttcccctgctcacgcagcggtggataatggcagctctgagatcattccgtcggctcatgcttcttccctgcgccattctgctgcgcctgctgcagctggtagaacggtataggcgttgcctgctgctgatgcagttgaaacatctggtcctgaacgctgatttggatctgctgagctaggttgctggacgagcaagaatccccgagctctgcggtcgcgagcttcaggcgttggacctcggctgtcagtgcctcattcaatgcgtcacgcagctgcgcctgctgctccatggcctgcagccggaacttgagctcgttgttctgcgtcgcgatccccgcggagtcccgctgaagaagcgtgagctgggcggagagagtggtggcctccgtctgcaggatctgca

SEQ ID NO: 19053 - DNA, 148 bp, Zea mays
  Clone ID: MRT4577_117378C.1
ctaccagaaagcaccgtttcccgtccgatcaactgtagttaagctggtaagagcctgaccgagtagtgtagtggggttgggcaaggtagtcaaaccaaaatttgttgcaacatatcaaaattctcgtgacatttcaaggtttccaaca

SEQ ID NO: 19054 - DNA, 414 bp, Zea mays
  Clone ID: MRT4577_117379C.1
tagtggacccactcgtccgagtacgagttcatgttggtggcgaggaaatgttacattgcgataacagaccatgctacttgaggaagatgagaaagataagcgtgaagaagaagagcgcagggataggaggatatcataggaaacatgagaggagagtagacgagtagcagaggctgaaaggaaaagacacgcataaagaaaaaatattgtgcccgggaagaaaacaggactgtcaacattttcttcgagcagcctagcagcaccaagtagtattgactgtgaggacgttctagacttgatatattcagatagcgactaggaagacaatgttgtggtcggggaacactattctgattcttcagctgatcaattttcaagcatggatgctgatgaacgatgcaatgagcatgaatg

SEQ ID NO: 19055 - DNA, 401 bp, Zea mays
  Clone ID: MRT4577_11737C.1
gctcccccgaggactactcctcgccgtccatcctctccttcggcggccaccacgccaaggcgcccaagcaggagctgctcgacgccgccgccgccgcgctgccgtcgttccagcaggcgcgcccggcgcccaagcgctcctacgacgacatgatggccgaggccgccagggcgcctgccgccgccgccgccgccgcacgcccggcctcacagaaccaggaccacatcttggccgagcggaagcgccgcgagaagctcagccagcgcttcatcgcgctctccaagatcgtcccgggcctcaagaagatggacaaggcatcggtgctcggcgacgcgatcaagtacgtgaagcagctgcaggaccaggtgaaggggctggaggatgacgcccgaaagcgcccg

SEQ ID NO: 19056 - DNA, 633 bp, Zea mays
  Clone ID: MRT4577_117380C.1
gcctccaacagctgaccattggtggggccagctgcttcctgtcgaactaactaccgaccacgacaagatgtcgatgatcgtcgctcatgtacgttccgaacctcttgctgcttctgcttcacaccacattgagtgggaagctaaagacatagctcaccatgaccctcactcacggcgctgggtgccggttctccaacattcgaatagacaaacggccatcatcaacacacacatggaggccaaagagctgacgccttaaaatctaccacccccgaacacggaaaaggacaaccctctgcaggtaaacgggccgaactgtatcctactcacgtagatagactacaaggatgcaaagctatcacaggtcaagtaccactccctaaacatgaagctgcagaactacctcaagaggctcaaaaacatcaccaaccagcaatgtctgaacaactactgtggcctaacagtcttggcacagaacaccatgaccactctcagacgatctaaacccggtaacatctgctgcagacagctaactacttctttatcgaccaatctcagaagtactacggaacaagagtgtgcacacactctgatgcactacttctgtatggacagtgtccatgaaagatggac

SEQ ID NO: 19057 - DNA, 268 bp, Zea mays
  Clone ID: MRT4577_117381C.1
aaaaccaatgagaaaaggagctaatgaaacattaattttatcataaaattaattatgttaaaaaattttttaaagttaattgtattcatcattactagttttattgttacttttgtaattgaaaaatattattttttaaaataaaaaccgtggttggagcaatggattttttgatttttaacaaatttgggtgctaataaagtgactactgtaaggaatatttttattaaagtggattgagaataatttgaaatttgtaactgatttt

SEQ ID NO: 19058 - DNA, 239 bp, Zea mays
  Clone ID: MRT4577_117383C.1
gacccactcgtccgactcgttccattgagccattcaaatacacatctaactatactcactacattccaactaacagcaatattgtacaatatattatccctgctcaagattattcccccttttatgaacgctacacatgctatcattattccacactatcagttatactattaatgtcacaacttctatgtctgattaaagacattaatacatatgatcaacaataacttacatacgtt

SEQ ID NO: 19059 - DNA, 745 bp, Zea mays
  Clone ID: MRT4577_117384C.1
gggtacctcgaggccggccgggtcccgtacccgtggctcacgtcgacgctgtccctcgccgccggctccgccatcatgctcgcgtcctgggccaccaggatcgccgaggcgccccagacggacctcgatttctggaaggcgctgactcccgttgcgatcgcgcacacgatcgggcacgtggcggcgacggtgagcatggccaaggtggccgtgtcgttcacgcacatcatcaagagcggggagccggcattcagcgtgctcgtctccaggttcttcctcggcgagcacttcccggcgccggtctacttctccctcctccccatcatcggcggatgcgcgctcgccgccgtcaccgagctcaacttcaacatggttggggatgaagggcaagtccgtgagcgggatgaactactacgcctgcctctccatcatgtcgctggtgatcctcctgcccttcgccgtcgccatggaggggcccaaggtgtgggcagcgggctggcagacagcagtcgccgagatcggtcccaacttcgtctggtgggtggcggcgcagagcgtgttctaccacctgtacaaccaggtgtcctacatgtccctggacgagatctcgccgctcaccttctccatcggcaacaccatgaagcggatctccgtcatcgtcgcgtccatcatcatcttccagacgcccgtccagcccatcaacgcgctcggggcccgcatcggcatcctcgggaccttcatctac

SEQ ID NO: 19060 - DNA, 284 bp, Zea mays
  Clone ID: MRT4577_117385C.1
ggagaataggatcttttttcttaccaaaagatgtgcctatcataattttttgggcaacaaaaaacccaaactcacttagcataataattgactctacacatctatctaaaaagttcctacatacatcaagacacataattaaagtactaaataatatatacacaaaccgcattccactgcactaacctctgcaacttaactacacatctactggtaccatggtataatccataataacacaaaacacattccactctcctataagtaaatcaactcataacctt

SEQ ID NO: 19061 - DNA, 1996 bp, Zea mays
  unsure (1)..(1996): unsure at all n locations
  Clone ID: MRT4577_117386C.1
cccncacaaaaagagcagcngccngccngagnagggacaacagancacggnncngaganaagaacngngaggncngcaacggccagcncgngcngcagaagaaacaaaaccgaacattttttatatacttgactgataatccagtttcgattcgtgtggctaagacttcctctgtggtgtggacgcacgtacgcaattcggcacgaggcacacgaattccacacaccacagaccacacgcacggtacagcctctccgcagctgcaggtgcctgctgttctccgacgagaccccaagaactcgccaacctatgccaattcccagccacccttccctctttcacaatgctggcctccgccgccaccgtgaagccctccaccgccgcggccgcggccacctgcaaggcggccttcaagccgctccacctccctcccctccccgccgccgccggcctcaggccgctctccctctccgtctccgcgcgcccgctgtaccgtcaggagcatgtcctcgcatccgtggcggtggcggcggctgggcgcaacgaacgcgccacgtcccccgcgccgccgtccgccaccgctgacggcgcccggccgctggaggtcgccgcgccggcggagacgggtcggcgcgccaagatcggggtctacttcgccacgtggtgggcgctgaacgtgatcttcaacatctacaacaagaaggtcctcaacgcgttcccgtacccgtggctcacgtcgacgctctccctggccgccggctccgccatcatgctcgcgtcctgggccaccaggatcgccgaggcgccccagacggacctcgatttctggaaggcgctcactcccgttgcgatcgcgcacacgatcgggcacgtggcggcgacggtgagcatggccaaggtggccgtgtcgttcacgcacatcatcaagagcggggagccggcattcagcgtgctcgtctccaggttcttcctcggcgagcacttcccggcgccggtctacttctccctcctccccatcatcggcggatgcgcgctcgccgccgtcaccgagctcaacttcaacatggttggattcatgggggcaatgatctccaacctggcattcgtcgtccggaccatcttctccaagaaggggatgaagggcaagtccgtgagcgggatgaactactacgcctgcctctccatcatgtcgctggtgatcctcctgcccttcgccgtcgccatggaggggcccaaggtgtgggcagcgggctggcagacagcagtcgccgagatcggtcccaacttcgtctggtgggtggcggcgcagagcgtgttctaccacctgtacaaccaggtgtcctacatgtccctggacgagatctcgccgctcaccttctccatcggcaacaccatgaagcgcatctccgtcatcgtcgcgtccatcatcatcttccagacgcccgtccagcccatcaacgcgctcggggccgccatcgccatcctcggaaccttcatctactcccaggccaagcagtagccgcccttggcgcgcgcgtctggctctcaggcctcagttcagttcaccgccgaatcagctcggcgctcgaagatataacagattatataacttttgaggatatctacctagcttgtataatagtattattactagatcctctcttctttttttcgtattttcttttttcctaggactagcttattactagatcatttcgtcgtcgtgttttcactatgactatgatggcgtagagagagagagagagatggatccatctaaataaaaaaaaaggtaccagatcttgttttgtccgaaaaaaaaaaaaaaaaagcggccaaaaatatatctctctctctctctctctctctctcactctagctaacatgcttctgctacctccacagtaacaaacggggggggccgccctcgcgtattctctgtctcaatatttacctccacttactctctttttactgcctggcgtcactccctaca

SEQ ID NO: 19062 - DNA, 1435 bp, Zea mays
  Clone ID: MRT4577_117387C.1
cattgggaccctcgaggccggccggggctgatatctaaaacccaccgctgttcgcgtcctcgtttctctcaatctctctcctctcctcgcctcgccttggtgtccgtgttcacgccgtcgctagcgcctgccgcggcgaagcttctgccctccccggcgccgggctcgggtcgtcgtcggccaggaagcctattcgagacaaggtcgatctttgctgccttggcgagcttcagccgaatcaaggtcgagcatggcggcaggccagtaaatagagcaacacaaaacccttcaaatcaatggagacctctgcagcaaccccgacccggccgccacaccaggcggccacttccccatcgccatcgccctcgtcgtcgctgaggctgtggaggccagcggcgcagcgcaacatgcgcaatcagtggtcccatctgagcgccgccaaggagcagtggctggccgccgttgctgacggccgtgcccacgcctccgcgctcgtcaacgtccacctctcctgcaggaacatgccggcgatggatttgggggtgctcaaggatatgccggggatccgcgataaggcgaactccaagttggcgcttagagaggagcaatacagcggcatgcttctgtcggcctacaaggagatggtccgtcagctgtcctacttggttgaagcttcccattctatgcgctgcttttctaaagcggctccaaattgctccatcacacagttttctgaccgccaagataatttgaatgattcaggggatggtggaggagccccagtattcaaatggttctccgtattataatttgagagtcttgcccaggagcttgttcagctgtttgtttcagagcaaaagttgaagaggctgctactcttggaatttctctcgattgctttaaaggaaggtgtagaactccagacatcattaaattggggtgatgaactatatgatggtgaatcaaataaacttcagagtattggccttcagtcaggagatgcctactcaccgcctgaaaattggtgtgcagaacgtttagggagtcagagacctggcaatctctctctgcacgaagttttacaggtttatttaaccacttggcatgctaatatgaacatcaaccggagtagaattggtgaaatattgagcttgttgaggaggagatgaggattaaactgtcttaaagattccgattcattttgttgggctattcatcaaggaagaagaaatgaaaaagaaagatcaatcagttcactattcaccaggattctatatccattgtctttatctgccttagtagaagccttgagagcttacctatgatcttagaatatagtactggtctccttgtaacccataatatttttttaaatttaatgttgggttacactggaaaaaaaaaataaattatgtacgatccccccctccccccc

SEQ ID NO: 19063 - DNA, 1063 bp, Zea mays
  unsure (1)..(1063): unsure at all n locations
  Clone ID: MRT4577_117388C.1
ccggccgggacacgaagcttgctcagccgccaactgccacacgcacagccctagccgccaaactgcccacacgcacaaccgcggagccgccagagccagacgctgccgccgtcggccgtcctccgccctccagggagccagcccctattcgagacgaggtcgagctttgctgccttggcgagcttcagtcgaatcaaggtcgagcctggcggcaggccagtaaacagagcaacgcaaaacccttcgaatcaatggatacctccgcagcaaccccgacccggccgccccacccggcggccgcttccccatcgccgtcgccctcgtcgtcgctgaggctgtggaggtcagcggcgcagcgcaacatgcgcaatcaatggtcccatctgagcgccgccaaggagcagtggctggccgccgttgctgatggccgtgcccacgcctccgcgctcgtcaacgcccacctctcctgcaggaacatgccgacgatggatttgggggtgctcaaggatatgccggggatccgcgataaggcgaactccaagttggcgcttagagaggagcaatacagcggcatgcttctgtcgtcctacaaggagatggtccgtcagctgtcctacttggttgaagcttcccattctatgcgccgtttttctaaagcggctccaaattgccccatcacacagttttctgaccgccaagataatttgaatgattcaggggatggtggaggagccccagtattcaaatggttctctgtattagaatttgagagtcttgcccaggagcttgttcagatgtttgtttcagagcaaaagttgaagaggctgctactcttggaatttctctcgattgctttanaggaaggtgtagaactccagacatcattaaattggggtgatgaactatatgatgaacgtttagggagtcagagacctggcaatctccctctgcacgaagttttacaggtttatttaaccacttggcatgctaatatgaacatcaaccggaaattgatgaaatatttgagcttgttgaggaggagatgaagattaaactgtcttga

SEQ ID NO: 19064 - DNA, 754 bp, Zea mays
  Clone ID: MRT4577_117389C.1
tgagtcagagtatagggaggctttcggcgaagttcactgaaatgaccagcaaatacacacaagaaatgcaagcgattgatggtcttttgaaggaaaggaatgagatccatgcttcctataccaacaatccacctctaaaacggagttccagcaggaataaagccaagtcgccttcgaaagtggccaaaactggtacagaaaaacatcatcagaaggaaaagaaggtgaaggatcactgcatggagggatgtggaagtgacagcgataactcaagtgaaaagaaatcaaaagagcggttcccaaggaagaaatggctgaaccttccattcaaacttgacaggagaaagacgtgctgagcaatgaagtccctctcggcccaacactagattgatatacagagaatttccactgtggcctcccgaaccaagccctctcccactgctaccaccttccttctttgtacccggattatttcgtgtaaagatcacatgtgatcctaagaattaaaacgtgagtcgttttagcgtatattgtgaagcccgtgctggcaagttgccgttcttggcattgggtcaaattggggtgccctgcttccgattccgtgctgcaccgtgcctatgtagcatgtaaagttgtatatgctgcgaatcgtagtacagctatatatttgtgtgtcctgaatcttgagtgtctttttactgccttctgtaaatgctccccaactgatgtaaatacaaaattccatgttcctcgc

SEQ ID NO: 19065 - DNA, 563 bp, Zea mays
  Clone ID: MRT4577_11738C.1
ggtaccgcggccttcctcgagttttttttttttttttttttttttttttttttttttttttttttttttttttttttttttttggcccaacaagcgaggtacctttcacagacgccttttaaaaaccgggggaagggggtaatacacgtgcacgggtctcgggggacaaaacctgggaagacggtagataccccgataatttattagtgcagcatcgtcctttaaaacacaatgactttgatcactggatcgggggtaaaccccgaaaaccccacgacctacatttttcttgacctccctgcgggcctaaaagcctgtcttggcaaaaaggtggacccaaccggatgccaacgccattactgcccttggggatcaccatggtgagcctgtccaccactaatctgggccgtaccacatgaacggccccatttaccgccccaggattatatcacaggataaacaccccccctctttcttggggggaagggttgcccttcctgcacaggttcagaatcagggcgcaaacctactggctacaaaagggcatgcccagcttgagcatg

SEQ ID NO: 19066 - DNA, 282 bp, Zea mays
  Clone ID: MRT4577_117390C.1
cgttgccttcgcgacctcgccgccgccaaggccaagctcaaggagatcaggcccttcttctacaacatcacatactgccgccgtgtcgcatactgacaatgaacagctcccgaaccttgcatgtcaagatccttcctctgctcttgccctttgatgtccttgaagaaccgcacctcatgctcgcctaaatgatgaggtgcatgctgcaagaacaggaggagatggtggaaacctgagactctcaaccggccccctggcccatgacgatgaacctgccggccg

SEQ ID NO: 19067 - DNA, 1847 bp, Zea mays
  Clone ID: MRT4577_117392C.1
cccacgcgtccgcccacgcgtccgcccacgcgtccgcccacgcgtccgcccacgcgtccgcggacgcgtccgcaatctctctcgcctcgccttggtgttcacgccgtcgctagcgcctgccgcggcgaagcttctgccctccccggcgccaggctcgggtcgtcgtcggccaggcagctgctacgcgtgaacacggtcacaccagtacggcagtaccacgcgacgtgaacggtgaactcgtgaagaacagagccgccactgaggaaaccctagcgacggcggcgtgctaccggtgacattgtccccctcggcccctccatccctgacgcagcggcgccagcctgcaggaagccagcccctattcgagacaaggtcgatctttgctgccttggcgagcttcagccgaatcaaggtcgagcatggcggcaggccagtaaatagagcaacacaaaacccttcaaattaatggagacctctgcagcaaccccacttccccatcgccatcgccctcgtcgtcgctgaggctgtggaggccagcggcgcagcgcaacatgcgcaatcagtggtcccatctgagcgccgccaaggagcagtggctggccgccgttgctgacggccgtgcccacgcctccgcgctcgtcaacgtccacctctcctgcaggaacatgccggcgatggatttgggggtgctcaaggatatgccggggatccgcgataaggcgaactccaagttggcgcttagagaggagcaatacagcggcatgcttctgtcggcctacaaggagatggggatggtggaagagccccagtattcaaatggttctccgtattagaatttggtgggttaatcatctcttgcttctatggattaagtcaccactatgatctttcgtctgttgggtgtgacaatgatctcctaacccatctatatctgagactactcagagcactatatattctcacatttgaggatgccgatcaatatctgagacagtacacacattcatgtttacatgttttaaatccacatgataaaaatatattatgtttcctttaatcacctcagagagtcttgcccaggagcttgttcagatgtttgtttcagagcaaaagttgaagaggctgctactcttggaatttctctcgattgctttaaaggaaggtgtagaactccagacatcattaaattggggtgatgaactatatgatggtgaatcaaataaacttcagagtattggccttcagtcaggagatgcctactcaccgcctgaaaattggtgtgcagaacgtttagggagtcagagacctggcaatctccctctgcatgaagttttacaggtttatttaaccacttggcatgctaatatgaacatcaaccggagtagaattggtgaaatatttgagcttgttgaggaggagatgaagattaaactgtcttgaagattccgattcattttgttgggctatccatcaaggaagaagaaatggaaaagaaagatcaatcagttcactattcaccaggattctatatccagtgtctttatctgccttagtagaagccttcagagcttacctatgatcttagaatatagtactggtctccttgtgacccataatttttttaaaaaatttaatgttgggttacactggaatcatattgggaagagcgttggaccaacatatgttattgaaatgagatttctaagttatcaggatcattcgcctagcttcaggtttgttctgtgctgttgtagatgtgtattatttacttcattggcctgctgtacagatcttggtgacatgctcgtggaaaaccgcatattgctttcaaaaaaaaaaaaaaaaaa

SEQ ID NO: 19068 - DNA, 360 bp, Zea mays
  Clone ID: MRT4577_117393C.1
actcccctgcaagctcggaatcggaggacaatggctgccgcggcccgctccggcggagggctttgccgtttcctgagctccctcgccgagctcacgaagttcggggtcgacgccgtcgaccagccacgccttcttctacttgcgaactaccggatttgaggctccgcctcggtcgccagcgattcttccgcgccccaggagtcgtcgtcgtcgtcggcggcggccacctccacctctctcgcagacggtctggcgctcctgccatccaccgcgctgatgctcttcacgccacaggtggcacccactctgcaccgcaagatcttcgtggtttctctcttcaccggtgccgcacccgcaccc

SEQ ID NO: 19069 - DNA, 643 bp, Zea mays
  Clone ID: MRT4577_117394C.1
cttctcctcgcctcgccttggtgttcacgccgtcgctagcgcctgccgcggcgaagcttctgccctccccggcgccaggctcgggtcgtcgtcggccaggcagctgctacgcgtgaacacggtcacaccagtacggcagtaccacgcgacgtgaacggtgaactcgtgaagaacagagccgccactgaggaaaccctagcgacggcggcgtgctaccggtgacattgtccccctcggcccctccatccctgacgcagcggcgccagcctgcaggaagccagcccctattcgagacaaggtcgatctttgctgccttggcgagcttcagccgaatcaaggtcgagcatggcggcaggccagtaaatagagcaacacaaaacccttcaaattaatggagacctctgcagcaaccccgacccggccgccacaccaggcggccacttccccatcgccatcgaactccagacatcattaaattggggtgatgaactatatgatggtgaatcaaataaacttcagagtattggccttcagtcaggagatgcctactcaccgcctgaaaattggtgtgcagaacgtttagggagtcagagacctggcaatctccctctgcacgaagttttacaggtttatttaaccactt

SEQ ID NO: 19070 - DNA, 637 bp, Zea mays
  unsure (1)..(637): unsure at all n locations
  Clone ID: MRT4577_117395C.1
ttcgggaaaaggnaaaaaaaaaaaaaaaaaataacaaaaaaaaaaaaaaaaaaaaaaaaaaaaaaaaaaaaaaaaattaccggcgaacccatctcctcgcatttcttcccatccgatccccccttcgaaaccaaaaccccaactccccccgaatcgatggcgcccaaggccgaaaaaaaacccgcggcgaaaaacccgggggaggaggagcccgcggccgaaaaggcgcccgccgggaaaaagccgaagggggaaaagggggcccccgttggaaagtccgctgccaaggaagggggggggggcaaaaggggcaaaaaaaagggcaaaaaaaggggggaaacctacaaaatctactttttcaaggggctgaagcaggggcacccggactttggaatctcctccaaggccatgtccatcatgaactccttcattaacgatatcttcaaaaagttcgttgctgaggccgccaagttcgcgcgctataacaaaaagcctaccatcacctcccgggagatccaaacctccgggcgcctcgtccttcccggggagctcgccaagcacgccgtttccgagggcaccaaggccgtcaccaagttcacctcggcctaggttgcgcggccgccgcttgcaggattct

SEQ ID NO: 19071 - DNA, 627 bp, Zea mays
  Clone ID: MRT4577_117396C.1
aggcgaatgatcctgataacttagaaatctcatttcaataacatatgttggtccaacgctctcctcccaatatgattccagtgtaacccaacattaaattttaaaaaaatattatgggtcacaaggagaccactgattgcgcatgttgcgctgcgccgctggcctccacagcctcagcgacgacgagggcgatggcgatggggaagtggccgcctggtgtggcggccgggtcggggttgctgcagaggtctccattaatttgaagggttttgtgttgctctatttactggcctgccgccatgctcgaccttgattcggctgaagctcgccaaggcagcaaagatcgaccttgtctcgaataggggctggcttcctgcaggctggcgccgctgcgtcagggatggaggggccgagggggacaatgtcaccggtagcacgccgccgtcgctagggtttcctcagtggcggctctgttcttcacgagttcaccgttcacgtcgcgtggtactgccgtactggtgtgaccgtgttcacgcgtagcaactgcctggccgacgacgacccgagcctggcgccggggagggcaaaagcttcgccgcggcaggcgctagcgacggcgtgaacacc

SEQ ID NO: 19072 - DNA, 169 bp, Zea mays
  Clone ID: MRT4577_117397C.1
gtctccggatccgtcgccgtctggtctccgtgtgctctcgtcggcgtcggcgtcggcggcgtctgactgaacccctcggcttccgcggcgtcgggtctctggtgctgctgctactgctgctgcgtgcaaggctgttatggccaccaagaagaaccttggcaacctcggc

SEQ ID NO: 19073 - DNA, 562 bp, Zea mays
  unsure (1)..(562): unsure at all n locations
  Clone ID: MRT4577_117398C.1
tacgacctccggactttccgcggaattcccgggctctcgattgctttaaaggaaggtgtagaactccagacatcattaaattgggaacgtttagggagtcagagacctggcaatctccctctgcatgaagttttacaggtttatttaaccacttggcatgctaatatgaacatcaaccggagtagaattggtgaaatatttgagcttgttgaggaggagatgaagattaaactgtcttgaagattccgattcattttgttgggctatccatcaaggaagaagaaatggaaaagaaagatcaatcagttcactattcaccaggattctatatccagtgtctttatctgccttagtagaagccttcagagcttacctatgatcttagaatatagtactggtctccttgtgacccataatttttttaaaaaatttaatgttgggttacactggaatcatattgggaagagcgttggaccaacatatgttattgaaatgagatttctaagttatcaggatcaaannnnnnnnnnnnnnnnnnnnnnnnnnnnnnnnnnnnnnnnnn

SEQ ID NO: 19074 - DNA, 1940 bp, Zea mays
  Clone ID: MRT4577_117399C.1
ctcccccggcatcctcacaccgcgcctcctttcaccccctgacttggccttcgctccggcgttcccccccgacgcccccctcccttaacaacccggggctgttcgcgcccgccgggcccccaatctctctcttctcctcgcctcgccttggtgtttcacgccgtcgctagcgcctgccgcggcgaagcttctgccctccccggcgccaggctcgggtcgtcgtcggccaggcagctgctacgcgtgaacacggtcacaccagtacggcagtaccacgcgacgtgaacggtgaactcgtgaagaacagagccgccactgaggaaaccctagcgacggcggcgtgctaccggtgacattgtccccctcggcccctccatccctgacgcagcggcgccagcctgcaggaagccagcccctattcgagacaaggtcgatctttgctgccttggcgagcttcagccgaatcaaggtcgagcatggcggcaggccagtaaatagagcaacacaaaacccttcaaattaatggagacctctgcagcaaccccgacccggccgccacaccaggcggccacttccccatcgccatcgccctcgtcgtcgctgaggctgtggaggccagcggcgcagcgcaacatgcgcaatcagtggtcccatctgagcgccgccaaggagcagtggctggccgccgttgctgacggccgtgcccacgcctccgcgctcgtcaacgtccacctctcctgcaggaacatgccgacgatggatttgggggtgctcaaggatatgccggggatccgcgataaggcgaactccaagttggcgcttagagaggagcaatacagcggcatgcttctgtcggcctacaaggagatggtccgtcagctgtcctacttggttgaagcttcccattctatgcgccgtttttctaaagcggctccaaattgccccatcacacagttttctgaccgccaagataatttgaatgattcaggggatggtggaggagccccagtattcaaatggttctctgtattagaatttgagagtcttgcccaggagcttgttcagatgtttgtttcagagcaaaagttgaagaggctgctactcttggaatttctctcgattgctttaaaggaaggtgtagaactccagacatcattaaattggggtgatgaactatatgatggtgaatcaaataaacttcagagtattggccttcagtcaggagatgcctactcaccgcctgaaaattggtgtgcagaacgtttagggagtcagagacctggcaatctccctctgcacgaagttttacaggtttatttaaccacttggcatgctaatatgaacatcaaccggagtagaattgatgaaatatttgagcttgttgaggaggagatgaagattaaactgtcttgaagattccgattcattttgttgggctatccatcaaggaagaagaaatggaaaagacagaccaatcagttcactattcaccaggattctatatccacttatccagtgtctttatctgccttagtagaagccttcagaggttacctatgatcttagaatatagtactggtctccttgtgacccataatatttttttaaaatttaatgttgggttacactggaatcatattgggaggagagcgttggaccaacatatgttattgaaatgagatttctaagttatcaggatcattcgcctagcttcaggtttgtcctgtgcggttgtagatgtgtattatttacttcattggcctgctgtacagatcttggtgacatgctcgtggaaaacgcatattgcttttagtggtttttttattacgcttatggattgtaggtcttatggttattattattgttattgttgttgttgttgttgttattattattattattattattattattactattattattatttccaaaaaaaa

SEQ ID NO: 19075 - DNA, 546 bp, Zea mays
  unsure (1)..(546): unsure at all n locations
  Clone ID: MRT4577_11739C.1
taccctcggagctctgccgggactttgtaattcccctacgccaggcaaccgtgattccgtgaactgtccctctacctctctaagtttgccaagaactgccacacagcctcacacctctgacgatctgagcttactgaagccatgaggccggcaccaagtgtttccaggcccaggcccacgtcaacgtcgacgacttcgccggcagcgccaccaccggcagccgcgaagctggcgtcctcgccgtggcactcaacggtgccctacctgttcggagggctagccgcaatgctgggcctcatcacgctggcgctcctcatccttgcctgctcgtaccggaagctcaacgactacctcagcaccggcgacgcttccccttccccctccagacccgaagccacggatggcaacggcttcaagtcgccggcggccactgccccggcctctccagcgaccttcgccgacctcgttgncggcgnnatggccggggaaaaaattccnacatnnttggncgggccgatngnccgaagaacgcangggaaggacagg

SEQ ID NO: 19076 - DNA, 185 bp, Zea mays
  Clone ID: MRT4577_1173C.1
tcagcacatctcagcctttacctttctcacactctcttcactcagttcgaggaatcggtgcatttagcgaagcggtaggtagcatcactacgttcttccgccaagctagttagtgccaatggccactgctgtagcgatgctcgtggccctggccctagccctagctctgatcgtggctgctagcg

SEQ ID NO: 19077 - DNA, 1373 bp, Zea mays
  Clone ID: MRT4577_117400C.1
aaaaatacaaaaaaaaaaaaaaaaaaaaaaaaaaaaataaaaaattctctctcttctcctcgcctcgccttggtgttcacgccgtcgctagcgcctgccgcggcgaagcttctgccctccccggcgccaggctcgggtcgtcgtcggccaggcagctgctacgcgtgaacacggtcacaccagtacggcagtaccacgcgacgtgaacggtgaactcgtgaagaacagagccgccactgaggaaaccctagcgacggcggcgtgctaccggtgacattgtccccctcggcccctccatccctgacgcagcggcgccagcctgcaggaagccagcccctattcgagacaaggtcgatctttgctgccttggcgagcttcagccgaatcaaggtcgagcatggcggcaggccagtaaatagagcaacacaaaacccttcaaattaatggagacctctgcagcaaccccgacccggccgccccacccggcggccacttccccatcgccatcgccctcgtcgtcgctgaggctgtggaggccagcggcgcagcgcaacatgcgcaatcagtggtcccatctgagcgccgccaaggagcagtggctggccgccgttgctgacggccgtgctcacgcctccgcgctcgtcaacgtccacctctcctgcaggaacatgccggcgatggatttgggggtgctcaaggatatgccggggatccgcgataaggcgaactccaagttggcgcttagagaggtagtaacaccttggccaccaattcagtgtaagatttgcttcacaacgtgatttagttggccattatgctgctaatctttgattttgttgcttgcttggtttaggagcaatacagcggcatgcttctgtcggcctacaaggagatggtccgtcagctgtcctacttggttgaagcttcccattctatgcgctgtttttctaaagcggctccaaattgctccatcacacagttttctgaccgccaagataatttgaatgattcaggggatggtggaggagccccagtattcaaatggttctccgtattagaatttggtgggttaatcatctcttgcttctatggattaagtcaccactatgatcttacgtctgttgggtgtgacaatgatctcctaacccatctatatctgagactactcagagcactatatattctaacatttgaggatgccgatcaatatctgagacagtacaaacattcatgtttacatgttttaaatccacatgataaaaatatattatgtttcctttaatcacctcagagagtcttgcccaggagcttgttcagaatgtttgtttcagagcaaaaagtgaaggtacatcatccctcttacacagtgatct

SEQ ID NO: 19078 - DNA, 261 bp, Zea mays
  Clone ID: MRT4577_117401C.1
gtacatctaagccacagcaagttgctaggtcctttgatccagcaactgaagcttcctcgtctcatcatcgagacgagtaagcaacatggcggctaatctcaagtgggctcctgttctagccctcgtcgtcgtcgttgctgccatggtctagcaccacgagcgtcggcaacatcgcagtgtactggggccagaacggcaacgactgcagcctggcggacgcctgcaactacgggctctacgcctacgtcaacatcgcgttcc

SEQ ID NO: 19079 - DNA, 428 bp, Zea mays
  Clone ID: MRT4577_117402C.1
ttttttttttttttttttttttttttttttttttttttttttttttttttttttttttttttttttttttttttttttaaacgaacaaaacggggtttattaacgatcaaaatgttgttgccaaaaacttaggcgggggggaggcccttttttttgccaaccatttggtttgggaccagaacttaccaataccttattcttgggttaccccatttttgtaacatttttccctccaacttttgggaacttttgcttaccaaaacatttgggatgggagattttgatagcccttccccctcctaataaaatcagcaaaaatgcctctcccttttttgggattcggggggggggccacctcagttgcaaccgcagcttcaaaattgggggcgtgtattaaaaaaccaattttccgctttttttttagggtt

SEQ ID NO: 19080 - DNA, 231 bp, Zea mays
  Clone ID: MRT4577_117403C.1
tttttggtggttttttttaaggtttgaaccgctaatttaccaaataaaagtaatggtggtttccccccctaagggtctcgaggactaactctcccgtccctaccaatcacagcacaaagaaccgtgccccaagaagatagaacaaaaacacacggtgaaccatgctggctccatcccataaacatacagggcctcaacgggcgaatctgattcaagcctaaaaaagaggaa

SEQ ID NO: 19081 - DNA, 780 bp, Zea mays
  unsure (1)..(780): unsure at all n locations
  Clone ID: MRT4577_117404C.1
tggtacgcctgcaggtaccggtccggaattcccgggtcgacccacgcgtccgaatgtggctaggataatgaaaaatgccatacctcaaacaggaaagatcgcaaaagatgccaaagaatgtgttcaggaatgtgtgagtgaatttataagcttcatcacgtcggaagcaagcgaaaggtgtcatcaggagaagcggaagacaatcaatggggaggatattctgtttgccatgtccactctaggctttgacagctacgtggagcctctgaaactgtaccttcagaagttcagagaggccatgaaaggagagaagggtatcgggggagcagtctccgccacagatggactaagcgaagagctcacggaagaggcattcactaaccagttaccagctggcttaataactgcagatggtcaacagcaaaacgttatggtttacacaacgtcttaccaacagatttctggtgtccagcaaattcagttttcatgatcggaaggacggacggaaccgggcttgtgtggagagagtctgatggagtctgaagcagaggcatgggcggaagtgagggtgaagctgcctccttgtaccataagtagctgtaatgtagcttcctgatgcttgactaattgaggtgttaattctgacttgagaatctttttcatgaatgattntaaaagaaaaaaaaattggattttaaaggtattaaaatatttttggtttgtacgagagtttgntgctctgtatgacgcctgtatgcattgtatattgcaatttatact

SEQ ID NO: 19082 - DNA, 571 bp, Zea mays
  Clone ID: MRT4577_117405C.1
acgagatccccggcgtgggcaaggtccacggcggcttcatgaaggcgctgggcctgcagaagaacgccgggtggccagcgcagctcaccgagccgacgacgacgcgcccgtacgcgtactacgccgtccgcgagaggctgcgcgcggtgctggccgcgaacccgcgcgcccgcttcgtggtggcggggcacagcctcggcggcgccctggccgtgctgttcccgaccgtgctggctctgcacggggaagggtccctgctggggcgcctggcgggcgtgtacacgtacgggcagccccgcgtcggggacgcgcagctggggcggttcatggaggagcacctggaccgcccgcgccgctacttccggttcgtctactccaacgacgtcgtgccgcgggtgccctacgacgacgccgcgctcctgttcaagcacttcggcctgtgcctctacttcgacagcttctacagggcggcggcgattgctgaggagcccaacaagaactttttctcgccgctcttcttggcgcccatgtacgccaacgcggcctgggtgctgtttcgcggcttcctcat

SEQ ID NO: 19083 - DNA, 681 bp, Zea mays
  unsure (1)..(681): unsure at all n locations
  Clone ID: MRT4577_117406C.1
cgnacccaaacgtgtgttcaccgttcccgacgaacctgccgcatcacctcaccgatcccccggcgcccgctggccctgtcccgactcccgagacatgcaacccgtttgccgctcgtgcttggcccccgcgcggccacagccggaggtaccccgcgcgcgcgcggccacggcgtgccaggcccgggccaccacgacgagccgcgtctgcgtctggcgcgcggctcccgcgcggcgcttgcgcgcaaacacgccgcgcggaggcgggacgacggagcccgtcgagccgcgcaaggacgggccggcgtcggcggtcgatcaggcggaggaggccgggctggcgcccgaaaagctggaggtgctggaggaggcggccatcatgggggaggacgaggggcgccggcccaccgactacgaccgccgcgcgcacatcttcgaggagagctcgcgggtcttccgtgatctcaagcagcgaagcgacggcgacggtggcggcggaagcgagagccagagcggccgtggtggtgccgtgactactggtgccgcggcggaaacagctaacaagaacccggtgtaaagataatgagccccagctgtagcagctttgttggataaaatgtcgtactgtgtaaaatgaaaggtggtgtcatataggttttaaaaatcttaaaatgttttttatcc

SEQ ID NO: 19084 - DNA, 594 bp, Zea mays
  Clone ID: MRT4577_117407C.1
tcctttgctgctcccttgcctcctgtttgctcctctcctgtctctgaacttctttcctacgctcacaattgatccagaggccgccagtcgggtgctgctcccgctaccagcggacacctgggtggcgccccatcttccgctccttcccttactagctggtcgcaacacttgctcatggctcttgggtcccctgacgatctgtctagcaccgtccatcatgcaggttatccgcacgcctctcgtctatccgctcgcgacctcgtctccgatcctccgcaaacgaagcgacaatcctgacgctgtgaagcgatcgagctataacgataagcgggtctgccccccttgcaactatgaggaagatgacgatgatacgatccgcaactgacaggattacacgtggcacatgcggtacaatgataggagaatgtctgaaggatgtgcgaactctatagttacaaaactacacttgttaccacgaacttgcaagaacgccattgtgaatatgaaccactgctgaatgacatcagatactactatttcttccacatcaatgagagcagaagatgccaacaagatatgcatagatcgctatga

SEQ ID NO: 19085 - DNA, 245 bp, Zea mays
  Clone ID: MRT4577_117408C.1
gaaaaaggtgaggcctaacatcctctgcttcttaccagtaccacaacaccacgacacgccggggaggtggaccagcggcgtcgatgggggacggcgaccgggagcgagaccctgaccaggagacgaggaatcagatgatgcaaatcctattcggggaccagtcggacgacgaggacgattctgacgatgacgacatcggcgacatggtctatgatgacgacggtcacgaacctgagacgacccct

SEQ ID NO: 19086 - DNA, 377 bp, Zea mays
  Clone ID: MRT4577_117409C.1
ccatgggaaaaggacgtgaatggtttcacaggcgcggggcaaacggggaaaaaaaaattgtgtggtggaagacgcgaaagaaagaacaaggcccacagacaccaaacaccgaaaaaaataggggcaagacaaaagaagaccccccaagcccggggaagtttcgggaaaaaaagggctttaccccgggaaacaaccaaaaaaaaatggggacatgaggatcctacaaaaacccaaaggatggaaaagggggggtctaaaaaaaaaaacaattagcttggggggacccaaaaacccgggaagagccccccagaaaagggggggctgaaaaataaaaccagtggcaccccacggagtatggagtgtacatcctcccgaaa

SEQ ID NO: 19087 - DNA, 649 bp, Zea mays
  Clone ID: MRT4577_11740C.1
cattgggtacctcgaggccggccgggaacaacatttccagatctctgtctttcgtctctctcgtctgaacggaagacgggtgtttactttctcggcgaagtaaaccgagagacagaggatagcgcccgaccgactcatcacttatggcttgcgtggataatagtggacgaccggagacatcgcgacctccgaccaccgtgctttgaaaggagtgtgtcctgactgactccgagaccacctcgagcgcctctcccgctccggatggcgagcccccaccagctacgggagtctactcatcctcttattctgcgaccagatccgcgtgctcctccaaggcgtcgtaacaagcgcaacgacaggacgcaatatcagcggagtcagctcggtccacaatcacgacgtgttctccatcaaggacgtggcctcgtacttgtatccccactccgccagcttgtccgagtgggtcatgtgcacctctgttagtaagaagtctgcggcaactgcgcgcacggcacacgcacgccagcgatacaaggccagcacaaactgacagggtaacaacacatacgtacgagaagaacattgttaggtgcctgatcagtatagtccgggccatgaatgttcgtgacagtacatatttactatacta

SEQ ID NO: 19088 - DNA, 229 bp, Zea mays
  Clone ID: MRT4577_117410C.1
acaaacattagtaagaaaagtgtccaataaccgacaacgggacatgcacaaacttgctggcggtgttcacactagaggactatcccaatacatttttttcacttagaatgagtcccctaccaaacgaaacacaggagcgtattccccaatcgggtataccgtaaccgaacaaaacgctagatgtcggattaaatgcagccgagcatgttcagaatggggactaacgagt

SEQ ID NO: 19089 - DNA, 275 bp, Zea mays
  Clone ID: MRT4577_117411C.1
tcgtacatggagaacacacagatgctcattattgaagctgaccgcctcgaccggaaacgatgggtagaggctatatatgacctccacaggatgctgaatgcggatcaactgatcgacgctagactgctagaatatgcatacatgctagatcttgcatgtgatatgaatgctgctggaatatctgacatgcttaggctgcattccatgctacagcggcgctcatgcatgcacaacacttacgctacatctggagcagggatctatgacgatctaga

SEQ ID NO: 19090 - DNA, 110 bp, Zea mays
  unsure (1)..(110): unsure at all n locations
  Clone ID: MRT4577_117412C.1
gactcactctctctgaaaactaggaancccactcccctcccgaaactaacgnnggcggcnntgccggngcgattcaggtctcccgccccgnctganattcgncctcttca

SEQ ID NO: 19091 - DNA, 695 bp, Zea mays
  Clone ID: MRT4577_117413C.1
tcgccctcgtctacctcgtgctcgtcggaaaaaacagctcagtttcatcacaagtttgttttgggatctttcgcctcaagtttcatctagctaccttcaacaaatccttcaatctccatggctacatcggtacttctcctattccaccttatgccactactagtagtgtttttattcttgagtagagcattttgctttcaactagcatgtctaattgcatataaattacatattctagatatcaaatcaatatactaacgaggaggaaattaaaaggaagagaaagaagcgaaagagagttgttgtattagctgtgtctattatggctataattgcaaatcggtatcaacggaggagacctagacacatcatagatgctaacgaagttcaagagagaaatgtcgagtgcagaaaacaaatgctatgtaatatgtaccagggttcaaatgtctattgctatgacagtttgcgcctaactaagagatcttttagtgacttgagtgccatcttacgggaaaagagtggcctacaggataccctaaatgtgtcggtagaagaaaagcttacaatttttctgcttatagtaggtcataacaccaaaatgaggttgatccgtagcacttatgggtggtcccttgaaccaatcagtcgacacttcatcgaagtgcttatagggattctatctttaagtcatg

SEQ ID NO: 19092 - DNA, 216 bp, Zea mays
  Clone ID: MRT4577_117414C.1
gggaaaaaaaaaaccccctttgttgaaaaggggggggcccctggccctaacaaagttcctaccccccggggttgaaaactttcctcttgacaagtaccgggttcaccgaaaagggaagtcccccttttactaaaacataacgggtttcctcacaggcggcggggactaaacccaaaccccccggtgggggccctttttaccccaaatcgttcgatc

SEQ ID NO: 19093 - DNA, 438 bp, Zea mays
  Clone ID: MRT4577_117415C.1
gggaaatgcatcattctcacccaattaactcacgatcaagcgcaacgtccacatcttaagaccctcccaagcacacccttgatacttctcggaccacatagcaataccaattatctaccaacatcatcaacctacggcattataccatcatctacaccttatacacgtcactctctgcacatatagcacgcaatcttgatcatattgctatcattgtccaaacaagccaccgtcaacaagaccatctcgctatccatgctcacgatatccctcactatactggatatgtaatcaatactaatactaaccatgaacatcatgaccccgctttacacattcttgacatgaaataccatctcattctccatgacactcactatcctgtcaaagctggtcttgaagcttatcatacatctcacagagaccatcacaatctac

SEQ ID NO: 19094 - DNA, 462 bp, Zea mays
  Clone ID: MRT4577_117416C.1
aaaaaataaaagaaaccccccacttggttaaaaaaaaaaagggggaccgggttcggggggaaacagcaaaaataagccccccgatccaaccggggccctaaaaaaacttttttttggccctattacaaaaattcagggcccaaagttccaaaaggggccccccaacaggaccctttttttccgggcccccccgggatttgggcaaatacccccccaaccccggggggggaaaaaatcattagcctggacaaaaaaactttaaaaatccacattgggccccaaaaaacactcaaatcgctctggaggcccaaaggcaaaattggcttcgttatcggaaccccaaagggcttcggtatcggcattttaaggggcttaatgggcggcatgggttcccttaggggggggcacattcttgttcgggggggaagaaattattcccgcaagggctttaaggggtgggga

SEQ ID NO: 19095 - DNA, 249 bp, Zea mays
  Clone ID: MRT4577_117417C.1
ccagattcgtctccactagaatagttacaaaaggtatacttatactgtattgctgtcatataacaacatattttaatgcaagatacggacactgacactgatactgacatgatcaagaagacaacggactcactatacaatccgtggactaaccgcattcacaacatcagcaatgctaaatactgcaaaccacttgtgcaaaatattcttcaactttcaagagttatgatagtatcaagattacaatac

SEQ ID NO: 19096 - DNA, 259 bp, Zea mays
  Clone ID: MRT4577_117418C.1
ccccgggcggaaaaaattttttttaaacccccacagaaaagcttccatgcaaaaaacacactgtcctgtttttttttaaaaggcggccccgatttacaaaaatccaacgggggtaaaaacaggggtaaaccctccagggtgtaaaaccgccgtgttctccagcaacaacagggggctggacgggacacaattggtggggaaatgtccgtcaaataaaacaaaaggcccccgggctttttttttttgggatgagaaatgt

SEQ ID NO: 19097 - DNA, 1479 bp, Zea mays
  unsure (1)..(1479): unsure at all n locations
  Clone ID: MRT4577_117419C.1
ggaaaaaggggggttagttttattcgactggcttcgcgtgcgccgatcttctatttagcacgcgacaggagcatctcgttgctcgattcggttttcttcgtgaatgcgcccccagcgagccgagctcgaattggaattggaactggacgtgcggctgctgcgttcggccgggggtggaattctcgcagcatccccgtgtggtggtgagaggccgtggctcgtgttgcggtcgacgcgcgcgaagggtcgagccccccgctcctttggggtactaagccggccgagcattagcggaacgaattatatgctcgtgaacctagtatcatgaggtacattaagatagcagctatgcttcctaacagaaccatcagggatgttgcgctgcgatgctgctgggctacaggtaaagagagaaggaagaaacctgatggattctacacagggaaaaaaatgagagacgtgaagccaatccaggacaaaatggttgcatcagtcccaatagctaattttcacatgacacctacaaccaatgtaatccccttttcggtatcaacgcagcatccaaatcaacaaagtcaggttcccaaagaagctcctgttgtcgacagtgcaacccagcgtctcctggaggaaaataatcagttgcttaaccagatttctgcaaataatgaaacattcaagacagtggagaacacagatctttttctccgcacgagtaacaacatcaaaacaattttaagcagaatgagcgaaacgcctggtatcatgagtcagatgcccccattgcctttatccataaacgaagaccatataaattctcttattcaactgaacagactggttgcatcatatggcacaacaagcatttcccatcatacgaagcaagagccatgaagctagtctactaaacccagggaaaaatgagaggaccagatggccggacccctcctgcaattctgtaaacgtgctgctgaggaagtcttgcatgttatactctaaccaagtgccaggaacagtcactgctttccagataatgttttcgcagtgacctgattgtttccaacccgtctgccagcctgcctgcccaccaattcttgaagcatttggaagaagtctgcagttgtggttcgagagccgcaagctatttgctgctgtttctgtttccgttatccagcatgtagaccagagtatcagacagtggatcctggtctctgcaaatgacctgtaaatatcggacggctgctggcgttccatgttttgtttctctgatcgctcatgaatgtatttcttcttttctcccccacccccggtcaccggacagggttgcattgctcccaatatgtaactgtatacagtagcgactccattttctgactaattggacacggaaacccaaacatttaaaaaaaaaaaaaaaggcccctannncccgtacccaattgcctatggagcgattcattcactgccgcgttacaacgc

SEQ ID NO: 19098 - DNA, 528 bp, Zea mays
  Clone ID: MRT4577_11741C.1
ctgttcgaaccatctgagctgacgtcgtggtcgttctacagagccggtatcgccgagttcgtggccacttttctgttcctgtacatcaccatcttgacggttatgggcgtcagtcgttctgattcaaagtgcaaaaccgtcggaattcaaggaatcgcttgggcttccggcggcatgatcttcgccctcgtgtactgcacagctggaatttcaggtggtcacataaacccggccgtgacttttgggttgttcttggggaggaagttgtcgttgacgaggacaatattctacatcgtgatgcagtgcttgggtgcgatctgtggtgcaggggtggtgaagggttttgagggcaagaaattatacggcgacagcggcggtggtgtcaactatgtgcacagcggttacaccaaaggagacggcctcggtgctgagattgttggcaccctcatcctcgtctacaccgtcttctccgccaccgatgccaagcgtagcgctcgtgactcccacgtccccattttggcgccgttg

SEQ ID NO: 19099 - DNA, 251 bp, Zea mays
  unsure (1)..(251): unsure at all n locations
  Clone ID: MRT4577_117420C.1
atcacccacgntcgcatcgctgagctgttcgtctagcatacagagtctcgcgngcgcgactgtatcatgcacactagcacgtcgtgagacatactctggatgcggacctagcagcagctctgtcagagagtcacgtctggagaccgtgatggttcgaggctgaacgtagcacgctcgatgcagtacatacgccgcgcacctttgtgagtctcatcatatgacttcagatatcacagcgcatatagattctc

SEQ ID NO: 19100 - DNA, 1945 bp, Zea mays
  Clone ID: MRT4577_117421C.1
gccggccgggccggggagaagagaataagggagatcaaacggggccgtggaaaaaggggggttagttttattcgactggcttcgcgtgcgccgatcttctatttagcacgcgacaggagcatctcgttgctcgattcggttttcttcgtgaattcgcccccagcgagccgagctagaattggaattggaactggacttgcggctgctgcgttcggcgggggctggaattctcgccgcatccccgtgtggtggtgagaggccgtggctcgtgttgcggtcgacgcgcgaggagggtcgacggcctcgcgccattggggtacgaagccggccgagactgagcggccgctgatcctggtttgagcgcctcgggttcctcttggatttggttggcgtttttatgggcgggtagatcggtccggtgatttctcagctgctatcggtgcgatggcagctgactccagcatggggtttcaccaggggatcaccgcctctctgtacaaccatcacatgctctcgttccagtccaacagcgacgtcggcatcggcggcggcgacgacgctaccggtggcatggtcatggccccggggagtgtgagtgggggcagtggcaacgccgggctgttcctctccccaaacacaggggtcgtcggcaacgcaccgggggttgccccgttaatgaactcgtcgggggatgcgttccgtggcactgggacgcccaagtataagtatgtcactggttctccttcggattggagtgaccgtgaggtagacatactgaatgaagggcttgtgagatatgctcgtgaacctagtatcatgaggtacattaagatagcagctatgcttcctaacagaaccatcagggatgttgcgctgcgatgctgctgggctacaggtaaagagagaaggaagaaacctgatggattctacacagggaaaaaaatgagagacgtgaagccaatccaggacaaaatggttgcatcagtcccaatagctaattttcacatgacacctacaaccaatgtaagccctttttcggtatcaatgcaacatccaaatcaacaaagtcaggttcccaaagaagctcctattgtcgacagtgcaacccagcgtctcctggaggaaaataatcagttgcttaaccagatttctgcaaatattaaaacattcaagacagtggagaacacagatctttttctccgcacgagtaacaacatcaaaacaattttaagcagaatgagcgaaacgcccggtatcatgggtcaaatgcctccattgcctttatccataaatgaagaccatataaattcgcttattcaactgaacagactggttgcatcatatggtacgacaagcatttctcatcatacgaagcaagagccatgaagctagtttaccatacccagggggaaaaacgagacgaccagatggccggacctcctgcaatcctgtaaacgtgctgttgaggaaggcttacatgttgttatactgaccaagcaccagggaaaaatcactgttttccagataatgtttttgcagtgatcaccagagtatcagacactttatcctggactccgcaagtgactgtaaatatcggatgactggaggcgttccatgttttgtttactgatcgttcgtgaatgcatttcttcttttcttgttttttattgttatcccagacagggttgcattgctcccaatatgtaactatgtacaatagccactgccctaggctgctaggcgtagaacgactccattttctgactatttggacactggaacccaaacatgttgtccaggtgttctgaattcttttttatcttcacttcagaagctttggaaaaaaaaaaaaaaaaaaggcccctatagctgtgccccaacatggacaacaacagtttattccttttgtttcgtttcaaattgtaagccattttagcattgtctc

SEQ ID NO: 19101 - DNA, 503 bp, Zea mays
  Clone ID: MRT4577_117422C.1
tttctggattgcatatatggcacaacaagcatttcccatcatacgaagcaagagccatgaagctagtctgttcagttgaataagagaatttatatggtcttcgtttatggataaaggcaatgggggcatctgactcatgataccaggcgtttatggataaaggcaatgggggcatctgactcatgataccaggcgtttcgctcattctgcttaaaattgttttgatgttgttactcgtgcggagaaaaagatctgtgttctccactgtcttgaatgtttcattatttgcagaaatctggttaagcaactgattattttcctccaggagacgctgggttgcactgacgacaacaggagcttctttgggaacctgactttgttgatttggatgctgcgttgataccgaaaaggggattacattggttgtaggtgtcatgtgaaaattagcttattggactgatgccaccatttcggcctggattggctcacgtctttattttttt

SEQ ID NO: 19102 - DNA, 955 bp, Zea mays
  Clone ID: MRT4577_117423C.1
ggggggttttttttttttttttttttttttacatatttacatgctttcagattttattcagaaaattagcaccaaggggcagaaaaacatcgcaatcgtttctcatgctaaagggcatgcgacagatgcatatatgtatatcgacaaacttgggggggggggggacatcgctcacattttgagggcatatttgaaacgcaggaattcgtaggaatcacgcagggattttgtaaagagctgttcaattttacagaagaaaaaaaaggagagtaggaataggaaaaataaaaactcccgcattccaaacaggccctgaaatcatgacagactgagaactgactgctttatttattcgccacaggtggattactcagcgagaacatatctaatgcacatggaagattggtgcacatgctgcacatattaaatcatcaccactcattttagatctaacgtttctagttgtttggtatattttgctaaaagcaccctccaacgtggtggtgtgtagtggtggaagcctggaaggtgttatttgtaaattgaatgatcaactaaagacgttagatctaaaatgagtggtgataatttaatatatgcaccatgtgcaccaattttttatgtgcaccagatatgtcctcttactcagcagcccacattgtttgccgaaacgacaaaccgcattccgagcttacgaagtggcgccacccacgctccttttggcttggggcctcgggaaaaaaaagatccatgaatgcctatcagcaaatagtgtgtgttaatggtaatatcacgccgttcgtcagcagtcttttaagttcacacctcagtacgtcacattcacattaagctatatatatgtaacaggcgtgcttagtacaaactagctagaactgccccagacatggatgtacatgcatgttgatcactacggggccagtagctcgagccgaat

SEQ ID NO: 19103 - DNA, 557 bp, Zea mays
  Clone ID: MRT4577_117424C.1
acaagcttttttttttttttttttttttttttttgttttttttttttttttttttttattttttttttttttttttttttttttttttttttttttttttttttttttttttaaaattaaaaagtttaattggccccaaacaaactaaggggaaaatttacaaaaattcaagaaacttgggggcgctttaaaaaacctttagagggcccaaatcaccctataagggggccaaataaaaattaaggggcggggttaaaaaaaaaagggccggaaaaaaacccagtgctaaaaaaaaaaaacccttaagaaaaaaaacacatttcctaaagggggaaaaaaaaaaaaaaggccggggtgaagccccttaacaaaagatgggcagtctttatggaaaaagggcccccccctaaagggaacaaaaaaccccggggggggggggtttaacccccagggtttccctttaattaccaaggccctaaccccccgttctttaggattttttcccttctttttccccccagtcccctttttttcccccaaaattaaaaaaatggggc

SEQ ID NO: 19104 - DNA, 475 bp, Zea mays
  unsure (1)..(475): unsure at all n locations
  Clone ID: MRT4577_117425C.1
ccggtgccggcccggtcccggttgcgcgatccctccaacaagcttgcttgaagcctccatcaagccatcccaacttctagggccgtagttattctcttcatggcgcgtggttattaagcaccaggcggaccaccacncagcaccccncaccataccacaggggccgagcaccacagagagagagnacgactcnagcaggcggggcgggtaccctccgagcggcggnccgagtacacggggaggcggcagcggtgnaccggnagggtnnggtgtcccaacgggcccgagaaacgnnnagtacgtacgtagtaccaagggaggtnagaaaagcagcataaaagcacatnatgcagcacctnnctggcgaaggccccggcgcccatcnnngccgccgggcgcccttttcgcacttctnanncgagaaaagcacgaggtctaaagaaagggaacccggnnnagcacgcgccaccccgcc

SEQ ID NO: 19105 - DNA, 129 bp, Zea mays
  Clone ID: MRT4577_117426C.1
ctcaactacctccggccaaacatcaagcacggcgggttctcggatgaggaggacatgataatccttagcctctacatcagcataggcagcaggtggtcgataatagcggcgcagctgccgggaaggacg

SEQ ID NO: 19106 - DNA, 396 bp, Zea mays
  Clone ID: MRT4577_117427C.1
gtcctcgcaggttcaatctcacctttcttcatgggtcaagagaaaccccacattaacatggggggtattggccatgtcgactctggcaagtcgaccaccacaggacaccttatctacaagcttggaggcattgacacgcgtgtgatcgagaggctcgagaaggaggctgctgaaatgaacaagcgggccttcaagcacgcgaggccgctcagacaagctcaacgctgagcgtgagagaggtatcaccacatgatatacctctgcggaagtttgagaccaccaagtgctactgcaccgacattgatgcccgctggacaccgtgacttcatcaagaacatgatcactggctcctcccaggctgactgggctgtacttatcactgactacaccactgga

SEQ ID NO: 19107 - DNA, 384 bp, Zea mays
  Clone ID: MRT4577_117428C.1
gggctagcgacattcaacgcacaattttgaattaacaatggcagccaaaatatcagggccaggtatgctctttggactatctgcaagagctgctacagcgaccattattacacaatgctcacaagctcctatagctcaacttgttgcgacggacctatcaccatcggtgtctacactctacgaaaacgcaagtcttcaaccctataggaaccaacaggcattcgcagctggcatcttaccgttataacccttgcccatcagcaatcataagacctattacagcaatttacctttggtgcattcattggcacataacatcagggcacaacaactacaacaacttgtgctataaaacctagctgcctactctaagaacaacagatt

SEQ ID NO: 19108 - DNA, 2148 bp, Zea mays
  unsure (1)..(2148): unsure at all n locations
  Clone ID: MRT4577_117429C.1
aggccgacgtgtaacttggtgattcatcggaggactaatcagaagtacacagtgcaaggtttgacacccttacctgccagccagatgacctttgtggatgctgaatccggccaaacacggaggctcgtggattattatgctcagaaacatggcaaggtgattgagtatcagatgctgccatgcttggatttgagcaagagcaaggacaaaccgaatcatgttccaattgagctctgcactcttcttgaaggacagaggtttccaaaagcaaacttgaatcagaattctgagaggatactaaaaggaagtgctctaatccgtgcatctgaccggaggaaggagattcaaaacttggtgaatgcttcggatggaccgtgcagaggagaaattgcacagcaatttgggatttccttggatgtacgaatgacagaagtcacgggtaggatccttcctccaccaaacctcaaacttggggcatccaatgggcagacctccaaattgagtatcgatcatggctgccagtggaatcttgtgaagaagagactagtagagggccgggttcttcagtgctggggcatcgtcgacttcagtgctgagccgtctggctctggcgcccgtcaggagcccctcgnatacaaggatgtttgttgagaaaattgtgaggaagtgctgtgagcttggtatccgtatgaaccctaatccatgcttcgtacacataacaaggatggcagtgctcttcgatccacatggactacatgaagagctaaacaaagcaaaacaagctgcagtgagcaagaagcagaggttgcagctccttttctgcccgatgtccgagcagcattcggggtacaagacactgaagctgatttgtgacacacagctggggatcctgacccagtgtttactgagcgaccgcgcaaacaatcgaaagggacaggaccagtacatgacgaatcttgctctaaagatcaacggcaagcttgggggcagcaacgttcagctgtttgactcgctcccacgggtcggtggtggggtacctttcatgttcatcggtgctgacgttaaccacccgtcccccggtaacgtggagagcccatcgatcgcagccgtggtcgcctctgtcaactctggtgtcaacaagtatgtgaccagaatccgtgcccagccgcaccgctgcgaggtgatccagcagcttggtgagatctgccgggagctcattggagtctttgagaagcagaaccgcgtgaagccgcagaagatcatctacttccggtgatggcgtgagcgacgggcagttcgatatggtcctgaacgaggagctggctgacctggagaaggcgatcaaggtgaatggctatgcgccacccatcaccgtggtcgtggccaagaagcggcaccacactcggctgttccccagggacgaacagcagccgcagacgaagaccgggaacgtgccgcctggcacggtggtggacacgggcgtggtggacccgtccgcgtacgacttctacctgtgcagccacactgggattctggggacgagcaggccgacgcactactacaccctggtggacgagcacggcttcggctccgacgacctgcagaagctgatctacaacctgtgcttcgtgttcgcgcggtgcaccaagccggtgtcgctggcgacgcccgtctactacgccgacctcgcggcctaccgtggcaggctctactacgaggctgccatgatggcgtcccaggcccagcgaggggggtcctttgacgtcactaacttcccgaggctgcacaaggatgtggaggacaacatgttcttcatctgacacaagtttttttttttttttttgccggtgtcgtggcgcaagttcgggtcgattttgctgtgtggcaacgtcgcattgtttttatgctgttgcctttttttgcttgctggtcgtagtgccactgtgtgttgttgaagtcgctggtttgaaactgcagtcagttaactgtacgcgtcctgctttgtttttgtttgcgcgcgtgtgaaacagacaaacagtctgatgatttggtgtgttcagggttgtaaacaaactttattagattctcactggattatactgcacgactgtagttgaaggaaaagaagcaggtttgagttgtgaagat

SEQ ID NO: 19109 - DNA, 254 bp, Zea mays
  Clone ID: MRT4577_11742C.1
tgctcgatgcactatcatctacatacacacatatctatctatcttttcactccatcatatcactatcacttttctccaatccagatccatgtctaatccagcttcgtcttctttcctcctccttctgctgtcggctactctgctctccaccttcttccgctccgatccttaccctgtgcaggacttcttcttttccgtttcgccgtgctgccacaacaactcttcctcttcctccatcacctactctttcttcc

SEQ ID NO: 19110 - DNA, 2012 bp, Zea mays
  Clone ID: MRT4577_117430C.1
tcggccgttgcagaggccctcctcttcgtctccgctctctctcctccccgcccccttggccccttctccctttctctctctcctcctcctctcccccctgtcttcccccattccccactccccccacctctccagctccgtcgctagggctccatttcccctgcacctccgccgccgccggatctcactttgcctcgccgccgccgccgccgcttcaacatcagaagcaccggattcggtgctgtttctcggctgcctcagcttccgccgccgggaggtccctggcggcgctcgccgccgccctccggcctttgctgagtcctctagacttgagaaggctgctgctgagtatatggtatctgtgggccattgtgctgtccatgcgagcggagagcatgcgtggcagctgtgcttcgggtgatgcccctgaccagagtagctgccgatgcattcggtgtgttgacgatcggactgttggcgctgcttgccgctctgggcctcttctgcatcttccaatcggtctacttcaggtgtcagatccggagaggaccctccttcctcccgctaggctactttaacggcccatgggtgacccgcgtcgctctggttctgatcaccatctggtggggagtaggcgaggtagcgagactgagcttcttgaagcaaaagctgttctccagcttgacatggcagaggaacatatgcgatgcgtacatactttccaacctagggttcgcggagccggggatcttcttcgcattcgctttcctgctccatggctcgttgcagaagaaggagctgggcactttaaaccagagatggaactggaagagcatggcctacacgctggttttctgcgttccagtgttctccgtgcaggcagtcctggtgttcgtcgtcgggcccaggcttgttagagactcgaaccatgacctcgggaggaggaagatcgcgaaatacttcgtacggacgcacacgccggttggagacaccagcgtctgcacctacccgttgttgggcaccatctttctcgggctcgtggatgccttcctgatgagctacgtgtcgtacgtcggatcacgggcgctgtccttggtcatcaacaagtcgctgcgaaggagggtgtacctgctgatgctgtcggtgctctgcttcctcccgaccagggtgcttctcctcggcttctcggtgctgcccaggccaggagacgccgccttcgagggcatcgtgttcctgtcgttcttgacgatgctgtcctgcacggccgtcgggatactcttgctggtctactaccctgtggccgattcgctggccctcagagacgtcggccagagggacatggctgcagagatggtgccttacgatgactactactgctacgaaggcgcgtcgctcgtggccaaccggagtttccgagaactcgagcgcaactccgacacctcgacgaagccgggatccatatcgttccgcactatgatcagggaagaccagcttcagcaggacggcgccgccgacgagatcggcttctcttctcgcagcggtgcccatatcggatcaccatcacccgcaggctcttcgccgagcgcggcaatgccgatgctccctgtcaaggagatccctagatactaaggagtattcagctgtgctgtgcgttttgcccctctgtgctatgtcctctccttcaccccctttttttcccccttctcttcctcttactaccttgatgataacagttttgtggcaatcaaaaggtttttttttgttacaaagaaaaaagcaaggcgctggatattggtgtgtgtgattggtggtacccgccccttggcgcggactggctgtgtgggggtgctctcttggggggggtgttgctgctccacaactcataatatctcccagccaataggttacaccatggactaggctggaatggggcctctgctgtgtcgtcgcctactattccttagctgtttctctttgtgacagctgtgccactgagtatatattatacgtat

SEQ ID NO: 19111 - DNA, 2251 bp, Zea mays
  Clone ID: MRT4577_117431C.1
ggatcctgggcacgagcaggccgacgcactactacagcctggtggacgagcacattttactcaccaagcagcagtatagacattgggcatggtgttgtagctatgaaaggaacccagcagacccttaaatacactcagcaagggttgaacctgtgtgttgactattcagttatgccattttacaaagctggaccggtgatggatcttgttcacaaaatagtggggtaccttgattatcgaacaactctgaacaagaggcaaatggaaaatctggttgatgagcttaaaggccgacgtgtaaccgtgattcatcggaggactaatcagaagtacacagtgcaaggcttgacacccttacctgccagccagatgacctttgtggatgctgaatccggacaaacaaagtgtcttgtggagtattatgctcagaaacatggcattgtgattgagtatcagatgctgccatgcttggatttgagcaagagcaaggacaaaccgaatcatgtcccaattgagctctgcactcttcttgaaggacagaggtttccaaaagcaaacttggataagaattctggcaggatactaaaaggaaaggctctaattcctgcatccaatcggaggaaagagattctagacttggtgaatgcttcggatggaccttgcagaggagaaattgcacagcgatttgggatttccttggatttacgaatgacagaagtcacgggtaggatccttcccccaccaaacctcaaactcggggcatccaatggccagacctccaaattcagtatcgatcagaactgccagtggaaccttgtgaagaagagactcgtagagggccgggatcttcagtgttggggcattgtcgacttcagtgctgagccgtctgacccccagcaggagcccctcaatggaaggatgtttattgagaagattgtgaggaagtgctgtgagcttggtatccgtatgaactccaacccatgcttcgtacacaaatcaaagatggcagtgctctccgatccgcatggactacaggaggagctaaacaaggcaaaacaggctgcagtgagcaagaagcagaggttgcagctccttttctgcccgatgtccgagcagcatccagggtacaagacactgagcttggtgagatctgccgggagctcattggagtcccagtgtttcctgagcgaccgcgcaaacaatcgaaagggacaggaccagtacatgacgaaccttgctctaaagatcaacggcaagcttgggggcagcaacgttcagctgtttgactcgctcccacgggtcggtggtggggtacctttcatgttcatcggtgctgacgttaaccacccgtcccccggtaacgtggagagcccatcgatcgcagccgtggtcgcctctgtcaactctggtgtcaacaagtatgtgaccagaatccgtgcccagccgcaccgctgcgaggtgatccagcagcttggtgagatctgcctggagctcattggagtctttgagaagcagaaccgcgtgaagccgcagaagatcatctacttccgtgatggcgtgagcgacgggcagttcgatatggtcctgaacgaggagctggctgacctggagaaggcgatcaaggtgaatggctatgcgccaaccatcaccgtggtcgtggccaagaagcggcaccacactcgcctgttccccagggacgaacagcagccgcagacgaagaacgggaacgtgcctcccggcacggtggtggacacgggcgtggtggacccgtccgcgtacgacttctacctgtgcagccacaccgggattctgggcacgagcaggccgacgcactactacagcctggtggacgagcacggcttccggtccgacgacctgcagaagctgatctacaacctctgcttcgtgttcgcgcggtgcaccaagcccgtgtcgctggcgacgcccgtctactacgccgacctcgcggcgtaccgtggcaggctctactacgaggcggccatgatgccgtcccactcctccgctgggacttttggcgtcactaacttcccgaggctgcacaaggatgtggagaacaacatgttcttcatctgacaccagtattttcttttgtgtgtacgcgtcttgccttttcttttgtgtggttatcagtttttaaaaaaaacttcaagtacactgcagtgtgcaaagttcgtactggatatacactgcatgactgtagatgaaggaaaagaagcaggtttgagttgtg

SEQ ID NO: 19112 - DNA, 829 bp, Zea mays
  Clone ID: MRT4577_117432C.1
gaactaagccacctgatagtccttagtttagggcttaacagaggatgtcgctagcattatagtttttcaaagccaaacaatgtgtttagttggaaataggttttctaaaaccaaaactttattttaaaatacacatgtgatcgtattatacttaatccagctccgataccagctgtggcagaacctcccaagttattgggcccacatgcacctgcgcttgtcccaaagacctcatacggctatgcatgtgcaccagataacttaataggatctattcgagtgtcccaaggaccccgaataaaccacttataacaagaaggccgagcccaccggcgcttaacaccatcaacagcaccacaaaactataacctgaataacactaggttagtgtttgttaggcgatgtccacttgacgatcatcttttatgtttgcactcgttcaaattatccatcttctggttcgtccatcagcatcaacctgcggattagcccgcgcttgggttcgacttgggtcgtcttccgtgtcacgtgattaattaacgtacccttattaaatccgacttgaaacaacgaaatcgacgactcctttcagctcagcatttcaccggaaatagggtgagtgctgtgtcgaatcacgcttcatctttatccgcatcgagtatcctccggtcgcgtactaatttattttcttctgcgcctaatcttctcggatcttggcgtggacgaagatgacgatcgacgacttgttcgagctttctgtcgagcacttgggacatcgaccaggggcttgcttctccacatcttcttgggattcttttggtcgcgcgag

SEQ ID NO: 19113 - DNA, 281 bp, Zea mays
  Clone ID: MRT4577_117433C.1
ttgttaggcggttcgactcgcctacctccggggtaaacctttcccccttatacaattccttccgccggccgccgctccacccgtacgacgacaccatgagggagtgcatttcgatccacatcggccaggccggtgatccaggtcggaaacgcgagctgagagcagtactgccttgagcatggcattcatgctgacggtcagatgcgcggtgacaagaccattgttgaagatgaacctaaaggctaaggctaatgaggctgaggagaggaagggccccacgg

SEQ ID NO: 19114 - DNA, 252 bp, Zea mays
  Clone ID: MRT4577_117434C.1
cgctggaacaccaatggggcttctccgtcttgccctgaggatgaagcatgtatatatttatttctatatctatgaccacactgtgtacgacgtgtaatgcatgccctgatcctagcgcgaaatctttcccacgatttatagggtttttgattgacagacctgatgtaaagcgtctccgaagacatacaggcacatcctaaaacttggacagattgaacgctgcaccactgacgactggattctagacatcac

SEQ ID NO: 19115 - DNA, 805 bp, Zea mays
  Clone ID: MRT4577_117435C.1
attccgccacgcagcgcctcggtaccatcgtgctcctgctcgtagcttcgtgtcccgtcccacccccggcggcccgcaggatccgtccggctgcggtgatttgatttgatttgtgatttcggttcgtgcggcggcgatggggatgctgtcgcggccggaggaggtgccggcgctgctcaggctcaagctggcggcggggcggatcaggcgccagatcccgccgcaggagcactgggccttcgcctacgacatgctgcagcgggtctcccgcagcttcgcgctcgtcatccagcagctaggccccgagctccgcaatgccgtctgcgtcttctacctcgtgctccgggccctggacaccgtcgaggacgacaccgccatccctaacgaggtcaagctacccatccttcgggacttctaccgccacatctacaacccggactggctcttttcatgtggagcaaacgactacagagtgctcatggataattttaggcaagtctccacggctttcctggagctaggcgaaggataccaaaaggctattgaagaaatcactaggcgaatgggagaaggaatggctaaatttatatgcacggaggttgaaaccattgatgactatgatgagtactgccactatgtagcagggctagtaggctatggactttctaggctctttcatgctactggcacagaagatctggctccggatcatctttcaaattcaatgggtttatttctacagaaaaccaatataataagggattatttggaggacataaatgagataccaaggtgccgtatgttc

SEQ ID NO: 19116 - DNA, 520 bp, Zea mays
  Clone ID: MRT4577_117436C.1
agcgtccgtctcacgctcgcgtatccatgcgcatggtcatgcacaacgtccagtaccacatccagtacgtcatgggttccggcaacggatgaacacccggacctagagcttggacgtcaccagcttgcacacagagctcgaaggaccgctcgaacggcaacaccgaccggatcaccaggcggctcggcgacgagcacctggaccacgccttggggaccatctgcggcacacaagaaccgggacgagaaggggtacgagagcatcgacgagcacatggtgcagctggacctggagggggacccgctcggcgccgcgctcatcatgcgcaagatgatcaccatgcccatcaacatgatgcaccaccgcatgcacaaggacctgtacaagcacttggtcgaggacttccacggcctcggccagtacatcggccgggactacgccgacatctacgagtacattgtcaagcggcttaagctgcagacactgcagagcacactgtacagcgaggtctgcagggaca

SEQ ID NO: 19117 - DNA, 329 bp, Zea mays
  Clone ID: MRT4577_117437C.1
actttctaagttgttttttttttcttccgcggtacacggaaaaaatcaacctcatctcctcaattgggagaacagctttccctacatctatccactaaaccacagccaggcatttgtgagccttaccctgcgctgttggcttttccctattcatcctaccacaccaggggcttgtatgtcgcgtcttgcaccacccccccctcctcggggacgacaacttttttttcccgccttctacgaacgaaccccaggctccccttgtggagactgacctccccgcaaaactcgaggagaaccaccccctggcggttgctctggtcccggtggtc

SEQ ID NO: 19118 - DNA, 346 bp, Zea mays
  Clone ID: MRT4577_117438C.1
gcgatgtggccctcctcccatgaacaaagccatggctgcacacctggacgatctcggttacacgaaggagatgcagttccagttctaagcattctctctaccaataccaaaataagcggcgatgggacaggtttctttgcctctttgagactttgagtagacgaagcctgatcctgtcgccatatagctccaaacagacgaagtatgccgttcagagcatcgtacctggatgaaagcaggagtaccgcgagtacctacctaatctgtattggtgtcgggacattattgtaccatgccatttttcgtgtcgtcgcaatcgctgctccaatgaagacatgttattttt

SEQ ID NO: 19119 - DNA, 246 bp, Zea mays
  Clone ID: MRT4577_117439C.1
gctcttgcgcttgcgcggaagcgggcgcacagggtgtttttttgagaagaatgcgggctccaccgagtacaagaagctgggaggtatagcaaggggtaaaggggtggagacggaaacgcccccttgtgagaatatgagggataaaaggactgcaagaaggaacaaaaagagtatggagggcatgatctcttggcggcgggtaaatagcacaggctacaaaggggtgggtgagcagagcaaacctga

SEQ ID NO: 19120 - DNA, 442 bp, Zea mays
  Clone ID: MRT4577_11743C.1
gctgtcgccatagcctctgacagaaactgcacggtcctcagatacatcccaaagaaccaacaaccctctctcatatgcaattagcaaccttgtcccaaaagtgtcaggctggatcagtattccaacaataggttgaggatcctgtaacgaaacaccagatctttcgattagagaatggatatgaacattgtatggcattatttgaagcttcccatcatctacatcatacttcaatacagaaagaaggccattctcatctccaagatacatcataaaggtcctctctatgactgcaaaagcagtaatgttgacatcccactgtgacgaataaaatagttgcctgaactcaagattccatacctggatttcattttcattggaaattgcaaccagaagtccctggtttgtaataaactgcaaaaacttgtcggcacactcttcg

SEQ ID NO: 19121 - DNA, 343 bp, Zea mays
  Clone ID: MRT4577_117440C.1
acccacgcgttcgtggacgcgtgggctcgggtgacttaaacgcttttcagttgaaattggagccgaggatatattgtgtaataagatggggggggccaacttaatataaaagagcttaacgaagtgtatattggagcccaaggggtacagggaggggggggaagcacctgggtgtgtctatttcaggcctacgggtctgttcatttgaggacatggcgggaatgatacatgacatcaaactggggcgccacctaacgtgagcctgccgaggggcatacctagttccctacaggtaatatatatccacggctggctgatctttggctgggccccagaaagacga

SEQ ID NO: 19122 - DNA, 525 bp, Zea mays
  unsure (1)..(525): unsure at all n locations
  Clone ID: MRT4577_117441C.1
cgcggccnnnnnnnnnnnnnnnnnnnnnnnnnnnnnnnnnnnnnnnnnnnnnnnnnnnnnnnnnnnnnnnnnnnnnnncaggactgcttaacaccttcaactctgtgcttgccagttgccacctatataaacagttgcacccagcacttgctcaccaccacggggagtaatggcaacgcggcaacgccgattgcccatatatatgatggcattatcctttgatgannnnngcgnnnnnatacttgtacctgacggccaagaacaggaagaagaggtagttgatgctgctgagcacgcacatgacccagtagaacctctcgaggcggtagtggttcaggctggcgccctgcagccnnnnnnnnnnnnnnnnnnnnnnnnnnnnnnngttcacgacggacaccagcaccgagctgaggtaataccccagcgccagcgacgcccacgacagcgacgtcgccagcgacctcatccgcggcggcgcctcgctgaagnnnnnctcgagcagccccgccagcgtaacaggtg

SEQ ID NO: 19123 - DNA, 145 bp, Zea mays
  Clone ID: MRT4577_117442C.1
ttttgtttgcgaacatatatggtccgctctcatagggtgatcgcaaaagccaaatgtggcgtacggccgccgtgactggcgaggcctaggcattggccgtgctcggcgcgtacgataaagggagcagccgaccccaacgtgccct

SEQ ID NO: 19124 - DNA, 480 bp, Zea mays
  Clone ID: MRT4577_117443C.1
attctatctgactgctatcgcccgatactgttcggtcgtggcgcagcgtaaagacctagatagcacggagcgatggctcgcctggacagcgcctccgcgatgggggcggcgtctcaccagcccgctggagcatttctgcattaaggaggatgtgacgggtaaccacgctagccgcacggcagctagaggatggggggctactacgacggcaaggctgactccggcgactcatgatggatggcgttactgatgtaccacggcccgctccgagttccgacaggtactccaccttatgcgccgtcagaggcgagacacccactctgaggaatggctcaaggatcacttacgggatccatgaccgcgagaaacatgggttatctcccccgtcgagatacatcatgttctgacggatcttgaagaatgacctaactgatggagtacgcatacgagctcatcgaggtcgtcaccatcaataggcag

SEQ ID NO: 19125 - DNA, 228 bp, Zea mays
  Clone ID: MRT4577_117444C.1
catctgctaataacatgcaaagaaaaaaaacagatgaagcgatctaaaatcttatactggaattctgcggggtcctcattcttgaacggagcaaaataaaaggaactaggaagaacatttttttaacaactcaaaactactccatgagatggggggaagggaccagatcttaactggaccttcccaagatagatcaacaagaaagcatgaaatgggaaaagcatggca

SEQ ID NO: 19126 - DNA, 367 bp, Zea mays
  Clone ID: MRT4577_117445C.1
gggatgttagagggggtccccctggtcgtagaccacgcagagaatttgtatggagctatggtttgcagattcagttggagaaaagagagagagatcagaggatcgcagaggcagggacttcgttcgacgcgactggggtcacgatgatgatgaggatttccagcagactaggcgtcatggcacccggagacatcgcagtctctctggctgggcgcgttcttcgcggtgtcgtggaggtccgggggattgcatcagttcgagcggcagaaacagaccttccactccattccgtcgtcgtggcttggtgattgggccaactgtgcgctggattccaaaggttaagaccaagtcggtctcttttgctgac

SEQ ID NO: 19127 - DNA, 250 bp, Zea mays
  unsure (1)..(250): unsure at all n locations
  Clone ID: MRT4577_117446C.1
atgcgaggagtcgaaacgcgagcaacgaaagatcgtgaactgagtgaggcctaggtagagaggtcatgatagagattgagagatgcggatgtaagagcgtgagtatctgagagttcttgagatgcacacaganctagaggagtgtcacagaagtcatcagatagcatgagtgactcatgcatggatgatgtgaatgtacagactgtcccatcagaagacgctgagtcgctcatgacaatggagcactgac

SEQ ID NO: 19128 - DNA, 523 bp, Zea mays
  Clone ID: MRT4577_117447C.1
gtcgtacgcgaagcataattttgcattgcattgctgctctcacgataccaactcgcgactgctatcgttctataagacgatccgtggccgtctagacaaaacctgtatatctcatgcgcgcataacacatgtcacattgatgccttggataagcaggccgaataactattactctatggcagtgggacactcctaccagtctacccatctgataggcagagctcctggtatattgacttttgttttgtgacgcatctccttcagtctactgatccttcgaagcagggtgcttaggtagacctgagccatagatccctatccccgacagaccaggcatgatctacaccttgcacctgtctgcgaggatctagacgatgtagctgtcatccctgtcggtggaacgaccatcctctgggagaccatggagaacagctcgaacatgcttggctttctgcccgagacacataagtggtcaggcatcgagaactatttcctcttcacgtccaagctaacgatcacggtt

SEQ ID NO: 19129 - DNA, 300 bp, Zea mays
  Clone ID: MRT4577_117448C.1
gcatcacccccgcaccaggagggggtagcagccaagcagcaacgtccccaacacgcccgtgtcttccccatgccgagtaggtcgcccctgcctcattgtccttcatgatgaggcaggcggtgaagagcctgctgctgttggggagcttcaagtcgtgtgccgtgaagagctacgagtcctccatctcgaagttgttcggggccactaaagtggtggccaggacaccgtcgcttccattggacgatgctatggtcctcgcattacaacctggtagcaatactcatcgttcacttacagaac

SEQ ID NO: 19130 - DNA, 678 bp, Zea mays
  unsure (1)..(678): unsure at all n locations
  Clone ID: MRT4577_117449C.1
gtaccctncccctcgaggccgggaaaaaaaaaaaaaaacagttcatccctctcgacgcgccgccgccgtctcgccgctgccacccagattgacggctccaattggcgcccatggcggaagaaaccaacataaaaaaggaggaagaggagttcagcaccggtcctctctcggtgctcatgatgagcgtcaagaataatacccaggttcttatcaactgccggaacaacaagaagttgcttggtcgcgtgcgagccttcgatcggcactgcaacatggttcttgagaacgttagggagatgtggaccgaggtaccgaagaccggtaaaggcaagaagaaggctctcccggtgaacaaggacaggttcataagcaagatgttcctccgtggggattcggtcatcattgtcctcaggaacccgaaatgagtagcctgtacacgtagagagtctatttgctagcagtacgttgtgctattgggtgtaaggtgtatgccaaatgctcaaagcatgggagtgtaagtcgcggcagaattcgccatgggattcagcttaagacaggatgctagggctgggttttgcttcttgtagcagacttgaacacgatgctcggcaatctcttgtacctcctcagctcggcaatctcttgtacctcctcggctcggcaatctcaaaagcggcc

SEQ ID NO: 19131 - DNA, 257 bp, Zea mays
  Clone ID: MRT4577_11744C.1
actcccagctgctccctcctcgccttcggcttatgtcctcctgctcgtccgctggggccgtgccgatcgatcacttggtgctcttcaaggcccaatcggaggcggtagcctcgatcaccgcggcggcgataacctcctcgctgcaagcactgaccacgctcgttcctcaactactctacatccactcatgaccgctgctccagatacagcacccggacgactaaacacttggcctcacactactactccacaccctc

SEQ ID NO: 19132 - DNA, 281 bp, Zea mays
  Clone ID: MRT4577_117450C.1
agaattcaagcaattgtacatgaacttcatgaattgggtttgctcaaggatcactctttggaggggcggtatttccagaattacagttatggaggtgtgattcaggatgaccatattccatttttaagaagaggtgttccagttctgcatctgataccgtctcctttccctgaagtctggcacaccatggatgacaatgaagaaaatttggatgaatcaaccattgacaatctacacgaaatcctacaagtctttgtgttggaatatcttcattgtaatac

SEQ ID NO: 19133 - DNA, 808 bp, Zea mays
  unsure (1)..(808): unsure at all n locations
  Clone ID: MRT4577_117451C.1
actcctaagggcgattggggccctcgaggccggccgggaaaaaaccctacagttcatccctctcgacgcgccgccgccgtctcgccgctgcccacccagattgacggctccaattggcgcccatggcggaagaaaccaacataaaaaaggaggaagaggagttcagcaccggtcctctctcggtgctcatgatgagcgtcaagaataatacccaggttcttatcaactgccggaacaacaagaagttgcttggtcgcgtgcgagccttcgatcggcactgcaacatggttcttgagaacgttcgtgagatgtggaccgaggtaccaaagaccggtaaaggcaagaagaaggctctcccggtgaacaaggacaggttcataagcaagatgttcctccgcggggattcggtcatcatcgtcctcaggaacccgaaatgagtaccctgtacacgtagagagtctgtttgctagcagtacgttgtgctattgggtgtaaggtgtatgccaaatgctcaaagcatgggagtgtaagtcgcggcagaattcgccatgtgtgttgatggtgggggattcagcttaaggcaggatgctagggctgggttttgcttcttgtagcagacttgaacatgatgctcggcaatctcttgtcccccgtcagctcggcaatctctccaaaaaaaaaaaaaaaaaagcggccaaaaaaaaaaaaaaaaaaaaaaaaaaaaaaaaaaaaaaaaaaaaaaaaaaaaaaaannaaaaaaaaaaaaaaaaaaaaanaaaaaaannncctctgcgttgttcccactgtt

SEQ ID NO: 19134 - DNA, 313 bp, Zea mays
  Clone ID: MRT4577_117452C.1
gggccagtaacctgtaactttcattaaaaacacaaggcaacgcaaagtaactccaaatggcaaaacatatatccaccacccgggggaaggcagacaagcttcatgaacaaaaggggacggggggtacaaacaaagggaaagcccggatagacacccgaaatgggaggtaataaacattaaatgccctcaagggcaaatcccaggttaagacccacccaacaggggaatggtagaacctttacatgctgaatccaagagggctttacaaagcataaaccagatggcttgcccgctgaaaacaacgggaggagct

SEQ ID NO: 19135 - DNA, 466 bp, Zea mays
  Clone ID: MRT4577_117453C.1
gctagaagcctgatattaccattgattacacgtgagaggtactgaccattcagtagatagcagtgagcatacccataggactgtagaacctataacccttgaaaggacaagcgctgcagcgctgctgctaaggagtgtaacatccctgaccctaggaagagcggtcgcacgcttgaagatgcataacatgatcatgaggcatgagagaatgggcatagatcatgtggatgctgaagccttgagcaagagcaacatagacctgatgctcaagaacaagctgtggaaaatagacactgacatatctctgcgtccgatgctatgcattaaacaaaatcctatgacttcgttggccgtgagattaagaagaccatgaacttacactacccttgctgacacacaaggaatctctgtggtccaacgataatgaaacagaggactgagcataaccttcagctgaagattgtgc

SEQ ID NO: 19136 - DNA, 357 bp, Zea mays
  Clone ID: MRT4577_117454C.1
accacgcgtccgaaaattataaaaagctatattctaagcatattgaaagggatggtgagttgtgattaaaaaaaaaaaagcagaaaaaaaaaaaaaaaaaaaaaaaaaaaaaaaaaaaaaaaaaaaaaaaaaaaaaaaaaaaaaaaaaaaaaaaaaaaaaaaaaaaaagggccgcccttttaaaagaaccaaacttaactacccctgcattccaacaaaaaacttttaaaaaagggaacccaaatttaatttaactgcccgcgttttaaaaacttagaaactggaaaacccttgccatacccaatttaaaccccttggcaaaaaatccccttttccaaacttggcaaaataccaaaa

SEQ ID NO: 19137 - DNA, 476 bp, Zea mays
  unsure (1)..(476): unsure at all n locations
  Clone ID: MRT4577_117455C.1
tttctggggggggggggttttttataaaattaaaacgggggtttattatgaccatgcatatattattgggcataccacacatgataatgtgtgtcgtcttactgcattattacatattattagataggagagagtattgttataaggaaaattttcttggggggtatgactgggggggtanncctnnaatggcancggaaactccacaagggtaggtgcggtagctgggcagctggtactggtagagtccacccatggccggcatgttctgcgccatcatcatggccatggggttgagaccctgggctgccagcagctgcttctgctgttggattagagctggtttgtacaggctggtgttgggggtagggggacgctcaagctggatcatcattttgaggatgctgcgcgacggagtggacttccatcatgctaatcttcttgtgggagtactgttgccggagcggttggaacat

SEQ ID NO: 19138 - DNA, 392 bp, Zea mays
  Clone ID: MRT4577_117456C.1
cgccatcaacgattacgttttcacagctgttatttctaacttccgagcctgtcccactcaggctgtttcttaaccaatcgtaatgacgtttgatcatgtcgtcacgaacgtctacgtgcaagcagatgctagtcgttgccgagattagtacaaacctataccgatacaatgcgatagcccctggcatcctcttttggcttcgggggggacaaccctaattgtggctcgacgttttgctcagccaaatgtagccaccaggaactccttgcaaatgctcatgaacttggccacgaaagcttccacatgaaaaatagccttttgatccaaggcgcatcttgtgctcgtagtgcgcggcccagcgacagatttcatatttcagatcagcatctaac

SEQ ID NO: 19139 - DNA, 696 bp, Zea mays
  Clone ID: MRT4577_117457C.1
gcccgcaaattttttttttttttttttgctgggaccaagtctcacacatattatgaatcatggcacatgatcgaatgtcacatctttactacataacaagagttctatacaaaataaatagttacattataaggagacaacggtccagcaacccaaagttgactgggagacgacgacctagacctctcacgaacacgccgcagcatcctccatacgcctcatcctgcggtacctgttcttgacctgggacttgagatttcaggtaccaacttgctcttcggatgacacgtgtcctcacatgaatcgcagcgtaatcgaagctggacgaggcggagcgtgggtctggcgggattcccatttccggccaagatccggccacccgcgccgagaacactgcatgcccaggagaatcaacgagccgatgcccagattagccagtcgcggctccgcccttacttcccacggcatgcgattgtcagcaactgggccgtgcacaccgaacgccagtggagcgaggaaccatggcggcacaccttttcctctgtaatagcggtccggcactcaacttcggatttcgtggtggtggcatgggtgcgaccggtggtcgggcgagccgcgagcggtatataggggagtggaggtagagggccgggacaccaaggtcccaacacgagcgcgcatggcggtcccggccgg

SEQ ID NO: 19140 - DNA, 864 bp, Zea mays
  unsure (1)..(864): unsure at all n locations
  Clone ID: MRT4577_117458C.1
cggagacaggaacttctgtgctgtttgagacgtaccgagctgctccacgccctcttggcaatgcagttgcatatcttaattctgctttcttggcacagagggaccagtttgcctctgacatcgcaacgatccttcttgctgctgggtcatcgatatgcatccaggcatcatcaaaaaggttgactgtcatgatggaggacttccttcagatgccaccttgcgatcacaagacactgctattaagcatttgcattcctcgttggactcctattggtggcctattttctggtgataaaaccatggctgggacagaaagtaagacaggaacttctgtgctgtttgagacgtaccgagctgttccacgccctcttggcaatgcagttgcatatcttaattctgctttcttggctcaggtctcttcagatggaacttcaagcagattaatattgagagagatatggctggcttttggtgcatatgggagccaacatgccatcagggctaggaatgttgagaaactgttagtgggtaaacctattactacatcggtgctacttgaagcatgtagacgtctcaaggaaacaattgttcctaaagaaggcacaaggcatgctgcttataggtcaagcttggcagttgcctttctgtttacttttctttacccagtaactgaaggaactttgaagactgtaaaggaagttcatcttaatggctatgcaacttttggcaccaatggaaatccaaattgtggacccgatgcacatgttgatgtttcacttaaaaaggtcattgatgtgaactccggttcatgtaccaatgaacgcattcttgaatattcaaatcngattattggaatcatnaaaa

SEQ ID NO: 19141 - DNA, 552 bp, Zea mays
  Clone ID: MRT4577_117459C.1
attttttaatattaaagtagtggatcaaatccttcttgtactagcctggttcattctaggtgacaccaggcgtatcggtattcctcgacctaatttaggtccaatggaactaaaacaattgtctggtaagaccccggtacttgacgttggcacgattgcaaagatcaaatccggagacataaaagtgtttccgggaatttaaagttttcaagaggatggtgtagagtttattgatggtagaatcgaatcattcgatgttgttatttttgcaactggttataaaagtaatgttccatattggttgaaggaaaatgaattttttttcacggaaagatggatttccatgtagaccaaatgagtggaaaggaaagaatggtctatatgctgctggattctcgagacgtggtctacttggtgtttctatggatgcaactaaaattgcaaatgatattatacaatcttataataacataatattgtaagaataaatgatattgattattttattaataaacttagcatcaaaagaaaaaaagatcctctatttttttt

SEQ ID NO: 19142 - DNA, 277 bp, Zea mays
  Clone ID: MRT4577_11745C.1
gaagaagacttcccctgaagaaagaactcgaaagaactaagaagaaaagactaacttaactttacccgccacctcaaaaaacacctttaacttactttcacaatgtcacacactgtcgatttgtactggcatccactttccccacctgctcgcgttgctgccgttcttcttgctgccaatggagtcaacgtgaactaccatgtcattgacctcctcaagggtgaacagaaggccgatagcttcaaggaagtctctgccaagcaacaagtccagcctt

SEQ ID NO: 19143 - DNA, 275 bp, Zea mays
  Clone ID: MRT4577_117460C.1
cacgcatacgattgcgatacgggtgcatgagacttaccgacacctacaactcaccattctgggacgatttcgaaagacggacgtcattctaatcaactcctatccatcctttacgatcactgttctacaacacttgcagatgcctacacaccttttcaccaacaaaaccctactgtagaaggagctgatccccctgccgagggaccctctgcaatttgccaccaaattcggtacaggacacgtctacactgccatgaccgtgtacaaaacgcccg

SEQ ID NO: 19144 - DNA, 133 bp, Zea mays
  Clone ID: MRT4577_117461C.1
tcgtccacgcgttcgccgacccctggggttaacgacaggcaatttaagggatctggtttcattggaacaatgggattccctgaacaagagttacatgtccagcattaaagtggttatccaggttaactaaaag

SEQ ID NO: 19145 - DNA, 233 bp, Zea mays
  Clone ID: MRT4577_117462C.1
tcgagccggtcaaacttttttttctttggtgctgcttctttttgtttggtgcccggccgtcggggccgtcccgtttggttttttgttgttgtttttgtggcggggggcgttggggtcctgggtttggcttgtcttgctccccgtgttgctttctctgtgtctgtctagatgcttcgattttcttttgcttacgttgtcctcgttggggttctttggtgccgttgtttccgttg

SEQ ID NO: 19146 - DNA, 736 bp, Zea mays
  Clone ID: MRT4577_117463C.1
ataaaagaaaagggtaaaatcggagttctccctcgtgtcgtcttcctctccgccgcttgtcctgtccaccctcgactgcttgcgcgtgacctgagccgccgccgcctacatccgctcaaccccgcgcccgcctcaaccacgccgccaccgaccacgcataatcctgcctccccttcgcgcggtttcgaggctcgtttcctttgggatcgttcgtctgccccgaccgcgtgggcgcttcttcttcgggatctcgctggaccgagcggcccagggctagggattcaggcccatggcgtggcggcgcgtcctcacccagattgcaaggcatcgaccagcaaaagcaatctacaatgaactagttgcttcctcccctttgggtgttcttcgaagtgacatcacttcaggtgccaggattagacatttacaagagaggaaccagtcaagttacattggtagccttgcacgccgggtccgagacttagaatcaccaagcggaacttctctgcttaaagagatttacagaagtgacccagagcgtgtcatacaaatatttgaaagccaaccttcattacattctaatcctgcagcactttcggagtatgtaaaagctcttgtaagggttgataggctggatgaaagtgccttgcttaaaacactgcagagaggtgttgcttcctcgacaaggggcgaagaaagctttagtagcattccagcattaattggtgctggtcaagta

SEQ ID NO: 19147 - DNA, 2831 bp, Zea mays
  Clone ID: MRT4577_117464C.1
aagcttggaattcggtcggaatttaaacgggaaaagtcggaatcccgaggatccacaggactcgagtcgtcttcctctccttcacttttcctgtacgccctcgaagcttcgactgcttgcccatgacctaagccgctgccgcctacaccctcacatcccgcgccctcctctatcgcgccgccaccgaccacccccaaatcctgcttccccaccgctcgcttccgttgggatcgtccgtcctcccagaccgcgtgggcgcttcttcttcggaatctccgtgggccgagtggcgctgggctagggattcgggcccatggcgtggcggcgcgtcctcacccagattgcaaggcatcgaccaacaaaagcaatctacaatgaactagttgcttcctcccctttgggcgcttttcaaagtgacatcactgcaggtgccagaattaaaaatttgcaagagaggaaccagtcaagttacatcggtagccttgcacgccgggtgcgagacctagaatcaccaagccaaacctctcttcttaaagagatttacagaagtgacccggagcgtgtcatacaaatatttgaaagccatccttcattacattctaatcccgcagcactttcggagtatgtaaaagctcttgtaagggttgataggctggacgagagtgccttgcttaaaacactgcagagaggtgttgtttccttgacaaggggggaagaaagctttagtagcattccagctttaattggtgctggtcaactgacaaaggatggagctcttggcactgcaaatgcacctattcacatggtcacagcagagacaggtcaatttaaggatcagctttggcgtaccttccgaagcattgcactaactttccttcttatttcgggcatcggtgctctcatcgaggatagaggaatcagcaaaggtcttggtctgaatgaagaggttcaaccaagcatagagtctactacaaaattcagtgatgtaaagggtgttgatgaagcaaaatctgaacttgaagaaatagttcattatcttcgagatcccaagcgcttcacacgtcttggtggaaaacttccgaaaggagtcttgcttgttggtcctcctggcactgggaaaaccatgctagctagggctattgctggtgaagctggtgttcctttcttctcttgcagtggaagcgagtttgaggaaatgtttgtgggtgttggagctcggagagtgcgagacctttttgctgcagcaaaaaaacgatctccttgcataatatttattgatgaaatagatgcaattggtgggagccggaatcctaaggatcaacagtatatgaagatgaccttgaaccagctgcttgtcgagttggatggttttaagcagaaccaggggataattgtcattgctgcaaccaactttcctgagtcactagataaagccctaatcagacctgggcgttttgaccgccatattgttgttcccaacccagatgttgaaggtcgacgtcaaattctagaatcccatatgtcaaagatcttgaaaggtgatgatgtggacttaatgatcattgctagaggaacaccgggattctctggtgcagaccttgctaacttggtaaatgttgctgctcttaaggctgccatggatggcgcaaaatctgtcacaatgaatgatcttgagtatgcaaaggaccgaatcatgatgggtagtgagcggaagtcggcagttatctctgatgaatgcaggaagctgacagcataccatgagggtgggcatgcccttgttgccatccacacagaaggagctcaccctgtccacaaggctaccatcgtacccaggggggtggccctaggaatggtggcccaactccctgacaaagaccagactagtgtgtcaaggaaacagatgctagcgaaactggatgtctgcatgggaggccgcgtggcagaagagcttatatttggggatactgaggtgacatccggtgcgtcgtcagacttccagcaagcaactgcaatggcaagagcgatggttaccaagtatggcatgagcaagcatgtcggccttgtctcttataactacgaggacgatggaaagagcgtgagctcagaaaccaggcttgtgattgagcaggaggtgaagaatttcctagagaacgcgtataataatgcgaagaccatccttacgaaacacaataaagagctacatgctctggccaacgcacttcttgagcacgagaccctcacaggagcccagataacgaacatattggcccaggtacgtaacaaacagcaacaagaacatactgtcgaagcaccacagagggccccagcttccccggcatcaccagctgcggcggcagcagctgcagccgccgcggcagcacagcaggcggcagccaaagctaagggagtggctggtatgggatcttagcacatggagcgccccaccggatgtatatttaaccaaacaagcaaagctgttccagcgattgacagttgatgaaggtcatcggatgtattgtatgctaaactgctgcagcaatagaacacactgattgcgtggaagttactcttccatgtgcctcgagtgcaaagcagagacaaaaaaactgtacgtgttgtagacttgtagctggtgcttgaatcagttttgtacccacatcgaaaacaattcctgttgtttacaccccgaaaaattgttagatttcgatctggctgccttgtgtaccctaacagagcgtaaattgtaacacatcctgaataaggccctgttccaatctcgtgagataaactttagcagctattttttagttacttttagccatttataatct

SEQ ID NO: 19148 - DNA, 766 bp, Zea mays
  Clone ID: MRT4577_117465C.1
ctcgaggctcttccgggtgagaggaataaaaccctaaaccatccgccgccatgccaacaataggcatacaaggtttgttttgtttgggaagaacacacctagcagtcatatgggtttctttacggcagatatcacaccgcagagattcgaagcaatctctggcatggtgcccctccgcgccacatttttgacagaaaaaacgacgaacaatttcattctcttttttttcaaaacgggcgggggggacttgagaatacctgattgaccgccatcacccgatgaagatgtcaagatatcttccttgttatctgatttttttaagagccggtttcaatctctagctgagattctgattctcccccacgtatgagagccttgggggacatccttctgcccccaatgaccccaactagggtttctgcctttcggatccatcctcggcacggcagcagcgcgacccggaaggggccgctcttcttccgccacgagaggacgaatcggggacgcaaagcaaccccctctgaagttggaatgaaccgtggacggaagagaccagagatgggagaggaacgacgcgaaatgtgggaaagaatgagctccaatgtgatctgaaggaaaccctagagttgtaccttgtttctccaccgatccgagcgacggcaggccccgacgatcgctatgggccgagccatgcgaaaccacccccgaggaccagccaatccaatttgagcgcggaggagacgcgacgccagccccgtgaggcgcg

SEQ ID NO: 19149 - DNA, 1690 bp, Zea mays
  Clone ID: MRT4577_117466C.1
cccacgcgtccgatttgttttaagcccagatgcctcaccaaaaatcctgagaatgtccatggtgatctcaaaatcagatgccacagggtggaggaagatcaccacatcatcagcataaagagatatacggttgtcatctgaatgttctgttagaggctccaacaatccatcatcagctgccttcttaattaacactatacatccataaccaagttgaacaacattggggagagatgatccccttgccatcgacaccttagttctttattgcctggtcgtctagatataacccttttagctctctgtcattgacaatgttaagaaagatgtgcaatttttgccaatatctggtcttgtgggaaccaatatgaaaaccaggatggataaaagcatttgtagttggtgggatggcccatgtctttttgaagttctggaccgtattgtagttcctttacgtgaccccaaaggttcagtaaggatgccgattattgataaatataaggatatgggcactgttgtaatgggcaaaatagagtctggcactatcagagagggtgacagtttgttggttatgccaaacaagtcccatgtgaaagtcattggtttgaacttggatgagagcaaagtacgtcgtgctggacctgctgagaatgttcgtgtcaaattgtccggagttgaggaggaggatgtaatggctggttttgtactttcaagtgtcgctaatcctgttggtgccgttagtgaattcattgctcagttgcagattttagagttgcttgacaatgctattttcactgccggctacaaagctgtgttgcatattcactctgttgtcgaagagtgtgagattgttgagctcatagaggaaattggcatgaagaaaaagaaagaagatccaaagaagaaaaagccaaagaggaagcctctttttgtgaagaacggtgcaattgttgtttgccgcattcaggtgaataacttgatatgcatagagaagttctctgatttccctcagcttggaaggtttacacttagaactgaaggaaagacggtagctgtaggcaaagttgttgatattccgcctgctggtagcccaacattctgagcttaagtcaattttgaacaggatggataatcatgaagcagtgcgttcgcttaagatacttttttttgggaagtgagattagttgttgaggttagattttttttcagtccatcttgagaatggtctatgcctttatggtttaggctagcaagtcttagattggttgcataaaattacatctctggttacatgtgaggttgtaaaatcagtatggaattatggatgagtgtaccaaccttaatgtacccgttcaagattatggtggtatctttgcgtacaatgctgtaactgtacagttgtgtgtgaagtcaaatgggcaggctgcattactcggatgtgcagcgtcgtgtcacacctggttttaagggtaaaaccgaatgcataacatatgtgtgctaggatctattttaacatatatgttgacatcatgagtgtaatatatctaaagaacaatgcataaaagcgtaaataaagattatattaacaaaaaaaaactccaacaataaattatagtgagacgtggacaccgatacacaggaagatgatcgggtcactagactagcatccatggagctcagcatcataact

SEQ ID NO: 19150 - DNA, 467 bp, Zea mays
  Clone ID: MRT4577_117467C.1
agcagtggtaacaacgcagagtactttttttttttttttttttttttttttttcttttttttttttttttttttttttttttttttttctttttttttttggacggaacacaagaggcttcttaattatacaaattctggccccccaaatcaagcaaggggggggggagagagaaacaaaaaaaagtcattttttacaagcgcggggcctaaatctggcaaaggaaaacccggggaaaaaaaagcagagcaacctcgatgtttttattgggaggaagaagaaaaaaagagagagagagagaggagcggaaccaccggcatttttacatgggtccgaacggcccaacactgggcaggggcattggccagttcagtactcccacagcaggggctcctcgatgagccggaacgcgcctccgccgaccacgttgttgtggacggcccacgacggggggggcccgcagcccc

SEQ ID NO: 19151 - DNA, 756 bp, Zea mays
  Clone ID: MRT4577_117468C.1
ggtgcaattgttgtttgccgcattcaggtgaataacttgatatgcatagagaagttctctgatttcccacagcttggaaggtttacacttagaactgaagggaagacggtagccgtaggcaaggttgttgatgttccgcctgctggcagcccaacattctgagcttaagccgattttgaacaggatggataagcatgaagcagtgcgttgtcttgagatacttttctttgggagaagtgagattagttgagcataggttttttccgagcccggcttgagaatggtctatgccttaatggtttaggcaacaagtctgtttagattggttccataatgttacatctctggttacatgtgaggtataatcagtatggatgagtgttccaaccttaatgcactgccaaattgtggtggcatttttgcgtacaatgctgtaactgtacagttgtgtgtgaagtcaaatgggcaggctgcattactcggatgtaaaaaaaaaaaaaaaaaaaaaaatggtgctcgaagtttccgctccgctcctgaaatcggtcgtaacttgtgctaaataggatgggtatcatttttgcatgtacggtttcccaagtttcgagtgacttgcagttcaaatctgaattttccgaagaaattcaaataaacgaactaaatctaatagttataaaaaacacttttacaattgtaccaaaatggtacttgtaggtctacatagtgtaggaacacaccataaaaaatttggttgcc

SEQ ID NO: 19152 - DNA, 237 bp, Zea mays
  Clone ID: MRT4577_117469C.1
ctcatcctaacctagtcactgtggacagtgaacatacagacctacatctacaagtgtaggtacagacagtacctgctatgagttacctagtctagcgctactgttctgcgtaatcttaatcgctgcctgcattaaacagcctgactatgccgaactctactacatgactgcagcagtgacagaatgtaactgatgcagtagctacggctaacacattggtcgctgccgttgtacata

SEQ ID NO: 19153 - DNA, 701 bp, Zea mays
  Clone ID: MRT4577_11746C.1
ttttttttttttttttttttttttttgttttaacatatgggctctagtaggcaaggcctgtaaataacagtatatttatgatgatggtggtgtcatggtgtagtagcaatgtggacacgcgacttacatactacgtattacaacaacatcctttagtcatcatgcatatccttattatataacacgttggattggttcggtggctagttaaataaataaatgcggggttaataattaagatgactacagatatatatataatgatgggctagctatagcaagctagctagacgttcccggtgacggggcagccggtggcgcagaccatggcgtcgttggtgcacttgaggaggcagacgggcagctccacggggtccaggtcgaccagcggctggtagcagtccagcatgcaggaggtgaccccagacccgcagctggtcacgcactgtgtcagccccgccagaggggtcgaccggcggccatctcggccgccgccgctgtggcggtgccagctctggccgcggtggcgctggtggtggccgtcgtcacggtggtctgcgctcgccaccgtcgccgcggccaccagcgccagcagaagcatcgtcgccgcgacgactgccttcatggtgtacgagtacgatcgacgttcttcggagacgacgaaggtgcagtgcagatcgggagatgcgcgctagctgcgt

SEQ ID NO: 19154 - DNA, 658 bp, Zea mays
  unsure (1)..(658): unsure at all n locations
  Clone ID: MRT4577_117470C.1
ataccttaaagcaaaatgaaaacaaaattcctattaaatctttgtaacatgtctgcaacttttttaatgtgtcgtttctgaattgtggtgtcttattctcatgtttgcaaatgctatgctatatgtaatatgtcattaatcatatgtagtcaggccccatgtaaaactacaaatgcgttttgctattttttattttttatttcaatttcatttatcagggaacaagctcaatcctgagatacattaaaggtccaagttctgctgcagctctgactatacctgattctccaagttctgctgcagctctggctatacctgattcttcatttgtacctgaggatccatctcttgataatgatgtatttgtggagccaattcatgaagaagaatgccaaccatcaacctctgagaaagaagacgacaataatacacattctgcgtctgcattttcagctaaaaaatgccgagcaaatgaagaaaaaagaatatcaaagaaattgcctggagttcaggtcagctgctctttttcctttggtggataccatcaaactgantttttgtttgggtattctcaagctgttggtgaatggaagatcttattttccttttgntggctgnttgcttggtttccgtgcaacanagcagcaccaatgtctaa

SEQ ID NO: 19155 - DNA, 300 bp, Zea mays
  Clone ID: MRT4577_117471C.1
gaaacaaatttgtagtagctggttggataagttattagttacaagttacaaagtccaaatccttacaaaagggtcctgatagaacggggcgggggggtccccacaataaaatttaattccaaattcctacgggtcgtacaggggtttgttttcagcaaaagagccgagctccataagctggggacatgaaggggggggggaagggatcgacggccttgggtaggaacctagtagcaggcccatagcaagggccctgtttgcagattctgagggagggaagccatcccatgacccatactt

SEQ ID NO: 19156 - DNA, 170 bp, Zea mays
  unsure (1)..(170): unsure at all n locations
  Clone ID: MRT4577_117472C.1
cgcagataatccttaagcaaacaaacagggtagaggtagagggagaggttttgttgttgagattagagnacaggttnnntctggaacaccatggctcctatcaagctgtactgagcgtacttgactatgaacgtctccagttgctcacctgcgctggaggtggctgactc

SEQ ID NO: 19157 - DNA, 473 bp, Zea mays
  Clone ID: MRT4577_117473C.1
aaaaaaagccccccatttttgggagggggaacccgggccgggaaaaacaaccatggccaaggggaacaacaggcccagaggggcaaaaaacaaccaacacccacccataaacccgggggttggcaaacatggccagggggagggagtggaaaaaaaacccgggccaaatttaaggcccccgggttaaaactaaataaaacacccctaacggggcccaacagcggcggttgggcatgggaccggtttaaaaggtggcttttaaccattttccacttcccccctttttttgggagaaggggccaaaagctaaaaaaattgggcgctcttccccaaaaaatccaaatctgggcctttgggaagggacaacccttggattcggcgttaattcaaacaggaggggcccaaatttttttttaaaaaaaaaacccatggttcttaaaaatttcggccacggccacaacgggggctagggc

SEQ ID NO: 19158 - DNA, 465 bp, Zea mays
  Clone ID: MRT4577_117474C.1
agccggccgggaatacatatgcttatctacggccgctgtcagaaccgagtatcgagacctccgccgcctattctccgctccctcgcattcgcactcgcacctccggctggtattctgcagaaataggaagattgattttcttcctgtgtcgcaccatcaagaaggacaagaaggttcagtccaatcaagcctagaagacagctgaatcggccgcgtcgtgcaaccctgcgactgcctctggtgccgctagggactctcaaccgggtgcatacacactggaagatggctagtagctgagggattgatcctcaggattacaattatccccgatgatttggcattggctgcacttgctcgagttctgacgcagagcgtggtcaacttcggactcgtccgttcagaggcccctcataccttcgatgatgttgctgcaacgcagaatgataaagcttcatggaactatat

SEQ ID NO: 19159 - DNA, 334 bp, Zea mays
  unsure (1)..(334): unsure at all n locations
  Clone ID: MRT4577_117475C.1
gccggccggtttcaanacgcgccgcgggcgcgcagcggtctcacacncncccncacccgcggnngaggagggaggacgactggggagaaggncgccgccgccgacccacaccaggcgcccaggacggaaggcggcccggcgccagagaggnaacgggaacggcgccggcgacgaacacccaccagcggccgaggcaaggcaggcagaagaccaacagccccactggaggcaaaagcaacacaatcacacnaaagganaggacgagacatnccagagcaggggcccggggnacccatcccaccagctaagcaatggcttggatgacgcgggccga

SEQ ID NO: 19160 - DNA, 838 bp, Zea mays
  Clone ID: MRT4577_117476C.1
gcaggcgcagcgcaggcagcatccacagcctgaatccaccacaccagcaccacccagcaccgatggccggcgacgacggacgtgctccctccggcctccgcgtcgtgatgttccccttcccgttctggagccacattaaccagatgctccagctcgggaagctcctccgtgcgcggggcctgggcgtcaccatgctccacaccgacttcaacgcgcccgaccccgcactccacccggacatcaccttcgtgtccatccgcgagtccctccccgccgaggtcgtcgccaaccccgacatggtagagcagatgatgcagctcaacgccgtctgcgaggcgccgttccaggcggccctcgccggggagctgctggcgcgcggtacaacaaccggtggcccgcgcgaggtcgcctgcgtggtggtcgacgggcagtggtacaagatgctgggcgcggccacgcgtgtcgctgtccccgcgctcgtgctgcgcgccgacggcgccgccacgtttctcagcatgctcgccaccccgcgcctccgcgccgacggctacctccccatcaaagaagagcggctggacgaggtggtgccgggcctggagcccctgcgcgtgcgggacctgatccgcgtggacggcagcgacgacgagacggtgctccgtttcatcacccgcaacgccgaggccgtgcaggcctcgtcgtcgggcgtggtgctgaacacgttcgagggcatcgagggcgcggcgctggccaagatccggcgcgagctgtccggccgcccggtcttcgccgtggggccgctgcacctggcgtcgccggaccccgcggcggcggcggccgc

SEQ ID NO: 19161 - DNA, 316 bp, Zea mays
  Clone ID: MRT4577_117477C.1
gtgtcggcggcggtggcgacggcgacgggaggggagatcaatccaaagatggcgatttctccgtgttcttctgagctatttattttcttttgatttgtttttttcttttcttgtttttaaaaacaatagctactagtggtagtagatgtacatgttgtgtatggagtattatttgttctcctcaaggatgatgtgatttagcagctgatattagggagtgagtacggcgcaatgatggccggtggagtacatacataaattataaagagattctcctgttcgatggggtaaaaagctaaagccattatagtttgta

SEQ ID NO: 19162 - DNA, 1332 bp, Zea mays
  Clone ID: MRT4577_117478C.1
cccacgcgtccgtccacgcgtccgcccacgcgttcgcccacgcgtacggctgaaggtgcgcaatccttttatgatgggcagagatctgatacaatggttggtctacaaaagcagtccatcaaggagtctaggtagcaacctaatactgaacgaactgaaactatatacgataattataatctttctcggacattagaaggtcttgaacaaagtgtacatgaagacattattgtgctatccaaggaactacacgaggctgaggatgctgaaaattctagacacatggagcccacgcgtccgcccacgcgtccgcccacgcgtccgctattaacacttagagctcggcaagcgaactatagagatgagttcctgcgcaaggaatctctagcacgccagcagcaataccagcacgccagcatgagccattatgccagcaattccacggctggggagcagcatggttataacccaacggcagcaggcacgcctcctgttgctgctggaggtgcttatggtgaggctcatcggggttatgcttctggccagtatgaatcatttagcgatcgtccagattatccagagttccatgatgggggcagaggtcgtggtcgtagttctgagcagcgtgctcaataccctggtggtcgtgcttataattccggtggccggcgattctagatatgctttgaactttgaaggacgatctatcactctgtcaagcgagctcatatcacctgatgtcagtgtgctgcaccgtgctatactcgaccgagaaacctaagcgctcataaaacttgttctacaattcaggtgcatcgaactactttatggttttgctagagttcattctggttataattgtagaggaacgaaacgatgagagaacactgacttttccgtttctctgcaattcatgtaatatgatctcggaagcaataacatttcatcttctataaaaaaaaaaaaaaaaaaaaaaaaaaaaaaaaaaaaaaaaaaaaaaaaaaaattcaatcccctggggggcgtgcttataattccgggggccggggattctagatatgctttgaactttgaaggacgatctatcactttgtaaagcgagctcatatcacctgatgtcagggtgctgcaccgggctatactcgaccgagaaacctaagcgctcataaaacttgttctacaattcaggtgcatcgaactactttatggttttgctagagttcattctggttataattgcagaggaacgaaacgatgagagaacactgacttttccgtttctttgcaattcatgtaatatgatctcggaagcaataacatttcatcttctat

SEQ ID NO: 19163 - DNA, 1768 bp, Zea mays
  Clone ID: MRT4577_117479C.1
acgctggcgcagcgcaggcagcatccacagcctgaatccaccacaccagcaccacccagcaccgatggccggcgacgacggacgtgctccctccggcctccgcgtcgtgatgttccccttcccgttctggagccacattaaccagatgctccagctcgggaagctcctccgtgcgcggggcctgggcgtcaccatgctccacaccgacttcaacgcgcccgacgccgccggacatcctttcacccttcagcccgcgtgccctctgtttctctcccggttcttcccctctcctgcgacgacagggttgggtaacgccgctcgccgccgccgccgccgccatacgcaggtgccgaggccttcgtcgatctcttagccgtcgacaagcacccaagagatgcaggatagaatgagacggcaggggcaatatggtgaagcggatattaactccatggttgctgcccagttgcatcactaccaggcacagcaaagggtacagaaacaccctgagaatagctacactggaagagatcctgcacaagcttctgcggagcatcagtacactccccctaaggcaagacagagtcaatgggatcgaggtggaccaaatgcgccaagccaggttccatcatatgcatataacgaagcccaaggtgctggaggtgcgcaatccttttatgatgggcagagatctgatacaaaggttggtctagaaaagcagcccagcaaggagtctagggagcaacctcgtactgaacgaactgaaacaagatacgagaattataatcttcctcggacattcgaaggtcttgaacaaagtttccatgaagacattattttgctatccaaggaactacaggaggcagaggatgctgaaaattctagacacatggagagattgaaggatataaatacacagtaccaggagaaactattagcacttagagctcggcaagcgaactatagagatgagttcctgcgcaaggaatctctagcacgccagcagcaataccagcacgccagcatgagccattacgccagcaattccacggctggggagcagcatggttataacccaacggcagcaggcacgcctcctgttgctgctggaggtgcttatggtgaggctcatcggggttatgcttctggccagtatgaatcatttagcgatcgtccagattatccagagttccatgatgggggcagaggtcgtggtcgtagttctgagcagcgtgctcaataccctggtggtcgtgcttataattccggtggccggcgattctagatatgctttgaactttgaaggacgatctatcactctgtcaagcgagctcatatcacctgatgtcagtgtgctgtaccgtgctatactcgaccgagaaacctaagcgctcataaaacttgttctacaattcaggtgcatcgaactactttatggttttgctagagttcattctggttataattgtagaggaacgaaacgatgagagaacactgacttttccgtttctctgcaattcatgtaatatgatctcggaagcaataacatttcatcttctatagcttcgagcatcagagagatggtcaaatgacactgatttgcattacatgtgattgtgaaacatttgcttttgaaaatgccaataaaaagaagcaaaaaaaaaaaaacccgcactccacccggacattaccttcgtgtccatccgcgagctccttccccgccgaggtcgtggccaaccccgacatggtagagcagatgatgcaacttaac

SEQ ID NO: 19164 - DNA, 307 bp, Zea mays
  Clone ID: MRT4577_11747C.1
tttttgggttgacccacgcgtccgggcacgcgtgcgcgtgaggcagaggatcctgatatgctcatttttgctatgggctgcatgccgaacccgactggggtgggggcctgtcatagggcacagagtccgcagtcctgcgctgctaggggtgtgtcttggtgggctctgaaagcactttctctgggagtatataggattgcgtatgaacttacacacatagacggagtgaggtagatgaataggtcaatgactgtacatgattactttaagatgtgctctgaactcccgatgtaggctgtgtatgaaa

SEQ ID NO: 19165 - DNA, 393 bp, Zea mays
  Clone ID: MRT4577_117480C.1
aagaggaggttattatcccaaatggtgaaggtgttaatgtagagasgtttttggggtggagagcccgatttgaasktgagttgcccttccmcsgtsstaaaattatcccagatccaggytttaaacccttaaaggaaaagaaaattmmaggccggcagtattttgaaagtggraggcatscagtgaaaggrgraagraaagttsytgatgaagatgaagaagaggaggaggatattgaatyygatgatgattttgaagmagatgaagaggaaatgkttgagbattatttwggyyaaaaattagagraayyascaggttaccyttttagcccaaaaaaagtccytttttggggccasbtttcccttaggaacccaaatgtggttatatgttcca

SEQ ID NO: 19166 - DNA, 777 bp, Zea mays
  Clone ID: MRT4577_117481C.1
ctcgaggccggccgggccgggcctccgcgtcgtcccttccctcccggcttccagggtccaggcctcccgcctccctgcacagcacagcacagcacagcaccccgcatctctccccttcctcaccaaccccgccgcctccgacgttcacctcggcggccgccaccggcgaggccgcacctcgccggtcacccacccccgctactcgatattatatcctactccgaggatccgcgtagccgcctccggctgcccacccgcggaactctagatctccgataccccgcgctccctcccgccgacggccacccgaccggaatgggccgctgtcttcagtaaggtctaaggacccaagggaaccctcctccgccttcgctcgtgcgcgaagcgcggccgcgatggcgatccgcattacggtgtcctactcgggctacgtggcgcagaacctggccgcgtccttcggcctccgctgcaccgtggctgcgggcgcaagcgcggcgctcggaccggggtgccgcttcctccaggacgcgctatctcaccccttctgcctcttcgcttcctcccgccgcgccgacccccaccatgacgccgaggatcacaaccacccgaagcccaggtccaaggctctagcccccgccgccgcagcaagaggaggcggccactcattgctgctgccgcggtcgtgttccgggaaggcggcgccgccggtggatgaccccccccgcctcgttggccgtggggctgctgtcggtgttcgcgtctgggatgggatcgact

SEQ ID NO: 19167 - DNA, 775 bp, Zea mays
  unsure (1)..(775): unsure at all n locations
  Clone ID: MRT4577_117482C.1
caaagaaattgcgcttgcgcagaaaactgaagagctgagagcaaggccgaaggttgaaagaattgaagagctgagagccgaagggacaagagcatcagaagttttaagtccttcggcaggagttgaagtgccaaaaacccagaaaggtctagcagtgacccccaaaagaaaaaggatggttaatgttctagatgtactggagacaataaagtcttcatgtgccactccgaagaaacctgtcgaagctccgaaaatgcaaattgaggcaaaaccatccgaagacgaagctgcaaagagccagaccgaagccaaggctgggccttcagagcccgccaaggagaaatccttggaaaccggagaagaaacgaaaaaagagactataaagcaaattctgcctggaaaaaactctctcttcagctcccgaagcatcttccagggaatctgattacattatgcgacatgcttcgggcaaaaggctatctgaagaggaaaagcgagaagctcatcattatgccccgaaattaaaatatccaaaaggnggcgttgatatttaacggcagtggagaggaagacttcttgtattgtctcccagaaacaaagagatctctgtctgccgggagataggaagaagcttcggtttcccgacgctagaagatgggctctcagtattatcanaagatgaatttgccgacagcttagcatacaatagcttnaaaggtgagaaaaatgaatttactgaaaagcaaaattttccattttcttatacttaataccg

SEQ ID NO: 19168 - DNA, 301 bp, Zea mays
  Clone ID: MRT4577_117483C.1
catggttccccctgtggttgccgcgggtggaggaagtatctctcagtcgtactgcggttgaagcatctgaactcttgagcggatcgcctgtgatggcactatggggcaaactacaactggagtgtgatatctacttgatatggtccagcgctcttgtgtgactgcacggtgctgaggttgccccggataagtaactgattatttccagtaacatctcaaagctccacaaaataaaagagcgaaaattcaaggggggccggttgaagaaccacgctacttacggcccgtgcaaagatatgta

SEQ ID NO: 19169 - DNA, 452 bp, Zea mays
  Clone ID: MRT4577_117484C.1
cggggggttgtttttattttttttttttttgttttgtttttttttttttttttttttttttttttttttttttttttttttttctgggtctggttttttgggggaaaaccccagccttgccaaagaaggggcctcgggccttaatccactggggggggggggcgcggatgaaaacctcttccctatggggcctttttggggtacccgaaccagaaccaagtcttgggggattggcttcaaatggaagggggctgtattgggcccgcgcttttggccctccccgggggtcaatatctgaagatgttcctttcagcggattgggggtaaatccaatggccccacctgggaatgcttggggggaccacctggttattttttgctggttgataaaactccggagggggctgcccccctttaattgggttgcgctcaaagggcgaacaacggacccc

SEQ ID NO: 19170 - DNA, 277 bp, Zea mays
  Clone ID: MRT4577_117485C.1
gtgaattctccagaagacaccatactcatccagtctgtactggaagctgtggaaggggtgaacaatgttgaatgggacacagttgagcagacaatagaagttgcatatgatcctgatatcactggtccaagattacttattcagtgcattcaggacactgcacagccccctaaatgctttaatgttaccttgcactcaccaccaaagcaaagagaagcagagcgcaatcatgaaattaggaattacaggaaccattttctttggagctgcctgtttc

SEQ ID NO: 19171 - DNA, 576 bp, Zea mays
  Clone ID: MRT4577_117486C.1
acgcgttcgttcataatcagaccaagcgagcacattatcatcgtcctatcatcagtggctcctaagatattgtgggtacttgcgctgcttcatcttatagggagcgcaacagatgcgtccattattgcacagtgctcagtctctccaagacagcgttatatcacagagaactggacgagtggctgcaatgggctctgatcaccgaagtgagcaagcatatgggctaccactggtagtggatgaaagcactgtacaacatccaatttgccagcagcaacatcaatcctaggcacatgtaacaatgcaaaccatctgagcgcatcagcaacaacaattgctaccactacttaaccaactactcatgcagaacgctgccacactacttgcaacagcgagttgcttgcattaaacccacttgctgctggctacataaatgcaaaccatgcacaacaacagctgcaacagggtctaccagcgctcagtcaactagccatggcgaaccctgccgcctacctacaacaggatcaactgctactatctatgccgctcgctgtggtcaatgcacactacatacct

SEQ ID NO: 19172 - DNA, 484 bp, Zea mays
  Clone ID: MRT4577_117487C.1
gtgggggggggggggttttttttttttttttttttttttttttttttttttttttttttttttttttttttttttagaaaaaaatattaccttgacagcttcatcaaaaatgtttaaagcaaggtcattttacaaggaacaaacattaggggggggggggcaaatttattcccttttttgccaacaaaaacagtccccaggacttgagataccaaacatagacaaataaacaaacaacttgccttgtcttccccctattataatgctccgggacaaaaactcttaaaaaaactattttttgccacccacctttgttcccagggccctttcaaacttgctaaaaatcttctgattggggattgccttgcctgattcatactcctgaaacacctggggcttctcatttataatctaaaaaaattgggcctggttaaattttttatcaaaccttgcttgaataaaatttttttttaaaacacttgga

SEQ ID NO: 19173 - DNA, 617 bp, Zea mays
  unsure (1)..(617): unsure at all n locations
  Clone ID: MRT4577_117488C.1
tnttattccgccatatatatgatggaccagtttttacataccgatattatgttctgaaatgtttcttctttgagattttttatatggatatatattgtgtgctaccactaccattgaaattaatctgctgctcccaatgaaaacatactaaataggctctcgtttttgtgagtgtcagacaatgacaaaaaactttttatctcaacaagttgggcacataaactaccaacaaaaggaagtataaaatgtaaaggcattaataactgtaatagtacaagcggatctaaaacctagctcctttgtttggagtttaatgtagattttgatctaattttctgtttggattgattatcactttgtattatctaattaatttccatattcatccatgttaagtactctaattcactgactcttgatttcttatcttctgaaaccacgttggttatcctgctcttgcaatgtgaaatttgctactgtcctgttaccctgattctattttaagctaggatgtgaattacaggttagggattgatgaggaacttgtggaactattggggcatcattcaccaatcccagtaacttatgctggggggtgtgtcaacaatggatgacct

SEQ ID NO: 19174 - DNA, 3090 bp, Zea mays
  Clone ID: MRT4577_117489C.1
ccggccgggtgttttcatacatagtatggtttgtttctgctttaatccatgagatgccatcaatgacaaactgcaatgaacatgggctatcatactaggtggcttgcaagttggaggtggaataaatttgcagaatgcaatgtcttaccttaatgaaggggccagtcatgtgatagtgacctcttatgtgcttagcgatggcaagatgaacattgaaaggctgacaaaacttgtcgagctggttgggaaacagaggcttgtgctggaccttagctgtcgaaaaaaggatggcagatatactattgtaactgacaggtggcagaagttcagtgatgtgtttgtggatgaaccggcattagaatatctcgctgccttcgcagatgagtttttggtccggtgttgatgtggagggcaaaaggtgcaactgtgttccttattatcaagtctttcttttattgataaaaaaaatcatattacaacattgacatgatcatgtgggacaaagttgctttgcaagttgtcatatcctattattccgacatatatatgatggaccagtttttacataccgatattatgttctgaaattgtttcttctttgagattttttatatggatatatattgtgtgctaccactaccattgaaattaatctgctgctcccaaatgaaaatcatactaaataggctctcgtttttgtgagtatcaacaatgacaaaaaaaactttttatctcaacaagttgggcacataaactaccaacaaaaggaagtataaaatgtaaaggcattaataactgtaatagtacaagcggatctaaaacctagctcctttgtttggagtttaatgtagattttgatctaattttctgtttggattgattatcactttgtattatctaattaatttccatattcatccatgttaagtactctaattcactgactcttgatttcttatcttctgaaaccacgttggttatcctgctcttgcaatgtgaaatttgctactgtcatgttaccctgattctattttaagctaggatgtgaattacgttgccaccgccatgccattgccgcaccagccagtccggccgggccgggagttaaagctcgcaacagccagccctactgaactctctcggacgggtgacaggctgacagccgccgcccgccagctttggagagccacggtgacaggccgccagcagccatcgacggccctccctccacctcgccgtcgtccctcttcccccatctcgccgagccatcgtccctccacagcaggaccacctcaccgagccgtcgtccctccacagcaggagtgcaggaccgcatcgccgagtcgtcgtctctccacaccaggttcgccgtcgcggcgcggctacctcgctccggctcccagctcgtccggtccagctcactcgcggtcgcgaccatctccgtccacctcatccctccggcaagcagttgctatactcatccagggtcagcagatcagcaactcttgccttatcctgctggctggccgcagcaccggtggtgtggtggaggatggcatcgaaatacgtggccagggtaccgtctccatggtgggcgccacaacgtcgtttggttggttcatgggtttccgtctgctcggtaaaatgcggggcattgggaggacgggctgttgtgtgcgctgctgttagcttcagaccatgcatcgacattcacaaggggaaagttaagcagattgttggttctactcttcgggattcatcaaatgatggcatggaacttgtgacaaactttgaatcagacaaatctcctgcagaatttgcaaaatcatataaagaagatgaacttcttggaggacatgttataatgcttggctcagatccttcaagccaggctgctgcactcgaggcactacatgcatatcctggtggcttgcaagttggaggtggaataaatttggagaatgcaatgtcttaccttaatgaaggggccagtcatgtgatagtgacctcttatgtgtttagtgatggcaagatgaacactgaaaggctaacaaaacttgtcgagctggttgggaaacagaggcttgtgctggaccttagctgtcgaaaaaaggatggcagatatactattgtaactgacaggtggcagaagttcagtgatgtgtttgtggatgaaccggcattagaatatctcgctgccttcgcagatgagtttttggttcatggtgttgatgtggagggcaaaaggttagggattgatgaggaacttgtggaactattggggcatcattcaccaatcccagtaacttatgctgggggtgtgtcaacaatggatgacctagagaggataaagaaggcaggcaaaagtcgagtagatgtaactgttgggagtgctctagatatatttggaggagatttaccctacaaagatgttgtcctttggcacaagaagcaaagtatggttggccaagtgtcaaggaacatgtggtagcgatcagtattgccagaatttattgtgtatcgctcgctaaaagcatatttattttcattacaaaacttcattgtgcgtttgaactgcttagtgccttgttatcagttcaatgtttatgttttacttgtgcaaatgttctaatagtccaatccatgctgttgcagtttaaaaaaaaaaaaaaaaaaaaaaaaaaaattcatttgattcgagcttcagcacaaagtatattttctgaacatttttgttcaaataattcagttaggctatctccaacagatcctctatctcatctcgtatttcaaactattttgcgtcccctattttacactacactggagacagtcttcagtgatgtaattcaaatctgaggagcatgacttgtttgggtttggacaccagggttggcgctaactcaaaaggtggtcaatttgtgagtaatgtactgttcttgacagtttctgacctcgatttgtctattgtaactgaataggctgaattgatgctgatagatacattttgcctgctacaacactgacattctgatttttaagttcctcgtttgagaaaataataatattgatgcaaattttggctccacc

SEQ ID NO: 19175 - DNA, 367 bp, Zea mays
  Clone ID: MRT4577_11748C.1
cggtttcttgggaaaaaaaataaacaaaaataggggcaaaatttggcatccggtggggtgggtccagaaggggccgccgacttttgggatgcaagataacatacgcagcgaggcgtaatcaaagtaccgtgcgcgggatgcctaatagtagtaccatgggctctggattttactaccgcagaccttgaaaatcgctgaatagccccattttagcagcttgggaaaaaaccaacatttccccacctgtcgcatttcccaacaggtccgcacccttaatgcttaacgggacgggccctgtatgaatgcataatgggccgcgcccgcatgcgacacattaagcgcgacggttggggtggtaacccccata

SEQ ID NO: 19176 - DNA, 539 bp, Zea mays
  Clone ID: MRT4577_117491C.1
ccggccggctcgagatctcgccccgtcgccatggacgcgatcgacagcgtggtggatcccctccgcgacttcgccaaggacagcgtccgcctcgtcaagcgctgccacaagcccgaccgcaaggagttcaccaaggtggcggcgcggacggcgatcgggttcgtcgtcatgggcttcgtcggcttcttcgttaagctcatcttcatccccatcaacaacatcatcgtcggttccggctagtagcagtagcggattatgtaagtcgttggtcccaactggttatgacttgtgaacccagttttgaatcccagcctcaagtcagtatcagtttataactcatcagagttatttatgtaggtttagtacaagttgcaaagttgttccttttgtctgagttgctgaggagagttggactctatcattcctcactactctacatatgggacctattatgctaaaacacgttgtcgaatttccaactcaaatactaccaaggcaaacataattgtaggaaaaaaaaaaaaaaaaaatttgcggcc

SEQ ID NO: 19177 - DNA, 509 bp, Zea mays
  unsure (1)..(509): unsure at all n locations
  Clone ID: MRT4577_117492C.1
ggccgcttttttttttttttttttgttattatgcaatatatagtagtgtttgctgaatggcgcgcttaatttgataactcagatacacagtccactcttcaggttagcagggagtacactgatctgtagatagctgcatcaattaatacacgatccacgatcgactaggctttggcattgaatatggtacaaaatgcggacacggagcgcggggcctatacataatatactagagtatgtcccatggcatgctcgttcttgaattatttcattttgcatcctgacgaccacaatgcatgtcatgtcgttcattattattcagcacgaagcatcacatgttgcgaattaatgtntgagcccgagtggcaactcttcatcgcccagagacgcggtacgcacttggcgaaggaggtctatctcagatggaacctgagcgtcctggcattgacctttgcgtgtcgcgagtcgagtctggctgaatcatcctgcactgaactcggctcctgatc

SEQ ID NO: 19178 - DNA, 565 bp, Zea mays
  Clone ID: MRT4577_117493C.1
cggccgcgctcggcggggcgttcagggacaacgtgcggtggctcctgaagcagtggagatgcgttccgggttccgtgtcggcgtggcgcgcgctgctgtcagacgagcggacgggcgccttagtccccgtcatcgccgtggaggagctcgcggcatcgtcgcccttgccgctctgcgatctctgtcgctgcgccggttggagccaccactgggtgtcaaagcggaagtaccatttcatcattccggcagtggtcgactgggaccggccattcagggctgatgggttgcttgggcacagcgagcacctcctacatggtctgatccatagtaatggctttggtcaccttctcaccctccgtggtcgtgttggtggctccactttcctctctggctgccagatcatggatatatgggatcaactttgcacagctctccgtgtaagagccgtctctgttgtggacttgacccagaagtactctgtggacctccgcctcctgcttggagtggcacaaagcaagacttggttcactcgctgggggtactgccttgccaagggttgtttcag

SEQ ID NO: 19179 - DNA, 486 bp, Zea mays
  unsure (1)..(486): unsure at all n locations
  Clone ID: MRT4577_117494C.1
tggactgaggccgtttttttttttttttggggggggccggggttgaaaaaagttaggcccgggcttgctgggaacattttgctgcttctgcggtgcccgctcagttaccagacccctgccttggtgtggtacagcttgagtgcttgctttgttcattgacccgctggtagccggtgcccnctttgttcatgcctacttcgaccgttctgacctgtggacgtaccgcggtgtgctcttgaccatcatttctacggtgcagatgtggcgcaccttgctgcgccgtgggcggcattacatcacttattgtggttcctactgtcttatgcgccataccttgaaggcgagaacgtgcaccgctgtttcagtgatgtggcaccctgtgctagagaaactagtcaagggcgctcaggctgggatcgaagaccattcgttgagaatgaaccacgcacatcgtcactcatctgatcgattgcggccacctcccat

SEQ ID NO: 19180 - DNA, 255 bp, Zea mays
  Clone ID: MRT4577_117495C.1
gtaccatcaatcatgatccatcttagtaatatcgggagcaaatcatatctggaacatgacagatctaactctaaaaaccatgaagctggatgcgtgttgtacgtgctaccattgctttagtaacaagtgatccgcgtacacagacaggcggctgcagccatggtcagcaatacagccatgagcagcaacatcatccagaataacatcatccacagaaacaacaacatctaccatcactagagcatggcatgcagc

SEQ ID NO: 19181 - DNA, 365 bp, Zea mays
  Clone ID: MRT4577_117496C.1
atctcttaattttttttttacgactttcccttcatggggacaaaacgagggccactttggggaacaaccaccccggacccccaaaaatatttttctctctgcgctcccaaagagatcttgtacagaccttcggaaactccaagttaactgacacacagggaaacaattgataagagctacccaggcaacaactccttatggcaagaccttaaacggctcaacaccggggggcccaagaaatgcttcaacccgagcgtactgcctgatgggccattctccactaacttgaccaaaaacccatccagccaccacaattaataaaactgacccaaccagatagaaaacgtaaaaagcaacaggcgccc

SEQ ID NO: 19182 - DNA, 186 bp, Zea mays
  unsure (1)..(186): unsure at all n locations
  Clone ID: MRT4577_117497C.1
ttagttagcgccaccaccggccggaagaagagttctacacgatgctgcgagtggcggntagaatgctctcgtcttccctctcctagtcgccacgccgcggcggtagccagtggttccaaagccttcgctggctttaattaaaatttgcgacctctccttagctaaagtgggtcttgatctattttt

SEQ ID NO: 19183 - DNA, 486 bp, Zea mays
  Clone ID: MRT4577_117498C.1
ccgcagctctaatttgctcataaaggccattggccgatgctaccgaatcaagatcaagaaggcattacggggcgtaaaagttgaggtcacgcaccgggggaatgtaaggcgcaagtatcgcatatctgggctcacaacacagccaactcatgaactgattttcccaattgatgaacaaatgaatatgaaatctgtcgtggagtacttcaaggaaatgtatggtttcaccattcagcatcctcatcttccttgccttcaggttggaaaccaaaagaaggcgaactatttaccaatggaggcctgcaagatcgttgaaggccagagatacacgaagaggttgaatgaaaaacagatcacatcgttgctaaaggttacatgccaaaggcctcgagaacaagagatggatattttacaaacagttcatcaaaattgatatgagcaagatccatatgcgaaggaattttgggatcaacattagtgagaagc

SEQ ID NO: 19184 - DNA, 346 bp, Zea mays
  Clone ID: MRT4577_117499C.1
tcgatcaaagcttgcgttcttgtactagaggtcggcagcaagcgctggtagagccaggggtggaaaagatgaagagcagcactctggtggcgatcctagttcttcaggcccttctggtctctgcggccgtggccaaaggacctgcttggtcgacgacgaaaaaacaatgctggtgcggtgagtgcaccagctggtcgggcgtgtggacctgcgactacctcctcaccaagtgcgccggcacctgcaagaactgcgttcccgttttcccgtgaccagggggcccctaatttcaggggcctcgtctttctccccgaaaactgcggctgcaagatccactaaagactca

SEQ ID NO: 19185 - DNA, 583 bp, Zea mays
  Clone ID: MRT4577_11749C.1
atgaatgtagcacgccttaatatgtcccatggtgaccaccagtcacacctagaggttatcaatttggtcaaggagtacaatgcacagaacactgatggaaatgttattgccatcatgctggacactaagggtcctgaagttagaagtggggatgttccagagccaattatgctcagaacagaatccagcatttataacccaactacttcccctagtgttatagcatctgcacagggtctacagaacgaggagttttccccaagccagctaagtaaaatgtttggatcccatgcaactatgatggccaacacccttcggacaccaatcattgtatttacgcagacaggctccatggctgtcctcctgagccactatcgtccctcgtctacaatatttgcgtttacaaacgaggaacgagtgaagctacggctagcactctaccagggggtcatccctattcacatggagttctctgacgacgcagaagaaactttctccagagcaattagcagcttgctgaaagcacaatatgtgaagaagggagactacgtcactcttgttcagagcggagtgacttcaatct

SEQ ID NO: 19186 - DNA, 113 bp, Zea mays
  Clone ID: MRT4577_1174C.1
acgcgtagcgacatccactccgcgtacgcactcggaatcggctcgagctcgttgctctgacgcatactgacattagatggatgggcactgcatgagagatgaggtcgctgaca

SEQ ID NO: 19187 - DNA, 517 bp, Zea mays
  Clone ID: MRT4577_117500C.1
cacccacccacccactcgcttcagccgcctccgccgcgcgtaccaagcaggtggagacaggatgccggctggccacggcctgcgctcgcggacgcgcgacctcttcgcgcgccccttccgcaagaagggctacatcccgctcaccacctacctccgcacctacaagatcggcgattacgtcgatgtcaaggtgaacggcgccgtccacaaggggatgccgcacaagttctaccacggccgcaccggtcgcgtctggaacgtcaccaagcgcgccatcggcgtcgaggtcaacaagcaggtagacaacgcggatccctttttttgtagaggcacttacgattagtgcgctggcgcatcttctgatcgtttcattctaggaaatgtaacgctttaatatagaatggcggctatttgctgacgtgttgtttgatttggatttatagaatttgtacaaacccaggtggcgttttgtttttgtagttgcaggagtggggaatctgagccatttctttgtatc

SEQ ID NO: 19188 - DNA, 475 bp, Zea mays
  Clone ID: MRT4577_117501C.1
agcgcacccaccccccacccactcgcttcagccgcctccgccgcgcgtacaagcaggtggagacaggatgccggatgtgcacgggctgcgctcgcggacgcgcgacctcttcgcgcgccccttccgcaagaagggctacatcccgctcaccacctacctccgcacctacaagagtcggcgattacgtcgcatgtcaaggtcgaacggcagccgaccacaatggggatgccgtacaagttctaccacggacgcaccggtcgcggctggaacgtcaccaagcgcggcatcagtggcgagggcaacgaggaggtcaatgggcgcatcatcaagaagagtatccatgtccgagaggagcatgagcagacgtcccgctgcacacaacagttccgcctgaggaaggcgaagaatgaccaggtgaaggcggatggcaaaaagcgcgtgtgaggttatcgaaaccaagagggaaccattgggt

SEQ ID NO: 19189 - DNA, 837 bp, Zea mays
  Clone ID: MRT4577_117502C.1
ccggccgggaaaccctagtgcttcccaccgatccatttcagccgccgccgcgcgtagcaagcaggagcagcaaggatgccggctggccacgggctgcgctcgcggacgcgcgacctgttcgcgcgccccttccgcgagaagggctacatcccgctcaccacctacctccgcacctacaagatcggcgactacgtcgacgtcaaggtgaacggcgccgtccacaaggggatgccgcacaagttttaccacggccgcaccggtcgcgtctggaacgtcaccaagcgcgccatcggcgtcgagataaacaagcaggtgaatggtcgcatcatcaggaagcgtatccatgtccgcgtggagcatgtgcagccgtcccgctgcacagaagagttccgcctgaggaaggtgaagaatgaccagctgaaggcggatgcaaaggagcggggcgaggtcatcagcaccaagaggcagccgttgggccccaagcctggcttcatggttgaggggactaccatcgagaccgtcactcccatcccgtacgatgtggtcaatgatcttaagggaggatactaggttgtttgtttggtctttctacctgttctacatctgtgttactctagtgcgtacaattttgctcacactgagcagtatgaacctattgtgcgttcatgttgaaagatttcccgttctgtgcaaacctgagtttagaagaatgctatgccttgatctttgcttctgacaacaaagatttgcctttttcaacctcatacggtgctaattatgtatttatgttgtttgaaccgtgaagtggaaattgggaaagtatgtcacactagtacg

SEQ ID NO: 19190 - DNA, 575 bp, Zea mays
  Clone ID: MRT4577_117503C.1
ctgtgcggcgctcgaggcggccgtccgggaaggaatcatcccgctgtgcgcttcgtttcgtggcggcgaacggccggtcgagcgccgccgcccttggctgggtcttcactcagtccttcgccggcgacgagcgtccacctggtgtctactgaactgagcagacagtagcaagagccactatgctgttcttctcctacttcaaggagctcgtggggaaggaggtgacggtggaactcaagaatgacctggcgatccgcgggacgctccactcggtagaccagtacctcaacatcaagctggaaaacacccgcgttgtcgaccaggacaagtatccccacatgtgaggtcacgagtcatccgaagatcatcctggtacctggaatctcaagtcccaggtcaagagcaggtaccgcaggatgaggcgcgtggaggatgctgtgacgagttcgtgagaggtctaggtcgtcgtctcccagtcaactttgggttgctggatcgtttcctcatatgatgtaattatttaattattttgtatagaactcctgttatatagtaaagatgtgacattcgatccg

SEQ ID NO: 19191 - DNA, 874 bp, Zea mays
  Clone ID: MRT4577_117504C.1
cattgggtaccctcgaggccggccggggcaaaccctagtgcttcccaccgatccacttcagccgccgccgcgcgtagcaagcaggagcagcaaggatgccggctggccacgggctgcgctcgcggacgcgcgacctgttcgcgcgccccttccgcaagaagggctacatcccgctcaccacctacctccgcacctacaagatcggcgactacgtcgacgtcaaggtgaacggcgccgtccacaaggggatgccgcacaagttctaccacggccgcaccggtcgcgtctggaacgtcaccaagcgcgccatcggcgtcgagataaacaagcaggtgaatggtcgcatcatcaggaagcgtatccatgtccgcgtggagcatgtgcagccgtcccgctgcacagaagagttccgcctgaggaaggtgaagaatgatcagctgaaggcggatgcaaaggagcgcggcgaggtcatcagcaccaagaggcagccgttgggtcccaagcctggcttcatggttgaggggactaccatcgagaccgtcactcccatcccgtacgatgtggtcaatgatcttaagggcggatactaggttgtttgtttggtctttctacctgttctacatctgtgttactctagtgcgtacaattttgctcacactgagcagtagtatgaacctattgtgtgttcatgttgaaaattttcccgttctgtgcaaacctgagtttagaagaacgctatgccttgatctttgcttctgagaacaaagatttgcatttttcaacctcgtacggtgccaattatgtatttatgttgtttgaaccgtgaagtggaaattggaaagtatgtcacactagtaaaaaaaaaaaaaaaaaa

SEQ ID NO: 19192 - DNA, 154 bp, Zea mays
  Clone ID: MRT4577_117505C.1
acaccgtgcggtggatctttaaaaaaaaaaaaaagggcggcgtctaaagatcagcttactttccgtcttgcgacctatagtcttctataggcacctaattcaattattggccgtccttacaacgttttgactgggaaaccctgtcgttcccaac

SEQ ID NO: 19193 - DNA, 861 bp, Zea mays
  Clone ID: MRT4577_117506C.1
ctcgagggcctggccgggaaaaaaaaaaaaaccctagtgcttcccaccgatccacttcagccgccgccgcgcgtagcaagcaggagcagcaaggatgccggctggccacgggctgcgctcgcggacgcgcgacctgttcgcgcgccccttccgcaagaagggctacatcccgctcaccacctacctccgcacctacaagatcggcgactacgtcgacgtcaaggtgaacggcgccgtccacaaggggatgccgcacaagttctaccacggccgcaccggtcgcgtctggaacgtcaccaagcgcgccatcggcgtcgagataaacaagcaggtgaatggtcgcatcatcaggaagcgtatccatgtccgcgtggagcatgtgcagccgtcccgctgcacagaagagttccgcctgaggaaggtgaagaatgaccagctgaaggcggatgcaaaggagcgcggcgaggtcatcagcaccaagaggcagccgttgggccccaagcctggcttcatggttgaggggactaccatcgagaccgtcactcccattccgtacgatgtggtcaatgatcttaagggcggatactaggttgttgtttggtctttctacctgttctacatctgtgttactctagtgcgtacaattttgctcacactgagcagtagtatgaacctattgtgtgttcatgttgaaatttttcccgttctgtgcaaacctgagtttagaagaacgctatgccttgatctttgcttctgagaacaaagatttgcctttttgcaacctcatacggtgcttataaaaaaaaaaaaaaaaaaaaaaaaaaaaaaaaaaaaaaaaaaaaaaaaaaaaaacacacaacc

SEQ ID NO: 19194 - DNA, 373 bp, Zea mays
  Clone ID: MRT4577_117507C.1
ttatttttgcttgaacatctcatatgtaagtatgacgacactcacgtaagaaatgggcttcatcagcccttaacggtggggattcaggtccagaaagaatccaggcttagctgctacggctgaccccatggctacacatgacaaaacactgtcttaactgatcaaagcggctggcgcttgtttccatatatctaagcaggctactactgcccggctgctgggcagatcactgggcgatgatgctcgcggctttagcacagggctaagcaccgatcccttatggctcgctggccattgcccacggctgctccaggattctctatcgaaccaggcagcgcattcatggcactatggctctgacctccatttggca

SEQ ID NO: 19195 - DNA, 807 bp, Zea mays
  unsure (1)..(807): unsure at all n locations
  Clone ID: MRT4577_117508C.1
aattcccgggtcgacccacgcgtgcggcttcccgcagatccatttcagccgccgccgcgcgtagcaagcaggagcagcaaggatgccggctggccacgggctgcgctcgcggacgcgcgacctgttcgcgcgccccttccgcaagaagggctacatcccgctcaccacctacctccgcacctacaagatcggcgactacgtcgacgtcaaggtgaacggcgccgtccacaaggggatgccgcacaagttctaccacggccgcaccggtcgcgtctggaacgtcaccaagcgcgccatcggcgtcgagataaacaagcaggtataccacacggatcccttttcgctagctcgctgatagtttgctgggcgcaggcagttgaaatcgtttgtgcacggcgcttacgtttagtgcgcggacgtatcttctgttcgtgccattctaggaattcgaatgtttagagtgacgacaatttgctggtgtgttgtttgatttggatctctgtagaatttgtggaagcccagggtgcgattagttttgtagcggcaggaatggacaatcataaccatttctttgtatgatctggtagtgatagatgctgtaattaggttgattctaatttcatgtatgattgggttcttggtactgcaccggtgtaatacgattctagcttaactanatgttcgaggtttcaatgggcctaactgtaagcaattttatttttaattgcttgacgcagaagtgcaaacatttatgaacaaccacaatctgaagtactcggatgctttatgcaattaaatctgcattct

SEQ ID NO: 19196 - DNA, 468 bp, Zea mays
  Clone ID: MRT4577_117509C.1
acctacgcgtacggcagattggttgcctgtgcagttcccttgtttgataaatactagtcatgctgttggaccaagggaaatgacttcacacttttttattgattctgatctgatgcatccttagtgtagcactttagaaggttcattaggctgtaatatttttgcatgcctcaagaaaatcacttttctatctagagaattaggtttaggtaaagacatttttttatcttcgaccatcatgtcaagaatagtggtattttagaaagcatgtcgtcaatatgttgataccatttttttttataaaaagtgatgtagcatgtcgtatatttgtaaaaaaaagaacatttgcataatactccctccattttttttatttgacgttttgcagttcatttgtacattagttggcgtcaaataaaaaaggatggaggtagtacaatatactacaattgaaactaatatcttgaa

SEQ ID NO: 19197 - DNA, 788 bp, Zea mays
  Clone ID: MRT4577_11750C.1
taggctattgcaaattctagaaggaagacaaagatagtatgcaccataggtccctcaaccaacactcgtgagatgatttggaagcttgcagagactggaatgaatgtagcacgccttaatatgtcccatggtgaccaccagtcacaccagaaggttattgatttggtcaaggagtacaatgcacagaacactgatggaaatgttattgccatcatgctggacactaagggtcctgaagttagaagtggggatgttcctgagccactatcgtccgtcgtctacactatttgcgtttacaaacgaggaacgagtgaagcaacggctggcactctaccagggggtcatccctattcacatgcagttctctgacgacgcagaagaaactttctccagagcaattagcagcttgctgaaagcacaatatgtgaagaagggagactacgtcactcttgttcagagcggagtgacttcaatctggagagaggaatccactcacaacatccaagtgaggagagctcaggtctgatgtgaatcggtcgccggagaagttttgatagcgccgctagaagtgttatcatcatcatcaccattatatgcgagtaattttaatgtttttaccaggagattgctacgtcgagttgtatgttgtgtcgaattcacgtgtagactctggacctttaactctgtattcgttcattttcacttgtttcacactggagtgctataagttcacgcttactgcctttgcttttgctttcttgtgaaacttgattttagtttgttgttac

SEQ ID NO: 19198 - DNA, 1153 bp, Zea mays
  unsure (1)..(1153): unsure at all n locations
  Clone ID: MRT4577_117510C.1
gagaaatcctctcctcatggatcctcttgtaatccctgatcaccaaacctgtcgcgctagcagtcggagtcaggattcaggccataaaaatatccaacttttgaagacagaagtgaaatagtaaatgggcttattttaggagttaacacaaacctgtcagtactaagcccactcaaaccagcccaacaccagaaccccgtcgagcctcaatccctcccaaggccccaatccattcccacgccacctataaaaagtcgtaagcacanccgaaaccacagcaaacctagacgccacccacccacccacccactcgcttcagccgcctccgccgcgcgtaccaagcaggtggagacaggatgccggctggccacggcctgcgctcgcggacgcgcgacctcttcgcgcgccccttccgcaagaagggctacatcccgctcaccacctacctccgcacctacaagatcggcgattacgtcgatgtcaaggtgaacggcgccgtccacaaggggatgccgcacaagttctaccacggccgcaccggtcgcgtctggaacgtcaccaagcgcgccatcggcgtcgaggtcaacaagcaggtcaatgggcgcatcatcaggaagcgtatccatgtccgtgtggagcatgtgcagccgtcccgctgcacagaagagttccgcctgaggaaggcgaagaatgaccagctgaaggcggatgccaaaaagcgcggcgaggttatcagcaccaagaggcagccattgggtcccaagcccgggcttcatggtcgagggcaccaccattgagaccgtaactcccatcccatatgatgtggtcaatgatctcaagggtggatactaggttgtttggtccatctacctgcagtacccagttctacatctgtgttactctagtgcgtgcaactttgctcactctgagcagtagtatgaacctgttgtctgttcctgttgaaagatttcccattttaggtgcaaacctgagtttctccgaacgcgttataccatgaccttgcttctgagaacgaagacgtgctatttttgcattttgttgtttggaccacacactggaaactgggaatgtgtctaaggccccctttggcagggcttatatcaaacaaaaaaaaaaaaaaaaatttgcggcc

SEQ ID NO: 19199 - DNA, 623 bp, Zea mays
  Clone ID: MRT4577_117511C.1
cctgctgccttttttcttatagacacaatgaacagaccacccacaaccttagttctctaagtcatcctgcctgctgccttatttcacagtacatacatttcttagggacacagtacactgaccacatcaccaccctcttcttccagtgctgcgtggaccatctggctgccttttttctccaaaagatgcaatattcagactgactgaccccctgccttatttcaccaaagacacgatgcatagtcaccccggccttgtttctccaatggccgtgatacactagtgatcatgttcagccctgcttccacctgcatagaatcttttcttctcagacagggacagtgcggcctcaacatctcctggagtctagaagctgtttcctttcccctccttcctcctcttgctctagccttaatactggccttttccctccctgccccaagtgaagacagggcactctgcgcccaccacatgcacagctgtgcatggagacctgcaggtgcacgtgctggaacacgtgtggttcccccctggcccagcctcctctgcagtgcccctctcccctgcccatcctctccacggaagcatgtgctggtcacactggttctacagtggtctgtgat

SEQ ID NO: 19200 - DNA, 342 bp, Zea mays
  Clone ID: MRT4577_117512C.1
cgggggaatgtatacccaaaccccaccaccgaatccaccactacaacaaaaaaacaaatcgggatcgcaaaaccaaaccccaaccacccgagcccagggccaccaccccccaggacaaaaccagaaaaagaaaaaaaccaaaacaaccacacgcccggggcacaaaaaaaggggatgggatgccaaagacacacacttacactgtcacggatcctaataaatcaaaaggcaagggaaagcgggagcgggcccaggcccccgggcccttccatccccggttgccgtcgcccctgaaacaggaaaactggtacctgtgttggggccttgccccggccagggccc

SEQ ID NO: 19201 - DNA, 421 bp, Zea mays
  Clone ID: MRT4577_117513C.1
cgttcaagagatcctaaagacaacaagcgcatcttcaggcacgcaaaaatatccatctcccatatcatcataattggggggtcgccaaaaacttgtacttgcctggcaaaagatgcttctcccatagctcggggtgctcaaaaaaaaagccggcgacgatggacgccgccgtcgtaattccccttctgggactcgatgcagaggccggcgccgaagccgcaggagaaaaaaaagccgaggccgaaaaaaagctgggagcactcgagggcgcacccgttgttgatgcccccgcagacgtaacagcctctggagaaccgctgcgcggggacgcggcagcaggggatgccgtggcgcccgacgaagtcccggaagaacacctcctttacgagcagcgcgcacgaggagggagcccacttcccct

SEQ ID NO: 19202 - DNA, 458 bp, Zea mays
  Clone ID: MRT4577_117514C.1
tccaaagttcttgagatgggactagagaatgttcgttgtggactctctcgttctgcatgtctttgcttccatgtgtggtgattaggtcgtgcgaccaaagcagttgcaattttactcatgacacctatactgttagttgtcctgtttctcgagagcaccgacacttttctgtgccttgcgtgatcatatatgcagtcaaacaagccaacatcattaccgatactgtgcacattgcttgtttaatgaggatgcggctgacatggatggttctatctcttaactgatggatgagttggatttatgttctctgcaatggatcaaccgcacctgctcaaatgaatatatcacaaggatgcaggcgcatattggatcaggtggacttgataccagatgtagctgaaacttgtaatatcttcgagcaacgaaaactatctgtggatactcatagctacccagca

SEQ ID NO: 19203 - DNA, 236 bp, Zea mays
  Clone ID: MRT4577_117515C.1
cgggcgctatttccccctcgatcggacggccgggcacctatgacgccgggaagctcggccgccggatccggagtcgtcccccctcggaactccaggctcctacaacaccatgaacgcgcagacaagggcatcggagatgggacagagagctatggaacggatgacgcaaatgacatctacatcgagatctggactggcaccactatcggcccctcataacaccccccatcacggcc

SEQ ID NO: 19204 - DNA, 447 bp, Zea mays
  unsure (1)..(447): unsure at all n locations
  Clone ID: MRT4577_117516C.1
caaaaacctacgcgcacccggccgttctccagtgggcaggcagttggcctcctttcctcgccgcgctgtggagcccacctcggtctcggtgcagtgtctcgctcgcgcgtgccggcgtgcgtgccctggtggcccatggggaggaggataatgaagagtgggcgacgcacgacgatgcagccgcgggcggcgcttcttctcctcgtcctcgtcctcggcgtgtcgctgcgtggatgcattgcncanggcggnggcggaggaggagggctcacgcgggggagcttccccaagggcttcgtcttcggcaccgccgccgccgcttaccaggcaagatttcagacttcagcaacgcggatgttgcagttgaccagtaccaccgtttcgaggaggacgtgcagctcatggcggacatgggaatggatgcgtatcgcttctctattgcctggg

SEQ ID NO: 19205 - DNA, 345 bp, Zea mays
  Clone ID: MRT4577_117517C.1
atgcatccacacgttctcagcacctctcattgcttcactgtttccccaactgcaattaactagagtgtagtgtctacacaatcatggcgctggctattcatccaatcattaatgctcaagctccacttcttcgtgagcatgtcaccctttatcgacctcttatccttgccctattattctatgcttatctatatataccgatatctgctttattattacccaatactttttatacaatattttcacttaatgtactaaattattttgatttcgtttctattaacaatttttacaagtttattactctatatcaatcttgatgcttatcatttactatattaatat

SEQ ID NO: 19206 - DNA, 623 bp, Zea mays
  Clone ID: MRT4577_117518C.1
ccccctctcgagttttttttttttttttttttttttttttttggtaaaagtttttttataaggaagattttattaattttaagaacattatatcgaaaggatacatgtccttgaaacctctttcagcctctactaataaaagcatacaacttttagaagaatgatcacacatacttacatacactttagtgactatcaatccgaagactagaccgccacccatgatcctaggcaaaaaagaccttgaccacttgcatcaaacgttgggtagcctccaccataaaaagacaagaatccagcttctgcagcacaacccaagtgcgaaaccaatgagagatagtatggaccgccaccaaggagaaacgctagctgcttttcctcgagaagtacgaagaagccaagggccatgtttgtttcggcttttggtagtttctggccatcaaaagctgctgcagactgccaaacgctcagcttttcagccagcttctataaaattcgttggggcaaaaaccatccaaaatcaacataaacacataatcggttgagtcgttgtaatagtaggaaaccgtcactttctagatcctgagccctacgaacaactttatcctcctccacgcgtaatc

SEQ ID NO: 19207 - DNA, 167 bp, Zea mays
  Clone ID: MRT4577_117519C.1
atgcggaagctgctagggctactgtgccactacgaagatgcacgtgaacataggggattatagatctgaactcatatacatctacatatctataaggcatactacgtacgcagaatgaggataggtccacagtggatcatatacctgaaccgacatgcttggacgaa

SEQ ID NO: 19208 - DNA, 2091 bp, Zea mays
  Clone ID: MRT4577_11751C.1
atgtactgtgtttggcaattggattccaagcgctgtaattcgcagttgatgctcgtaatatcagttgttgctgcgggctcgttactgaacagaggacagttaatcacttcagtggttactaaatgtggtgacaaggtgctttatgtggtgacgattttaccatttctgatgcagatgtatagtgaggctagtagtgaaatcccttcacaggcagctattgcaaattctaggaggaagacaaagatagtatgcaccataggtccctcaaccaacactcgtgagatgatttggaagcttgcagagactggaatgaatgtagcacgccttaatatgtcccatggtgaccaccagtcacaccagaaggttatcaatttggtcaaggagtacaatgcacagaacactgatggaaatgttattgccatcatgctggacactaagggtcctgaagttagaagtggggatgttccagagccaattatgctcagtgaagggcaagagttcaatttcacaattaaaagaggggtgagcactgaagacactgtcagcgtgaactatgatgacttcataaatgatgttgaagctggtgacatactgttagtggatggaggaatgatgtcgcttgctgtgaagtctaaaacagctgatacagtcaagtgtgaagtagttgacggcggggaattgaaatcaaggcgccacctaaatgttcgtggaaaaagtgctactttgccatctatcactgagaaggattgggaagacataaaatttggtgtcgaaaacggtgttgatttctatgcagtttcctttgtgaaggatgccaaagttatccatgaattaaaggactacctaaaaggtgttaatgcggatatacatgtcattccaaaaattgaaagtgcagactcaataccaaatctgcagtccattattgctgcttcagatggggcaatggtggcacgtggagaccttggtgctgaacttccgattgaggatgttcctttgctacaggcagagattgttcaaacatgtcgaaacatggagaaaccagttattgtcgccacaaatatgttggaaagcatgattgaccatcctactccaactagggcagaagtttctgacatagctattgcagtcagggaaggtgctgatgccatcatgttatctggtgaaactgctcatggaaagtacccactaaaggcagtcaaggtgatgcacactgtggccctcagaacagaatccagcatttataacccaactacttcccctagtgttatagcatctgcacagggtctacagaacgaggagttttccccaagccagctaagtaaaatgtttggatcccatgcaactatgatggccaacacccttcggacaccaatcattgtatttacgcagacaggctccatggctgtcctcctgagccactatcgtccctcgtctacaatatttgcgtttacaaacgaggaacgagtgaagctacggctagcactctaccagggggtcatccctattcacatggagttctctgacgacgcagaagaaactttctccagagcaattagcagcttgctgaaagcacaatatgtgaagaagggagactacgtcactcttgttcagagcggagtgacttcaatctggagagaggaatccactcacaacatccaagtgaggagagctcaggtctgatgtgctggtaggaatcagtcgccggagaagttttgatagcgccgctagaagtgttatcatcatcatcaccatcatatgcgagtaattttaatgttttaccaggagattgctacgtcgagttgtatgttgtgtcgaattcacgtgtagactctggatctttaactctgtattcgttcattttcacttgtttcacactggagtgctataagttcacgcttactgcctttgcttttgcttttgctttcttgtgaaacttgattttagtttcttgttacaaaaggagctagcactaacagcgtgttaaattttgtaaaacggggccttcttgctccgagaactgctcagttaaaactgttgcaacaataataaaaacgtccatgcaaggcgacaacatgcctggccagaaggccg

SEQ ID NO: 19209 - DNA, 861 bp, Zea mays
  Clone ID: MRT4577_117520C.1
ccccctctcgagttttttttttttttttttttttataaggaagattttattaattttaagaacattatatcgaaaggagtacatgtccttgaaacctctttcagcctctactaataaaagcatacaacttttagaagaatgatcacacatacttacatacactttagtgactatcaatccgaagactagaccgccacccatgatcctaggcaaaaaagaccttgaccacttgcatcaaacgttgtgtagcctccaccataaaaagacaagaatccagcttctgcagcacaacccaagtgcgaaaccaatgagagatagtatggacctaatcgtttctgactcatgacaaaagcaacatgttcaagctcaccgccaccaaggagaaacgctagctgcttttcctcgagaagtacgaagaagccaagggccatgtttgtttcggcttttggtagtttctggccatcaaaagctgctgcagactgccaaacgctcagcttttcagccagcttctataaaattcgttggggcaaaaaccatccaaaatcaacataaacacataatcggttgagtcgttgtaatagtaggaaaccgtcactttctagatcctgagccctacgaacaactttatcctcctccacgcgtaatcgtaatgatactcagattctcctcacaaccagattcttcccacagccagattttcagaaaagctggtcagaaaaaagctgaaccaaacagacccaaggtgtggtgggtttgcctgacgaatctgactgaagtttggacatagcattggggtgggtgcctgactgcctggtcagggttcggaccgagatccttggacggaagaactgaggcgatttc

SEQ ID NO: 19210 - DNA, 834 bp, Zea mays
  unsure (1)..(834): unsure at all n locations
  Clone ID: MRT4577_117521C.1
cattgggtacctcgaggccggccgggacacaaaaacctacgcgcacccggccgctctccagtgggcaggcagttggcctcctttcctcgccgcgctttggagcccacctcggtctcggtgcagtgtctcgctcgcgcgtgccggcgtgcgtgccctggtggcccatggggaggaggataatgaagagtgggcgacgcacgacgatgcagccgcggccggcgcttcttctcctcgtcctcgtcctcggcgtgtcgctgcgtggatgcattgcgcagggcgggggcggaggaggagggctcacgcgggggagcttccccaagggcttcgtcttcggcaccgccgccgccgcttaccagtacgagggagccgtgaagacggatggcagagggcaaacgatctgggacacgtttgcacacacttttggcaagatttcagacttcagcaacgcggatgttgcagttgaccagtaccaccgtttcgaggaggacgtgcagctcatggcggacatgggaatggatgcgtatcgcttctctattgcctggtcaagaattttgccaaatggtacgggccaagtcaatcaggccggcatcgaccactacaacaaagtgatcaatgcactactatcaaaaggaattcagccatatgtaaccctgtaccactgggacctcccccaggncctggaagacaggtacaacggatggctggacaggcagatagttaatgactttgcggcttatgctgagacatgctttcaggcgntcggaggacgtgtttagcactggatcacgctcaacgagccgnacacggntgcagtccaaggctacgatgctgggc

SEQ ID NO: 19211 - DNA, 1377 bp, Zea mays
  Clone ID: MRT4577_117522C.1
atgggtaaccaagatgcgactatagatgccatcctagggatgaattggctaaccaagtatcaagcaagtcttagttgtgacaagagaactgtgaagttagtgtccttatcaggagaggaagtgttagtggagttggtcttgtctagaccaaggaaaggaagctgtcaccaagtcaccgcccatattgagaaaatcgaaccattagaagctatcaacgtagtatcagaattcccagatgtgtttcccgaggagttacgaggcatggcacctgaaaggaaagttgactttgccatagagcttatacctggcatcgcccctatttccaagagagcctatccagtgtccggaccagaattggtggcactcaagaagcagattgatgagttgttagagaaaggctacatcagaccaagtacctcgccttgggcagcccgagtgttatttgtggagaaaaaggatggtacgaaaaggatgtgcattgattatagatccttgaatgaagtcactgtaaagaacaagtaccccctacccagaattgaagacctattcgataagttgagaggagccggtgtgttttcaaagatagatctgaggtcaagttaccatcagctcaggatccgaccctcggatataccgaagacaacatttattgccaagtatggactatatgagttcactgtcatgtcatttggtctggcgaatgtgccagcttacttcatgtacttaatgaatagtttctccaagattgctaggccaatgatagccttgttggcaaagaaagttgagttcaagtggaccccagcaatgcaagagtcctttgagacattgaagaagaaattgacaacaaccctagtattgattctgccagatgtccacatgccatttttagtatactatgatgcttcgtacaccagactgggatgtgtgttgatgcaggaagggaaagtagtggcatactcgtcctgcgagctgaagattcatgagaagaattatcccactcatgatctggagttagcagcagtggttcatgcactgaagacctggaggcactatttgtatgggcagaagtgtgatatctacacatatcacaagagtctcaagtacatattcacccagtcagagctaaacatgaggcagcgaagatggctagagttaatcaaggattatgagctggagatacattatcacccagacaaagcaaatgtggttacagatgccttgagcagaaagagtcaagtcaatatgttggccgctcacccgatgccgtatgagctagcaaaggaattcgacaggctgagtctcggatttctgaacaacactcaaggagtgacagtcgagctagaacccactctagagggagatatcaggaaaggctag

SEQ ID NO: 19212 - DNA, 295 bp, Zea mays
  Clone ID: MRT4577_117523C.1
caaagacttacgctgtcagtactttggatttcaatccttgcaagtactctacgggatgtgttaactaatatctcttttcacgcacagattccacatatcattacaaacttcatactactaagaaggttaatgcatttcacaccgactatatggttactccattacatcggtacatcaatgatccaaatgcacatgcaatcattaataatcaagctaccttacacattactgcgataacgaacaactcatattttgacccatcacattatgcactacattgtcactataaacatcc

SEQ ID NO: 19213 - DNA, 123 bp, Zea mays
  Clone ID: MRT4577_117524C.1
acaactacagctccgacggctcctttaatgtttaggagtacctgcgccttcggttgtaccacagagagaacgcgagtatgtgaccaaggtggttttactaacacaccaagccgtggtggaatt

SEQ ID NO: 19214 - DNA, 434 bp, Zea mays
  Clone ID: MRT4577_117525C.1
ccgccatcccaacatgttttttttttaaggcttggggggcgccaaacaccaaattggtttggaaacccggaaaatcccgccccgttgaaaaggggccttcattctttggacgggtgcccaaattacaaccctttcagaattcaaatacctacaagggggacaggccaagccaaatttataactttcaggttttccagccccccccaaaaaaccaattaaggttggcaaccccttttacgaaccagggggtaccacaaacacaagggggtcgcacatgggttggggccacaacatacaaagggggggggccttccccaaaaagacttcagggcccggggaaacaaacaaaccttttatggaaatttgccccacattttttgggaaatggggggggcataatttggggctggggtacccccaggaacttgggaaac

SEQ ID NO: 19215 - DNA, 314 bp, Zea mays
  Clone ID: MRT4577_117526C.1
acacccttccggaacctaattaagaaggtaaaggtcttgatccggaggttgccacccaaaaaaaacacgcaagggtaaggttccacaagcgatcgcagccttccttcctgtgtcaactgaaaggttaagtttgtaaggttttgaggtttattgttgtttggatcccaattttgtttcttgtttccagtttttgtccactgtttaggtttagccatcctggggaactgtgcttctttttgaccaacacagggtgtggcatgtcctgaatttaatgccgtgttaatgcatccaactccatttatttttttgtgggc

SEQ ID NO: 19216 - DNA, 699 bp, Zea mays
  Clone ID: MRT4577_117527C.1
agggggttgggggtaggattcttcagcacagcgtcatcttccttggaaattctggacaagaactcggacacccttgaaggtgacaaagccgccagggatggagatgcatgtacatcagaggcctgcagttgagacggtgagtcccccaaggttgcttcctcaaccctccttgcttctcgacgccgacaaaaataaacttgaataggctttgggcggaggagcatagaaggggaggtggcagcaataggagacaccctaggaggcaaaccctcactggcagcccctacgcccaaatctccaattgaagcaataacctgctgacttccaatctgacttagatccttatgacactcgatcaactgcccgctgccagggcactcatgcactgaagggcactcattcaaacaaaactgcccaccccgttgcaggttgaaggtttgttgtaaaggaagggacaccacagacctactactaattgggtcttgagaaaggacatcctgctgaaggaccaaaggtgatagcggccggtccgacacagcgagggcagaagaaacagcaggactgtgattttgaacttgggtgtctacttcgaccggatgtggttgacattggggcaattaaagggattctgcatctttttagtgaagcctctggtctgaagaccaacattcagaaaattaatgtctttccaattcagtg

SEQ ID NO: 19217 - DNA, 676 bp, Zea mays
  unsure (1)..(676): unsure at all n locations
  Clone ID: MRT4577_117528C.1
ttaaatattaatagagctcctgcagaagatctggggggggggggggggggggggcccgcctgcaacggaccgcgcgacgcccgcctacggtgacccaccttacgcacgcctgtgcagagcccgagcccagccccgcgccagtgggtacagtcgtggcctaagccagggcgcgtccggacctgagaacacaggggtatcaacaacccgggtccggaacggagcgtggggaagtgcaccacccgcgtctccccagctcacgctacgtacccccaagaacctactacatgatcgtcaagatcctcgtaaaggtgtaggagaaactggaggtcgacagaagcacataaattgtggaagaaataattgacaacgtcaacgtggtaatcatgacccggtccactcacgaaacggtactctaggtccaggttacgaagacgaaagtcggtttgtcctcattcctactaagtgctggaggtgggtgaggctttcgttcccgtcacgagtcgacgaaccacgctacttactaacctccgtcttccggcccccttctcacgagaggctcgttcggaactaccaccatgtccccgcccagtggcctccctttccctttcccctactcttccgccttccttacgtgcggctngcgtgacacacaggagagtgtagagatgcacgactg

SEQ ID NO: 19218 - DNA, 431 bp, Zea mays
  Clone ID: MRT4577_117529C.1
ggagggggccaacccccaagaaagaaggaggaattttttggcggggagcccaaaaactcggttgcctccttcctacaaaatactacgaagtcggcgacgcccgggccccttaagactaaaaggaagggaaatattaaaaaaggggggacaaatcgcgctaaacgggggggggtctttaaacgaaaaaaaacgggaaattttagccccccggggggaaaaaaaaaaaaaacgggaaaccgaccccccccggggggggttttgttgctttagggcccaaagaaaggaacctcaaccctgcggggggaaatgaaggagccggaccaggttggggaggggttaaagaaaaaaccccctggtcccatttggggcgggggccaggggggcaacattgggaaatccccccgggcccccccggacagggggggaccgcc

SEQ ID NO: 19219 - DNA, 330 bp, Zea mays
  Clone ID: MRT4577_11752C.1
cggacgcgtgggcgggcacaagatcaaactcatgcacacgaccttgtaaccggggctggagaggggtcgcataagatagagggcgaccaacataccacattgtacagaaaggggcgtggacatcactatgagttgaagatgcacgggccagggtctatttgcactgggatcagtcagcagtttcgaatgatgcgttttactgctggagaattacaaaagaagcttcgaacgtaggctggtcgaattgcatgaaccaaggactaatgacaccgttccctgatgttaacgcaaagccaggcgatgtaattgcaatcataaagacaactgttt

SEQ ID NO: 19220 - DNA, 383 bp, Zea mays
  Clone ID: MRT4577_117530C.1
ctattctccaagtcccaatccaccgacgaattccaaaccctgcctaggacctcggcgccactcgccgcacgtcggccacgtccgcctccaccagcggtggaggggaactggagagacaaatcaatgagcaggacgcgggagcagaagagatgaagccaccaaagcgtgcagttgaagagtcgagtcgaggactctaagaagcgactacaggccggctttcccatatgagattgtggctgtttccttcattcctgcagggagttgttggctgctgtgggctctccgcgccgggctgtgggtgctgctgtttaggccaggggagtgcaaatagggtaaaaatgtatatactataaggcttttggtatttgggactgggtgcggcc

SEQ ID NO: 19221 - DNA, 478 bp, Zea mays
  Clone ID: MRT4577_117531C.1
gagcttactatgcggcggccgccctttgtttttttttgtgagcctacaaatgtccactgccccaaggcagtccttgcttatatagttcatggcaaactgaaggagcagaagtgcaaagcataccagaggctctgtcatatgtacggcctatgtgaaggcctcgctccctctctacttacaccagcgcccaccatggactctagggtcttgcatgacctggattgcaacgctggctggcggtacgctcactgttattaactttgactttatggaccaagtagggggcgtgttttgtcgtcccattcattacctacgggagtgaaccataatccttcagttgcgaaactaaatttaagatggttgaaccaatcaaaaacttttagagtggggtggagcacacctgctgcgtaccacaattagagtaaacgcattgcgacacttcttctctggcttgcggaagaactatggtaacatactg

SEQ ID NO: 19222 - DNA, 287 bp, Zea mays
  Clone ID: MRT4577_117532C.1
tgaagaaatgcttcttcagacgatgcaatttggcacagcgtgtccatgggtcagactcacacccgcaagcaaaagatatagctcagtctcattgagaaggagcaattgtggcccaaaatgttcggtgtcccaattggaattgaagagtagagtgagagcaaaacgaagccgtatccagcagaggcatcgaggaccataatggagttggctaaggtgggcacgctgtgtacgttgacccaagagggtttgccccttggtactggggttcgattcgcggttgaccctga

SEQ ID NO: 19223 - DNA, 228 bp, Zea mays
  Clone ID: MRT4577_117533C.1
actatgaggaggaactggtcgccactgatactgtcccacgcgtcttgctgaaccctagtcatagctcggtactatatattgctgccagggacgtagttaaacatgttctgtgttatttcgcttgttgctgctttggttacaaccacgaggagggacgccatgaccagattgacttgtgctgctttgtggaccaaacaccgatgagtctaatgttgctaacgacgttga

SEQ ID NO: 19224 - DNA, 829 bp, Zea mays
  Clone ID: MRT4577_117534C.1
cgactttcccccaactgatcacaccaacagcaacagctaggcacagcccacgaacaaactgccgttgagaaggcgaaccatttcttcctccccggagacacgcggagaaactcgacgactcctctccctccccactttagtcccgaactcccgatcgggaaatctcagcggaggcgcagcatctccctgggcggaggatctcggggcccggcggagaaggtggaccggcatcacgccaactaatcgagccagagccgagagggacaggacagggaggaagcggttcagaagacgaagaggagatgtcgtccgacggcgggggctcccagatgggcgtcgccggcgcgctgggcctctcggtcacgtcgtcagtagccattgttatttgcaacaagtacctcatgagcacccttgagttctacttcgcgacgacactgacgagctggcacttgctggtgaccttctgcacgcttcacatagcgcagcgcctgcgcttcttcgagccaaagccaatcgacgcgcagactgtcatctcctttgggtttctcaatggaatctccattggcctcctcaacctttgccttggcttcaactcagttggcttctaccagatgaccaagctggctattatacccttcaccatgctcttggagaccatctttctgagcaagaagttcagccagagcatcaaggcctctctcatggtcctcctcctgggagttggcatcgcatcggtcactgatctccagctcaatctcctcggctcaatcatcgcagtgctcaccatcgctgcgacctgtgtctggcagatcctgaccaaccaaatcag

SEQ ID NO: 19225 - DNA, 449 bp, Zea mays
  unsure (1)..(449): unsure at all n locations
  Clone ID: MRT4577_117535C.1
ttaggtacgttaatttaccatgtgatgcggagaaccagagctaagtcgaccacaagatgatgttaagcgtgggcttctccccaaggtgatgctgggggatcaacctgaagatgggcagacttaacaagtgcaagacaaaaggctggtcgtcaagtgatcgtcatctaacaacactaacctagtgttattacaggcaagccccggtgcatttgtcatctccttgccgttttaaaatctttatcaccttatatgatgcattaggtgatagagtttgtgtgctaaacaattgatgcatttccttccctggaaaattgattaccctttcttgatacccttttatgaaaatgattnttatgatgcttagccttgctttagaaaacanaattgtttttaaaacaaaaggtgatgcttcacagcggatggggaattttacaaagaaatacttttga

SEQ ID NO: 19226 - DNA, 410 bp, Zea mays
  Clone ID: MRT4577_117536C.1
ggccgggccgggtaatggagaaggttgcatgcacgtctcctccgatctcaccaatcatcggagacccaaggaataccgatttcaggcaatggtgaataataagtcttcatccgcggaggtcaagccgatcgacaatgcaagtgcgcctggatctcagattacagtgcagtcggccgcggatcaactacacctccatgttcggggtcctgtactgctgccagtacgtcattctcgttctgggtcaaatgacggcggacgagaccgtatcggggggggatgctgattagaacatcttgtacaacgacacagtcgatgggatgaaggtcatccgagccatgtccaatctcgttgagtggaatatcatctatgaggtcaggactggcaacgatcgacaactgttgcagctccat

SEQ ID NO: 19227 - DNA, 181 bp, Zea mays
  Clone ID: MRT4577_117537C.1
cctgtctttgaggttgtccgaccattccacatgctacactctatgcttcttttcccatccttaccacggttcaaggtgaaaacccatgtaacctcagatccaacgcaccacagcttaccattataccctgtctcacacctagccttacgattccttggtcatgggccaaaatagccacact

SEQ ID NO: 19228 - DNA, 2694 bp, Zea mays
  Clone ID: MRT4577_117538C.1
atgtctcaagataaaaaagttgttactgaaacgaagctgagcctttctgaggagaagaatcttggatttattgaatcaatagcaaagacaaatacagagaagattactagggagattttagaaggtttatctgaagacaccggtgacagcgacagttatgacgtggaaagtggcggggaagactccgaagatcgaccctggcgaccaagtcatgcagttttcggaaaatcaactattaaacagagtcatctcgacaatatgaggggaagatactttcgagatgtgtctattgtgagggctgacaacggagacaagacttctcctactcccaaagaaaatgaagtcgtgatcttccgaagcttcttcaaggctgggcttcggttccccctaagcagctttgtggttgaggttttaaagatattccagatttttcttcaccagattactcccgaagccatcataagaatgggaatctttgtatgggctgtgaggagtcagggcttggagccaagtgcaaaaagtttctgcagtatgcacgaacttttatatgagacgaagccctggggtaaggagcagtatcataacaattttggctgctatagctttgttgctcgctctgggtcaagctgccccgtgccaacctttcagaagagatggcccggagactggatgaaggaatggttctatgtgaaaaatgatttaaaggtacaggaggatattaaagagatcatcatgcgtcctatctggcagcgctttggccttcggaaaccaaaggtagaaattgatgaagcagccgaagaatgccgaaaggcctttggcatagtttgttctttcatcagaacgagggacttagtccaagagcacgtggcctacaggatatggccattggtagtcaactgggagatgccgaaagaggccatcagcaacccccacgaaggtggtttggttcgactaaaatataccttcaggtttggagaccaatttattgagccagacgacgattggctaaagtgtgtcaaagctacaagtgatgaactgcttggaccgtactccaaagcggaagataatgcgctatttgcggccttcggaagccagaaaaagaggagactgaacaaagtttttgatgctattgggttcatgtaccctgactaccgctacccgtcacgggggcaaaaaagaaaaagtgtaacttccgggaaagatgatgcttcagctgctccaagcgagcccgcaccgaagaggaaaaaggtgaaagtccttactcaccgaccgcgcttcattgaaccggccatagtgcctgaatttggtggtgaaacctcttcggctactgaagccaaagaacctacggctacgcagaaaactaaagagccaaaggccattaatattgaagaggcagaggtcgaaagaacaaaaatactagaagttataagcccttcggcagaggtgacagtgccgaaggcgcaaaaggatcttacaacgactcccaagaggaaaaggatggtcaatgtactagatgtactggagaaaataaagacttcaagctctactccagggaaaaaacagccgaagcttcaaaaacgcggattgaaacaaaacaaactgaagtcgaagctgcaaagagtcatgccgagaccaaagctgggccttcagagcccaccaagaaaaaatcactggaaactggagaagaagaaacggaaagagaaactacagaatagattttgtctgaacaaactgccactcctactcccgaagcatcttccgaaattctcgattatattgtacgacatgcttcgagaaaaagacaacaaggagatttctgtctgccgggagatgagcaggagcttcggattcccgacactagaagacgggctctcggtgctatcaaaagatgaattggctgacagcttagcatacaatagtttaaagggcctttttcttagcaacgccctcagggcgcaaaaaactgttgaagacgaaggatgcactataactttgaacaaccttcgttccgaagtaattgaactaaggaacgaaggtcttgaaaaagataaaatactaaactcattggtgaataaaataaaagaagacgaagctacttccaaagcccaagctgaaacccagaagtgcgaaattgaggatcttcggaaacagctggctgaagcgaaattaaaatgtgctatcgccgaagctgaccgagacgccagtgattactggaaaaattattgggaaaaaacggttgtagaacttcgttcttcaaaagaaaaatgttatgaaaaattcatagaatgtatgggaaaaataaaaactagcttcgccaatgttggcgtatactccagcgaagataactttgtaagaggcgatcctgagggcccaattgactggatcaacaacaaagccgaagcttttgaggaaattttgagtggtcgtggagatgtctgtgccttctcaggtgccaggggaattgcggctattttggagaagtcaggttgcgatcatgtgaaagctttggcccaaaccgaagctactttatctattgatgacacaaaggacccctcggctgaagcgagcttagttggcggaaaattctttactgacatatgggagaatggcggccgagggatgtgtaatactcaaaattgtataaaaggattatatggtgatatccttattttatgtgtcatatttgcatcatga

SEQ ID NO: 19229 - DNA, 274 bp, Zea mays
  Clone ID: MRT4577_117539C.1
atcgatactgggaagctttcttcaaacgtaatcacataaacgacacaattgcggtacgatactgctgcaatctgcttgaatatgccgataatgctgaacaacatatgagctatgagtgccgttatcaagttcgtctagtctatttaattatgatgaatccaagtattcgttatttatgccgcgaatatgagttcgaaaatgttcaatgctttttggttcgatggatgtactggtggattcctcttttactaattgcactcattgtgggaagtgt

SEQ ID NO: 19230 - DNA, 346 bp, Zea mays
  Clone ID: MRT4577_11753C.1
gtgttaacttttatttttttttgattgatttctgactggttttacaagtttttgtttgaatatttgataaccctaaaggtattgtttctggcttttattctgctgtcctgaagcccatatttatgagactaacaagaaaaaaacccatccacttgtggttacaacaaaaaaaaggaggggcccgtgcttatgcgatcatgacgcaaaaaaaggggcctactgtgatacctcacaaaaccttaggggggggtaccaaaaaatcaaaagggggggggcactgaaaaacatatgtgcgtgagatagcgataacaactccttgtgctattgaaaccccctcaaaacgggg

SEQ ID NO: 19231 - DNA, 1386 bp, Zea mays
  Clone ID: MRT4577_117540C.1
attgggtacctcgaggccggccgggaggttgcggttgccccttgcccgcatcatcccacctcgcgaacgaggacggcttctagtccctcgcctacctcgcccccgaaccttggcgtctgccctaccaaccgcagcagcgacactagaatggccgcggcgccgtcatccctcgcgtcctcccacctctccccaatcgcggcggtgtccactcccgccgtcccacatcagcttcgcatcggctgctcccgccgccgcgcccagcgcatcgttgccatggctggatccggcaagttcttcgtcggaggcaactggaagtgcaatggaacaaaggactccattagcaaacttgtctctgaattgaatgctgctacccttgaaactgatgtagatgttgtggtggcacctccattcatctatattgatcaggttaagaattcactaactggtcgcattgaggtttctgctcagaatgtgtggattggaaaaggaggagcctacaccggagagatcagtgcagaacaactggtggacatcggctgtcaatgggttattcttggacactctgagcgtagacatattattggtgaaaatgatgagtttattggaaagaaggctgcatatgcattgagccaaaaatgttaaggttattgcctgcataggagagctgctggaagagagggaagcaggcaaaacttttgatgtatgttttaggcagatgaaggcttttgcagatagtatttcaaactgggcagatgttgtaattgcatacgagcctgtttgggctattggaaccggaaaagttgctactcctgaacaagcccaggaagttcatgctgctgtacgcaattggctgaagaccaacatatcacccgatgttgcctctagcactcgaataatctatggaggttctgtgaatgcagccaactgtgcggagctagcaaagaaagaagatattgatggttttcttgttggtggtgcctctttgaagggccctgatttcgccaccattatcaactcggtgaccgctaagaaagttgcagcctgatgagccctgtctgttagaaataagtggtcatctgtgtttcaacctcacctgccacgccgtaaagcctgtaggaggtgatccgtgtgatggtgtgccgtcaccttcctgcctttgctgatttgcagcaccacggaaacagaaaataacgcaagatgtcacaatttttttttttttttgttctcgtagtccgtagaccttgtgtacgttacgggagttcagttgcacgttggcgatgtacgtttagaatattcttttgctctgtccttttgtaaggggaaaataatttgttgacagacgaggagaaatgataagtgctttttttatgcctcggtacttgaact

SEQ ID NO: 19232 - DNA, 473 bp, Zea mays
  Clone ID: MRT4577_117541C.1
cccaaaccctacccatacccccgccgccgccgtcgccatgccttccaagctcgacccgtcgcatgtggtggaggtcttcgtgcgggtgactggcggcgaggtcgtcgcggcgtcttccctggcgcccaagatcggcccgctcggtctctccccgtagaagatcggcgaggacattgccaaggtgacggccatggtctggtagggcctgcgcgtgaccgtcaagctcactgttcagaaccgtctggccaaggtctccgtcggtccctccgtcgtcgtgctcgtcatcaaggcgctcaaggagcccgagagggacaggaagaaggttatgaacatcaagcacatgcggtaacatcggccttgacgacgtcgtcgagatcgccatgaccatgaggaacaggtccatggccaatgagttggccggtacccgtcaagagatccttcgcacctgcgttagcgttgggtgcaccgtcgac

SEQ ID NO: 19233 - DNA, 348 bp, Zea mays
  Clone ID: MRT4577_117542C.1
gcacgcctgcaggcagccgggccggaattatattgccggctcgacgagctctctagtcggcgggcgccctttgttttattttttgcactgaacacggttaactgtaacagcacccgtacatgcggatgaacgcatctccgatgctacgtttcgagtgaaaccatgctacactgatgacgctacctgatcatctgatgctacccgctggctttggctgctcatcacccccggactttgaggctacagctggactccttctgtatgatgctacggtactgccacatcgtctgccaaaagtgctatccctgaataagtgagaggtgtgtgcacactttctccatgactatc

SEQ ID NO: 19234 - DNA, 364 bp, Zea mays
  Clone ID: MRT4577_117543C.1
ctgcacgtactcgacctcaattccgacccacacgtaactcccacacatcctcccactcttcctcttccttttggtttctagccagctacccccaatattgtgtatatttaaaaggaaatgtgcctatacatacttctcacacattttctcttatcaatacaatacatatctctaacatcctactgatctttatatacgactacatttaatcaaaaatctaatctttgatctctaccctaaaatatgcacccccttattttacctggtcttgctatactctttttatgcactcataccattttaaactccatattttctatcaattcttccaatcatctcatcttcacttttctcaaatacctcc

SEQ ID NO: 19235 - DNA, 356 bp, Zea mays
  Clone ID: MRT4577_117544C.1
ggcattgccgtggcagcggcaaccgtgtcgccgaagggacgctgccgtccgcgtcggcgaggaggctcgtcgacgcgttctggcagaacatgggcagcggtggtctgcttgacggggacgcggcggcggcgcgccggagcctggtcctgtggagcggcgcctccacgaaggtgtccaagaggtcgagaagtaagagcaagatcttggagggtgatggtaagggaagtcggcgcaacggccatgctcggtggctttcagcagatctgatgagtaacgacagtgcaatggaggttggtacattctctcaagacgatgttccaagatgtcctgaaaagacagtgaacctagaggatctg

SEQ ID NO: 19236 - DNA, 371 bp, Zea mays
  Clone ID: MRT4577_117545C.1
cgcgacgaaagggctcatcggcgccgtccttcctcaaggctccgtcggcccgtccacggtggccgtgcttgccaacggtctccacttcaaggggacatgggctcagccgttcgacccgtcacggaccttcgaggcgccgttccatctccccggcgggggcaccgtgcgcgcgccgttcatgatgacgaggaggacgtatgagtatgaccagcactacgtcgcagtgttctccggtttcagggctctaaagctgccctacagctgcagcaagagcggcagcaaccagtggcaccaagccgcgtacttctacatgcttctactcctcccagacgacgacgctgccggccacggcctcagagatgtctacgaca

SEQ ID NO: 19237 - DNA, 435 bp, Zea mays
  Clone ID: MRT4577_117546C.1
cgaggcatgcggctttatagtttttttataggggaacctaaataaaattgactggccggggtttaacatctttgggggggggaaaaccttggcagaacccaaattttttgccttacgggaaaccgccgtttcgccaccggcattaatagagaaaaggcccgaactatgtggccttaccaatagatggccaacttgaagggctaatgggacccccccttttctgggctataaagcgcgggggggggggggtttacgcccaacgggacccttacgttggtcatggccttgacgccccagcctttgattttcttcccttactattcccgcctgggccgcgggtttttccctttaaggtataaagggggggttccctttagggatccaaataaggggtttgggggccctcccccccaaaaaacccccttatggggggtg

SEQ ID NO: 19238 - DNA, 343 bp, Zea mays
  Clone ID: MRT4577_117547C.1
acgagccgcattcgcagccatggacgtgagcgagagcaagctgtaaggcgaataaaggcgcggtggggcgcatggtctgcggagcgacctataaaatcgtgtctcgttcctgcagggccgtgcttcaggtcactatgagccgcgtgtgtcggttcctcaataaaggccggtacgcgcaccctcgttatcacggatgcccccctctacttcgacgccgggctggagtacctcccgtgcgacgtgctcgagctctcctgctacccggcatgggacaactagaagacacgcttcataatgcgccacgtgctgctcgccatacagaacgacgaggagctcggcaagc

SEQ ID NO: 19239 - DNA, 367 bp, Zea mays
  Clone ID: MRT4577_117548C.1
gggtaaaagcggccccgggggcgggcccaaggggggggtccccaccgccagaccagcttggggggggaaagggccatccggccacacgggcgaaaatataatcccccggaagctcccggggaaaaccaggggggcccaaaaagggacaaaactgaaaggcccgaggaggaaaaaaaagaacagggggcaccggggaaacccggccccccacccaaatggaaaaaccggccaacccccggggacaagcgggcagccaacggggcggggggggccaaacatagatacggccctcctgcgatggggccttcggttgcggggggccctcccagctccccctgaggggggccgccggcggtccccaaaaggg

SEQ ID NO: 19240 - DNA, 525 bp, Zea mays
  Clone ID: MRT4577_117549C.1
ttcacttcgccagcgtcattggtacattcaaagcacttgtgctacaactggtgagggattgtacgaaggcctggattggctgtccagcaacattgcaagcaagtcctaaattttcaagcgaggtttggatcatctaggagcttttggatgatgatggtgctggatatttagggttgggttgatatttccgtatgtaagatgtatgccctgagctcaacagttattgagctctgcttaagttttcacagttaaattgttttatgtaatttgggccttgagatgtttctgaaccaaacagctaaaaagagttcagttgagttaattggttgccattacattacgagattcattcatggtccatatgttcaacagaatcacatcagaatgatatgttttcaccaatggcatgaattctgcagttttggtgtattgaaatgcatggtagattgttctatgtaatttgggccttcagatgtttctgaaccaaacagctaaaaagagaagatgcgtcaattggttgccatt

SEQ ID NO: 19241 - DNA, 3679 bp, Zea mays
  Clone ID: MRT4577_11754C.1
tacttcccctagtgttatagcatctgggcagggaccgcagtccgaggagttttctccaagccacctaaggagaaggtctggatcgcatccaacactggtggcgaacacccttcgcacaccaatcattgtatttacacagccaggccccatggttgtcctcctgagcgactatcgtccctcggcgacactatttgcgtttacaaacgaggaacgagtgaagcaacggctagcactctaccagggggtcatccctattcacatgcagttctctgacgacgcagaagaaactttctccagagcaattagcagcttgctgaaggcacaatatgtgaagaagggagactacgtcactcttgttcagagcggagtgacttcaatctggagagaggaatccactcaccacatccaagtgaggagagctcaggtctgatgtgctggtgggaatcagtcgccggagaagttttgatagcgccgctagaagtgttatcatcatcatcaccattatatgcgagtaattttaatgtttttaccaggagattgctacgtcgagttgtatgttgtgtcgaattcacgtgtagactctggacctttaaaaaaaaaaaaaaaaaaaaaaaaaaattcaggggtgtggaccgcgccctgcaccctggcgcgtgggcccgcctcctccatctccccctgcggcgtaataagaagcggcccacggccaccgccacgccgggtcggaatatcatacgaaaaccctcgcggcgaggagcgctctccgtcccacacacgcgcgccgcagcctccgcagtccgcacctgcctccacgacttgtcgtgctcgtgcgctactctcctcgagcgcggcgcggagcacggggacatcaaatggcggcagcggcggagatcggtggtttcgcggcggcgagagtggcggtggcgacgctcaggccggctgcgcacccagccccggcggcggcggcggcaccgcagcctaggagggcggtggcggcgcagtcgctgcggacgaccgccaccgaggcgctgacggcggatctcgccggcacgaccaacggcgctgtgcatgctcggatgaatagtaaggctacaagtgaaatcacttcacaggcagttactgcaaattctaggagaaagacaaagatagtctgcaccataggtccctcaaccaacactcgtgagatgatttggaagcttgcagagactggaatgaatgtagcacgccttaatatgtcccatggtgaccaccagtcgcaccagaaggttattgatttggtcaaggagtacaatgcacagaacactgatggcaatgttattgccattatgctggacacaaagggtcctgaagttagaagtggggatgttccagagccaatcatgctcaaggaaggtcaagagttcaacttcacgattaaaagaggggtgagcactgaagacactgtcagcgtgaactatgatgacttcataaatgatgttgaagctggcgacatactattagtggatggaggaatgatgtcgcttgctgtgaagtctaaaacagccgatacagtcaagtgtaaagtagttgatggtggggaattgaaatcacggcgccacctaaatgtccgtggaaagagtgctactttgccatctatcactgagaaggattgggaagacataaaatttggtgtcgaaaacggtgttgatttctatgcagtttcctttgtgaaggatgccaaagttatccatgaattaaaagactaccttaaaagtgctaatgccgatatacatgtcattccaaaaattgaaagtgcagattcaataccaaacctgcagtccattattgctgcttcagatggggcaatggtggcgcgtggagaccttggtgctgaacttccgattgaggatgttcctttgctacaggcagagattgtccaaacatgtcgaagcatggagaaaccagtcattgtcgctacaaatatgttggaaagcatgattgaccatcctactcccactagggcagaagtttctgacatagctattgcagttcgggaaggtgctgatgccatcatgttatctggcgaaactgctcatggaaagtatccactaaaggcagtcaaggtgatgcacactgtggcactcagaacagaatccagcctttataacccaactacttctcctagtcttgttgcatctgcacagggtctacagaatgaggacttctccccaagccagctaagtaaaatgttcggatctcatgcaacgatgatggccaacacccttcgcacaccaatcattgtatttacacagacaggctccatggctgtcctcctgagccactatcgtccctcgtctacactatttgcatttacaaacgaggaacgagtgaagcaacggctagcactctaccagggcgtcatccctattcacatgcagttctctgacgacgcagaagaaactttctccagagcaattagcagcttgctgaaagcacaatatgtgaagaagggagactacgtcactcttgttcagagcggagtgacttcaatctggagagaggaatccactcaccacatccaagtgaggaaagttcaggtctgatgtgccggtgggaattggtcgtctgagaaattttgatagcgccgcctgatgtgttatcatcattatatgtgtaattttactgttttaccaggagattgctacgtcgagttatatgttgtgtcgaattcacgtgtaggctctgaatcttgactgtgttcgttcattttcgcttgtttcacactgaagtgttataagctcaactttactgcttttgttttcttgtgaaacttgagtttagtttcttgttacaaaaggagctagcactaacagggtggtgagttttgtaaacggggcgaggactgttgagttaaaactgttgtaataatgatatcgttcctgcaagacgacacatgcatggccagaaggccaaagtctgaactcttttttgccgggcaagacaggatgcccatgttcattgtcgtggtggcatgatgcttgctagccttttctgcccctccgcatcatgtcaaggggataacctgcagcggatgtggacccagcagattgggcacggaacacacgtctatcacgaccatccgcgaaaagtgctcgaacattataacgttccagttgctagcttcggattccccgcaaggtttcaaacttgagccccgccgccccgggcagggaggtaaattaatttattctttgtttttttgtaagtgccccctaaacgttttaatggacatgtagtcatagattatctaagtttttcggtcttttttgtttttaaaattttttttttttttttttttttttttttttttttttttagatcgagaccgctgactacactgactcgaggactatgtgactccatagtgctgttgatgctgacttcgtgctcttccatcctgccggggtgatgaggactgatgcgatgatgacacagctgtgaaggtggttgatattgttgacacattccgtctacaggagcatcctccttttgacaagaaatcatttgtgtcttacatcagtgaatacatcaagaatctcactgctgtgttggagccagatgaagcggatgagttcaaaaagggtgtcgagggtgccacctagtttctccttagcaagcttgaaggacctgcaattttttg

SEQ ID NO: 19242 - DNA, 961 bp, Zea mays
  Clone ID: MRT4577_117550C.1
agatgcttgaacacttattacgaaattgaacaggactctctttagctgtttacttcacaaacatcttagggctcgaatacaataaaacaatagtatgacagtgaaaccacagccggagctggctcagtaactgttgatctcaggaaaatacacagtacatacgggaatagcatagcaccatcccatcccaacacaatccctaggtacccggtgattcaatcgtccatccaaagcgctcctagctccttcaaaatcttgacgaaaatttaggacttgttggcaatgttgctggacagccagtccaggccttcatacagtccctcccctgttgtagcacaagtgctctggatgtaccagtgtcgctggcgaagggagtgcaggccaagcttatcagtgatctcagcagcattcatggcatttggaagatcttgcttgttagcaaacacaagcagcacagcatcacgtaactcatcctcattcagcatcctgtggagctcatcccttgcttcaacaacacggtccctatcgttgctgtccacaacaaagatgagaccctgtgtgttctggaagtaatgcctccacagtggcctgatcttgtcctgacccccgacatcccagacagtgaagctgatgttcttgtactccacagtttcaacattgaacccgatggtggggatggtggtgacgatctcgccgagcttgagcttgtagaggatggtggtctttcccgcggcgtcgagacccaccatcaggatccgcatctccttcttcgcgaacaggcggctgaacagcttggtgaacgtgagccccatctcctctcctcccgcgtaggtgctcttcctcccggctggcctctcctgatcggaggaatcgctcgatccgcggtgggttcgccggcgccggagccggagaaggtgggcggaaacaggaggtcacgagagagaagggggagagagtgact

SEQ ID NO: 19243 - DNA, 280 bp, Zea mays
  Clone ID: MRT4577_117551C.1
cccacctgtgccagatcagaatgtcgtaatcatggtggaagccagcaaaggcagggttgaaatatttattctaataaaccatggcaccactctctgttatctcattatgcatatggtgagcgagaagcacattcagttgaatattgacagagtgatacatctacctgagggttatattaactttcacctacactgatcatattaaggacacatccaaatattttgatacacattctttgaaaacccatgctttccactagcaaacattactattaatatt

SEQ ID NO: 19244 - DNA, 1317 bp, Zea mays
  Clone ID: MRT4577_117552C.1
gcaccagccgcagcaaaaggaagcttggctcggttcccctcctgcggcctattggcttctggcctcgtataaaaaaggcgaggacgcgctccaccgccagaatcatcgtcaccccggagcctctccttcccggtctcctccgcccgttgccttcgtcccctccatctccggctgcgtcgccggcgagcccgacaccgcgaatcggatccgccgacaaggtgagagggaagagatggggctcacgttcaccaagctgttcagccggctgttcgccaagaaggagatgcggatcctgatggtgggactcgacgccgccggaaagaccaccatcctctacaagctgaagctcggcgagatcgtcaccaccatccccaccatcggattcaatgttgaaactgtggagtacaagaacatcagcttcactgtctgggatgtcgggggccaggacaagatcaggccactgtggaggcattacttccagaacacgcagggtctcatctttgttgtggacagcaatgatagggaccgtgttgttgaagcaagggatgagctccaccgaatgctgaatgaggtaaattctcatgcccttgagaatcctttccccggtatggaactttgtgtgctgtgctcacagctatggagatgttacctgttgcaggatgagttgcgtgatgctgtgttgcttgtgtttgctaacaagcaagatcttccaaatgctatgaatgccgctgagatcactgataagcttggactgcattcacttcgccagcgtcattggtatcatacactatcaacagatttcttctttcctcgttatattgctctatgactctatgtagtcatagtgtcgtagttctgctcttctgcttggtaatgtagtatattatttagctagcagtcagctggtgcttaatgatttattggattttggcggcaggtacattcaaagcacttgtgctacaacgggtgagggattgtatgaaggcctggactggctgtccagcaacattgcaaccaagtcctaaattgtcaagcgaggtttggatcatctaggagcttttggatgatgatgatggtgctggatatttagggttgggttggtatttccgtatgtaagatgtatgcccctgagctcggcagtttttgagctctgcttaagattctcacagttaaattgttttatgtaatttgggccttgagatgtttctgaaccaaacagctaaaagagttcagttgagttaactggttgccattattacattatgagattctttgatgctccaaaaaaaaaaaaaaaaaaaaaaaaaaaagaaagac

SEQ ID NO: 19245 - DNA, 1031 bp, Zea mays
  Clone ID: MRT4577_117553C.1
cattgggtacctcgaggccggccggggccgggccggattggcgtcacattcgcagccgtctcactcctctcgcacagcatccgcttctcctgccaaaccctagcacctccgtcctccgaccccctcagctccggcgatggcctccaccccgcaccctccgccgctcatcggcaagtcgggaaacctcacggtgttcttcacgccatcggcggagcacgagagcccggggtccgagttctctacgcccccgacgagccctcgcgccgaggactcccctgaatcaccaccggcgcagacagcccctccgcccgcgcctgtttactcagtatccacgccgcagcttgtcaagatggtctccccgccgcttcccgccgagaagctctcccgaccctcgctggtccaggtaccgtcgccgcccgtcaagtcggtctcaacgccgctgcaggcaccaaaggtctcttcctgctccttgccaccggtccaggtgccgccattgcagttcgggaaggcttcggcaggatcagatggatcgctgcttgcgttcttctgggacgcggttgcacgcatgcaagaaggtgacttggaagagaatccttcgtatttaattgctctggtttatttttattttaaggtttgtgactttgaattttgatatgtgagcaaaatattttggtttagcacacgcgagcttggacgagcacatctcgagatggttcgggctggaccagtccaagtaccagtgggcgctcaacgactattatgagaggaccgggcaggagatagatttgagcaacgttggcactcgttagcagcacagttgtaaaaattcagaaagcttgaaaaagtggattatttatagtttttatgtgtgtaactaagctggtgccgtgtcaagctgcatatagaatccttttggttgcgtgaagactgagttctctttttctgcacccggaagctcttggttgtaacaaatccatatttagcacctttattgtagcttcgttgtggataaagaaaaaccttgctgaccg

SEQ ID NO: 19246 - DNA, 378 bp, Zea mays
  unsure (1)..(378): unsure at all n locations
  Clone ID: MRT4577_117554C.1
caaaggaccaaggaancgggagaaggaaccncagcagctttcgcgattaagacaaagagggcccnnccgggggnngcgggaaccatgacanagcgggccggcanaccgancaaaggcagcccncccgggccgcccaggaagcgcgcngaaanaaacagcnngcnncaacccancnagcaggaaanaanggaggagccangccccaacangcaagcanaccaacgccaagacgaacacgnngcgccnccanacnggaccacgaaaacnccagcaaccggcaagcccggnaagacaacagcacgggacacacgngcgagcacaaggcagaacaaggggaggacagangcaccccnncngagccgggagaccaaaggagaa

SEQ ID NO: 19247 - DNA, 1081 bp, Zea mays
  Clone ID: MRT4577_117555C.1
gcgacccgcagcaaaaggaagcttggctcggttcccctcctgcggcctattggcttctggcctcgtataaaaaaggcgaggacgcgctccaccgccagaatcatcgtcaccccggagcctctccttcccggtctcctccgcccgttgccttcgtcccctccatctccggctgcgtcgccggcgagcccgacaccgcgaatcggatccgccgacaaggcgagagggaagagatggggctcacgttcaccaagctgttcagccggctgttcgccaagaaggagatgcggatcctgatggtgggactcgacgccgccggaaagaccaccatcctctacaagctgaagctcggcgagatcgtcaccaccatccccaccatcggattcaatgttgaaactgtggagtacaagaacatcagcttcactgtctgggatgtcgggggccaggacaagatcaggccactgtggaggcattacttccagaacacccagggtctcatctttgttgtggacagcaatgatagggaccgtgttgttgaagcaagggatgagcttcaccgaatgctgaatgaggatgagttgcgtgatgctgtgttgcttgtgtttgctaacaagcaagatcttccaaatgctatgaatgccgctgagatcactgataagcttggactgcattcacttcgccagcgtcattggtacattcaaagcacttgtgctacaacgggtgagggattgtatgaaggcctggactggctgtccagcaacattgcaaccaagtcctaaattgtcaagcaaggtttggatcatctaggagcttttggatgatgatgatgatggtgctggatatttagggttgggttggtatttccgtatgtaagatgtatgcccctgagctcggcagtttttgagctctgcttaagattctcacagttaaattgttttatgtaatttgggccttgagatgtttctgaaccaaacagctaaaagagttcagttgagttaactggttgccattattacattatgagattctttgatgctccatatgttcaacaccacatcagaaagatgcttgtttttgtgccagg

SEQ ID NO: 19248 - DNA, 528 bp, Zea mays
  unsure (1)..(528): unsure at all n locations
  Clone ID: MRT4577_117556C.1
acaacccacgtttcgacgacacaacaaagcaccgcagcgacgaagcccanggccggggncgngggggngnncgacnncgacaagacgancancgacgncgacagcgacaacngggncgnggacagccncggcnncaccgagccgnncgagcgccnccngcccaccangcccnggaacacgcncagggacaccangangggggagcngcacgcgcacggcaggacgcnggacgacgncgccgaggcgcnccgngcggcgcccgncgncgcgggcgnccccgccgccancaaggccgccnacgcgcncggcngcgaccggcgcgnccncagcgacgccaacgccnncnncancgacaccgnccnggcgcaccacggccngcngggcngcnncncccagaacaacaccaaccccagccaccccgacgccgacgccgacggccgccnccgcaacgggcccaaccacgaccngcacgggngcggcgnnggcaccngcccgcccaacangggcaagggccaggngcnggaccgc

SEQ ID NO: 19249 - DNA, 675 bp, Zea mays
  Clone ID: MRT4577_117557C.1
tcgaggtcggccgggccgggaaaaaggccacaccatttcccttccccaactctgcaggctgctcgtcgccctccctccacgccggacgcgccccgatccagatccaggggcgtaacatggcatcaaaacgcatcctcaaggaattcaaggacctgcaaaaggaccctccaacgccatgcactgctggccctgctggcgaggatatgtcccactgccacggcaaccatcttgcgccctcctgatagcccatatgctcgcgctctctcctcaccgaaccaccccctaccccccacctacccttctcatcctcccaccccccctcccaatacaaattcctcctccaccccacacccctaccaaacccccctaccaccccccccccctcacccccccgcacccccccccccaccacccttacccactacctctccctccctcttctccctaccccccccccccaaccccctcccctccactactacctctcttcctccccccccaccccggccggcccccgccctccgcccccccccccccccccctacttctcctctctcccccctcccccttttccccccccctaccccccccccttccccctcctcccccaccccccctcaccctccattctccacccacccccctccccccccccccttgcctcccccccccccc

SEQ ID NO: 19250 - DNA, 360 bp, Zea mays
  Clone ID: MRT4577_117558C.1
ctcatgcgtaaacggatcctacgcgttcatcctgatcgaaccaatgaaggactggggcctttacatgtaatccagccccaacctctcacacgaagggactactacgcgatcgttgcgaacaatacgtagctgaataacaagttcccgaacactgtgatgtgcgccgacatcatctctattagctcccacaactccgttaaacttacggaccgatcccagtacgccgaacctctgccacttgccaactgcttcgtgtccaacctagaggactccgacatactgccacatcctttcattgagcggcccaatctcatctacgagtttgaccaaccgggctttaacatacatgagatcgatgct

SEQ ID NO: 19251 - DNA, 182 bp, Zea mays
  Clone ID: MRT4577_117559C.1
caagctgcagtacggtccgattccgggcgaacacggccgggagtgcggaccgtggcgcgaggagcccaaacacagcttcctccttaagctgtagtcggtctcctcgctccctcctcaaacgtcgtcgtgctgccgacattgtctgtcacggctccaaccggagcaccatcccacctcccccg

SEQ ID NO: 19252 - DNA, 587 bp, Zea mays
  unsure (1)..(587): unsure at all n locations
  Clone ID: MRT4577_11755C.1
cgtgnggcgcggttggntctcgctcgcctagtcacgtagctaggaatccccttggcgcgcggngaacgtgacgtggntgtgacccaccccatcgtctgtgcctggcacgctccatgtgtggcacgtcaggtctggccaaggccaggacgggcgcggcggggcctccagcatgggcggggaggccatcctctgccgatccccgtgtttggccgctcaccgtctaatcattttgtctgccgcgccttttttccttgcaacttttctttcgtcgcattgcactgcaccccccgctccttcaataatgcgttgctgctggggtgtgcaacgtaggtaggagtagtgcactgcaccgcgtggcttttgtcctgactcctgaccctgccacgtacgacgaaccgatggcgtcaggacgtgaccgcgcccgcctgttgtcgtctggccaggcctccatcacgccttggcgcgtgcacgagatcgtagccaagccaagccaagcccgcccccgtcagcgcaagcgcaaacgaacaaacctgccacgcatcgcatcgcactgcactagtacctgcatagaagtatgcggtggtggt

SEQ ID NO: 19253 - DNA, 222 bp, Zea mays
  Clone ID: MRT4577_117560C.1
tcgcccacgcgttcgcgacgtgtacagcttcggcgtggtgctgctggagatcctgatctgccggaggtgcgtggaggcggagtacgtctaggggagcaacatcgtggactgtacgaggcgtaatgtcgccggcggcaacttcatggacgctgcgtactgtgcataccagctgacctgtgaggcggtccagcactagacggtgttgtcgctcggcatggatcc

SEQ ID NO: 19254 - DNA, 236 bp, Zea mays
  unsure (1)..(236): unsure at all n locations
  Clone ID: MRT4577_117561C.1
aacatattttccggctaccaagttttatccaaaaatagagggactagtttttatatggtcgtttcaaattatatatagcctgtttgttcaatctaaatattttcctgtcgtttcatggctactagaatagatgctggacgcatatacatctaggatagtcagatatgtaaatcgttaaagcttgtgctagtctaatctngatctgtggtccttttagtcatgatgttatgccgata

SEQ ID NO: 19255 - DNA, 324 bp, Zea mays
  Clone ID: MRT4577_117562C.1
tttcttttttttatataagcgaaagagacacacaacaggaaagtgttaatattaaacatccattcacacatacacacacataaagaaccctttctaccttaaggacctaataccaaaaacagcattatataacaatatatacctaactcccacaatggttcaacaccacgtctcaatgtctctacccatgaatgcattagcatcttaccatcccctcttaatttacctggtcgcccgcccatatcatacactattattcctcggaaacgcaaatttaaccccaccatcttaccactaaagaacaaacgagctagggggacaaaa

SEQ ID NO: 19256 - DNA, 146 bp, Zea mays
  Clone ID: MRT4577_117563C.1
tttctattttttagttcattactatcctgagtactggtacttctttttgggtggggactccttcacaacttattgctacgactatcacttcgaatggttaacgtcttaaactcatactttggcactccaactccctacagacaaca

SEQ ID NO: 19257 - DNA, 265 bp, Zea mays
  Clone ID: MRT4577_117565C.1
ggtaggctttcgcatcctgctatgtcgagtcggatagtgatctgaaacgaatatggcatctgttttgttttcgcgactagtgccacgtgtcagaagaagcagtttgaggtgtctgaagatgatgcgccgaaagatgacacagagatccaagtagcgcggtagacctagtttgtttccgtcgcttgtacatttgcttatgttgtcaaataggacacccagttgttagtggcactggtctctcctttctgatgttatgatacattgt

SEQ ID NO: 19258 - DNA, 344 bp, Zea mays
  Clone ID: MRT4577_117566C.1
agattaaggccggggcccgaaacgctggaccacgttctcgatttttgtcgttataaaacacgaacacatggactggggtacagctgcgccagcggaactgtctatacatatactgtgctggcgtactccacacagggacacagacataccgatggatcacgtacgtaccgatggctgaaccagaaactggcgagggcacgcgatctgatcatgcacgggtacaggtttaatattttttaccacgtagtgtgtcccctccttgctcgggcacttgcggagctatacttgactttgaagggacagggattgccgttcaactccttgaggcactcgagcatggggtc

SEQ ID NO: 19259 - DNA, 321 bp, Zea mays
  Clone ID: MRT4577_117567C.1
tagccgctagtgctagttctagccggggcggacggcggacgaagctcgctccgacgataagcctgcggacggcgatccataacggcagctaatgtactgggagtgtaattaagtgctgtaacatagtgttaattaagctctgatgtttttgcgaggagagaaaaaagtcgtttaattctcagttttgagttttgactcctgatcggtgaccagctgaccttgcatgttatggtgtcggacgaagcgaatggctggcaggaacgccgtttgtactctgtgtggcatgtaaattgttaccggttgaagaagagttaccagtcc

SEQ ID NO: 19260 - DNA, 240 bp, Zea mays
  Clone ID: MRT4577_117568C.1
aatcgtgagggggtctatattaaatttagttgtgtctttttaaaatttctttcatcattttgggcactacacaatgcctgaatagacattttttgatgatagaatgaaacccacataggtcgactcataaaccggactcaatccaatcatcgctgccatcaataataaccccaatttaacgaaaagtcaaagttttagcccccatgtaaatcttttgtggttcaaaggatgacatttaaa

SEQ ID NO: 19261 - DNA, 181 bp, Zea mays
  Clone ID: MRT4577_117569C.1
aagagcccaagcttttttttgcaacgggctatccatagaagaattggtgactgtgtcacaccgagaaggagatgaccctttgtactcttgcatgtcgcattgaacaactcacgctttcatcacaattacatacaggacacacaccaaaccttggtgcacttgcactttcttacattcagta

SEQ ID NO: 19262 - DNA, 370 bp, Zea mays
  Clone ID: MRT4577_11756C.1
acggatatctcggttctcgtttcgatgaagaacgtagtcaaatgcgatacctggtgtgaattgcagaatcccgccaaccatcgagtttttgaacgcaagctgcgcccgaagccttctggcggagggcacctctgcctgggcgtcccgccatcccacataaacacacagaaggagtgctcgcgtgatctctgaccgcgtcaacaaatacgccgaccgcagcacaaagatacacgatggcggccaccgcatcttcctgcctgactctcgccccccccgtgccccacccgccccccccctccccccgctgcgtccctcaccaccccctcccccccccccgcccccccccccccccccccccccccccccccac

SEQ ID NO: 19263 - DNA, 178 bp, Zea mays
  unsure (1)..(178): unsure at all n locations
  Clone ID: MRT4577_117570C.1
ttgccgtaggnagcgccttacgtagctcgaattcgctcgaggccactgcgcagacagacttcgctcgtactcgtgcgcctcgcttcgcttgtcctactgaaccatgtctgacaaacccgatatggctgagatcgagaaattcgatcagtcgaaactgatgacgacagagacgcaagag

SEQ ID NO: 19264 - DNA, 432 bp, Zea mays
  Clone ID: MRT4577_117571C.1
atttctagattctaacaaaaaaaaaaaaaaaaaaaaaaaaaaaaaaaaaaaaaaaaaaaaaaaaaaaaaaaaaaaaaaaaaaaaaaaaaaaaaaaaaaaaaaatttttaaaaaaaattttaaaaaaaaaaaaaaaaaaaaaaaaattttttccttgccgggggggcctttcaaaggggcaatttttgcatttttccttcaccctggggggggttgggccttccttttggggggcccatttcccctttttgggggtggttttacatttcatgggccgtgtttttacaccgttgtgcttggaaaaaccttggggttccccattttattcgctttggagaacttccccttttccccggttggcgttttggcgaagggccccgccccgttcgcctttcccaccgtttgccccccttgatgggcatttggccccccc

SEQ ID NO: 19265 - DNA, 810 bp, Zea mays
  unsure (1)..(810): unsure at all n locations
  Clone ID: MRT4577_117572C.1
ccggccggggaccaagaaaaacaccgtaccgaacatccaatccaagtacgtgctcgctgaactcgagaactgcagccaggtgactagctagctggccggtgcgatcgagctgacatggcctccgccttgacctcctcctcctcctcaaaggtggctgcactcgctgcactgttcatggtgcttgtgatgcacgccgaggcgggcagctggctcccggccaaggccacatggtacggcgcgcccgacggcgccggccctgacgacaatggcggcgcgtgtgggttcaagcacaccaaccagtacccgtacatgtccatgacgtcgtgcggcaacgagccgctgttcaaggacggcaagggctgcggcgcatgctaccagatacggtgcctcaacagcagccacgacgcttgctccggcagagccaagcgcgtggtgatcacggacatgaactactacccggtgtccaagtaccacttcgacctcagcggcacggcgttcggcgccatggccaggacggggctcaacgacaagctccgccacgccggcatcatcgacatccagttcaggagggtgccctgcaactacaagggcctgaacgtcaacttccgcgtccaggtgggctccaacccgaactacttcgcggtgctggtgcagtacgcgggcaaggacggcgccgtggtgcagctggacctgatggagacgaacaaggacaccggcaagccgacgggcgtgtggacgccgatgcacgtgtcgtggggcgccgtctggcgcctcgacaccaagcgcccgctgcggncctcgagctccagc

SEQ ID NO: 19266 - DNA, 389 bp, Zea mays
  Clone ID: MRT4577_117573C.1
tgaaggccaagccagccgcaccgcgccgcactcgcattttggacatggtcgtcgtcctgctgactcgcctcgccgactggcgccacactctgccacccggggcggacgaggtgcaatgtggatgtgctcgacagacgactccggaaggaagcaccgagccaggatgggccaagggcgcggaccgtctcatgtgcgatgagcttgccgcttggtccaacgcgtccgagtacaatccggaaattgcaactaagccaaagattggctacactctaaaccgaggcaaaccaattctagaacgcattcgttgggaacacaaaatgacatgcaaacggcgagtacaacaaacaacttgatctgcagctctgttattacacgaacgataaaaccaa

SEQ ID NO: 19267 - DNA, 184 bp, Zea mays
  Clone ID: MRT4577_117574C.1
aattccgggggacacgcgcacaatgctcgctcgggctgttactcgtgctgcttgccctccgtttcctcacgcggaaaaagagtccggctgcaacccggatgttggcggcgataagactccggcaacgaaacacctcactcaggactggcgcttgcctatgaccaccaaagcctgcttttgggtt

SEQ ID NO: 19268 - DNA, 608 bp, Zea mays
  Clone ID: MRT4577_117575C.1
cgacgattccgccccgccggccaggtgagagatgagcctcacgggcacggcggccttccgtgccaccaaaatcccgcgcgctcttcctccaagtgcggtgagcctgccgcctcctcctcggcctcggcgtccggggatccgccgccgggggccgcgaagagtactaaggcgccgccgccgtggtgcgtgtaccttatagcctcatcccggatccgccgcacgtacgtcggcgtcaccaccgatttccctcgccggtgattcctcgccctgctctacctgcctcccccgttcctttccccacttgcatgtctcggatagtcgtcatatggttgcagcggctaagttcgtgtggtgttagcatttggagaagactacgtttggagttgcagaaccacaagaaattgaccccatccggttgtgcttgttgcaggacagtgtggctctatcttgttagggctgaaatttgattgctttgcttcaatttagtacttcttgttttgtattcatattctgagtcgccttgctctggtttgcaggatacacatgcttgaaaatgcaaatttaattcacagtttttcaataggtatatgttaataacagctagcagc

SEQ ID NO: 19269 - DNA, 428 bp, Zea mays
  Clone ID: MRT4577_117576C.1
aaaatagaccccccagacaaaaaggttaaggaaaaaaaaagggccaagggggggggggggagcttaaaaggttccatttttggccaaaagccaacttttttggccccttagcccccaaaggaaaagggggcccttgcccctttgctaaaaaaaaagcttggggagaaaactttggaaggaggccattttaaactggggcggccaccaagggttccaaaaaaacccctttgaaagagggaaaaaaccgacaggtttacagggaaaaacccaaaagaccccagtatatggacttggtctttgggggaaaccacttggtcaaaaaaattatttaaaacggggattttcccccaggggtggtaaaaccccctcgggaggggaaaggccccaaaaatcccttgggctccaagggctactttagccccaccaac

SEQ ID NO: 19270 - DNA, 310 bp, Zea mays
  Clone ID: MRT4577_117577C.1
aaaaaggaagacccaatgccacggacaattcacaaccttaatgcgccgcgaagcgggaactatattttctctccaaaagaaagaggggggtacaaagcggataacaggacccacctttttttaaggagagttactggtgcgggggccgcggaagacaatacttaagaaaggcagcatgctgatcacaaaaagtagatttgagttttgtgcgtaatgaacggggcaaactgcccaccagctcttttgtattgtagggagtcatgatccactgaatcgcccatcatcacgaggggggccgtgtttcctcctc

SEQ ID NO: 19271 - DNA, 184 bp, Zea mays
  Clone ID: MRT4577_117578C.1
agggggcccccacggaaagcataattcaaagggcccccagcttattaacccatccttggggccatggtaggtagacttctcggggcccaagaaaaaaccgtaccccaatatttgcctaacggtggaccgggccttattaaaaccccggaagttggggggggggcaacctgtgaaaaacaaaccc

SEQ ID NO: 19272 - DNA, 418 bp, Zea mays
  Clone ID: MRT4577_117579C.1
gggagggacaaaaccaatctaaaattggggcatttggttttagaaaaaacaaaaaccatgggggggaaaacccaaccccggcaaaaaaggggggggtttcccgggaaaatctaaaggggggccactacaaacggaagaggcaaggacaaaaaaaagcttcactcggggggtttggaataaatctctaagcccccctgaataacccaaggacagggaaaatgggggttacgggtaaaaacggaaggaaatggggggggtttttttggagctcggggggatggaacccattacggggaaaaacaaaattggaaacggcccacccttttaaataacccaaccggggttggggggggggtcctaaaaaaacttgcccaacgggagaccttggagggggatggcctttacaaaaaaggcctgg

SEQ ID NO: 19273 - DNA, 326 bp, Zea mays
  Clone ID: MRT4577_11757C.1
gagctcactagtctgtggccgccctttcttttttttttttgttttttcacaatacattccagtgcactttgatccaagtaagatttgaataaccgaacaagaccttatctgatcgcgctaacaggaccttatttgatcacccttgattggctgaaacaaaggcaccactgatactggaattttatttgtgaataaatatacaacacaaaaaaattttgacttaaaggagttactacaggcgttgtatcgggtgctgtctcccaataatggcatcaataatggacagttcgggcgcaattttgttgacatattgtgaacaaaaaggg

SEQ ID NO: 19274 - DNA, 173 bp, Zea mays
  Clone ID: MRT4577_117580C.1
attgaatttgagaaatcggatgagaagtaattatgcttagggacacggaaaaaaatgttgagctgggggatgaagtgatggatacaaatgcaagctgcgccactaattcacataggctgatgagtgccaacttgtgttaaacagtaaaacagatgtagttagttatccataca

SEQ ID NO: 19275 - DNA, 264 bp, Zea mays
  Clone ID: MRT4577_117581C.1
ttattggccatgtcgacttttgcaaggggaccaccacaggacaccttatttacaaacttggaggcattgacaagcgtgtgatccagaggttcgagaaggaggctgcttaaattaacaaacggtccttcaagtacccgtgggtgctcgacaagctcaaagcttagcgggagagagggatcaccattgatatcgctctgtggaaggttgagaccaccaagttctactggacggtcattgattcccctggacaccgggactttatta

SEQ ID NO: 19276 - DNA, 232 bp, Zea mays
  Clone ID: MRT4577_117582C.1
tcggggaagaaagcaccctcctggcgtcaaagatccctagatatggcgtagctccctagtctgtaagcctgcattttcattcatggttattattatatctgttcattagctgttcgacctagcagtgtcttaaaacgtgacatgtctcctgtgctgagcgttgacatgggccctcctccctctagtctgtaaacgctgtcactgaaggtacctctcaactgaccatttcttc

SEQ ID NO: 19277 - DNA, 622 bp, Zea mays
  Clone ID: MRT4577_117583C.1
gcttacagaaacggcctaccaagccagcccgattctgcaaagcaccacccaggtacacctacgcggcccggcgagatgaagctcccgctgtcggcggggtcgcccgacgcggcgcccgagctggccaagccgtcgctgccggcgacgtggctcatcctgcacgcgctcttctgcgccacctccatggccgtcggcttccgcttctcccgcctcgtcgtcttcctcctcttcctgcccacgccgcccatgaacccgtcggcgcacctcgtctccctcgtcaccccgcccgtcatgctcgccagctccaacaccaccgccaccatcactactacgacgaccaccaccaccaccgtcacgacgaccaccacgctggctgagagcgaggccggcgccaacgcgcaccaccaggtccaccacggtccggtcttcgtcggccgccacgccatccgcgtccgcaagtggccgcacccgaaccccggcgagctcctcaaggcccacagcatcctcgccgccgtccaggaagcacagcgccgcagccgcaaccgcatggccgacccgctcaggcccgtgattgccgtcaccccgaccaccacctccgcgctccaggcgccgtcgctcacgt

SEQ ID NO: 19278 - DNA, 656 bp, Zea mays
  Clone ID: MRT4577_117584C.1
cgggccacgggccccggcagagaactgcgcgcaaaaatccgaggagagatcggccggaccagacaggccactggttcgtgcacatgcgcgcccggctgcggtcacatgcaccagcagcagcgcacttcccactctgggtcgccactcgtctcgctcacctcacctgtcagagttcggagagatcagagagaggggggcacctcgcctggcctctcgacaccgccgccgatggtgtgacgcgactgctggccccggccacgatgcgatgctacggacacaatgttgtgcagtgctctcttcactgtctacgtactccggtctgctctcatcactgtccgacgcgacacgaagaaaacactgcaacagcgagcttcgtttggttccgcggtggctacgcacgtttgcaaagtgccaaaaccttgtccgccactctgcgctcgtattccgagtttgaggaagaacacgagcagcagcgtggtgtaccctgcacggtgcacctatctatcacccgtgcacaacttgttgtcggcatcgccacatcgcagcagcgtttcagtgcgtggagcgcttcgcatttattcatagacgatactatatattatcgcaatatacatatgtgcataaaaactcctagcaatagatctatcactgctccc

SEQ ID NO: 19279 - DNA, 541 bp, Zea mays
  Clone ID: MRT4577_117585C.1
ggtgttgggggttttttttattttttttttttttttttttttctttctttttttttttttttttttttttatttttttttttttttttttttttttttttttttttttagaaaggcctttcttatttttggggccccccaaacattatcgggggggggggtttttgaactttaacccataagccatctaaaagggggccccccccatggtggggtggggggggaacactggtgggtttgtcaaaacaaggtggttgaatggccccaattgttgccgttgtaaaagggggcccccgttaggcatagcgtgccggtagaacggcaacaactgttgttgtgtcaaaaaggcagcagggctcacatcaactagctggctgaatgggagtagttgttgctgctgtaaataagccgcaaagttcaatgctgctagttggttgaatggaaaaaattgctgggggggggcagcaactaactggctgaatgggaattgttgttgcaaataagccgcaaagttcaatgcccccacttggttgaatggaaaa

SEQ ID NO: 19280 - DNA, 885 bp, Zea mays
  Clone ID: MRT4577_117586C.1
cggacgcgtgggtaaaattcgagatgttgaatgctaaaaaacaattagtgacaatattgtttagatataaatttgagatgtcggaggaagctgcagaaaaaggtaggaaattccaaagaaaactaaaaagaacgtagagagtttttgaaaaagattatagaagtaggaaaaagatggggaagctttgcatgaaagtgatgggttttgttgctcgtccttctacgaccattgttgagcaaattcgtgatgttattagtattcatatttactttctacttaattttaaattgttggtatgctcgtaggttaactttatctctagggctaagcttcaattcgacatccgcccattcttcagtcttaatgtcgttgccgccgagtacaatagtgattccccggtgcatccacaccaaggatttcatcaccaccagccccatcaacgactacaatggtgaagagtttgtcttctactctacaaggaagtaccgtgccaaaaaactcaataatagagtaccacaccaaccaaaatggctaattgttgccactagagagaatgtatagcctattatgtctggcacttagtgaatcgatagctttaagggcaagttatgcactcgagtgactacaatagggaagggaggccttccaaggcaagaaagtgctcgttgtcggttgtgataacacctttccaaaaataatgttcatgcctacattgtttgttcgtcattgggtaaaacctttgctatatttatttatttttattatcgtatatattattaatacttttgtttgcaatttgattatatgttctttcactttatgtacatataataattgttttatcatgcatcaattgtatctcattgtaaacttgaataatttgaa

SEQ ID NO: 19281 - DNA, 872 bp, Zea mays
  unsure (1)..(872): unsure at all n locations
  Clone ID: MRT4577_117587C.1
gaattctccgggtccgactccacgccgtcncgaggcagggcaggttttgcgaagcaaagcccacgagcacaggatgaggatgcgtgcgcgggcggcatcggcatctgcgccggcggctgtggtggtgctgctcctgctcctgctactggtgggcgtctgcgcgggcgccgtgtacaaggtaggcgacctggacgcctggggcgtgccgccgccgtccaagcccgacgtctacaagcgctgggccaagtccatccacttcgcgctcggcgactccatctggttcctgtacccgccgagccaggactcggtgctgcagctggcgccggcggccttcgcgtcctgcgacctgtcgcgccccgtggccaggctcgccgacggcaactccttattcaacctcaccgcgcccggccgcgcctactacgccagcggcgcgccgggccactgccgcaggggccagaagctctgggtcgacgtgcccttgcccaacggcacctacctccagccctccgccaccgacctcgccgcgctcgcgcccacccccgccgccgacccgcccgccgggttcgcgtccgctgccgccgccgcgccacaggggggcaacgcctcgcccgcgccccgcgccgccgccgccgctggatccgtcgtcgcactctccttcgcgctccagatcctcctcctctgactgtgcggtacagtagctgattagctacctctatctcgctagttttgagatctccattttttgtgtgtgctgtggaacgagagtgagaacagttctttcagaggctgaaaattgaattgaatgcatgatcggagggagattggatctccatttgcttccgaaaaaaaaaaaaaaaaaaaaaaaagccagt

SEQ ID NO: 19282 - DNA, 559 bp, Zea mays
  Clone ID: MRT4577_117588C.1
gcacctagttagggacaatattaaagtttgagatgttgaatggtaaaaacaattagtgacaatattgtttagataaaagtttgagatgtcagaggaagctgctgaaaaaggttaactttatctctggggctaagcttcaattcggcatctgcccattcttcagtcttaatgtcattgccgccgagtacaacagtgactcaccggtgcatgcacaccaaggatgtcatcactaccagcaccatcaacgactacaatagtgaagagttagtcttctactctacacgggagtaccacaccaaccaaaatggctcattgttgccaccaaacagaatgtatagcctattatgtctggcacttagggactcgatagctttaagggcaagttatgcactcaagtgactatcatagggaagggaggccttccaaggaaagaaggtgcttgttgtcggttgtgataacacctttccaacaataatgttcacacgtacattgtttgttcgtcgttgggtaaaaaactttgctatatctatttatttttattatcgtatatattattaat

SEQ ID NO: 19283 - DNA, 281 bp, Zea mays
  Clone ID: MRT4577_117589C.1
gtagcttcgagcgggccccttctcatatccatccgtgcgcggcgtcacctgagccggagaacgcaggggaaggagcgcgtgatggacaaggccaatcatctcagcaccgttagcgacggtgataggcgaccaatagcatgagccacaggttctctgcgcttatcggagagttggactactcgttcctgttggtctccttctggtcacgttcctacctcgtcgggatgtggagacattctttcgccagctgctacttctataccggtttcgcgtttgtggat

SEQ ID NO: 19284 - DNA, 462 bp, Zea mays
  Clone ID: MRT4577_11758C.1
gactctttttttttttttttttttttttggctaacgagcgaccctatatatgcatgggaggccctgaatatgcatgtgtagccgttctgaagtccacaaccatatacaagcgcttgcatcaactaacaactaaagaataaagtgcagaacacttgatgcagtatttaaaccacgaacaaacgcatggaattgctgatccatagcagactgtcttagcaaaaaaaactaaacttacttagtaaacaacaaccgaacgcatagagactccatgcggggacactccgtgaatttgcctacttggacctttgcctaatctttcggagcttccccttaagccggctgatacgattcttcttccacttggccctaatcgggggggcatgactgcctctcgcacggttttgggggaagaccggaaggcgggaagagaggcttgtgatgcgacagcggtggaccccgctg

SEQ ID NO: 19285 - DNA, 677 bp, Zea mays
  Clone ID: MRT4577_117590C.1
taagtttgagagttgatggtaaaaacattagtgacaatattgtttagataaaagtttgagatgtcagaggaagctgctgaaaaggtaggaaattccaaaaaaaactaaaaagaacgtagagagtttttaaaaagattatagaagtaggaaaaatatgtggaagctttgcatgaaagtgatgggttttgttgctcgtccttctacgaccattcttgagcaaattcgtgatgttattagtattcatgtttactttctacttaattttaaattgttggtatgctcgtaggttaactttatctctggggctaagcttcaattcggcatctgcccattcttcagtcttaatgtcattgccgccgagtacaacagtgactcaccggtgcatgcacaccaaggatgtcatcactaccagcaccatcaacgactacaatagtgaagagttagtcttctactctacacgggagtaccacaccaaccaaaatggctcattgttgcccccaaacagaatgtatagcctattatgtctggcacttagggactcgatagctttaagggcaagttatgcactcaagtgactatcatagggaagggaggccttccaaggaaaaaaggtgcttgttgtcggttgtgataacccctttccaacaataatgttcacacgtacattgtttgttggt

SEQ ID NO: 19286 - DNA, 547 bp, Zea mays
  unsure (1)..(547): unsure at all n locations
  Clone ID: MRT4577_117591C.1
ttaaattcaaaagttgtggggtggggggggggtactcacaatattgtttagataaaaatttgagatgtcggagaaagctgctgaaaaagttaactttatctctagggctaaccttcaattcgacatctgcccattcttcagtcttaatgtcattaccaccaattacattggtgggggcccggtgcatccacaccaaggatttcatcaccaccagccccatcaacgactacaatggtgaagagtttgtcttctactctacaacgaagtaccgtgccaaaaaactcaataatagagtaccacaccaaccaaaatggctaattgttgccactagagagaatgtatagcctattatgtctggctcttactgaatcgatagctttaagggcaaancnntnccctcccctccatacatcaacaaaaccttttcccccccctcccttcacacccttccacccccccttttcttctggccctccctctctcctcctccctctcccaccttcccttctactcaaacaaaaaaaaaaaaaaaaaggcgcgcccccct

SEQ ID NO: 19287 - DNA, 396 bp, Zea mays
  Clone ID: MRT4577_117592C.1
tctgtaaagattggtgtgcgatgccctgtcccgtcccaactaacctctttccacgccttggtgcctttcggttcaataaccctccgctgatcgaagggtttagaaggcttcaatgtgagggaccgacgatacctgatggcacgccgtggcccagcttgtgtgccagcctcctctgtagaagcgtctgctcccgatgtctcctctccatcgtccagttctacggcagcttcctcagcctccgcgtccacagtcgcctccgcagtaggtgccatagtaggtgccactaaatcagctgcacgcgaagtagtcccttctgtattggagggtccgctgctaccccgcatctgctctagggaggcaagcaactgctctctcgagccgaattccgagcttacg

SEQ ID NO: 19288 - DNA, 566 bp, Zea mays
  unsure (1)..(566): unsure at all n locations
  Clone ID: MRT4577_117593C.1
catagttagtgacaatattaaaattcgagatgttgaatgctaaaaacaatttagtgacaatattgtttagatataaatttgagatgtccgaggaagctgctgaaaaaggttaactttatctctggggctaagcttcaattcgacattcgcccattcttcagtcttaatgtcgttgccgccgagtacaatagtgattccccggtgcatccacaccaaggatttcatcaccaccagccccatcaacgattacaatggtgaagagtttgtcttctactctacaaggaagtaccgtgccaaaaaactcaataatagagtatcacagcaaccaaaatggctaattgttgccactagagagaatgtatagcctattatgtctggcacttagtgaatcgatagctttaagggcaagttatgcactcgagtgactacaatagggaagggaggccttccaaggcaagaaagtgctcgttgtcggttgtgataacacctttccaaaaataatgttcatgcctacattgtttgttanaaaaaaaaaaaaaaaaaaaaaaaaaaaaaaaaaaanaaaa

SEQ ID NO: 19289 - DNA, 499 bp, Zea mays
  Clone ID: MRT4577_117594C.1
cccccagtttgtttaaagactggggtggaacaaaaaaaatttccttcgggcaaaaagagcgcttggttgttatgaacattggggaaaaaaattttttttttccacccctaagggggggggggggggctaagcactttaaaaaagtcctttttttttttaccccggttgggggaggcctttttcctcaaccccatgggggggagaggttcctgttttttcggttgggggaaccccttttttgccaccctttgggtgaaaaaagggctccttgacctgaactaggttcccccccccgttgtcttttttttccccagcaagggtttttttccgccccccaaaaaccatttttttttttactgcacaccggcttccctttggggggacaggttctttgataaactctttttactgttggggagaggggctttcccgggggccataaggggccaaaaaaaagaatcccccgtggtgttttagctcgccaatgataatgccaggg

SEQ ID NO: 19290 - DNA, 399 bp, Zea mays
  Clone ID: MRT4577_117595C.1
atgtggttcaggaaaaaaccaggggggcgtgaaaaagctaagccggggtgaagggggcctgcccccaaccctgtgagaagaaaaagggggagagagagaggaacacgcggataaaggaggcttgcggcgggaacaggtggggccgaggccgtgaacccggaacaccacctgggaaaaagagggggaacaaacacccttacaaaaaaccacgggggggggcaccccggggggggggggaccaacaccaggctcccagggggattacggcccgccaaattttttgacacatcccaaagttccacccccttatgggggcccacggctttgccaatctccccaggggttgtatgagcattaaaaaggcgaacacccacggggaaaaaaacgcttttttcgccc

SEQ ID NO: 19291 - DNA, 237 bp, Zea mays
  Clone ID: MRT4577_117596C.1
actagttctagatcgtgagcagcctgcctactgcattgcatatttgcattcgacgatcgattcgacaagtcatccggtgtacataagacctctgttttcccttcttttgctccgtttcttgtttctccttgttggactcgaacgagattcaacacaacaacacatgtactagtacttctgagtaccgtcaccatccatgccgtgatggatcgaattgaatcctgcaatccccaggaa

SEQ ID NO: 19292 - DNA, 195 bp, Zea mays
  Clone ID: MRT4577_117597C.1
cctaggacaaaagtctttgtcccacgggggttattgacaactaccaaggggcgcttcttaggctgcctggacacccgcaaaataaaccgttcttggggtacaaagttcaaaccacaaagccacaaaccctaggcaacctggctttactactagggggaccgggtttttacaccaaggaccatttgacgaacatta

SEQ ID NO: 19293 - DNA, 309 bp, Zea mays
  unsure (1)..(309): unsure at all n locations
  Clone ID: MRT4577_117598C.1
gtggtggttgggatttggtggacctcgatccgcttcttcgtgcctataatgtcggcggaggtgcccgtcgacctcggggtcctggaatccttcgagacggtgggtagtagagaagtatcgagcattcgcggggaaaagggtgaaagggcaggcaatccgtggtcgccccgtcaatcgagctaagaaaaagggatcaggggcgtcgagtggtggggtgggacatgttcgggggcagcggtgtgggagatcaaggggggctgggggcgaattgctcactggngcncggtggtcgtggctcttttcgttttc

SEQ ID NO: 19294 - DNA, 619 bp, Zea mays
  Clone ID: MRT4577_117599C.1
cattgggacctcgagccggccgggaaagccctcatcgcgagtgagcggaaaccgtcatatacggcccactggagaactcgcaccgagacgcggctggtacaggcatgggaagatcagaagggagtgtcaccgcgcgaagtcatgctccgttctggcgggggagaggcttcccagggaaacgctcttgtcacatactgaggctcagcttgtgtgcagaagcggatgaacgcttattgtgattgccatgcggtggacatgaactccattcgcgcgcctgcgcggaagggataagcctcacatgaagaacgatcctcgtcggcctagacatctcgttatgcagcgaaaacatggccatgctctaccactccatctgcagccctgctggctccgcctacaactacaggcgcgctacttcaaggaggtcttcggccagcgtatcacctggcatgagggaactacaacacttataaagaacttgcatcggcatctgtactccatgggcctctggttgaccacagccatatgctggggctagcatgatgggctctgaccttctactggcgtcactcggtgatctatctccaataatgcctcgagtcgtggcactcccaacgacgac

SEQ ID NO: 19295 - DNA, 459 bp, Zea mays
  Clone ID: MRT4577_11759C.1
aaacaaaaaaaaggctaaagccaatcggggggggttcacatccaggaattaaaaaactttatttacggggggggggggaaaaaaacctaacccgaccataattataaaattggaactagaccaccccccagggttgaggacaggaatacaaaaataaaaagggggggttactttttttgggggcaaccagcctgggtttttttgaccccagggattttttgggcccggtttttccgctttttaattggggggggggacttttaaaccttagaagaaaaacacattcctgaggagggggttttggggctcaaacttttggggaaactcggggtttttgaaaaagaggccaaaaccaggggacttgcccccaccgaaggggggggggaacttgaaaaaaaaaaggggggggggggccttcacctggaaaatttggggaagcctttttttaaaccccggctg

SEQ ID NO: 19296 - DNA, 276 bp, Zea mays
  Clone ID: MRT4577_1175C.1
attacattcatctttatttttataaatcttttttttattctcattctttatttattttgaagcttccccacaaaggatatttgtttctaactaggaaagcccactgaataaattaacttgtgcccattggggaaaccccccaatggttgcggattaataaaacccagtcccccaactttaaaaaaacaccaaattattctcaaaaaactttcaaaaaaagcttggttacccccaaaaacctttttataaaagaggggaggacacttttaatccctt

SEQ ID NO: 19297 - DNA, 716 bp, Zea mays
  Clone ID: MRT4577_117600C.1
cggccaccaacttagcaatattttacatatataataataatatataggaggagcacgtttaccactggccagtcagtcagtcactcagtggccactgctacacagcacagcacacaaccaccacagaaccggcaccggaacggacagacagacagacaaaaactatgatgatccaagtagacagcccacagcgcggcgctaaagacaaacctttcttccggtccaaacccttactagtactaatattttatctttattaacggatagccgactaccaccatctacgtacgctgacaacaccaccacagtccgcgtcacgcctttcccgtcttgccgccacgtacgggaccgcctcacgcgccttccccggcgccgcccgccctcgcctcgccgcccgtcgtcgccgtcatggaccgaggttctttggacgcgttgaaggagcgcttgcagtgcgcgatggcgctctggatgccgtcctgcacctgcagcagcgagtcgtcccgccgctgcgcctgcgccagcgcctgcgggcccgtcacagcagccgccgccgcgggagacggcgccgcggccaccgcggacgacgccgaccggctcttcccgagccgcttgcacacctgcctcagccccgcgggcacgccgggtgggggcgcgcgcacgccggacgggtccgcctccgcgtccgtctcctcctctccctcgctcgccgcgccgcc

SEQ ID NO: 19298 - DNA, 299 bp, Zea mays
  Clone ID: MRT4577_117601C.1
ggggtgtgaaattactttttcagttttaattggggacaacataaatcaaggggaaaaaaaaaaaaggccccccgaaggggggcacaccccccaaacacaaaaggagggggccaagccgaccccacccgggaacgggggcaaacaagggagagggaaccggggggaaccccccaggcgaaagcaagaacccacccccggggccgcagggagcaaacaccaaaggcctaacccgtacacccagggaccccggcaccacaagaagcaccaaaccccccaaagcaaaacaaccgggggaaggg

SEQ ID NO: 19299 - DNA, 286 bp, Zea mays
  Clone ID: MRT4577_117602C.1
acatcaaaaccgccagataactttttttttttgcactataaaaccacaggcgaggaatgttccaaagaacaaggggtgacttaacaacaagatgcaattacaaatataacttggtgacagcccatttggcagagcctccctataggctaggcacttgctaccttaagataaagcgtaagaaaagttatcttcttaatacatatttttttctaggacttccttcggtctcgaaatttttgtatttatgcctagtacattttttaaactaataccgtcggtttatata

SEQ ID NO: 19300 - DNA, 268 bp, Zea mays
  unsure (1)..(268): unsure at all n locations
  Clone ID: MRT4577_117603C.1
cggacgcgtgggcggacgcgtgatgaccgcgtaattcaatgctctgagaaaccataaattgcgtccttcgaatacatgaaagtgcttaccagctttctcaatttcgacattgtttccacagctgtatattcctatatggcttcaatgtgatgctacgttttcaaaatagatgatgctctagaccttctaaagtcacggaatgctctactgcatgactntagctctgatattatatctaatgctttgtatgaacaccatgtgcatgcat

SEQ ID NO: 19301 - DNA, 517 bp, Zea mays
  unsure (1)..(517): unsure at all n locations
  Clone ID: MRT4577_117604C.1
gaactacactacaacanaactggcgtccgtcaccgcccgcgccctcttcgcatcccttcgcccgtcgtcgtcgtcggccttccttggccactctagccgcctcggcctcacttctacctcntcnccnacnattttgtgtgggggggggggagtccaattncnantnnctccncttccttccctcccccncctacctcnacancancctnccnnntaacaactccttcnacccnttnnncctnncnnatgaccctnataacctnnagtggtacctgcatgccgagctggtgaacgggcggtgggcgatgctgggcgtggccgtgatgctgatcccggatgtgctgaccatagcctggctgatcaactcgccccatttgtacgactccggcaagtcggattacttcgcgtcgtcttcgacgctgttcgtgatctatttcatcctgtttcactacgtgggaaatccggcggtggcaggacatcaagaaccccggcagcgtcaaccatgaccccatcttca

SEQ ID NO: 19302 - DNA, 206 bp, Zea mays
  Clone ID: MRT4577_117605C.1
accacgcctcggacctactataacaattgtagatttgcttgctggtcactctgataaaactagtgcattgcatgcgatcaaatgtaacgctcgatgctgcggtgctaccatgcacgtaccatattcgcgtaagtcagatgacaaatcaagtctatatcctgcagactgggcttaccactaactacctagtacctcctagcttgcta

SEQ ID NO: 19303 - DNA, 382 bp, Zea mays
  Clone ID: MRT4577_117606C.1
aaccggaccggaaataacgggaagaccaacgcagccggttttttaagacgcgggcaagaaagctagggcaaggccagggtaagaaggagctgacgcgaaagcaaaagaggagaaagcaggaaaactagcaaagaagagaataatagacgaaagaagggcccggagaagcacagagcaggacggaaggagcaagcaagactggaggagacaaccatgggaagaaagagaggtggacgaacaacatataaccatgaatgactttgaggaagcagcaaaaacggaacagccaacaatgagaagagaagggattacaacagaccccggagacacaagggaagatgacggagggcacgactcaaaaagaaaagagcacgaccgaggc

SEQ ID NO: 19304 - DNA, 243 bp, Zea mays
  Clone ID: MRT4577_117607C.1
cttgctctcctcctcgtctctactgcttcctcccctcaaatacttctaattcacaatgtacacaatcacatgataatcatccactattacatcattgatacaatcaacaaccattccattacttattatacatccttacataattccttacttttcaaactataccattacacaatttaaacacatacttccatttaaaccattactccaaaattcactaaacaattttcactcaaaacttat

SEQ ID NO: 19305 - DNA, 177 bp, Zea mays
  Clone ID: MRT4577_117608C.1
cccacgcgtactactgcatctatccctactagcactctagcaacatgctatagcactaatgctgagccaaatctccaagatcacgacaccactacaatgagaccatgcttctcaagattattagacaagcagctacactatcaaccaatgactgattcactactaccttcatgacat

SEQ ID NO: 19306 - DNA, 279 bp, Zea mays
  Clone ID: MRT4577_117609C.1
ctcgaagtgatcatcagattatcaaacgacgacttcgaacaaaaacagccagatatatcacttatggaaatgtgtaatataaatcttatagtcatagtcattggaacttgcatcctgtattgtaaatatttatggatatattatgcatgagatcactctgcatatagattgcagtttgatacatagtataattgtaattcaataaatgagtcaaaatttgtatatgtttataaggctttttgataatagcttcttgcaaactgaatgtccctattatct

SEQ ID NO: 19307 - DNA, 197 bp, Zea mays
  Clone ID: MRT4577_11760C.1
gcttcaatccttcggaaaaccttgaacctttgtgaaaccgaaacgaacaattattcaagcagctaatgcttaacatctaatgggaacttcggtcgtgggtttaataacggccttaaggattttccgggcaagtaagggctttcggttgttggcggcgttcgggaacggcttgaattttaataatttcaagggcaagg

SEQ ID NO: 19308 - DNA, 650 bp, Zea mays
  Clone ID: MRT4577_117610C.1
tcaccagatgttggcttcgtggtccgtgtttaacgggcgtagagagagaaagagaacagagcgagagagggggaggacgaagccctccgcgtcgtctcctgctgttccatcccacatctattctgcctcggcttgcaccttcgacctcgctggtgaacatctctggttctattttcatcgtcgggtaacaagaaactaatcagggagtctcttcccatttcttgcagtggaggaatgtttagctacagccgcgcagcatgctttccagagcataaattggtggaagagaagtttgatgctaccactttgccagaagaaccgagccagacacaataacatcaaactgagtctgagatactgcactttacaaattctttcgatattggcagattgaagaccaacaagatttgaagagcagcaagatcagcttgcacctgcagtttgaagaaatcctttcaaagaagactgcttgcggcaatcttgccttcactccacaagcatgtgctgtgttatgcgtaccatgtaatgattgtagtacttgacaactgataccaaagtagtggatgcttttctttcgcatgaagtcatgttgatttttgtacgttctaacagcgtctccatcaatatcctattgaatctcccatacttcg

SEQ ID NO: 19309 - DNA, 762 bp, Zea mays
  Clone ID: MRT4577_117611C.1
cattgggtacctcgggccgggacgttgttgttggcttcgtggtccgtgtttaacgggcgtagagagagaaagagaacagagcgagagagggggaggacgaagccctccgcgtcgtctcctgctgttccatcccacatctattctgcctcggcttgcaccttcgacctcgctgaaagttctgacctcaaactgaaaggggcctgtgaagcgtttccttgcggcagtgcaatggaggtgaacatctctggttctattttcatcgtcgggtaacaagaaactaatcagggagtctcttcccatttcttgcagtggaggaatgtttagctacagccgcgcagcatgctttccagagcataaattggtggaagagaagtttgatgctaccactttgccagaagaaccgagccagacacaataacatcaaactgagtctgagatactgcactttacaaattctttcgatattggcagattgaagaccaacaagatttgaagagcagcaagatcagcttgcacctgcagtttgaagaaatcctttcaaagaagactgcttgcggcaatcttgccttcactccacaagcatgtgctgtgttatgcgtaccatgtaatgattgtagtacttgacaactgataccaaagtagtggatgcttttctttcgcatgaagtcatgttgatttttgtacgttctaacagcgtctccatcaatatcctattgaatctcccatatcttctatacgaaaaaaaaaaaaaaaaaagcggcc

SEQ ID NO: 19310 - DNA, 1290 bp, Zea mays
  Clone ID: MRT4577_117612C.1
atggtcggccccaagccgaatcggatgtgcaaatccaagagcgccatcgccacctcctccccttccccctccatggcggcggccgctgcggcatccacgccgcggcaccgccggtcgccgcgcacgaccgcgaccacctccttccccgcggcgtcgtcctactccacctcctcctccaccacggtgtcctcctccgcggcgtcgctcgccgcgctccgcgactccctcccggagctgccgctcctcttcaccttccaggacctcgccgccgccaccgccaacttctcctccgcgcaccgcctcgcccccgccgcgccctcctcctcgtccaactccttccgctgcgcgctgcgcgggcaccccgccgccgtcttccgccgcccgctccgccgcgacgccagggacgtggccgcgcgcctcgccgtgctgggccactgccaccacgccgccatcgcgcgcctcctcggcgccgccgcgtcgcccgaccgcaccacgctgttcctcgcctacgagctcgtcccggacgcgtccccgctgtccgtgctcctccggaaccccaagaacccgtccttcaccccgctcgcgacctggcactcgcgcctccagctcgccgccgacgtctgcgacgcgctctactacgtccacctccaggctgacaccgtgcacaaccgcctctccgcgtcctccgtcctcgtctgcggcgacgggcccctcccccgcgccaagatcgcgcatttcggcgcggccgaccttgccggcgagctcccggtcgagcacaaggatgacgacggagggtccaagggctccggctccggcagccaccgccgcaccagcagccgggggaggcggatcgagggcacgcgcgggtacatggcgccggaactcgtggctggtggcccgccgtcgcgccgctccgacgtgttcgcgctcggcgtcgtgctgctggagctggtgtccgggcaggagccggtgcggtacgagatagtaaaccggggcacgggcgagtacgagaggacgtcgctgatcgacaccgcggcggccgccgtcgcggagggcggcggggaggggatgcggcgttgggtggaccggaggctcagggactcgttccccgtcgaagcggcggagtcgctcaccgcgctggcgctgcgctgcgtcagcaaggaccccctggcgcggccggacatgtcgttggtggccgccaaggtgtccaagctcttcctggaggcgcaggagtgggccgccaagttcaatgtccccaccgacatctccatctccatagcccccaggtga

SEQ ID NO: 19311 - DNA, 211 bp, Zea mays
  Clone ID: MRT4577_117613C.1
ttccttacatccgctcaacccccactacagggggggtttttttgaaagggcagggggttacctacaccaaacgtgttcccatcggccccaacgaatagctctcctccatctgctaacgagttatccaaatttgtcacactatctcaatcaagctgccacacatgtttacctaccatcgctaatactctgtataacacatacttactcctta

SEQ ID NO: 19312 - DNA, 321 bp, Zea mays
  Clone ID: MRT4577_117614C.1
gacggacgcgtcctacgacgactcgtccggcactgcctgctgcctttttcatccgacaaccctagaaccacaaagctgatatctctacactggtgtgcgcgctgcatccgcatgatatcgctaaagtcaacggagttgctgcatatctcagacactgcaacacacctgctcacgttcttcacttcactggaccctcatagctacccaacttcttaaaaagtcttaatcacgatgtcattcctgccggtgtcccaaggaaacctgcgatgactctcgatgacctctttaacatcaacacatgcatcgacaagacacttgttt

SEQ ID NO: 19313 - DNA, 132 bp, Zea mays
  Clone ID: MRT4577_117615C.1
cacctacacgcttaactagacttgcatctggatccgctcattaacgcgcagacctgacggggaaggaaggatcttgagcgcttctgtttccagccggcctaagcctgttcagagttgctttgtaccaaactt

SEQ ID NO: 19314 - DNA, 1527 bp, Zea mays
  Clone ID: MRT4577_117616C.1
cggacgcgtggttctgccgccaattcccttgcctccagacttcaaatccccaccaccatcgaacctccccaacccggcaaatcctaaatccaatataggctaaccctagccgcccatccgcccgccatgaaggcgtcgatcaagttccgcgacgacgaccgaccgctgctgcgcgccaaggtgccgattggcgtgctggggctgcccttcctctcgggcctcgcggcggggggagacgccaaggacctccgcttcgacctctccaccgccttctcctctggcccggcgctccgcctctcataccgccccaacgaacccctccagcctttcgccctctccgtccgcacggggctggggccgctggggtcccctgcccgcgccccattcgccctcgccgccgaattcaacctcacctcctccaacccgcccgccttctcgctcctcttcaagccccggatcggggacttcgccgtcgccagctccgtccgctccccgccgacaccgccgcccacatccactccgcccccgctagcgatcaagatggtcgacctcaccaccaacggcgacgaccacgactgcgaagcacacggtaacggcttctcctttaacgggaatgtattgggggcgaacgtggcggccgtcaccgggacggacggcggcggcggcggcgtaggcgcgctgctgtccgggatgcggctcacgaccaggagcatgctgccactgtggagtaaagcgagcctgcggttccagtgggggctgcgtgtgccgccggagatcaaggccacgcttgcagacaacgggtacgggcgcaaggctgggagcctcgccatcagcaagctgccgctgctggtgatgaacaagatcaccatcgagcacacgcccaaggtgccttcacagtctgaaacggacaagaagaggaagaaagatacaccaccggcagccaaggatgaagagttgtcattcatgaagaggcaactggataagctgaatgtggagaacacaatgctgcgtcgtgcagttgaggacttgcgtgcagagattggagccggcaaaggcgatgatcgtaagctgccaacagcagtgccacctcaacaacattctttagtgtcgaaaccagatcgccatttccacatcaatgcgaaggaattggtagacagtgggacgaaaccggcctcaaatgaagcaagtgaggagttgaagaaggtgcttgagggccggcggaagtaagaagcacctagctagggcttgctgttattgcaagccctacattatgacatagctgctgactgctgtgtcaggttttgtggttaataataatacttcctcgctggagaagattgctaaggtcagtttagcccctcgctggagaagattgcaagtgaggttgccattcgccataggtgtggtagtaattttgcctcaattctattttcattgcttgtcttaggatattctgttctgtataaattttcatcttttgatctaaaatgaatgaaggattagttttttcaacaaaaataaaaaaaa

SEQ ID NO: 19315 - DNA, 351 bp, Zea mays
  Clone ID: MRT4577_117617C.1
ggaattcccgggtcgaccctcgcgtccgcgcacctactagatcggagtctacgtcgacgtctatgagttcggcgccgtcctcttagggatgccgcacttgttcttcctcggccgcaccggtcgcgtctggttcgtctccttgcgcgccatcggcgtcgtgattttcttgctggagtatggtcgcatcatctggttgcgtatccatgtccgcgaggtgcatgagcagccatcccgctgctctgttgagttccgcctgatgtaagagttgttagtcctgctgaatgcggatgcttaggatcgcggcgtggtcatctgcacctagtggctgccgttgggccccttgcctgtctt

SEQ ID NO: 19316 - DNA, 656 bp, Zea mays
  Clone ID: MRT4577_117618C.1
actggcttttttttttttttttttatattttatattttttttaagtccacacaattgggtagactaaaaaaaagaaagttcaagcttagtgggttcaaagttgggcgatgcctcgataaaacaagcttgtctacctcctctgctacagaattgttcccaatccaatttgttttagtgaccgcaaatagaatatatccaggtttcgttctgtttcttcctccgtgcccacgggcacacccgttaagtgtagctcgagtttagtcgagtctgagccttcggtgagtgagattttcaatttaccgaaatgacctgccggccatgtaggggctcgccaagtggtgacaacctccttgggtcgatcaacgctgatcacctcacccgttacattcccaccaaacagggacatctctgcgccaacctcaggtttcatctgggcaggattgcggctccacatggggatcttagtctcgtcagtcaagaaatcaaacagatcagaggcgctacacatgaactgtcccttcgatgcggacactggaggtattgaccacattgcccttgctcgacttggtcgtctggttgttcgtagggaccggcgccgccgtgggggccgacttggtctgcaggttcgccgcggggggttgaggggttgatgcacc

SEQ ID NO: 19317 - DNA, 987 bp, Zea mays
  Clone ID: MRT4577_117619C.1
agcatactgaaaaggtgtaactaataatcagccaatcaaggaaaacacacctgactattgagccactgatgtggggtttcattatatcggggcgtattggaaaccttagctaatagtgttaattagatatctccacaacttagttccatgtcaagaagctaagcagaaattagttttaattctattgacgtactatatattactttggctgctgttaccatcttccatgtcattgttctgttctttaaattatatagtatatgatatctataagaacttgaagtttgtataggggaacgagtacgtggcaaacttctgctgctctgataaggttcaatttattaacagttcttctgtaaagcatagaaacgcttacttttaacacagaaaatcaatgacaaaggtctggattttttatgaaactgaaaatggagataggagtcaagcatttataatgtaactgatgctttgcctgttgttatgcagcttgtggtgaacagtacttatttatatcatgttattaggttttttttccattttcctcaaaattctattgggttgtgtatggcaggaacagaaggagggcagtgaagctcggtttccttgattgctagcagtattatcttgtgtcatagtggacccgctttcgtccagcggtggtgccaatatttagaagcatcacctggcctgggcagatgtagtgtgcgtcttatagtctctgctttagatgtgcaatgtaacgaagctttagcacagtatgaactagaccgcataaaagaatccatgtccattccgccagtaatacgagcgggttggtatctgactccttagagtcaaaagtctgtacaattgtatcgtcgctccaaagcaaaaaaaaacaataataatgtgctggagaagcggcgatgacttcacattgtacacctttaccagctggaatttgacagaagtttggaaactgttcttgtcaattgcaaacaaaaaaat

SEQ ID NO: 19318 - DNA, 337 bp, Zea mays
  Clone ID: MRT4577_11761C.1
aatacagttgtttgggaagccatgcacagattaacccatttgctagctgagtgggggaacagggccatggtttcaaccagcgggacaccaaaaaaggaggatggtatttattaccagaagcccaaaacaacttggagcaagacctcgttggaagtagcatctggctctgactgaacagaacacaactgggtacaaaggttggttgcccaaacacttgaatggcttttatgcctaagactactccttctggcgggcacccgggagctaatggtctatgccatcaaggccaagcttggcataggccgcacacccattggtctcatctgcgacctttaca

SEQ ID NO: 19319 - DNA, 241 bp, Zea mays
  Clone ID: MRT4577_117620C.1
aagataaagggttttaggtaaaaacataaacaccaaacccaccttacacaaacaatacttattcccaaataacctacacatgtatacactaaacaaactccaaaaaaattaagctaacttgtttatacatgaacaactctatcaccaatacccccaccaagcacaatcaacttatttatccactcaattctctaaaataaacaatttttcccatactttacaaatcctaaacacaaacaat

SEQ ID NO: 19320 - DNA, 400 bp, Zea mays
  Clone ID: MRT4577_117621C.1
ggaacctttgggctgatttatgtgcttgtttatgtgcttgtggatgtgcgggtccggacaggacgataacatacttggtaaagagggtagatcaatttgttcctgccacaccgactagtaaacaaggtaatagtgagtcccttaatagcacggcacgtcatagtaaaatgtccggaggttatatagaggatcattcgaaaacctagctctgacctcttgggtccggtcccccgaatacccttcctatttgcacttaaaagacctcgaaaagtcaacgccactgagataaatcgggccgataagaagctagaccctaaatcggcctactaacgtttgcgcttggtcgcggaagttaacgactgaagatacgcataaagaagagaccggcgaagtggagtca

SEQ ID NO: 19321 - DNA, 384 bp, Zea mays
  Clone ID: MRT4577_117622C.1
tatatatcttttagatttcaacttcctcgactacttttttaggtaggtcgattggggtttgtaggtgaagtgtcgatttgtctgtgagagtgagaccacatgaagctagagagagaagatgccaataagctattcaggctgccgctgcttcgtgcttccgttccactggccgggtggcttgattgtttatgcagacttggctaataagctattcagaaaaaaaaaaaaaaaaaaaaaaaagaaataataacacaaaaaaaacaaaaggctgcccgttttaaaaaaatccaagttaaagaacgcatacaagcaaaaaaaaaaaattttccccaaaaaaaaaaaaggggggggcccttttaagggaccaaaattttctccccgggg

SEQ ID NO: 19322 - DNA, 447 bp, Zea mays
  Clone ID: MRT4577_117623C.1
caaaccaacagctcaaaagaagaaatacgggcttgaacaaaggcacagggccaagacacagaacactcagctgcagaactacaccaacaaggggagtgtaaagctaaacaaccccgacgcccgaaaaaaaaaacgacaaggcaccaaaaaaagaattggccaagaacatccggtaaccaaggaagcaagcattcgattattcacgaaaaaaaaccccggagcccacaacgaaaacccaaaaaggcaaccccccggcccctaacaaccaaagaaacgcccccaagcccctgaaaccacaaccccaaccagaccaagccccggggggggccgggcccacccacgcgacggaggggcgccccggcccccggggagagacaaaggaaaagggccccaaccggggaaaaaccggggcggcaaaaaagccccacacaccgcaccggagggcgc

SEQ ID NO: 19323 - DNA, 442 bp, Zea mays
  Clone ID: MRT4577_117624C.1
taagaatatcttttccctccttatcatcgttcctcaattgcaagagcagcacaatgtgactatggtacggctgacaacgtatggatcaggagacaaccaaacatgcccaaagggatggtctgaaaagcatagacgacttcgcggcgagcacacccctgatgagctggagatggaggacggcgacgagatcgatgccatgcttcaccagaccggaggcagcgttcctagcaccacctaaaagcatcagtcgcggagcttcgttttgctctccgccctgcgtagtagtaaacaaaagggaaaaagtctttttaaggaacttgtgatgctctggctccttgtgccattgctgagggacatccctagcctttgtttagtagtatggcttggtactttgttctgtcatcactcgtttatctattcctaatacatgccgtcatgattg

SEQ ID NO: 19324 - DNA, 250 bp, Zea mays
  Clone ID: MRT4577_117625C.1
ctaataggtgggggttttaatattaggggggggtgaatatataaaaatatatgtagatgagtttttaagcttccaacgccttaagacactttgcactggtagattcagctggagggactgctccccttccccagaaatcctttgcctggaaacccccccgattcttgggggacatcgcgtacaaagaaagatgtcagtttgccattgatccagccattacaacactcacaacaatttctttgttctttcc

SEQ ID NO: 19325 - DNA, 388 bp, Zea mays
  Clone ID: MRT4577_117626C.1
tttttaacctaaatcataaagtttaagattaggaatttaacatcttctcaagcaattcaaatatcacagttggcttgacgaagtcattgtcgaccaaggtcaccaaaacatattcatcatgaatcttgtgtagcaattctcggcttgcactaccatctggataaatgttggcccagttattaagccaggcatcatatgcttcatctttccaaactcgaaagcttaaaggatctacaacagtcggttgcgcaatttcacatcctggaaatacgccccaagtcacagcgatcggttcagtcgggtcactgttagtccaatcagtggagccatcatggttgatcatgtgatagttgatttgtggataatcctctaaagtttttcgtaactt

SEQ ID NO: 19326 - DNA, 344 bp, Zea mays
  Clone ID: MRT4577_117627C.1
tcgaccacgctatcaagcccacatggactcggggatcacccggagtggctgcggtcccggtgccgccacggtacagacctgtggctctgtgccgacgtttgggacaggctccggcgaggtgctagacttcgacgcacaccaccggttcaccatctacatcaccgacagcgatggggaactgcagcacataccggcgtgctctatcaacatcagtgagtacacgccgcgtgaggaccctatgctatggcgccggttctaccgcaacatgctaatgcataaggagcaccactggtctggcatggactagcaattccggtgcctcattacagcaccttctggggaca

SEQ ID NO: 19327 - DNA, 131 bp, Zea mays
  Clone ID: MRT4577_117628C.1
aatgaataattggtcaggggatgactgctaaaaagccccaaccatctcaaactttacccgggtactaacaaggtttaccaattcaaaccgtgctcttaataaagggcaaactaattcctatgcaaatccaa

SEQ ID NO: 19328 - DNA, 637 bp, Zea mays
  Clone ID: MRT4577_117629C.1
gccggccggtccgggaaccaaatcaacaacccatccattaattggaagcgagatacaccgggacaacgaaccgagctagacacttgaacaaatgagagcagacgcaacgggatgagcaacaataacgcgatgcctgcgaccatgctctccgtcagtctcgttgtctctagcatgagtggctgctgcaagggcaccgccagcgacactccatgacgtacgctgtgcattctcctccccatcagtctctggtgctgctgggtcgaccgtggccacagctgctactatgtcttcaaggagccgatgatcacgcccacccggtgctcctgctacctctcgcaggacaagcggtccgccgactgcacacactgctacgagctcaccgtcgccaagaccttgctctgccgcgactggatcttgaggctgtactaccaccacgtctgcacactcaggcccgtgcaactgctgcgacttcggctactgcacgatggactacatcctactactgccaccgcggggacacgcaggacacgcgccccatccactgcacagcgctccatcctatgtggagtccgaccctcctcgactaccgatgactagacgtcttccacgaactatcctcgtcccaagtgaactccat

SEQ ID NO: 19329 - DNA, 415 bp, Zea mays
  Clone ID: MRT4577_11762C.1
ttttttttttttttttttttttttttttttttttttttttttttttttttttttttttttttttttttcaagccaaatcactgtttcattttttaaaaatgcatccccccagtttagggggaaaattcctgttttttcaccatcccctgggcaacttgattttggtggcttcctttttacaccctaaccaaaaaaccccccccgccccctccaaattgttggaaaaaaaaaaatgaaaacccttttgttaaggtttttaacaacagcttgggaaattggtttttttacatttacattaacattggggggggggctttaactttttgataacttgtttaggaatacaccaaaagctcactgaatcccctaaacatttgtgaaatatttgggtgttccaattataacattggccagg

SEQ ID NO: 19330 - DNA, 397 bp, Zea mays
  Clone ID: MRT4577_117630C.1
gggaaccgggccgcccctctacgcaaactctatatttttttctatttctttttttttcaatatttaaactttttaggggcgatattaaaaaatttgggcattccaataattaaaatcatttgacacaaaaaaaaaaatggcactcttattacactgctttacaaccttcaaaacaccttgggccagccttgttttactctacatttcactctcgtcccaccctacttattccaccccacttctttcttaaccaacattcaagttctttccttccctgccagccatatagatagacatatgggaaaggcatgcgcggccttcattgtcattaattctttgacatcaaacgggcaccacactcatttaaacttgatccaacctctttgcatcttacaaa

SEQ ID NO: 19331 - DNA, 293 bp, Zea mays
  Clone ID: MRT4577_117631C.1
cggacggtgggacactggttaattcttcaattcatgattttcagtgggagcaagagttacagttagaaattactggctttattattggagactatgtcagaggtcttaaggatgaactagagaggaagttgtatgagcaaagctccattgtgaacagtctaagaaaaaaatcgcaagacactgtggctcagtgtgcttccatccgtgaagacctgattgctatttctaatatgctattaccttcagaagaggaacaccatattcctctgtgtagacatgaaagtttgggtaat

SEQ ID NO: 19332 - DNA, 294 bp, Zea mays
  unsure (1)..(294): unsure at all n locations
  Clone ID: MRT4577_117632C.1
gctaatcctataatccatgatttaaaagatttgcgtgccanacagtcaccagggaccacagatgaaattgcagcagaccccatacatcatcttgaaatatttagatcacattatagatataatggatccagagcacccatactcactggaacaaatgaatgtagtgactgaagatttaattgaactcaattatctacgtaatcatgtcatgattacattcaccgcaacaatggagcagtggatnntgacgtctattattggactacgcatacgcgtgaaactcagactgagctt

SEQ ID NO: 19333 - DNA, 551 bp, Zea mays
  Clone ID: MRT4577_117633C.1
aaaaaaaaaaaaagaaaaaaatcccaccagtagggtaaaactaacctgtctcacgacggtctaaacccagctcacgttccctgttggcgggtgaacaatccgacgctttgcgaattctgcttcgcaacggtaggaagagccgacatcgaaggatcaaaaagcgacgtcgctgcgaacgcttggccgccacaagccagttatccctgtggtaacttttctgacacctctggcccgacgcaacccccggcattgagaaaaaaagaacgccaaaggatcgataggccacgctttcgcggttcgtattcgtaccgaaaatctgcgaatcgagcgagcttttgcccttttgctccgcgtgaggtttctgtcctcactgagctcgccttgggacacctgcgttacgtttttacagatgtgccgccccagccaaactccccacccgaatctttcctcgacttgggtcagaaaaaaaccgagaggagccgatcgaagaggaaaaaaaaaagaaaacgaaaaaaaaaaaaaaacaaaagaggggggaaaccccctttttt

SEQ ID NO: 19334 - DNA, 321 bp, Zea mays
  Clone ID: MRT4577_117634C.1
cccacgcgtccggttatcctgagttgcaattgcaacatgtaagctagatagaagagaagagaataggtgttcccgcgggaagacgctcacctgacatttcgtgaagcaccggatgccatggtgatctctcacagcttctggtcacaaacgttaaggtattcgtcgagactaggtaaaaacgggtgctacgatagatgtggaaactggcgcggcgccaatagatcttcagctatgggacagaaagtgaccactaaaaaggccatctgcaactaactgaaacggggatcttgtgattacagttaaaggcaccaaagcactagt

SEQ ID NO: 19335 - DNA, 1122 bp, Zea mays
  unsure (1)..(1122): unsure at all n locations
  Clone ID: MRT4577_117635C.1
atcttcactgcatgcgttggtggttcgtttatgttaacccaccacccaccagcagcgcaagcgcttcccattcccgtccaccaaagctaaatctacgccgcaccaaccgaatcgggaaggggaaacaaaaaggcagcgtctgatccgacatgccaccggcatgttagaagacatgggcggaagcccgaccggagcccccctcccctggcactggcagtgacacacgcacacgcggcgcatccgtccagatccaagtgcgtgccttttgggcctcaaaagcggagggggaggccactgggcacagcggcatcttgcaccatcagcgcggcgcggcgcggcacggcgacgacgagtctgaaggaaggagcagacgagcaggaatcattccgctgcaaggctgccgtccgcgctactgcccccgctttccggggctgggcggacccgcgcccgcctgtcctgtcctctccagcctgcccgtgctcgggcgtgtttggctggcggctggcgctgtcgtcgcacgcaccaccaccgccacaagggccggggagccctgccgcctttgctgattcggctgtacaacagcgcgctagccctttttttttttcttctgagagagatgcttcccctgctgcttatatccaccctcccggccttcacgctgctcctcgccgcgcccgccaccaaggcctgctgcaagctcgcgcgcgagctggccctcctcgcgctgctgctggcgacggagctgttgcgccacgccaccgccgccgccgccgccgnggggagcagggagcgggagcgaggcgccaggatgccgtccgcttcgtccaagccggcgcccgcattggcgtcggccccctcggccgaggcggagacgacggccgccgccgcagccgccgccgcggggctcccgctgctcgacctgccggagctcgcgctggaccgcgtcctggaggagctctcgccgtcgtcgctcgcggcgatggcgtgcgtgtgctccgcgctcagggaccgctgctccgcggacgcgctgggggggccgtacctgcggatcaagtgggggcgcgtgctcggcgccgcggcgcgcaaggaagtgggatgccgaacctgggcggcaccgccagc

SEQ ID NO: 19336 - DNA, 379 bp, Zea mays
  Clone ID: MRT4577_117636C.1
acaccccataactgattctagcatcagcatcggctacaaggggtcgttaaacgatcaagagcgggagcagcactatcacaatgatcctatgtctccacgcccttctactatctacgactgctaccaaaagacctccttacccgaaaaagcaacgctcattcgacgagcacaccaactgagaggtcgtgtggacctgctacgaccttctcaccaagtacaccgccacctgcatgaactacatgcccgtctacacggacaaaggcgccaccaagtacacatgccgcgacttccttccctaaaactacagctgcaagatccactacatactcatgcaatcaaccatggtcacaaccgatggacccttcttccataagcatgc

SEQ ID NO: 19337 - DNA, 252 bp, Zea mays
  unsure (1)..(252): unsure at all n locations
  Clone ID: MRT4577_117637C.1
ggggggacaaaacacccgaggggggnagacgaaggggtttcatgggaataagttaaaaaccgaccattggccacataaagttttcccgggaaattttcaagcaaagggactcccaaaaaacttacaaccatttggacaacataaaggggacatagttgttgacaccacgaaacttaggcatcaaaagatccaggaccttcttatttgaagggccactgggtctccctggggaactcccctttctccttaggg

SEQ ID NO: 19338 - DNA, 245 bp, Zea mays
  Clone ID: MRT4577_117638C.1
taagctcggaaccggctatgcctggtgggggagccgtacctcaccgccaactttcaagttgggggagatctcaacgcgggacacaacaagaaccgcatcatcccgcgacacgtactgctggccatccgacaatgatgactcgagaagctactggcctggccaccattttcacgggggggccctgcaacatcaacctgggctactaaaaaacaaaaccggtggcgtgctggggggaacccacaaaa

SEQ ID NO: 19339 - DNA, 353 bp, Zea mays
  Clone ID: MRT4577_117639C.1
gggggggaacgaaaaccaccggtggtaatccatatagcggcaactctttcaatctacatgttcaatttctccaatggacatacaccaatgaaaatacaacaaatggtacataccacacggttcatttctacaacggtgattgggggtaggggctgggacaacccccagctggctcacgctcattactgacgtcctaccaattagcccacctacttgcttttggggccaagaacgtccatgtcaatgaactcttacttgcacatgccgccagattcacccatgtattccctggcacaatagtacatatttgaaatgattgggatatacaaactctacaggtccttcattttatt

SEQ ID NO: 19340 - DNA, 253 bp, Zea mays
  Clone ID: MRT4577_11763C.1
tgccaaattcattggtgcaggtgctgccacagtaggagttgctggttctggtgctggtattggaacagtctttggcagtcttatcattggctatgccagaaacccttcactgaagcagcagctgttctcatacgctatcctgggatttgccttgtctgaagctatgggtctcttttgtttgatggttgcgttcttgatcttgtttgccatgtaacagaaattactgcctaaaatgttggcattcatagtaatt

SEQ ID NO: 19341 - DNA, 414 bp, Zea mays
  Clone ID: MRT4577_117640C.1
gtcaatggttccgcgatcaaagtgactgacggtgaaaaaaaaaaaaaaaaaaaaaagggggggcgccctttttttttttttttttttttttttttttttttttttttttgtgggggggccgttggggtgtttcccaaaaaaacaaaactttttttgggggggaatttacctttttccctcaaaaaataaaaaaagattttaggggttttagggccctctggggtaatttttccttcccattgggggaccctattaaggtggggaaccaataacccctttgggggggttttttaacaagtgggggcgggggctggctcctgggtttaccaacaaaggttccttttgatagttggtggccccctttggcctcaaatgaaaccccccgattgggttttgggctatttggggttttta

SEQ ID NO: 19342 - DNA, 212 bp, Zea mays
  Clone ID: MRT4577_117641C.1
cccactcgtttcgtaccacgctgtccccaagtgatgctccttcgcgctgtgactgacctcagaggagcaccatggtacctgtgcaaaactccatcttctgaagtgacctactcgactataagctctgatcggaccgccctttccttactagagaataatgatcagatactggagcccaaccgaactgcctatgaagaccctgagcactcatt

SEQ ID NO: 19343 - DNA, 264 bp, Zea mays
  unsure (1)..(264): unsure at all n locations
  Clone ID: MRT4577_117642C.1
gaanaccgggcggaccacaggcttccgttttcttccccttttaacaaagtcctcctttttttagggttcctaagggttttttgaaggggcaatgtcgccggttgatggggagtaccattgcttcgtcggcggccttgcttgggccaccagcaacaagtcgttggaaaatgctttcgcctcttacggcaagatcctcgattccaaggtcataaccaaccggaagacggggaggtcccgcggttttggtttcgttaccttttcttc

SEQ ID NO: 19344 - DNA, 237 bp, Zea mays
  unsure (1)..(237): unsure at all n locations
  Clone ID: MRT4577_117643C.1
agtccgtggangcaggccgtgaaccgttgctcgatacgcgcatgccgctttgccttcgcgctctagcaccactcgtcggctctcgcgctcgcgcaccacgcacggcgcggtgccgactgtcgagtaaccccccattcgcattccccagccccaccgatcggatcggcaaaatcccccaccagatcccggcgcccccaccacacaacatacgagcatgcgagatgtgcacgtgctgat

SEQ ID NO: 19345 - DNA, 467 bp, Zea mays
  unsure (1)..(467): unsure at all n locations
  Clone ID: MRT4577_117644C.1
ctactggcctttggcccgcccgtcgtgaggtccgcagctcgagcagccgatccggcggcggcaccgaggctttgcactcctctgtctctccgccgccctcctcgctgccgccactctgctccccggcgccgccgtcgccgaaggtgtcacgccctccgaggcgcgccggctccgcgacgaggtgaaagatatgttctatcatgcgtttgatggatacatgaagtatgctttcccactcgatgagctgcggcccttaagttgccaagatcgattctttggataccttggctttactgggtgataaggagaaatttggtgctgctgtggagtgggttggtaagaatgtccactttgatattaataaaaccgtctntgtttttgaaaccaacatacgtntccttgggggtctgctttcagctcacctgnttgcccgtgattttgcccctggtttgagattccaatcttct

SEQ ID NO: 19346 - DNA, 2550 bp, Zea mays
  unsure (1)..(2550): unsure at all n locations
  Clone ID: MRT4577_117645C.1
cggcgctcgggccggccgggccattttgtcccatcaaactcgctactggcctcgggcccgcccgtcgtgaggtccgagctcgatgcagccgatccggcggcggcaccgaggctttgcactcctctgtctctccgccgccctcctcgctgccgccactctgctccccggcgccgccgtcgccgaaggtgtcacgccctccgaggcgcgccggctccgcgacgaggtgaaagatatgttctatcatgcgtttgatggatacatgaagtatgctttcccactcgatgagctgcggcccttaagttgccaaggtgaagactcccttggtggttatgcgctcactcttatcgattctttggataccttggctttactgggtgataaggagaaatttggtgctgctgtggagtgggttggtaagaatgtccactttgatattaataaaaccgtctctgtttttgaaaccaacatacgtatccttgggggtctgctatcagctcacctgattgccagtgattatgccactggtatgagaatccaatcttatgatgaccagttacttcatttagctgctgacttagctcagaggttgttgcccgcatttgacactcctacaggtattccatttggatctgttaatttattgtacggagtcgatgaaaatgaaagcaagataacatcaacggctggtggtggtactttgacactggaatttggcatattgagtcgcttgactaataatactgtttttgagcgagttacaaaaaaatcagtgcgtggaatatggtcacgcagatcaaaactcaatcttgttggtgcccatataaatgtctttactggtgaatggacacagaaggatgcaggaattggcacaagcattgattcattctatgaatatcttctaaaggcatatttattgtttggagatgaagaatacctgtacatttttcaggaggcttacaaagctgccatgcactatctccatcatgatccttggtacgtggaggttaatatgaactctggtgctactgtttggccactcttcaatagtctgcaggcattctggccagggcttcaggttttagctggagatgttgatcctgctattcgcacacatgctgccttcttcagcgtctggaaaaagtatggttttacccctgaaggttttaatcttgctacatccactgtacagaatggacaaaggagctacccgctacgaccagagttgattgaaagcacatattggttgttcaaggctaccagagattacagataccttgatgttggaagggacatattagcaagccttcaatatggtgccagatgcccttgtggttactgccacatatcagatgtggaaacccacaagcaggatgatcacatggagagttttttccttgcagaaacggtcaagtatctctggcttctttttgatttagctgctggccctgacaatattgttgaaaatggaccatataagtacatatttagtacagagggccatttgttacctgttactcctgagatagccttggaagatgaacattgttcatattttggagcattctgtaatggcggtgccgaccatggatatggtgctagtgctagttctactaagcatcgaaatggaaactatacccaattagatgatattcaaaccccttccagtcactattcaatgccaatgtgttgtttacgccaggttacatcaagggagtttgtccaggattgactcatgcgcagaaatttgggatatcatactctgatgaagaggataactttatagagcagacttctgagagtcttgatcatcatggtgaatctgccatagaatctagcgtccaagaccaatcaagttctattatattgatctctcacccagtcgcaagccaacaggatgaggcttttgagagcgagtctggaagtcaagatcatgcaaatattgttgtaacttctgattctgattctgattccacaagccgtgataatactgttggctctcccggaatgaactcggaagaacttatggacgacatatagggcacctctagacaggacaaaagatgaagaggttgctcacagtgttgagtccaagatatcagctgaccctttgctcatgtagcaacccatttctgtggaatcttcagggtcaatggcttgccgaatgcagaacaagttagcaagcaagcaaaatgtctggtagacgattccagtatcttgccagcttcaacatcggaaattgatatttactttcagatagaatatattacagggcgtacattcactaatttgttcttttttttctgtatcgatcactaatagatattattttgattaatagagaatgcacgagttttgtacaccagatgcatatgaagaggcgcggcacacatcacaggatctatttagtgtagaacagaacagcaaacgagttttagcgtgtatcttacaagattttagattcgaaaaaatcaaggatttgaagctagctttgatagataagttttttttttagtgcgggnccctcagatccgacgctcctaactcttctac

SEQ ID NO: 19347 - DNA, 284 bp, Zea mays
  Clone ID: MRT4577_117646C.1
acgtaccagcggaggttttatttcttaatcattggacggagagacagaacgttgggctgtgccatcaatatgtgttggtagaggagggcaacatttgcaggctacttcttccacatgatctttgcctggatcccgcggggctacggaactttcctcaggcgtatcgatatgaagggccgggcctagccacactgccatccaacgggcctacatatcagccattgaaatcactcagaaatgctaccctcagcggataggcaaggcattaatgatcaacgagcctt

SEQ ID NO: 19348 - DNA, 143 bp, Zea mays
  Clone ID: MRT4577_117647C.1
gttttctttttttttttttttgacctgccggagcgcgcgctttaatggtgagctcccaatacactgtaggtcggtcctaatcactctaaggtcgagatcccagctctgtggagtccgggactaaggtattcgcggggggaacc

SEQ ID NO: 19349 - DNA, 1057 bp, Zea mays
  Clone ID: MRT4577_117648C.1
aataagaacgcgatgaggatatgcgccttttttttttttttttttctgtgcattaatatcataataaacaggataacatgggtatgtacatattgtactcctacgcgacaacagttatatatgatgatcagacatcgattatggtttgcacaagaacatttgatccgacagcacgaaatcccatggaatcatatcgtgctttctttttgtttcacaaaataaaaaaacccgtgaacacaagtcatagtgccatgcagattgccacgcgtatcacatgacagaggtaaatcagagaggtcaaccaccgcatccgccgccgcagccaccgccaccgcatccgccgccgccgcagccgccaccgccaccgcagccgccgccgccgccggagtcgagcgccgagccgatgatggcgccggcggccagcccgccgaccgcgccgacggcgagccccgcggctcccgacccaagcccgctgcggccgggcctccctccagcgccctgcgccgggtagccgtacgcggcctgcgcagggtagccgtacgcgcccgcgggaggcggcgggtagccctggccgtagtagtatgcgttgttgttgctgctctgccggcgcggcttcttggcgccctgcgcgcacccgaacgccgcgatggccgccacggccgccgtcgcggccaccgcgaggagcaagatcgccacgggaccgagcggggcggcggaggcgccgtgccgcgtggccgcagcagcgccgaccgctagcgcctcgcgcacggcgagaaggctcgcccgcaccatggctatgccctccttgcggatggttgtggggagcgaggtcggcacacggcgagggagaggtgggcaggcgcgtgatggagacggggggaaggaggggagtggagggcagttaagaagggagggtccgctctgattggctttgcgaggtcaaagtcttctgctagttctacttgtgctagtgctacgattcaataatggcgtactcggtcgttgcttggttccctcgtagttgcaccgaaacggcgaagaagaattccccggccgg

SEQ ID NO: 19350 - DNA, 368 bp, Zea mays
  Clone ID: MRT4577_117649C.1
ctagttatagatcgccagcagccgaccttttctatctttcacctaccaccaatgtcttgcgaaaatggacccttttttgcgcttctaagcctcctacttcacgcaacaaactccattattgttccatagctcatattcgctcctaacgacggcaccacctattaccggctgccagttacacctttgagcttctaacacaccaacctgctagcatccaacctacaactaccgctggcagagagcgtctttcatcagcgcatctcccactttcaacagcaacaattgattcatctcaacctacgcaccatttctcccaaacaataactgcataatctgtcataactgttgctcctacacatcatgcaccc

SEQ ID NO: 19351 - DNA, 274 bp, Zea mays
  Clone ID: MRT4577_11764C.1
gcagacgcgtgccctacgaagctcgatcgctcgaggactcctacccgcgcgccggggggccacacattggcggcagggctctggcgtatccagctcccggctgctcggcttggatcgcgtcactgggagcattggcggcacagcctgggttacgcagccaggctggatcaccacaccacctcccgccgcggcacgaatgaccactacgatatatatggcgggcatccccctctcgcacagcgacgtagcgcgaggccctgctgtgcgagacaac

SEQ ID NO: 19352 - DNA, 233 bp, Zea mays
  Clone ID: MRT4577_117650C.1
aagcacgagcgggatctgatcaaattaggacaaactatgaatccccatacccttcacccatatatggtttttgagcattcgaaaacatgacaacaatctccgctaagagcaaactcaaaaaaaagcggcaaacaccaaacccatcctcaattggtgctaacacgctactatgtgccatcatcaatccaccccaggaatagaataaaacgggaagtccggaccgctccttttgc

SEQ ID NO: 19353 - DNA, 397 bp, Zea mays
  Clone ID: MRT4577_117651C.1
gaaggtattcagaacgccgaccgttgggaagggagcttcggggcggcccgccgtggcagcggcggtcggacggtctgagctcaatggcacgggcccttggggcgcgaacgccctacgtgggtcggtgcggacggagagcaaaggcgccggttgctagcttggattttgacttacaggcggtgagtgataatacgatacacggtagatattcgccactggcattttcaacctggcgcgatgaccaaacgcgtgaatcaacggagcctgtagtgctaggttgaattactatcacggcacgcacattatgagggataaactaacctggcttacgacaggataaagccacatcacgttcaatatggtgagctgaacaatgcaacactttgcgaaatctgct

SEQ ID NO: 19354 - DNA, 822 bp, Zea mays
  Clone ID: MRT4577_117652C.1
ggcgacttcgactgccttgtcctcgctagactgtggccagcccagcgtcgccgccgtctgcctcctcgacgaggtcaacaagatcgtcttcaacctaactgtctgaaatctcgtcaacatcaggcacggaccctaaactgagtgtccaccgcgagtacgtcaatctcattgatagctcttctccattcccttccccttcgcctacctcctccctttcaccgcctacggatagccctcaaggtgcctttcttcttcttgccatttgtctgtcctcctattatttttgtgttattatttttgtgttatgtgtaacaatttccgtcacagactagctgctccaagattaggcatgacatagaaaagcaagcaggggaggacaagacaaggtgagcgagatgcttcagatgcctagacgcaagtgtgtgctgcgtggctcacatcaggtgcaccgggcatgctggacgagctgaaggcgttcggcgaaatgcctcaccccaagagcccgttgtctatcaaagcctcttggttccatgagaactgagaagcatgttggcattgacgaggcaacgggtattgtcggactcttcacatcagttacgttcatttgtggagacaaaaattggtttaccaaggtcactgaaagatagatgcccaacagatcagcatcatgttgactgcataacgtgtcatgatagaatccttatgcctggcaggcgagccaaccttgttggacttgcacagtagagcattgcgattcacgcttttgactggacagtagatctttttcttataccattttggttaggagggactaacacatac

SEQ ID NO: 19355 - DNA, 267 bp, Zea mays
  Clone ID: MRT4577_117653C.1
gtccgcaagaccatgggttcttgcacagtcgacatggtggttcccatcatcacggttcaatctcagggtccttgcatccggctggaactggcgacactctataggaccccgcggtttcgcttttccgctcacagctaaggttcatatggaggagtttttggactgatgtacacgacttttggtagctaactgttgagaactttggacgagaactcaaatctctggtctctaagtgtggctggacaggccggatgaagttgccaatgg

SEQ ID NO: 19356 - DNA, 685 bp, Zea mays
  unsure (1)..(685): unsure at all n locations
  Clone ID: MRT4577_117654C.1
catacaataaggcagtacttcgactgtgaaaatgtttggttcaaaatacaaaagttctttttcagcctattgattcaatcacactttcggccctcactcacatcttcactttcttcgtcttctttgaccctttgttgtacaggaaaaagaacatggtacgtatctaagagagttcataaataatagctttagtaatacaggtctaatgacaaacctttctggtatattcttcggcttccaaagcagttaactgtcgggcacctttgtttcataattcaaagagaaatatcttcgtagtgttgagaacactttttgaaggagtcttgatatctttgactgccatgccgaaactagtttctctgacaattttaatgtggttgcagctagccttctcaagtactgaagccattccatgtgaaccaaccatcgtgcagtagtcactgtgggtgttgattattgattcaagttctcccaattccttttctaactagccaagcaccccctcggtgtcctcgctggtatgtgaagttgctctcgaagttgcaccaactgaagagaagattttcttcaaagcatcgcagcaccaggaaacaattgcaaaggaattaccctgaagatgctctaaagtttccaattgtggcagaaccttccaagttattgngcccacatgcacctgtctttgtct

SEQ ID NO: 19357 - DNA, 509 bp, Zea mays
  Clone ID: MRT4577_117655C.1
aattcggcacgaggccggctacgccatggccgaaatgctcgcccttccgctgcccctccgagcgccggcgccaccgccaccgccgcgtcctacaattcccaaccccatcgtcacccatcgccaacctcacacaccgtcctcctcccctcctcgcctcttctccccgaactccctcctctgcacctcccgccccactccagcctcatcctcccgcaaaccgcgcctcggccgcccgctcgacaccttccgcggcgaacagccgtggcacctgcctccgtccctgtccctccccgcccgccgcgcgctcctcgccttgctcgccgacccggcggaacacgcttccccgcgcgacgtcctctcggcgctcccggagaccgatctccccgccgtcgtgaacacgctcgcctcccgagggggccaccccggcatcgctgtcgccgtggtccgcgccgcgcgggacctccacggtgaccgggctctccaccacccgcgcgtgctgcctactgcca

SEQ ID NO: 19358 - DNA, 387 bp, Zea mays
  Clone ID: MRT4577_117656C.1
agaaaaagacttgcagaagcttcgggatgctagaattcagcaagacatgcttgatcgtgaagcttccattttacgtgcaaaaactcaagcagctttggcagagggaatctcatggggtatgacagatgatgcaatagaagagtctgcagaggatgatgcagatgaaattacttggcaaacctacaaaggttagcttactgatagacaagagaaaactcgtagcaagatagtaaaacgaatggagaagattgccaacatgaaaaaagaaattgatgcaataagagttaaagacatttctcaaggtgggctaacccaaggtcaacaaacacaaattgcacgaaatgaacaacggatgtctcagattatggaggagctagataatctaga

SEQ ID NO: 19359 - DNA, 630 bp, Zea mays
  unsure (1)..(630): unsure at all n locations
  Clone ID: MRT4577_117657C.1
gccgtcggtggtgcggngaaagccgaggaggcggcctggccagccgtccttctcgtcgacgctgctggacgccatctgcgactccttggacgagcaggccggcggccatggagcgacggcagcaccaacgcgtgggagcgccaagaagcagcaacaggcgcccctgcattactactactactacaagccctccttggcggccagcaaccgcgcggcgcgcgcggacgactgcttgtccggccgtgggtacttctcgtcgtccgaggtcgagtgctccctccgccgcctccgccccatccgcacctctggcggcgccgggccggcctcggtggctcccgaggagaagcaacagctggcaccgcctggtgcagcgatgagggcgcggaagccgttcgccacccccgccagcgacagcggcaactgccgcaggccggcctctcccggcgcgcggctcgccagtttgctcagcgcaatcttctccggcaagcggcagcacccggctccggcggacgacgagccggcgtgctcgacggctccatccagcgtgcgcccctgcctcgctaagacactgccgtcggcgcgggcgcgggtgacccggaggcagagccggagcaggaccgtgcgtttctt

SEQ ID NO: 19360 - DNA, 1995 bp, Zea mays
  Clone ID: MRT4577_117658C.1
ccatgaatacgccaaacttggaaaaatgcccgggtccacaaaaaacggcccccaccttgttcccttaaaccccgcccccccggtttatttagcttattcttttttttttttttttttcctttttttttccccgcgggccgacccatgtcttttttgagacaggcgcgtttgcgtacggccctaggccgcttttttttttttttttttactagtaaatgtccatcgcatttcaattagctgacaaacgacccaaacaatacaatagcttctgcttaatattgcagaacactggagtagcgagttcaccacgagagcagcaagacacaaacgagaagaaaatagcggcagagcacagggctcgcaatcatatacggccctttatttaaccgaccacggactcacgggaggacgaggcacccttcagcgacgggcagaggggtaaccttgacaggaacataggccgtagggccctcaccgtcgctggcttcctcctcttcctcatcatactgaaccaggccagcagcgctgaagatgtacgccttcacttcctcgaagcgctcctcggagagagagacctcagcgaggagtttccacgcggaggtttcagatgcctcctcatagtccatcctccgtttcagcaccatgtgtccactgatctcccacacagctgggttcacctgagtgtccagcagctcctggctcacttcacccagagcctgcttctctgcgtagcactgggggaacaggaaaaccctcttgccacagtcagaaatgagcacattgtaaggcacattgttgtcttgcagccaaatgcaagcattagaaaccacagtggccaggtcgtccagggtgttccctccctcaaataccaggcctctcacaggataatttatcagcttggacacggtcaccccattcttcttcgtgtcctcagagagtgggatcttgtgggtagctgccttctcaacagggaaaggcactgacaagtagtacgcctgaaagtggaggtgattgatggtggcaaacgcacccaagctattgtaaccaagcctgaagtatgggctacctccctcggctgccatttgcagtgcaagcaagaagctctctggatcaatcctctgaggcaggcggtccagaacacgaggaatgagaagcacatgtccatattcaattgggcttacattgatagcaataacatttggagcccgatcaacagcaatgattggagcgttgttcaggaaatagctgtcatcaccaccactatctcaaattggaacccggcctgcttcctggccaacttttgtgaaattgaatttggcagggtcaaacggctggagcacacggtccacacgaaactcagtagggcgcttcttaagatggcgcccttcattgagttgtgcaacaaacccaaggttgccaggaatgaccttggtctcacaggcagtgacatcgtagcggaataagcctcgagtcatcctgtcctcccactcactaaggagaatatcaacaagtaacttggttgaagcagcatcctcctgcgagccctttgccggagtcaacttgaacgcgtagaggggaagcttggaagctgctcaaagatgcaaatgttaatccaataaaagtgcagagtaatttgctacttccatgtccagtgaagcaagtacaatactaatttgctgatgtcttagtgaggtttccaccaagtcaaaaaagaaaccatatttccagtgaggcatacagtatgcacataataataatacaaaaggctctatgtttttgcttgcgttagttataatggcctggggttcagactgaaaagttattataaatatccacagttgcataagatatctgtttattatatccttatttaacccaactcaattcgaggcggataacagctaattgttacccgaaaaccgctgatggtaacaatttttaaccagaggcatgaaccaaaatagtgcagataaaaaaacccggccggcctcgagg

SEQ ID NO: 19361 - DNA, 1000 bp, Zea mays
  Clone ID: MRT4577_117659C.1
cagcgctgaagatgtacgccttcacttcctcgaagcgctcctcggagagagagacctcagcgagggagtttccacgcggagttttcaggtgcctcctcatagtccatcctccgtttcagcaccatgtgtccactgatctcccacacagctgggttcacctgagtgtccagcagctcctggctcacttcacccagagcctgcttctctgcgtagcactgcattattgaacagatagatgtttttttagaacatcataaagagattccaccaccaattcagtccagaggagcgacaacactcagaaatttacctgggggaacaggaaaaccctcttgccacagtcagaaatgagcacattgtaaggcacattgttgtcttgcagccaaatgcaagcattagaaaccacagtggccaggtcgtccagggtgttccctccctcaaataccaggcctctcacaggataatttatcagcttggacacggtcaccccattcttcttcgtgtcctcagagagtgggatcttgtgggtagctgccttctcaacagggaaaggcactgacaagtagtacgcctttaaagaagaaaagataatataattcagtactaagcaacatttttaaaacaaaagttaccacaacactatctgcacaatactgaatatgctcctgtttggttgggattttgtggtgagaagtaaatttagataccatcaaaagtttaatacctgaaagtggaggtgattgatggtggcaaacgcacccaagctattgtaaccaagcctgaagtatgggctacctccctcggctgccatttgcagtgcaagcaagaagctctctggatcaatcctctgaggcaggcggtccagaacacgaggaatgagaagcacatgtccatattcaattgggcttacctgcaaaaaccattgcaaaaaaaacatcaatggaaacaagaatagatagaatggaagtaggatttccagtgtgactgagagatggaagta

SEQ ID NO: 19362 - DNA, 543 bp, Zea mays
  Clone ID: MRT4577_11765C.1
cgaccacatctcaccagctgggagcatccccagggacagccctgctggcaagtacctgcttgagcgtggtgtgcagccaaaggatttcaattcttatggaagccgtcggggcaacgatgaagtgatggcacgaggaacctttgcaaatatcaggattgtgaataggctgttaaatggagaagttggaccgaagacgattcacgtccctacaaacgagaagcttttcgtgttcgatgctgcaatggtcagttcttcaccaagctacgtttctaccaacatactattcagcattatattaagacaaaaaaggcactcgattcgccttgtcagccaactgagctaggctcagttcactggattaattatgaaacataaagtgtccttttacctcatactaaccagacttgtcatttcaacaaataatgcatatgaacttgacatcattattcttgtcaacgagtatttctcttgtactcctattaggtcattacactggttatgcttatttcagagattcaaagctgatgggcatcacaccatagt

SEQ ID NO: 19363 - DNA, 655 bp, Zea mays
  unsure (1)..(655): unsure at all n locations
  Clone ID: MRT4577_117660C.1
ccccgcgtccgaaaaaactcatcttccccgctcgtctgcattctcggccatcggcggcgctccagagttccaggtaatcgtgctccctcccccgccctcctccaccccatctgctccatcccactccggtttcccattgctagggtttagggtagacatggcggcgtcggcggtgccggctttcccaatcgttaggccacaacaatgtgttgcatacggtttgtgcatccggtagtactcgctgtcctcttccctcaccttgtgcgccacggactcggggccgccgggcgtcgtggcctcgcgcggctcctgctcccgcgaggaggagaaggaagacaacccccggatgcttgccaacgcgacccaccgcgccagtggcctcttcggcgccggagaaccgcggcggccggtccgtgaagtcgtcactcggcgcctagatgtatctgctgctcatctcctgagattgagccgtagcccaactggtcgccgcgtccctcgcccctcccctcgcgcgcagcagcagagcaccacagcgagcaatggaggcggtgggcgtcgacctggcgctgggcggcatcgccgcgtccctccccgctccccccgcgcgcagcagcagagcaccacagcgagcattggaggcggngggcgtcggcct

SEQ ID NO: 19364 - DNA, 630 bp, Zea mays
  unsure (1)..(630): unsure at all n locations
  Clone ID: MRT4577_117661C.1
cggacgcgtgggcgctctcgctctcgggtctcgggtctccaccagtctccgctctctggacgccggaaatgcagatggactcctacaactacaactacgccagtttcttccacgacgaggctccgtccttctacccgcacgttgccgtgccgccctccccggagctgcccatcggcctcattgcctcgccaggggagccggagccgcccttcgcgccgccgatgccggccgcgttccaggactacccgccgggcgccgtggccgtgggggtgggagcgccgttcgggggggccagcgtgcacgggcaggcgatcgacgcgatgggcgggggcgacgggcagcgcgagcagagcatggcaatggcggaggacggggaggagccgccgccgtcgagagcagccgcgggttccggcacatgatgcgggagcggcagcggcgcgagaagctgagccagagctacgccgacctgcacgcgctggtggcggcccggtccaggggcgacaagaactccatcgtgcaggccgccgccgtgtacatccacgagctgaggggcgcgcggaaccagctgcagcgcccggacgaggagctcaaggcccgcatcctgngccacgacgccgggcagcagtgcgt

SEQ ID NO: 19365 - DNA, 669 bp, Zea mays
  unsure (1)..(669): unsure at all n locations
  Clone ID: MRT4577_117662C.1
gcggccgcttcgaggcnncggccggtgtcgggacgacaaaatcaccaaccagtccagtcaccactgggtgctaaggagaaatggccacttccgcgcctgcggccaatgccgacggcgctgctcccggaggtgtagatggccgcagcggcttctgcgaggtgaccaggacgttccgcagcctgcgcccgccggtgccgctgccgccgacggactcaccgctctcgtttccggagtttgcgttctcgctcctggcgtcgtccccgacccctgcgcacccggctctcctcgacgccgccaccggcgaggccgtatcgttcccggcgttcctgtcccaggtacgcgcgctcgcaggggcgctgcgctccgtggtccggctcggccgcggcgacgtcgcgttcgtcctcgctccgacacggctggacgtgccggtgctctacttcgcgctgctctcattcggcgccgtggtgtcgccggcaaaccctgcgctgaccgcggacgaggtcgcgcgcctcgtggcgctgtcaggcgcgtccgtcgccttcgccgtgtcgtcgaccgccgcaaagctgccggctggcctccccgccgtgctcctcgattcggaccacttccgctcctttctgcaaaagcagagcgacggccgtggggaggagggacttgcggcggaca

SEQ ID NO: 19366 - DNA, 1882 bp, Zea mays
  Clone ID: MRT4577_117663C.1
ttccaagtacgtggaaccttctgagacggctatcctacgtgtacgctagcctccaaacttcaaagcgcgtctctgcagggctcgcacgtgctctttttccctcctcaccccgaattaacaatcgcgaaatcccaggtttgacctttcccccagccttgttgttccagtgggacccactacacccatgtcccttcttcctcgcacacgcgggacactgcacctgatcctctcaagccctcaacacgccaatttgaccacgtgaccgtaatcttgatccacgccctccttgcacttgcaccgcaccggtgcctatttaacccgcgctcgaacaactctctgccggcaacgcaaccaactcgctctcggctctcggctctcggctctccaccagtctccgctctctggacgccggaaatgcagatggactcctacaactacaactacgccagtttcttccacgacgaggctccgtccttctacccgcacgttgcggtgccgccctccccggagctgcccatcggcctcattgcctcgccaggggagccggagccgcccttcgcgccgccgatgccggcctcgttccaggactacacgggcgccgtgggcgtgggcgtaggggtgagagcgccgttcgggggtgccagcgtgcacgggcaggcgatcgacgcgctgggcgggggcgacgggcagcgcgagcagagcatggcaatggcggaggacggggaagagccggcgccccggcggcggcagccggcgggaggccccgccgccgccgccgtcgagagcagccgcgggttccggcacatgatgcgggagcggcagcggcgcgagaagctgagccagagctacgccgacctgcacgcgctggtggcggcccggtccaggggcgacaagaactccatcgtgcaggccgccgccgtgtacatccacgagctgaggggcgcgcgggaccagctgcagcgccggaacgaggagctcaaggcccgcatcctgggccacgacgccgggcagcagtgcgtcaaggtgcagttcgaggtggacgagccggcgtccgccatcgactccatgatcggggcgctcaggcgcctcaagggcatggacgtcagggccaggggcatccgctccagcctgtccgggcgcaggctgtggacggagatgaatgtggagaccacgatggcggccgacgaggtggaaaggggcgtggaggaggctctgctgcaggaagtggagaggaagcagcagcagcagcttggagctgggagcgccgcccctggttttccaggcccgtcatcgcacgtgcaaaacgtgttttgacacgcgatcctcccccacaacaagaagccaaaaagaaacatgaaccccgagcctcatttcttgattctttttttttaagaaccggatgcgcaaaacgagcatccgcgtccctggctctattgatttgtttttaagtagaaatcggtgctgtttgtgtacaagtgttgtcgcagcctccaagtgagattttgagcacgtgtataaagttctagggctcgtgttcttacaacacacacacacaaaaaaaaagagacgtgcggccagtgaggactgaggacatgtgggcagggatcaagtgggccggaggaagcgggcgagaaatggggtcgagggacaggcacgttccggtcgtgccgtgtggagattcctagccgcggcggcaaccggtcaccagtgtgctctcgttgtccttggtctctactactcctgctacaaatggtgacgcctttattttatcgtgtggagtggatgtaaatggacgccaccacaataaatcagagtcctaaattaattttagtttaaaaataaataaataaaaatagagtatgattcttatataataatgggc

SEQ ID NO: 19367 - DNA, 318 bp, Zea mays
  Clone ID: MRT4577_117664C.1
gttccttctcccttcaccatcccactccacctaacaattgggagaagttttagcccagctaagcggctgtggatgggaggatcctaagagcaccctggaaatccaaaaccatctcgtctccgcagcggagcccaggcttcgtatgacggcggccattgtcgatggccactacgcgcgcctacaagcttcgtatcccgtgaattgctggtttggggattttgaatttgaacttgaagtcggattgctcttgactgctttgtttgaactggtgcagttaagttgggctgggttggggttgattcacccgcgatgatcgaa

SEQ ID NO: 19368 - DNA, 429 bp, Zea mays
  Clone ID: MRT4577_117665C.1
ttattttcatttgattttttaaaaaatcttatagcctttgaacatggatatcagccatatctgtggcagcctggactcagtgagacctaatacggaaagaatatactacaaatgcagatgacactcactgcataggcaaaacggcatggtgaatgagtgacagccccagctgttgtgatggaccaagcatctccaaacgctggcttgcatgtcagttctggtctgagagcaccccagctttgccctaagaaagagggtctcttatgacctgaccattaaggatggcacagggatggggtcagactcatccaaatcatataaacttgaacttgaggtccatttgcctgtggatcttttattgcagggatgcccacagctttttaaccaagaaaggaatcacatcatccacatcggcactggcctgcaaag

SEQ ID NO: 19369 - DNA, 480 bp, Zea mays
  Clone ID: MRT4577_117666C.1
ctcttgattcagtctaaaaaaaaaaaaaaaaaaaatgttccagctccttccgtcgtcttaacgcttggttgcgttgcgcatccatttcattgaagatgatccggccgggctcttgattcagtctaaaaaaaaaaaaaaaaaatgttccagctccttccgtcgtcttaacgcttggttgcgttgcgcatccatttcattgaagatgatccggccgggctcttgattcagtctaaaaaaaaaaaaaaaaaatgttccagctccttccgtcgtcttaacgcttggttgggttgcgcatccatttcattgaaaatgatccggccgggctcttgattcagtcttaaaaaaaaaaaaaaaaatgttccagctccttccgtcgtcttaacgcttggttgcgttgcgcatcctattcattaaaaaagatccggccggccttttgattcagtctaaaaaaataaaataaaaatggtccccagctccttc

SEQ ID NO: 19370 - DNA, 198 bp, Zea mays
  unsure (1)..(198): unsure at all n locations
  Clone ID: MRT4577_117667C.1
canaggtctcttccctcctttacananaagtgagcactcctgtgtgtttttgctattttctattcagttaattgtcagtcagcaaaagggtggaagcacaaaataacttatctccactgaaaaagttgcattcattacctctaatattgacttgggttcacatgagtaaactgggtgtttgctagccttctaataaac

SEQ ID NO: 19371 - DNA, 407 bp, Zea mays
  Clone ID: MRT4577_117668C.1
attcggctcgagcaaggtggaccaaccttttttttgttgccacccaattctttttgtttggtttgcacaatgacacgataaacctaggccctggcataactgctggtgccgccattgaacctactggtaccaatggaacaccaagggatcatacagactctgacatgggatgaagcaatctcaaacaaccctcaaaaagctcagatcggatccttgtggccttcaccgctgactcaattattcacgaactaatctgcgtccatgctgtcttagaagaagctctagctctggatctaatgctggatgtatagaaggtcatacacgttaatgcaatctctagcgatgaacaaaacctgcaagatgatgacataacgcatataacacctatggcgcctttgatcataatg

SEQ ID NO: 19372 - DNA, 245 bp, Zea mays
  Clone ID: MRT4577_117669C.1
gtctctatttgctagtctcatatacactaatcattgatcaccatgctttctaaatgttcatacatacatacttttacctaccgaattgggtattataactagttactggactatattgaactcatattaatctatatcatgctaaatttatgtaagctatgtgtaccaaacatgtattggaatcttagtaagctataatatccccagcacagctataccctcacatgaaaaaagacataaaaggg

SEQ ID NO: 19373 - DNA, 313 bp, Zea mays
  Clone ID: MRT4577_11766C.1
gccaacgagtggggctacagcaaccgtgtcgtcgacctgatccgccacatgttcaagacccagtaggctagtagagagatagatttctgcctccctatcgtgggtcgtccccaatggcctttggtcgcagaccatctttgctgcttgtctatgctgagaataaatgtgaacggtgcccctggacgctggatccatgctggttttggacacgctgtctttttgtgtttaacttatctgctgccgtcctgtaacgaattcgcaagttttagttcttttgtgctttgttaaagaataaacaatgaggtttcagttt

SEQ ID NO: 19374 - DNA, 770 bp, Zea mays
  unsure (1)..(770): unsure at all n locations
  Clone ID: MRT4577_117670C.1
gacagcccagaagattgtatctcgggcggacctacttcctcgactcctttgcgcatcgccgggcgtcctggtcttctgcgagaagcacacgaagcaaccggggcacctccgcctgcgcctcccctctcagctactctgtttgtacgcggccgcatccatttcgtctgcccaggaatggaggaagaatatctgcagtgagggactgagggggatcccaagttccagacaaaactcaccgaggaaaaccattctccgacatggtgaggacgagaaggaggttggtgctgctgctgctgctcctcgccctcacggtgctttccccgctcgcgctctacactagccgcctctccgtggcgcttaactctatacanagcgcgggttttccctggagaaatcacgaatcaggaaacagtgagctccttgaaagaacctgtcgacattgtcttctcagaggagctgactgaatctaagagccaagaattgcgattgccaaaggtaggtgcgcacaagagccgtgtgctctctgaagtcacggttgctgatgattatacatcatcgaaagataatgaagtgattgagcaagtaattacgctggaagcacaggatggtgnncttggtgaagggaagcaggtgtttcagatgagcaggagaaaaacattggatcactgcagcaatcttctttctgaggaaagttcacaggacactatgcctaaacagacaccctgcaagggtgntgcgnagaatccaatcagctagacagacggtaaact

SEQ ID NO: 19375 - DNA, 2751 bp, Zea mays
  Clone ID: MRT4577_117671C.1
gccggccgggcctgaacagcccagaagaattgtatctcgggcggacctacttcctcgactcctttgcgcatcgccgggcgtcctggtcttctgcgagaagcacacgaagcaaccggggcacctccgcctgcgcctcccctctcagctactctgtttgtacgcggccgcatccatttcgtctgcccaggaatggaggaagaatatctgcagtgagggactgaggggatcccaagttccagacaaaactcaccgaggaaaaccattctccgacatggtgaggacgagaaggaggttggtgctgctgctgctgcctcctcgccctcacggtgctttccccgctcgcgctctacactagccgcctctccgtggcgcttaactctatacaagcgcgggttttccctggagaaatcacgaatcagggccgtggcgtcaaggcagataagctgaatgcgcttcctctgcaaacagtgagctccttgaaagaacctgtcgacattgtcttctcagaggagctgactgaatctaagagccaagaattgcgattgccaaaggtaggtgcgcacaagagccgtgtgctctctgaagtcacggttgctgatgatgatacatcatcgaaagataatgaagtgattgagcaagtaattacgctggaagcacaggatggtggcttggtgaagggagcaggtgtttcagatgagcaggagaaaaacattggatcactgcagcaatcttcttctgaggaaagttcacaggacactatgcctaaacagacacctgcaaaggttgttgcggagaactcccaatcagctagaacagacggtaaaactaaaaccactgttctacctgatatgcggatccgaaatatcaaggatcagttaatcaaggcgaaggtataccttggtcttggatccattagagcgagttctcaatatcttaaagacctacggcagaggatacgggaagttcaaaaagtgcttggtgatgcatccaaggactctgatctaccaaagaatgcacatgaaaaggttaaagcactggagcagatgctgattaagggaaaacagatgcaggatgattgttctattattgtaaaaaagcttcgagctatgcttcattcagcagaggagcagctgcatgcacacaaaaaacagactgtttttctgacacaacttgcagctaaaacccttcctaaaggtcttcactgcctccccctgagactagctaatgaatacttttcattggatcctgttcggcagcagttcccaaaccaacaaaatctcattaacccaaaactgtatcattatgcgttgttctcggataacatactagcaacagcggttgttgttaactcaacagtgttaaatgctaagcatccttctgatcatgttatccacatagtaactgacaaactgaattatgctccaatgagaatgtggttcctctctaatcctccggggaaagcaacaattgaagtacagaatattgaggagtttacatggctaaatgacagctacagtccagtactcaaacatcttgggtcccaatccatgattgattactactttggaacgaatcgtgcaaactcagattcaaacctaaaatatcgaaacccaaagtacctgtcaatcctcaatcatctccgcttttacctacctgagatttatccaaagcttgacaagatggtctttcttgatgatgacatcgtagtaaagaaggatctggctggcctttggtcaatcaacatgaaggggaaggtaaacggtgccgttgagacttgtggagagagtttccatcgctatgatcgatacctgaatttttcaaatcccattatcaccaagagttttgacccacatgcttgtgtttgggcttttggaatgaatgtgtttgacctggctgaatggaggcggcagaacataactgaaatttatcactcgtggcagaagcttaatgaagatagatcactctggaaacttggtacttctccctccgggtttggtcacattctggaacaagacatttcccctcagccggtcatggcatgttcttggtctaggttacaatccccatgttaacagcagagacattgagcatgctgcagtcatacattacaatggcaacatgaagccctggttggagattggtctacccaagttccggagctactggtccaagtatctggattatgaccaatctttccttcgggaatgcaacatcaatccatgaaggaacctggtgcttttagtcccttctgacataaccaatagcctgttttctgtcgatgtgcactttagtgtagtcagcatagtactctcttgctttagatatcagttgttaacaagatttcttattgcctgtgcttcttgtcagaccctttgcataattgcaggaatatctgttatgtttttagagtacatgctttagagcagggcaaactttagatagtgcaatgctcttatgccatatcgcctttatgtactgaacgtttgctgcaatcctgtaatttgaaagcaaactttcccaacagattaaaaaaaaaaaaaaaagaaaaaaaaaaaaaaaaaaaaaaaaaaaaaaaaaaaaaaaaaaaaaaaaaaaaaaaaaaaaaaaaaaaaaaaaagatcagaaaaaaaaaaaaaaaaaaaaaataaaaatagaaaaacaaaaaaaaaaagaaaactaaaaaaaattggggggccgtctttttaagaaaaaaacaattatcatcctcgttttaagaggctaatctttttt

SEQ ID NO: 19376 - DNA, 189 bp, Zea mays
  Clone ID: MRT4577_117672C.1
agagcagcaatagagatttcctgatttttttcaagggtactgtccagtaaggaacatagtgcaaggatcataagcctgtgcctaatagacgaactgttgggatgcgtttttaccgctgaacatagcgcacaaggaatccaccgtactatttagcgcatcgctcatgccttccgaatatacgatcttccc

SEQ ID NO: 19377 - DNA, 259 bp, Zea mays
  Clone ID: MRT4577_117673C.1
gacattattactatttttgtttctccttccattatatatgaaaaggtgcgggtactattggacaaactaatttacacatattcgttttagctacagagggcattatcgccttttatgtctacgagaggaccaattatcttgtcagcccattgcatatttctgagtccagctacttatggttggattcgtactttcacgccatcagttcttgtacaagttgagcaatttaatgggaccaacgcgatcgatcagggttgtg

SEQ ID NO: 19378 - DNA, 364 bp, Zea mays
  Clone ID: MRT4577_117674C.1
actgcatgtgcatttcatcaatacgtgcaaaacgatagcgccaaatattactgatactaccgcaagggcactcggcgcttacttctccagcccgacccaggcaccttctgcaataacgagagcgacagcaacgccaccggcagctcatactatggcattcaaccaggcgttccgggctcagcaacagcatccacagcagctcatggctcagcagcatgagtcccagcctgagaaggagcacgcgatggaccccccacccgaggccatcttccaagactacaaggccctcaacaaacttaaggacaaggtggcgcttgcgaccggcggcgactacggcatcgggcgcgccttgtgcctgtgcttc

SEQ ID NO: 19379 - DNA, 381 bp, Zea mays
  Clone ID: MRT4577_117675C.1
actttaattttacaaataagtgttcaacacgtagttagcgtattgtcttgttttttccaagaactgtgagcctgaacatacaattgcctcttacaatgaccatgaacaaacatactaccacagacatttcataatgctcacagtcaagctccaacgggtatggattcaaatcaactggcgggtaaaatacccctggcgaggaagctttccctgctcttgaggaactcgtccaaacaaaccttgaggccttcattcaccctggtttcgggcaccacaaaccggaggacgttgacacatatgcagacgcctgggcggaagaaaatcctgaccctgtaaatcctgaacggggcgctggggtggtggcagctttccctataggga

SEQ ID NO: 19380 - DNA, 287 bp, Zea mays
  Clone ID: MRT4577_117676C.1
ctatacctatgttttttcaaacaaacaacgggccaaaccatgcgggacttttaactttaaaagagcggtaaacccccagtctagctaggaacggagatgaagagagatggacaaggaggacttacaccatacttgtgggcgccggcatcacagatataagagggcagtggaagaatcatagattcacggtccaaagcatgcggtgctgaacgcattggttgggggggaaccccatctagtaaagctagcataggtgggctaaaaaggtcgggagctctcaagggaag

SEQ ID NO: 19381 - DNA, 170 bp, Zea mays
  Clone ID: MRT4577_117677C.1
cagcgttagggcggcgccttcagccgacaaaaaagcgaagcgtcactagatgcttgttccttgacagacaaccataattccaaggacatcctcaatctcttattcatctattgaagaagggcccaccttttgcacactcccagcaagtccaccctactcaaaagctacct

SEQ ID NO: 19382 - DNA, 310 bp, Zea mays
  Clone ID: MRT4577_117678C.1
cggacgcgtgggctcgtctccccttaacacatgcaactatatcttcagctagcttctccctgcctcgccaccaccatccctgtctccgggaaccttcctgtcacctcggaggccatggcttccatggcctatatagctgcctgtgccgcggcattggcgatcttcgtcgctctgctccgctgggcgtaccgatggagccaccccaagtcgagaggcatgctcccgccgggctccatgggcatccccctcctcggcgagacgatgcagttcttcgcgccgaacccgacctacgacgtgtcccccttcgtga

SEQ ID NO: 19383 - DNA, 155 bp, Zea mays
  Clone ID: MRT4577_117679C.1
tacggactttttgttttgccaaaaaaaattcgtcgaacacctacgtgcaggatgagtgcgcgcactgtctgccacagatggcccggatcgccataggtgtctgaagtatcagagcacggcctccccctaagaacgctagcggtcagtcatcattc

SEQ ID NO: 19384 - DNA, 482 bp, Zea mays
  Clone ID: MRT4577_11767C.1
actgaaaacacgagacacagagcacatcttgctgtcttgctgattcagccaccattgatgaccatagattgatcattctgagtgaaagcacagtatgccatggtaacttcacgtgtaaacgagagttgagttgttcacgcatagcaatttaagttcactacatcagcactatggtaggtcaaggcaatttcaggaggcactatacagaaactacatttctgaaggtgtctaaaaggtgtgtgtagagtgtgcttactagtagtttagccaccatgaccgaaatgttttcgagctcgtaccaagattacctaagctgagcatcatcccagatctgttggccaccctcgctgtcaagatcaacggcgaccacaaggcagcaagcatccagcacttcctttttttttctcattcagccactactgcagcctacaaaggatatcataatgggccgacccagtcacccaggacgcaatatgttggtc

SEQ ID NO: 19385 - DNA, 265 bp, Zea mays
  unsure (1)..(265): unsure at all n locations
  Clone ID: MRT4577_117680C.1
ctccccccggcnccggccccggtctctccagtctccacccacgtatccgcggaggcggaananctgccctgccgctcagagaaatcggcgcgcncatcccgtctccccnctggcgattcattcggcngcccaaacccacagggagtcgcagccggaggagggaggcgtgctggagtccgtccaaggagcgcanacacgagcaacgtacgagggaaagggganacaaagagccttctccgatcgtcgccagctagtagccnctgtc

SEQ ID NO: 19386 - DNA, 341 bp, Zea mays
  Clone ID: MRT4577_117681C.1
tcgcggacgcgtgggcgagctcgtaggctcaggctctggtttctagacttggtacattacgcgctgaacgctattggctgcttgaaagggaacctctcggtttatgcaggaggagttttctgtgcgctgatctttacgtgtattgcaaatgctgatacttcgagatgagctgatcctagcgagagctaggcatgaagatggaccatcacgtgtacacatgatcagagagcatcggcggcaagtgctattcagtcgtattatcactgctgatgatactagctgggatcatcttacaacgggaatggctagagcctttaggacctgcaacgggagtgctagga

SEQ ID NO: 19387 - DNA, 355 bp, Zea mays
  Clone ID: MRT4577_117682C.1
gcttgaataaacctttttattttaaatcattgaacgtaacggaggctttattagagcacgcgcgatcggggggagaagagaacccttaacaatgggcccctaatttaaaatattcaacaaacccccttgttgaatggggccaaaaaaaaaccctttcctcctctaacggttgaaaaaactgcgaaggaaacaagggggggaaatttccacccaaattattttgttggccccacaaaagcaaaaaacaacccccccaaaatttgaagaaaaacccaacaaaggaggtgtttcaaaaaaacagagaagccctaatccggtaaccaaacggggattaaccaatgaaaattctccccat

SEQ ID NO: 19388 - DNA, 184 bp, Zea mays
  Clone ID: MRT4577_117683C.1
ctagtacttgcactagcttctagatttatacatccatatttcatatgggatgattcatcaaactaaacatataatatgcccacacttaccattagttgtagaaacaacactttacattgggcgaccagagggagtatccagctattgaacataacaaaatgaaattaccaggttggcctgacta

SEQ ID NO: 19389 - DNA, 631 bp, Zea mays
  Clone ID: MRT4577_117684C.1
ggccgcttttttttttttttttttgcgcagatacttattgcattggttgcaatcgaaccttctcagacccttttattgctggttactactagcacagttgacacctgcccgcataggaaaactcagggtccagagtgtaaccacaggtatagatccgatacgtaggaatgacacctagaaaccctgtggacgctataactaaaccctgctcaagccagaaggaatgcctcggaaggcattgctcttgatgatacactacttttgcgctcaagcgagcatacaggggggttgcccctgcaaagccagcgaagctacttggggtcaacatgcttacacgcgcagatctgttactgcccattcacatactgctcaggcacaacgagaaccttgccgctttcggaccttcccttaatcaggtccacaagagccttatcagctggcagtctcatagtatacttagtgattgccctctgaagacacgagggttgacgcatccttcctcagaattatttatcatctgattctcactgcggaccacatgcggaatgttacactggtcggacgaaggcacaatcaccttaagctgtttcacatggagtctgagtctggcgactagcaggactttggcgtg

SEQ ID NO: 19390 - DNA, 415 bp, Zea mays
  Clone ID: MRT4577_117685C.1
cgcgtccgccagattagatgatcaaatatgtgggtatgcgataggccagagtcaacttagaattctccatggactggcaaatatatttgagatcaaatgaattggattcacaggttatgcacatttttatttttacacacttcttggccgggcttcctatttcatctataagatgtggtaattgatatcttattgacttgcttatttccagtttttgtttctacattggactgctaggcgccatggcagaaatcacggttcaccttttccactctgtttttcctttgtactgtatacaggagacacagtagtattgtggaggcttagattatatgtgattaagtgaggttagaacattattcctttttgttcaagaaagataatgtatatgatgaaaccagtacctacgccaaag

SEQ ID NO: 19391 - DNA, 335 bp, Zea mays
  unsure (1)..(335): unsure at all n locations
  Clone ID: MRT4577_117686C.1
ttctagccattttcttaatcgcgattgcattctaggctggcggggccgacattgtttgaccaactttcatggctngcaacaagggatcggacgtaaacggttggaaaacatctctggtactttctatacgatttttatttgccccaaacaaaaaaaaaaaaaaaaaaccagagaaaaaaaaaaaaaaaaaaaagaaaaaaaaaaaaaaaaaaaaaaaaaaaaaaaagacgaaaaaaaaaataaaaataataaaaagcggcgcccgccactttgagacctctcctacccgaaaattaattctggcccagaacctgaaggcttacaacttttcctta

SEQ ID NO: 19392 - DNA, 153 bp, Zea mays
  Clone ID: MRT4577_117687C.1
ctagtagacgactcgggagctgatgggctgacatattgggtggcagacgcgctttagagcatacaaaaagtatacgtcttaaaaacccctgagaggacttctacatggtcaaagccatgaccattcttattgcaaggacctacagactacgtc

SEQ ID NO: 19393 - DNA, 377 bp, Zea mays
  Clone ID: MRT4577_117688C.1
ctacaacttctgagagatcaagaactcatatatgcgcacaacactcttcctctgacaagagtttgttctgcaactaaccactatatatatagatcgatcctctatctgacaaggtgcaggtgcaggtgatcatatgaactccatggaatcatgcgtgcccccgggtttcaggttccaccccaccgacgaggagctcgtcggctactacctcaggaagaaggtggccgcccagaagatcgacctccacgtcatacgcgacatcgacctctaccgcatcgagccatgggatctccaagggcattgcgggatcgggtacgaggagcaaaacgagtggtacttcttcagctacaaggaccgcaagtaccccacggggacgc

SEQ ID NO: 19394 - DNA, 688 bp, Zea mays
  Clone ID: MRT4577_117689C.1
tttttttttttttttttttaatgcttcagactcatgtagtaatatagtattagacatatacaagtcacaagtgctcatctgcgagttgattctctgcaacgtagcaaccataaatcgagcttacgcctctagcttgaggccaccctaaacggatggctcagatatttcctagtaccccaaatgagttccaccatcgccgtggtttcctccgtgaggcgcacgtctgtgccggctctcacgaacggcgcgaagaacatctccgatatggtgaccaccatgaaggctgtgacgaggaggtacgccgctgctctgggcggccgccacagcccggccgccctggcccgtcgctccgcgtgctggaacgcggcatggaacatgaagaagagcaacatctcacccctgggccgctgtagcgtcaggtaccagtacaggaactcgtggagcaggcccgacattaggaacgcggccagcacgccgacgtcccggccccacctggcgcgcacgggcgcatacaccgactcgcggaggaggtccacggccattaggttccactgtcggccccagaagctgctcagcgaggtgacggcgagcggcgtgctgaactgcctctccaggctcgcgcccatgagtgccgcggagacgagcgcgatagaggagaacacgaggtcgagcgtgaggaagatctgga

SEQ ID NO: 19395 - DNA, 299 bp, Zea mays
  Clone ID: MRT4577_11768C.1
gcatcgagatgaagagaataattatattatcggctaaagctggtggcacaacgaataaaaaattgagcaaggaaataagttatatttagcacaggtcatggatgggctacaaataatgtggggaagattgggcctgttaattaaatgtacatgtactactcaagttctaatgctgggaattggagtggcctaaatagcaatcctaagtgagaaacctggtactcggctgagtggacgctttacactaagccaacctggaagtccagctgagtaacttaatggtcatgccccctgctaca

SEQ ID NO: 19396 - DNA, 665 bp, Zea mays
  unsure (1)..(665): unsure at all n locations
  Clone ID: MRT4577_117690C.1
agagaggggtgaaagccgggaaaataacgccatggctaccctcgccgttgcctctccgttcaaaaccctaaaccctagcccgccggaccacagccgcacccgcacccgcacccgcaggcgcctcccctcctccattcttcaccttccgctaccggcggcgccgtccgcgtcgacaacgatgccgcggccgtcggagataccttggagcaaggatatctgcaattcggtgcggctcattgggactgtgggcaccgatgtcgagctgcggcagctgcccagtggctccgctgttgcgaggggtcgccttgccgtatggaagtcggccaccgagactacatgggtaacactacaattctgggatgatatggcaattgtggcctctgagcatgttaagaagggtgaccgaatatttgttgctggaaggcttgtgtcagatactgttgatgaggggcctgagaagcggcacgtttactacaagcttgcagttcaacagttgaatttcatcgagtcccagccagttcgattatatgaatcagatgcaagccaggatgccccagaagaacccaaggtatccagacttcaagcataagcacactggtgaagcgctatgnggtgatgggaggaacacccctactgggttacatctcagttggcagntttggact

SEQ ID NO: 19397 - DNA, 505 bp, Zea mays
  Clone ID: MRT4577_117691C.1
gtgtgtgggtttgttgttttttttttttttttttttttttttttttttttttttttttttttttttttttttttttttttttttttttttttttttttttttttttttttggtttcgacaggggggccccatttattcattattattattggcaagggggggggacattaaaaagggtaaagggcccctccactccactccaattgcacccacaagggaaaagggaagggaaaacccttgtttgtttcaagggaagttcaaaaccatgaaaggggtgggattacacaccaaaccacgaggagagttgcaaaaaaaaaaaaacgtttctttccatgcaaagtagtacctaatacgaagggttatatttgcatttacggggcatcaggggaggggtccagcatcacacgatttacgggagcacccccggtcccatttggggataaacaactcggataaacctcctcaacattttttgggtgccctttgggggggggggggggccttt

SEQ ID NO: 19398 - DNA, 398 bp, Zea mays
  Clone ID: MRT4577_117692C.1
ggcacgaggggccgccaagaactgatcatcgcggacgatccatatgggatgcatccagcagccgtacgtgcacggcgtacctacctacccaccgggccatgcccattattactatttactacgtactactggggcggctcggctggcgcattatattccttattattattcacaggaaccaccttcgtcgagacccacccacttaagggaaggaccaaccttccatttcctttaaaaataatcttccacgcatcatgctatttttgtcccctcttttatttttttctctctctttaaacttggtgctggaatttgggatttgaattaaaggtacgtataccgtaaaaaaaaaaaaaaaaaaactcagcctgcccttttgaggggcccaactcccccta

SEQ ID NO: 19399 - DNA, 371 bp, Zea mays
  unsure (1)..(371): unsure at all n locations
  Clone ID: MRT4577_117693C.1
cccacgcgtccgcccacgcgtccgttgacgcgtgggcgcatataaaggtgtcgatggaaggaattctacttttttttgctgatgaagaaagtgaagtangtgcaatcgatttccccattattttattacttgcattttgattatttaaattgttattcctattggtgcgactactagagttaatattacaggtaaaaatcttacgaatacaatagaaataccattgggtggtgctggagtacctatttcgtcacaaggttgtgattcctgccatgttttttttttctgcattggtagtttcacttccaaagcttttctagcttcgtggtaaggtaaagagncactactctgctatngtactagatctcatg

SEQ ID NO: 19400 - DNA, 170 bp, Zea mays
  Clone ID: MRT4577_117694C.1
acactaccgcaaggtcgacgctacggcaccacattacgtaatcttgctgcttgctggattggacgtttgcactaccacgacagattgaatcagcctgttatgggttcactctactggatggtgcttgctccgctctctctcgtcggtactatcggggtcgggcctggttg

SEQ ID NO: 19401 - DNA, 446 bp, Zea mays
  Clone ID: MRT4577_117695C.1
gaaaatctgcaacgtaactgtttagacacactttgggccgctgcatcctccaaaaacctttctcttcaacttgctggtagttggcgtcgtcgaccttcctcgctcctggcatggggggggggctctatgatgccatgggtcacttgatgcatctttcactgggctttctgtgccaccctctgcctttccatgggcggcgcaaggctgtttgccgccctcagagctgctaatttgtcctttcttgtgctcctgtcccccagctgctccccgttcaactttgtaaagcgcccttgccgcacatgctccatcctttgcggtctttgatgttggcttaagctccaatgtcgtaccttatgggttcccttgccgttgacctccctgaacaccgtttctacgacagcgcagtgtccgttctttgctcgcctgctgcttctaagggcttgcat

SEQ ID NO: 19402 - DNA, 413 bp, Zea mays
  Clone ID: MRT4577_117696C.1
ggccctcgacgacaggctcctcgccgcagcccggcccggcggcggcggcaccgcgagccgccgcgccgccttcgtcgtcgggctccccggcggcgtgatgacggcggtggtgtccccgacgccgccttccggccttttggcggtgacggtgacgacaggctcccacgtgaagaccacggcggcggccggcggcttctgcacggccgctacttcctcctgctgccccatcgttggcacgcaaaggctgtgtcctgccgtcctgtttgtatattggaatggattgtctctctgccgcgtgtgtgtttcttggtgtgaggagacgcagacgacggaggtggaggaggggggaaaaaacggtggttggcgctcaagggagaggaggttatcggcagagcactggcgtttagcccggg

SEQ ID NO: 19403 - DNA, 356 bp, Zea mays
  Clone ID: MRT4577_117697C.1
ccatacaaaaacaggaagggaaacgtactatttatgggggggcgcccacatacaccaaaaaaaaaactttatgaatgacaaccaacaaacaagcaaaaaaagggcgccccccaccaatggttggtggtaggaaggaggcgggttggtcaaaccaagcaggacaaacggcagccaacattggttgtaaaaaaaagagggggggggagccacccacaaacgggagaaagaaaggcaccaactgttgctgaaaaaagaaggaaacccagctggatccagctagctaaataaaaggaagaattactggcggaaacaaacaaccgggggcattccgaccaaccaattgaataaaagaaaaa

SEQ ID NO: 19404 - DNA, 254 bp, Zea mays
  Clone ID: MRT4577_117698C.1
ccccccaaagcaccccaggggggaaataaaccggaccaattaccagcgggggggacccccaaacccagccccccaagggcgattaaacaggaaacaaacattgggggctacaacattctcccctccaactttgggggccccaaaagaccaaaaagaaagaaaaagggcctgggaggacccttttatggccccgaggacccccaacaaacggatcggcaaaccacccatgaacccaggggctgatcattggcaaa

SEQ ID NO: 19405 - DNA, 366 bp, Zea mays
  Clone ID: MRT4577_117699C.1
ctcgagccggacgaaaatgctcttgcgcattggaatgcaactttacaagcaccataattttactttacgaactaggacgaaatttggctaataaaatttataactaattgcatgacgtcaattcctaagctttaaaaatactaaatcagactaatttcaaacgcacataagtgaggagcctaatcgctgcgatgattggcgcaaagagaggtgcccagttcctccgactcgtactcatccagcagcgccaggctccgatccagcttctcgatgagctccaggcgcggcctcgtgctcaccggcggttcagcctactctttcatttcttgttgcaccatctcctcctattccactcctaaataggga

SEQ ID NO: 19406 - DNA, 938 bp, Zea mays
  unsure (1)..(938): unsure at all n locations
  Clone ID: MRT4577_11769C.1
cattgggacctcgagccggacggaggccgggggaactgatcctattctgtcctattctagcgcgctctgacggaggcgtcgcgttcgatcctcacaatgcagtgaaatcactctgctctcctctgcttccttctataaatctaatagaataactccgtcaagaagcaacgagcatagaacaattcaacagaggaagaatcaggcagggagctctcccattcgcatcccaggccaacctcaaccccaatccaatccgttgcaggtcgcaggatggctccgcgtgagcaccaccagccccaggaggaggaggaggaggacaccgcaggcgtcgtcaagctcatcagcgccgagggcttcgaattcgtcgtcgacaagaaggccgccatggtctccaacaccctacgcaacatgctcacatcgccaggcggtttctccgagacgcgccagggcgaggttcgcttcccggagatccccaccaatatcctcgagaagatctgccagtacttctattggtcgctccattattccagtggcaaggaaacagcagagtttctgatcgaacccgagatcaccctggagctgatgatggccgcaaactacctggacacttgatgaggagcctgagggatctaaccctaggaaccgtttggttgtgaaatttgaaaaggtaatgtaaacgttatccgataacactgtaaattttaaaaagtaagctattacttggattgtttggttcagcgtaagagattatgttgtggcttaaacaaacacgctccaacgtaatcagttactgttgtaatcaaatcaccttacattctactgaaccaaacagcaccatagtgtcttatgaaatatgaaagaacgaagcaatggttactagtgattaaaaaaaaaaaaaaaaaaaaaaaaagcggcctnaggagacagaagagnntctg

SEQ ID NO: 19407 - DNA, 363 bp, Zea mays
  Clone ID: MRT4577_1176C.1
ggtgcgctgccgtgggcgccggtcggggaccgcgcggggcggccatttggcgtgcgcgagggcaccgatggccgtagaggggcagcagcgcccgcaacggttcggtctatctagaacctggggacggggggggcgctccatcctcgtgcggacgcgggagccccaaggtggattcgtgcggcataccgctggcctcgaaacccggaccggatcttggtcaggccgtggataaggtcgaccacccggggggcgggaagcttctgaggggcggtcaccgagaagcccgcctcgacgcggccgaaaacgagctacctctggcgttgaggccacatagctgcaacccgatgccttcaagggcgctgg

SEQ ID NO: 19408 - DNA, 271 bp, Zea mays
  unsure (1)..(271): unsure at all n locations
  Clone ID: MRT4577_117700C.1
caccataccacacccatccaangaacccaagnaacacaaaaaaggcactgccccaataacacgattgaagacaaaagtccaccaaggaaaggacaaacagccacatctgcaactgcaaccctgacacccgactagcaacataacaaccttacataatccaaaaacactaccatccataatctcaccatcactatcaataaaaaagcttatctcatgacccccctttccccaaatcatcttcaagcttataaacaacaaaagctctcccaac

SEQ ID NO: 19409 - DNA, 461 bp, Zea mays
  Clone ID: MRT4577_117701C.1
cgaaaaataggtagcctgccctggggcgcgcccctgcgtaacttccgagtcgtcgtgctgatgggtgcggtgtcaacatgtggatccgcacggctagtgctgtgctgtgctgcgctgtagctttctgtcagctgttggaaaaagcaaaagctcctggaaccatcgcccagctctttcgtgacatctgtggactgtaaaagaaattcctccatctgcaggaggggagcggtagcacaccggataagaatgcgcctctagggagtaagcagtagtggtggtgctcagttcgtctccgccgtgccatgagttgagccatccccacacctgtcgctcgtgagccagagggacactgcaccggggcgacggcgtacgagggagagacagagacgtgcgtgctcctccgcgcgcgcgaagcccggttcccgaaggtcgccgtcacgcagcggatggactgatccatc

SEQ ID NO: 19410 - DNA, 278 bp, Zea mays
  Clone ID: MRT4577_117702C.1
agagctgggcagtgaagtggatatcactgaaggagataggaagccagactacactgcttacgttgccatgatccctcagtgcataaaggaggaagacaccccttcagataatgatagtggcatctgtatgagcccagagtcctatctggggtctcctcagcacagcccctctaccacgggctctccaaataggagcctcccatctccaggtgttctctgtgggtctgcccgtcccaaaccttacgatcctcctggagagaagatggtagcagcaaaag

SEQ ID NO: 19411 - DNA, 2298 bp, Zea mays
  Clone ID: MRT4577_117703C.1
gtgatacaaccagcaagtcctaattgcggcgctcgtttgggtggccctcgcgatacgtatgcacggatgaatgaacctacggtctgcgtgtccaccacgaacaggaacttcccgggcaggatggggcccacaaggacggccgggggagctctacaccgtccattggcctcgaggccggccgggaaggcctcagcgtgctcgctcacctcctctgtcgcttgacctacccccctccgccccccgccgggcccgcagggtgttcgacccttcgcccgcccgcccgagcgccgccacggcatggcttcctccatctccgccgccgctaaggcctccgcggcctttgcccacaagaaggagctggccgcgccggcgccgcaccgcgcgggctcgagccgtcggaccaagccgtgccgcgtgcgcgccgtcgcgtcgcccgcgcgcaccccccgcgccccgtcgtccaccggctcggtgaagaccgcgatgacgatgacggagaagatcctggcgagggcgtcggagcgcgcggcgctggagcccggggagaacgtgtgggtggacatcgacgtgctcatgacgcacgacgtctgcgggcccggcaccatcggcatcttcaagaaggagttcggggaggatgccaaggtctgggaccgcgagaaggtcgtcatcatccccgaccactacatcttcaccagcgacgagcgcgccaaccgcaacgtcgatatcctcagggacttctgtctggagcagaacatcaagtacttctatgatatcaaggacctcagcgatttcagggctaatccagactacaagggtgtctgccacattgcacttgctcaggaaggccactgccgaccaggcgaggttctcctgggtactgattctcatacgtgcaatgctggagcctttggtcaatttgcaaccggaattggaaacactgatgcaggttttgtgatgggcactggaaaggctcttctcaaggtgccacctactatcaggtttgtattagatggagaaatgccgccttatttacttgcgaaggatctgattttgcaaattattggtgagatttcagtatctggtgcaacctacaaatcgatggagtttgttggatcaactgtagaaagtctaaccatggaagaacgtatgacactatgcaacatggttgttgaagctggtggaaagaacggtgtcgtgcctgctgatgaaactacatttaaataccttgagggtaggacatcagttgattatcaacctgtctacagtgatgctgaggccagattttttagtgactaccggtttgatgtatcgaaactggagccagtagttgccaagccacattcgcctgacaaccgtgccctagcaagagaatgcaaagatgtcaagatcgaccgagtctatattggttcctgcactggtggcaagactgaggacttccttgctgccgcaaaggtgttcttagcctcgggaaagaaggttaaagttcccacattccttgtccctgccacacaaaaggtgtggatggacgtatatagccttcctgtaccaggatctggcggcaaaacttgcgcccagatattcgaggaggctggttgtgatacaccagcaagtcctaattgcggcgcttgtctgggtggccctcgcgatacgtatgcacggatgaatgaacctacggtctgcgtgtccaccacgaacaggaacttcccgggcaggatggggcacaaggaagggcagatctacctggcgtccccctacaccgctgcagcctcggccctgacggggtacgtcacggaccccagggacttcctcatgtgaacgatcttgaaacagccacagagtgcctgcaccgctgttttttgtgttgaaccttagtttaggcgtgtgcccttcgttgagaaataaactcccatgtcgggaggctgccattgccatttatgttttttgcgttatatttattacagtgactgccgataacgtagttgagcgttacaagggaaatacattcattcttcccagtatcgatggcagtcactagactccgttcttacaaaaaaaaaggcatgtcgagagatcttgtagttcatacacttgttaaaacacttttttgtacaatgtatgggaaagaagctcagtcgatctttcttgtttaaaaaaaaaaaaaaaaaaaaaaaaactctaaaacctcccccttggccgcccttttttttttttttttttttacataaaacactcttttaatggggttgcttgcatgactttaaaggccaaaacaaaaaaaggtttacaaattaatatgaa

SEQ ID NO: 19412 - DNA, 361 bp, Zea mays
  Clone ID: MRT4577_117704C.1
cttgtggtcttttttttggttactttttttgccccttttttgttttgctatcacaggggggggccaaaagctttttcaaaaaacaaccccccccctcaccctttgtagagggaacacgatgcgggccccgggaacacatgccccgcccacaaaaagcctggatatcctggggacccctcagagatgccaggggcccttaaaaaagtttgaacccggtgaaaccttctgcccgggagcggccccctaaaaggggcgcgggctcttcctgggagaaaaaatccggtgcccttggggcggtcgccccccctgccccttttggacacgccccccccccccccttttttggattacccccccattt

SEQ ID NO: 19413 - DNA, 1913 bp, Zea mays
  Clone ID: MRT4577_117705C.1
ccatcaccgcctcgtgtgcagcgtgctcgctcacctcctctgtcgacgcaccaccccgaagccctcccgccgcgctcgcagggtgttcgacccttcgcccgcgcgccctcacgacatggcctcctccgtctccgccgccgccaaggccgccgcggcgttcgcgcacaaggtccagaaggagctggccgcgccggcgcagcgccgcgcgggcttgacccgccggaccaagccgtgcagcgtgcgcgccgtcgcttcgcccgcgcgcgccctgtcgtccaccggctcggtgaagagcgcgatgacgatgacggagaagatactggcgcgggcgtcggagcgcgcggcgctggagcccggggagaacgtgtgggtcgacgtcgacgtgctcatgacgcacgacgtctgcgggcccggcgccttcgacatcttcaagaaggagttcggggaggacgccagggtctgggaccgcgagaagctcgtcgtcatcccggaccactacatcttcaccagcgacggccgtgccaaacgcaacgtcgacatcctcagggacttctgtgcggagcagaacatcaagtacttctatgacatcaaggacctcagcgatttcagggctaatccggactacaaaggcgtctgccacatcgcacttgctcaggaagcccactgccgaccaggcgaggttctcttgggcactgattctcatacatgcaatgctggagcttttggtcagtttgcaactggaatcggaaacactgatgcaggttttgtgttgggcactggaaaggctcttctcaaggtgccacctactatcaggtttatattagatggagagatgccgccttatttacttgcgaaggatctgattttgcaaattattggagagatttcagtatctggtgcgacctacaaatcaatggagtttgttggatcaactgtagaaagtctaaccatggaagagcgtatgacactatgcaacatggttattgaagctggtggaaagaacggtgttgtgcctgctgatgaaactacatttaaataccttgagggtaagacatcagtcgattatgaacctgtctacagtgatgctcaagccagattttttagcgactaccggtttgatgtatcaaaactggagccagtagttgccaagccacattcgcctgacaaccgtgctccagcacgagaatgcaaagatgtgaagatcgaccgagtctatattggttcttgcactggtggtaagaccgaggatttccttgctgctgcaaaggtgttcttagcctcgggaaagaaggttaaagttcccacatttcttgtccctgccacacaaaaggtgtggttggacatatatagcctccctgtaccaggatctggtggcaaaacttgctcccagatatttgaggaggctggttgtgacacaccagcaagtcctaattgtggtgcttgtttgggtggccctcgtgatacatatgcacggatgaatgaacctactgtctgcgtgtccaccacgaacaggaactttccgggcaggatggggcacaaggaagggcaaatctacctggcgtctccctacactgcggctgcctcagccctgacggggtatgttacggaccccagggacttcctcatgtaaccgtcttgaaacaacaacagatttcatgatgtaacagagtggttgtactgctgtttttcgtgctgaacttttgtctaggcatgtccttcgttgagaaataaactgcactagaataagcagcgacttctcgggagccatagcagatgtgacctcatatttatttgtgcaactttttttgtttttggctctgaagtcatgcaaggaaaccacataaaagagtgatttatgtatgtgtcagaatcaaacaataattgtcaaaaaaaaaaaaaaaacccagttctgt

SEQ ID NO: 19414 - DNA, 681 bp, Zea mays
  Clone ID: MRT4577_117706C.1
ctcgaggccggccgggtttccaattcccagatgggaagaaccttggtactcgtctgcaccatcgcagtagccgccgccatcgcagccgttcacgtgtctgagcaagaacacaaggacgcgttctcccgtttctcacaccaattcgaacgcaattacacctcccacgagtcatcgcaccgctatggtatcttcaagaagatgcaccagagagtccacgaccacaatgcacgcttcgccgccaacgaagtgacttgggacatgcaaatcgaccagttctctgactggacacctgaagaattccagaactttttcgctggttacgtgcaaccaaacggaacaacctctgccgagatcgcagcgcagcgcaccaagcgccagcccgcatggatcgactggtcccaaaagggtgctgtcggtccagtgaagagccaaggaggttgtggaagctgctgggccttcgctgccgtcgccacactcgagggatgccacatgatggccaacaaaggttacgccagtctgtctgagcaacagctccaggactgcatgttcgaccgcgtctgctcaccaggaggtggtggaccagaccaggccatcgactgggttcacaaccacggaggtatcgcttccgagggagcttacccctgcacccgagtccacggtaactgccacgacgctgacatc

SEQ ID NO: 19415 - DNA, 402 bp, Zea mays
  unsure (1)..(402): unsure at all n locations
  Clone ID: MRT4577_117707C.1
ccctcctccgcacatacgcgtcgcatccgctcccaggatcctctgcgccaccgcaaccgtgtgaccgcccgtgccgccggcgatcccgatccgccgacccgtcccagccccgctcgcagccatgtcgccgtcggagccgacgcgggggagcgcaacctgctgtccgtcgcctacaagaacgtcatcggcgcccgcagggcctcgtggcggatcatctcctccatcgagcagaaggaggaaggccgcgggaacgaggcgcacgccgcatccatccgcgcctaccgctccaagatcgaggccgagcttgcccgcatctgcgacggcatcctcgcgctcctcgactcccacctcgtcccatccgccgncggcgccgagnccaaggncttctacctcactatgaag

SEQ ID NO: 19416 - DNA, 1069 bp, Zea mays
  Clone ID: MRT4577_117708C.1
ccgctccacaggatcctctgcgccaccgcaaccgtgtgaccgcccgtgccgccggcgatcccgatccgccgacccgtcccagccccgctcgcagccatgtcgccgtcggagccgacgcgggaggagagcgtgtacatggccaagcttgcggagcaggcggagcggtacgaggagatggtcgagttcatggagcgcgtcgcgcgctacgccgagtccaaggtcttctacctcaagatgaagggtgactaccacaggtaccttgctgagttcaagtcaggtgcagagaggaaggatgctgcggagagcaccatgaatgcctacaaagctgctcaggatattgctcttgctgatctggctccaacccaccccatcaggctcgggcttgctctcaacttctcagtgttctactacgagatcctcaactcccctgaccgtgcttgcaaccttgcaaagcaggcctttgatgaggcaatctccgagctagacagcctgggagaggagtcctacaaggacagcactctgatcatgcagctcctgcgtgacaacttgaccttatggacttccgacaccaacgaggacggcggggatgagatcaaggaagcagctgctgcccccaaagaatccgcccccgagggccagtaagacggatccgatctcccgacctgatgcgtgtctgctgatgtcggggagtttaccaggactgtgccgttcttgatttctgatagcttatcttctagtacacctcgtgttgttctcttcgtcacggcgccggtgcgcgtgcgctgaagctgcctgccattgccattgcctttgccgctgtttttaattaagcacacactctagatgttatgcccgcatgctatgtttcgattctcaagttgataaatgatggctggatgctggttttcgtgctccaagcctgctgcttcttccagggaaaaaaagacctgcccttgttgcagcgttgttgtttagaatgacctatatttgactggtattctgttacggtggctttgcaaagctgtttgtttggtttaaaaaaaagaaaaaaaaaaaaaaaaaagcggcc

SEQ ID NO: 19417 - DNA, 570 bp, Zea mays
  Clone ID: MRT4577_11770C.1
cccacactttctggaagacattagcgttatgaagggcagaacttaattatgatctattgtgcggtcaatcctgtgtaccagatggggggtggtcttgctgattagctggtccaagaacaggctaccgccacacagcatcgctgaacaaggggcccagcactatcaaacaaagtaactacaaagcctgggtcatcactgcagcgtagtcagtgtcttggttatacaccatgggaacatactctatatattgcggctccgcacgacatgtaatgtgaatggggttggttgtaaatgatgattttacagaggccggaagctgagcactggttaaaaagaaaaaaccttatggccattctctagaggactcaacattacgacctcgctctagtgcgaacgatctttctgacctagcgtcatgctaattccattgacaggactgtctggtaccttgtgggcacctacagaatcatagggctaatcaacttaagattatagcatgacatactcctttcaccgggttcaagggtggcatatatgtaagagttcaagcgccgtacaaacatattcgca

SEQ ID NO: 19418 - DNA, 164 bp, Zea mays
  Clone ID: MRT4577_117711C.1
aaaaaaagcccggttaagggtttaacagaaaaaatacccaagcgttactggacaaaaaggtcacgtgtttacagagttacagttcccctcatgcgtttttatttttggacgactggttatcaacacgtaaacagcaggcctcagacaaattaatatatgggggg

SEQ ID NO: 19419 - DNA, 496 bp, Zea mays
  Clone ID: MRT4577_117712C.1
acaagcttttttttttttttttttttttttttttttttttttttttttctttttaaaacctttatttttgacctggcaaaaaccaaaggacaaaccacacaagaaaatgggggaccccccaccccaaaatgacatatgggggacgggagaggggcataaaagaaatggccaaaaaggaaagagggaatgggcgggcggaaaggaaccaggaacccccccgggggggggggggaaccccaaaagccgggaccgggaaaacccacccctggcccgggggaattgcccccaaagcccggggagggggggggaaccccacccccgggggggggaaaccaaaggccaatcccaacaaaccgaagggggaaagaaaagaaaccggggggggggccaaagggggcggaggccgggaccaagggggggggggggggaaaaaaaaatccgcccccagtgccacaaaaaaccggccccgaacacaaaaaaaaaaaaccggggggcc

SEQ ID NO: 19420 - DNA, 135 bp, Zea mays
  Clone ID: MRT4577_117713C.1
cccgtccaacctcccggatatcacatagacatagcgggaggtgttatcgcggaagatttctgtcggcggtcgagacgcctggttgttggcgctccagtatgccctcaatgtggagctgctgacatcggatactgc

SEQ ID NO: 19421 - DNA, 386 bp, Zea mays
  unsure (1)..(386): unsure at all n locations
  Clone ID: MRT4577_117714C.1
atgtattatagaaataaccgaacaagtcctaaagaattacaaaaaagtagactatcatagacacaattcgatctgcagaaacggaactaacaaagaacgatattgccttgagctattagcacgcatcagatctgatgatcatctatatatctgcggattcaagggctaatttcttcctgatgaaaacaccacctgcagttttcattgataaagagcgaaagttgtgtgtcaagtgttacggaccttgttcaaacgtatatacatcttgcctgaccttgtattttccctgggacgtacggcgccgntgcaaagaagaaagctggctgcttggctgactccatcgatttagctagggtttccaaacaagcatgcatggcgaattggcg

SEQ ID NO: 19422 - DNA, 411 bp, Zea mays
  Clone ID: MRT4577_117715C.1
ggagcacagagctagctagccagccagccagcagccagcttgctcgccgcgcctttccttcttcctcgcctccgggccattccgtgccgccctccaccgccgccgccgtattcagggatggagatgaagaagatcgcctgcgccgtcctcgtcgccgcctcggcggccaccgtggcgctcgccgcggaggctccagctccggtcctcaccagcggcttcttccacgacgcgcccgtcgtctgagccgccctcagggccgtcgacccctccttttttgactactacattcagtgagccggtcggtgcgccccgtggccggggaagaaactactgggcgagggagtcacatggctgtgcgcataccgatgcgcgggcgttgtttttggttcgacgcaccttcagccctgtttt

SEQ ID NO: 19423 - DNA, 503 bp, Zea mays
  Clone ID: MRT4577_117716C.1
tgcagattagaggcagagtggtgactgctatcgcttctggtggacgttcgaaatgtccttggtgacctatctttgaattggcattgccagaaatagctcaaaagattacacggttggagaatgaagataccttgcttgattcttctggtgagactagatctcgtcacatccaaccacgatggaaacaagtcctactagccgtaatggggcccgaacaacaccagcggccggtggatgggatcgctgcccgctcctgtcgtcgttgccccattggtggaggcccgaacagcacctgcaaccggtggatgggatcaccgcaccgtccctcgccgttgttgccccatctgtggagcacctcgtggccggggatgccgcccatggcgaccaaccagctcaccctctctttccatggcgagtttcattccaggcagatggactcgcacagtgtccaagacgtgcttttactgcttggagggagggagctgagtagtctgggtggagca

SEQ ID NO: 19424 - DNA, 784 bp, Zea mays
  unsure (1)..(784): unsure at all n locations
  Clone ID: MRT4577_117717C.1
ggtaccctcgggttcggccgggttatccggcctaatgccaacttttctaagtggtctaaatctcagtaaactagatctatcctacaatagtttccaaggagtaatacctacaaccagtctattcgataattctacagttgtttcgctagatgggaatccgagattatgtggaggagccatggatttgcatatgcctccatgccatgttgcttcaagaagagcacgcagagcaagcttattgattgaaatattgatcccaatatttgggttcatgtcactcgtattgctggtgcacattttactcctagagaagaggcagtcaagaagactatggatcgaagcaatcatttgaggaagantatggttcggtgtaccgagggaagctgaaggaaatggaagtggcagtaaaggtttttgacctggagatgagaggagcagaaagaagcttcttgtcagagtgtgaagcattgagaagcattcaacaccggaatcttatccccatcataactgcttgctcaatagtaggtactttcaaagctttaatttttgagttcatgtctaatggcaacctggacacatggctacgtcacaaaggagacgaggaggctacaaggtgtcttggcttaactcaaagaataaacatagttgttaatatagctgatgcattggattatttgaccatggggtgtgggcggccaactgttcactgtgacttgaaacccagcatatacttctagatgatgacatgaatgctctcttggggagatttttggaattgcaagtt

SEQ ID NO: 19425 - DNA, 565 bp, Zea mays
  Clone ID: MRT4577_117718C.1
actccatagggcgattgggttcctcgaggccggccgggaatttctatctaatcttcatatacactactcaagatgtctaacaacaagatcgttcctctcacaattatcaagggcgctggccatgagcacatccctatcccagagggagagtgcgcaatcattgccgacttccactctgtcaagtcccagagctcacactctacaccttacttgacaaccggcttctacagagttgtccctggacctacacgatacggcgagtacgactatgaggagaccaaatatgtcctcaagggccaaatcgatatcaccgatgaagctactggcaagacacaccaccttgttgccggtgactgggccttcttccatgttggatccaaagcccagttctcaaccaagactgaaggtgtcgcattctacgctgtcacccgaccaatgaacgacggccaccctaaccttgttggccgtgaggagagcacctccaagttgtaaaagccatgttattatagactttaatgaattaagatacatttttagcaaaaaaaaaaaaaaaaaacccgcggcc

SEQ ID NO: 19426 - DNA, 196 bp, Zea mays
  Clone ID: MRT4577_117719C.1
attatcatcaccaaaaacgatgcgactgaatgctatacctgtctggaaccctcttctctactgacacttcagcaaaactggtctaataggtgctaagaggactctgacataccttcccagacgcaagaggacatacccgcattcattgataatagctatagtattatctataacacatgctctcttactaaattac

SEQ ID NO: 19427 - DNA, 403 bp, Zea mays
  Clone ID: MRT4577_11771C.1
cccatgctgtccgttgggccgagagagtgacctccaacacatgcactaaagagaatcgctacactctacattgcggatgttgtacacacagactctggcaaagcgaccaccacaggacacactgaactacaaggtggtatgcattgacaaacgcgtgatcaagaggtaacacaaggaggctgataacatgaacaagcggtccttcaagtacgcatggatgctctacaagctcaaggctgagcgcgagagaggcatcaccattgatatcgctctgtggaagcttgagaccaccaagtactactgcacggtcattgatgcccctggacaccgtgacttcatcaagaacatgatcactggtacctcccaggctgactggtgctgccttatcattgactccaccact

SEQ ID NO: 19428 - DNA, 280 bp, Zea mays
  Clone ID: MRT4577_117720C.1
ataagacgaccacacacatgtggtattctcgcccgggaaaaaagtgattctgtcgtacaaagagacacaaagtgccatagaaactacaaaaagtgttgaacccaaagcagcatggcacaaactgtgcacgcttactgatgtacgtgtatgtcgacagcatttcaactcccatgtagacaaacaccctgatatggacttagctcgtgcataggccgcatgatccgtacggatacatgaatcttcatcaggaaaactggacgccgacaccattctcaggttt

SEQ ID NO: 19429 - DNA, 197 bp, Zea mays
  unsure (1)..(197): unsure at all n locations
  Clone ID: MRT4577_117721C.1
acncagaagcccaaagcgcatacgtgccgagtactaaaggccattcctatgagaggagcttctaatgcaaaggctgtcgagctcgtgaaagtgcgaggtcgaggcagacagccgagtactgccattaggaagtgtaggatgggcctgctgatccagattggcgggctaatcacagccttgaaacccattgccggatg

SEQ ID NO: 19430 - DNA, 420 bp, Zea mays
  Clone ID: MRT4577_117722C.1
gtgacttgtacggcgaccgaagccaccgccccagccacgccatggactctctcctcggcacgggcgccttttctggcgacgacgctgacttggacaaggcgctgttcaccgtgcccgacgcctactgcggcggacgggccggaggactattctcgctaccgcaacccaagtcaggccgcgccctgctcttgtactgcctaccggcgcccaaatccacccttgagacgcgtcttctgctgtgatatcggcgcccaaatgcggcaacgcccccacgttctcctgcatgccggcgcccaagacttacggaggaaaccctaagcgcgttgtacagaaccgaccgcagccgatcctgcagtacgcatgcgacagctccgacgacgacgaggactacgccaagaagcgccgcgccagctacaacga

SEQ ID NO: 19431 - DNA, 256 bp, Zea mays
  unsure (1)..(256): unsure at all n locations
  Clone ID: MRT4577_117723C.1
gtgacttctgtatcctctcgatcgattgcttcctccaccgaggcggggggaagcgccccccagatcgccgccggcaagcggcgatcactgcaactgcgagcataagggacgctcgtgaagtgaccaatccgatctggcactggctgcacagggcaccattgaatggctaatccggacaacggnggggttgcctactgttgcggttctctgatggttccttcactacaagctgtattaccacaattggtatcgactt

SEQ ID NO: 19432 - DNA, 270 bp, Zea mays
  Clone ID: MRT4577_117724C.1
agcaaagtttgttctataaactaaaaataaaatcctaagtcccccaactgactaaatggaccccccgttggccaacgagacccctcgttggccagacggaccctaggcaaaccttataaactgagtcccaggccaagaaggaacgagaggccagacaagcctcattatattcccacccctttgcaatttagacaaaactgaccaacattaatgatatcacagagatcataagactgacggacagactcttatggcatgggacccacctat

SEQ ID NO: 19433 - DNA, 272 bp, Zea mays
  Clone ID: MRT4577_117725C.1
accctagtaacggccgccgagggccggaattcccccctatcgagggcgcgcccggcggggccccttgcgatcaatgaaccttgagaggcttagcacccaagaagatacatctgtgggcaaaggtcacctgagatccaatcaaatagacccacgatatccaaagaattcttggaaggagtgcatgccaatcatcacttctgctatctatattgggactaggggcaaccatagggatcgcgctagccagactcgaactactctaaaaagaccat

SEQ ID NO: 19434 - DNA, 301 bp, Zea mays
  Clone ID: MRT4577_117726C.1
atcaaaacaccttgacaaaccgttaaaacagtatcagtaaccatgtgtacatccctgtgcctcttagattgctaagttctgctctcattcttacttcaaaggatactttttaaagaattgttaatgcttttttataatactagtcatagccctgttggcaataagacaacagattcagtgagaaagcaaaatcactgataattccatcatccagggagaaccactgttatttaagtatatggccttccagacttttctgtgcatttatagatatcttaatgggatcaaagtgtacatactg

SEQ ID NO: 19435 - DNA, 262 bp, Zea mays
  Clone ID: MRT4577_117727C.1
cccacgcgtccgggcgaggggcgactggttgagcgcttcgtctagacagcccagctgcgcatttggatgcaaattacgtgtggaggatggagtaaaatactgagcaagggagagggaagaggagacggtcttttcttttcttgagccgaggagggggatcaggtggagtgagcgaaggggaggttctgccgccggcaatggagatgaatcttccggcggagagcccactctgctcccggggccggcccgccctagtcgtgcg

SEQ ID NO: 19436 - DNA, 467 bp, Zea mays
  Clone ID: MRT4577_117728C.1
gccaaaggggcctcccagggcctccccttttaaaaaacagccaaaaatatcaaatatctggggggtatataccaacaaaaagggggttatcggtttttgggccacaaaaaaacaccgggggggttatttttcaacccctccaactacaagaaagcaaacttgccctttccccaagccaatgggagggttttgctactataaaacccccacaacccggggggccggttacccaaatattaaaaagaacctccgagggcctgaaggcaaaccctggggcccttgggggaccccccccgccccccaaacttttggaaacccgcccggaagaaccccaccaactttccgttctctggggcccggttggggaagcttacattcaaacaaccccatttgatgaacccccctccccaaccttgctctcttaagtgaccccacaattctttttggaaaggaagggcaaaggaaaa

SEQ ID NO: 19437 - DNA, 211 bp, Zea mays
  Clone ID: MRT4577_117729C.1
tcatactgatccaccaaatcattaatagccatcttcatgttctcctctctgctctcatctagggcgggggctccaccatatgggggcaggctactccttctcctcttttttctgatgcggccattatttctggtaatgttatcgcccccaacgccgtcgtcttctgcgttatgccatgcaccacctgtagctctatcaacgtgtccaccgc

SEQ ID NO: 19438 - DNA, 142 bp, Zea mays
  Clone ID: MRT4577_11772C.1
gaccggccgaaaacccgggcgtcccacgcgcccggtagagccgaacgaggccagcccaccgggggcacgttaagagcagcggcgacaatcaagccgccgccgaaggcgccgagaccaccgacaagagacggaacgcgacaaa

SEQ ID NO: 19439 - DNA, 290 bp, Zea mays
  unsure (1)..(290): unsure at all n locations
  Clone ID: MRT4577_117730C.1
gaataacttaattgggccaagcccataaatcctaacagaaactgtaaccgttgttccggcgacactttcatccaaagaagactaatctcccaagttcagacactctagttaacgacaaaatgtacaaccatctctataggcccagatcagcacaagttctacgcgttaggcactgccatgatggcaagagcctccctgttctgccccangatgttgaacaccgaccatgtggcagagctcggcctcgtcggacggggccatgacgaccatgttgggcaggcaggccatgt

SEQ ID NO: 19440 - DNA, 262 bp, Zea mays
  Clone ID: MRT4577_117731C.1
ataaccccttgacaagctttttagtgagctgatatggttcgaccctgccgatcgaccgatacctgtcagtctttgctgcgagaaagaagtgaagcgcctaatcataatcaacgctgtaacgcgtcttagggacgggtatgacgcaaaatctagcctggactgcgagaaggatacatccgttcaatcagatggcggcgcgctaatataataacgatagctgcgagttcaatccacggacaccccaattatcattactagaggc

SEQ ID NO: 19441 - DNA, 341 bp, Zea mays
  Clone ID: MRT4577_117734C.1
cccacgcgtccgcccacgcgtccgcccacgcgtccgattccatccctggttaagaccaacccctccatctccatgcatctccaatgaacaacaactgacagctctccgtgatctatctatctccttccggtagctttttttgcattggccttgcaagtgctttattgctagagtagctgcgcttgcattattaactagataagttagtgatggatctcgcgacgaccccggcgcggctgcggcccatggagcctggactggcacggcgccttgtgcacgtggtggtcggcgtgtgccacatacttggaggcggcctgttccccaaacgcattatgatggac

SEQ ID NO: 19442 - DNA, 643 bp, Zea mays
  Clone ID: MRT4577_117735C.1
ctgacattggttcatcttctactgtgtactgttcataatattacctgggctaggttttgaccggcccattcttgttgggccgacaaggattgtggaaggaatgggcggcccaggtttgcagctctgagtctctgaccgatcgctggcgtgcgtgcttgtgcttgtgcagggagtgacgaagcagatcggtggctcagtgcacgagctggcggcgaaggtggacgagtacgcccgcggcatgatcagcgggcccggctcctcgctcttcgaggagctcggtctctactacatcggccccgtcgacggccacaacatcgacgacctcatcaccatcctcaacgacgtcaagagcaccaagaccaccggccccgtcctcatccacgtcgtcaccgagaagggccgcggctacccctacgccgagcgagccgccgacaagtaccacggtacaacgcaccacatgagctagcatatgtgccactgtttgcctgttgcacagcacagatcgtaccccgaccggaatctgtgcgtcatcttggctctgttgtttgatgcgtgcgtgcgtgcaggtgtcgccaagtttgatccggcgaccgggaagcagttcaagtcccccgccaagacgctgtcctacaccaactacttc

SEQ ID NO: 19443 - DNA, 1214 bp, Zea mays
  Clone ID: MRT4577_117736C.1
gccggccgggtcgattaagcaacaggcaggccgcacgctcttccttagcttgcctgaattctgtagtcacgcacactagtctcagatatggatacttgtcatcaatccatagagaccgcagatggcaagaaggactacagtgaccctgccccggcaccattcgtgaacgccggcgagctgggcaagtggtccctgtaccgcgccgtcatcgccgagttcgtggccacgctgctcttcgtgtacgtcacgctggccaccgtcatcgggcacaagcgcgaggccgagtcccagccgtgcggcagcgtcggcgtgctgggcatcgcctggtccttcggcggcatgatcttcgtgctcgtctactgcatcgccggcatctccggcggccacattaacccggcggtcaccttcggcctgctgctggcgcgcaagctgtcgctggtgcgcgccgcgctctacgtggtcgcgcagtgcctgggcgccatgtgcggcgccggcctcgtcaaggccttccacggcgcccactggtaccttcgctacggcggcggagccaacgagctcgccgccggctactccaagggagccggtctgggcgccgagatcgtgggcaccttcgtcctcgtctacaccgtgttctcggccaccgaccccaagcgcaaggtcagggattcgcacgtcccggtcctggcgccgctgcccatcggattcgcggtgttcatggtgcacctggccaccatccccgtcaccggcacgggcatcaacccggcaaggagcctggggccggccgttgtgtacaaccagcgaaaggcgtgggaggatcactggatattctgggtcggcccactcatcggcgccgccgccgccatgctctaccaccagttggtcctccgcgccggcgcagccaaggccttcgcgtcctttcgcaacaaccagcacttctgaatctctgatcctcccgtcggcacgacgatacatggattccaattttcgccgtgcatgcatttcgtgtctccagtgtttgcgttgtgtatcgcttacgatttcatcggcttccattccaagttttcgatcagctacctgtttattgtggaccgtaacactacgttctgtatttttcaacttactgtatctatctatgtactgatttaggttcagtgcaaacactttccctgtttgtataattcatctcaaaaaaaaaaaaaaaaaaaaaaaaaaaa

SEQ ID NO: 19444 - DNA, 304 bp, Zea mays
  Clone ID: MRT4577_117737C.1
ctcacttgtttggagacgtgcgcgttttcattgggttggttgtaagttgcagcagacttcggtttcttcctacgcaacgtggtcgggtagtccgcctgtgatccactctgagtgtagctcctgatctttgctggcaggagaaacggaacggactgtgcctgacgtggcaggatctctttgcgtagctaacctaagaatccgtgatcagatactagacatgcttctacctgctgcttcgcctatcgatctatgacggacaagcggggccagctccaaggtttctaagcatgtacctcccagtggc

SEQ ID NO: 19445 - DNA, 374 bp, Zea mays
  Clone ID: MRT4577_117738C.1
cggacgcgtgggtttgtgggcgctttgtcttcaccacttctccctctcgtcgtatgctaccgccggtgatctcttctgtggcgacatactggtctctgcgcgttgccgtgggagtgcgccgggaccttgggtggccgcccgagtcctcgggacgaatcaagcgcctctggtgctcgcggcagttcttgtcggtcgacggggagggagccgtgtcgcgcatcgtcgcagaccgcaacgcgtccatcggcattgttgcgtgaggacacgagccacctgaagatcatcctggtacctgaaatctcaagtcccaggcaagttgtgcccttgatcacttctttttacccagtcatgttctaattaatcataatgatctg

SEQ ID NO: 19446 - DNA, 446 bp, Zea mays
  unsure (1)..(446): unsure at all n locations
  Clone ID: MRT4577_117739C.1
cccggtcgaccagcgttcgcgagcgtncggcacgcgtccgccatgcgttcgttctatgtctgaatacctcatgggtgaagaggttccagatgctgatattgctgttgtccgtgtcaccatcttcagtcgaccctaatgccacttatatgtggatgtctttgactctagtgaagacttcatatacctaatgcacacacttgctgacttcgaagcagctacaaagcttctgacacttgcaaaggttacattctgttatgatgcgctacatggtggtgctggagcttatgccaaacacatctttgatgaaaaacttgatgctgactaaaagctaactgaccaattgtgatccagaacatgactttggaagtggtcatgcggatcctaaccttacctatgctcaagactcggttgaactgatacgtcttggaaagtcattctcaaatgtt

SEQ ID NO: 19447 - DNA, 337 bp, Zea mays
  Clone ID: MRT4577_11773C.1
agaagagctctgtgaagagccggtcacattcaactttggcgaggcctgtctgactacacggcactgacattctcccgcgcttggcattggatatcagtacatgtggatgaatagatggaagcaggaacactacccgcttgaaaatctatacagcagtagagatgatgtctcaggagacttgattaaagctagagaggagagggtctatcaccgaacatcatctacggaccttcgtgagaggagagccctaaatatactgagccaacagacgaaggctctctaaccttatatccacagatcatcatcgcacagctcatctactgtgctcgctaaacat

SEQ ID NO: 19448 - DNA, 298 bp, Zea mays
  Clone ID: MRT4577_117740C.1
ggcgcttactattaggccacgaacgccggactcccgttgttgcctgacatgaagttacgggctacgtgactcccgccgaacggggccgagggcacagcccaggtgctacgaccattcggacgaaagccctaatcagagaccttacgccaagacggagaaggactttagggcaaccatcgcctatggaaaccccccccaaagcaagccagggaccacggaccccgctctcaaagtggggaccatcaccgtaccacacctgaacaagccctacgcggagggggacagggactagatcgcc

SEQ ID NO: 19449 - DNA, 159 bp, Zea mays
  Clone ID: MRT4577_117741C.1
atcatttacgcaaactatcttaagagacacagacctgcttgccaagaggaacgggcggaaaataagcacggataccaccacaacaagcacaaagccaacgatgattaagctcaccacgccaaaaaaaaccgcgacaacggacacccattaaccaaaaac

SEQ ID NO: 19450 - DNA, 337 bp, Zea mays
  Clone ID: MRT4577_117742C.1
ctacggactgtttagctcgactgggtgccttctgcttaatcacctttcgggttattgtgtgtgcgctcgtgctatagctttgctttctccaatgagcatgatgataatatggatgatccgttgatgatatctggattctgaggatgactttgcgttactttagggggctagacctatatcccgactacctcttcggaagtgacctatgaagatcacagaccacaatgggaaaacagggcctccatgagtgtgatatggaacaccgatggccacgtcattagggaagtcttacgttcggtgacatttttggtcattggggacagaagcctatgttatg

SEQ ID NO: 19451 - DNA, 717 bp, Zea mays
  Clone ID: MRT4577_117743C.1
agcctgacgtcgagaggagttcgtcgataaataagttctccagaaaccccgaaaccccgcgaccaccgcctcgccgcttccacgactgagtgcgctgaccgacgacgcctccactaccgcctctcgcccctcgccgcgcgcgaccgacgcccacagccttacgatggtgaccgacgcggccgcgatggcggtcgtgaaggccgcgcgccccgtcttccgcggcgcccacgacggcgtggcgttcgccgcaaacgccgcgttcctcgccgcgggatactcgctctgcgccgtcggccctgccgcgctcaccgacccccttcccgcagttgacgaggaggtgggaattgatgggtggaacactatggacaattgctatgcctttctgtactccaaggaggaggagggcaagaagaagcgcattttagtgaaatgtctagtgattgatgacttccttgctattgatgcgctggatcttgaggcacaacacaaggaaccctgcaatgtccagataaatgtgaaggatttcttctctgaagaacagcccaagaattataaggatatgtacaagaattttgcgggcttcatcaatacccttaactcaagcttgttagttgaattggatggtaagaatgctgctgctgctgccgcccagaatgttatgagcagttcatcaataaacagttctgaaaatgttctgcgggatacaaggactactga

SEQ ID NO: 19452 - DNA, 1982 bp, Zea mays
  unsure (1)..(1982): unsure at all n locations
  Clone ID: MRT4577_117744C.1
ggagcggctggtcttgtgcccgacggtctcgggtcctcccgtgattggcagggcccgccgcagacccgggagccggcgtggaagcccccgccgccaccggtggtctcgccgcgcagtggatctggtggaaggaaggctggtcggaggcccaagcgggttgccgtggccgctacgggcatggtcgcggacgtgattggcaaggagtacacgcgacccgcggctaattctgtagtaagcatgccaaatgcttggaagggtcgggacggggagagcgatggcagcgggtctggtggccgcaaggacagtgttgaagaggcagagcagttcctgtgctccatgctcggggataattccgagcttggcatgggtgttgtcagagacgtgctaggccagtatgggtacgatgttgagaaggctttggatgcattgcttgatatatctggtgtgtcttcagttgaaaacatggaaacaaaccatcaaagtgccagaaggaatgacacatgtcatctagatatgttttctggaaatgggctatcagtggagaatctgactgcagggaatagaagaagtctacgccagttgacagatgagatatccaacactgggctccagtctgaattaggacacgagtttttatggggtgaacctcagatcagctatgcggaggctgttaaggaggcaccacgctcatcaacattgccgtcaagatcaactgtaatgaaagctggtccacaacaagtcctggattcactgtttaaaattcctgaaacacgcacgtatgagccaagttctatggactggaaaaaggtagtaaagaaactgcaaacaatcaattataccgctgcatcaaacaatcacgaaaggcctaaggatgggggtggctatcgtgagctccgtggtgttgctgcaaggcattacgataaaatgaaagaatactatcagaaagctgcctttgcatattcgaagggtgacaggtcatatgcttcttaccttgctgaggaggggaaacattatcgagaactgggtcgcatagaagacgagaaggccagcaggaatatatttgaagccagaaataagcatataacgaacacagtaaccatcgacttgcatggccaacatgtccaacatgctatgaaccttctcaaaattcacatgatgatttgtatttgcattccatctgtcttactgagggtaattaccggttgtggttcagaaggtacagggaagggaaaaataaagcgctcggttatagagcttgcggagaaggaacatattgagtggcgcgaagagaactctggaactgtagcccttcgacttggtgggccaagagagtatcggttccttgagcatgaaagcgattctgacctagtggggaactttaacatagattaacttctgatctaatctatgtattcccgtatttatgtgttatagctatggatgctgcctaggttgcgatgtaggctgtagttctgacacagaagctcggtattgtagttgggtaaattatggtgtaatgttgaccccaggctgctaactgtgcaatcacagaagctctgactgtacaaccgtagcccttctgtgaacaatgcaacacaggaaccgtaatcatcgtgagttgaagaatatcatactatggccgattgccacgggaaccaattttggcctgtaccaactggaacttacgatttgtatgaaaatatattcaacacttaggccaattttagtttaatgctcgctctcttggatgctaaaaataagcattgatattttgtatggatgaacacccccccttataataaataagtgcggtttgtattaggaaaggttgagttccctacaaatgttatttttctaaaaaatgaatttgtatgagatcaatcactatagtatttctgagtgcatgtaaaaaaaaaaaaaaaggncgncctgaagatagttgcctccctcacccgggaaggattccggaccggtacctgcag

SEQ ID NO: 19453 - DNA, 628 bp, Zea mays
  Clone ID: MRT4577_117745C.1
caagcggggggccgtggccgctacgggcatggtcgcggacgtgattggcaaggagtacacgcgacccgcggctaattctgtagtaagcatgccaaatgcttggaagggtcgggacggggagagcgatggcagcgggtctggtggccgcaaggacagtgttgaagaggcagagcagttcctgtgctccatgctcggggataattccgagcttggcatgggtgttgtcagagacgtgctaggccagtatgggtacgatgttgagaaggaacaactcgctgctttgtgttctgaatggatatactgttggtttgtacagttgtgctaatcaagtgctttcaggctttggatgcattgcttgatatatctggtgtgtcttcagttgaaaacatggaaacaaaccatcaaagtgccagaaggaatgacacatgtcatctagatatgttttctggaaatgggctatcagtggagaatctgactgcagggaatagaagaagtctacgccagttgacagatgagatatccaacactgggctccagtctgaattaggacacgagtttttatggggtgaacctcagatcagctatgcggaggctgttaaggaggcaccacgctcatcaacattgccgt

SEQ ID NO: 19454 - DNA, 691 bp, Zea mays
  Clone ID: MRT4577_117746C.1
aactcaatacaccggccgttgcaactcgccagtcacccagccacccagccagccattgagcccctctcctctcctctcctcgccgaatccagcccggcgttcgctgtccgacatccccaccaattcggcgcgccgcacgtgcgtacgtataacacatcggtcgcccgatcaatggctctgctcaaggccgcgcgcgtcgccgacgtccccaccctcgacgtcgtcgtgccggaccacctcgccgccgccgccgcgcgggtcctcgacgcggaggcggcgtcgatggtgaagaagcagcggggcgcgggccggcggttcgcggtgatcgggcaccgcggcaaggggatgaacgcgctggcgtcgccggaccggcggatgcaggaggtgaaggagaactcggtccggtcgttcaacgaggcggcgcgcttcgccgtcgactacgtcgagttcgacgtccaggtcaccaaggacgtctgcccagtcatcttccatgacaacttcatcattactgaagaacatggcaaaatttcagagaagcgtgtcactgatcttcagttggaagattcctccagtatggcccacaaaacaagcaaggcaagaatgggaagcctttgctgcgcgaaatgaacggacggtcgggtgttgaattgcaacgcccagacagatgatcccctttgcccccttcaagaag

SEQ ID NO: 19455 - DNA, 538 bp, Zea mays
  unsure (1)..(538): unsure at all n locations
  Clone ID: MRT4577_117747C.1
gcgctctctcctatccatcgctganagtcccctcgatatctcatcaataaatctgcgtctatctccgatccgctgcaactactatccctcgctcctagaagctgctcgtcctgatcgcgcgtgggtgtatcttagtacaagggagtcgccatgggtgtctgactacgcaccgtgccacagagaagctgtaggacaccgtatacctgcggccccttgacagccgcaacgacgtaatatgtatactgtactactcccccgacaaacacgacatctcttctactgcagctactgcagatcgctcatcactctccacacctgacaacagctggagacctgccgccagctcctcaacagcacctccttgttcgtctagtggctgaagaccaacaagcggccctcctaccaccccgccggatgaatcacgtacgtgcggaccaccagctacatgcagatcacacacacatccaccttcctccaatgcatagcctaacaagcaccctgcctcgcgccggcttcccttccatgaaatgctgcactt

SEQ ID NO: 19456 - DNA, 327 bp, Zea mays
  Clone ID: MRT4577_117748C.1
aagctcggaattcggctcgagcccaatactgctgtaccacctttctgtcactctactcaccacccccggtctcgggcggagactaattcatatgcacacacaggcacaatgaccccacccccccttcgtacgctcattcccgcctagctaacacagagcacagccatgagctcgagtccctggccttgcaaaccttttagtacctaactagactgacgatgtttaacccaccttaacaataaatacaggctgaccccaacgggcacatctccttctgcagggcagctagagctgatacggacgcctctgtcccagacatccacccac

SEQ ID NO: 19457 - DNA, 739 bp, Zea mays
  Clone ID: MRT4577_117749C.1
actgttccatcgtccttgcgctcgaccccctccccgccggcccgtccctcgctcggcacacaagccgcctccgcgcctcgatttccgaaacgcccccggctccaatggcgctgccctacctggaggccgtcctgtgctttatgactctcaattacatatttgagacatatcttaacatcaggcagcatagagcccttaagttaccaacattgccaaaatccctggcaaaggtaattagtcatgaaaaatttgagcaggcgagagcttatagcctggacaaaagcaatttcaattttgtacgtgaggccataactatagtatgcgatatcgtgatactgtactataaagtccttccttggttttggacgaaatctggagtgttagtaaccaatgttggcctgaatgcagaaaatgagataatacacacccttgcattcttagcaggtgtcatggtttggtcacagatcacagacttgccattctctctgtactctacttttgttattgaggctcgacacgggtttaacaagcaaacattctggctcttcatttgggacatgatcaagggaattttgctgtccgttgtactcgcaccaccaattgtggctgctatcatcgttatagtacagaatggagggccttacctagcaatatatctctgggggttttatgtttgcgctagctctgctgatgatgacaatttaccctatcatgatagctcctctgttcaacaaattca

SEQ ID NO: 19458 - DNA, 491 bp, Zea mays
  Clone ID: MRT4577_11774C.1
tttcaaagcaagggctgctttattaatgttgggaatttctcaactgtaatccatggattttctcggcagggtgatctggaatcagcactatctttactggatgacatgtatctcaccaacaggcatcctgatgttgttacatacactgttgttgttgatgctttaggaaggaaaggtaaaatgaaagaagcaacagcgcttgtagagaaaatgcttaacagaggtttgctccctacacctgtcacatacaggactgtgatacataggtattgtgaaaagggtgcggtggaagatttactcaatctgctggataagatgctaacaaaacaagggtttagtagtgcatataatcaggtcatcgaaaagctatgtgcatttggtaaacttagtgaggcttacaatctgctcagcaaggtactaagaagtgccttaaaaagagatgctcaaacatgccacattttgatggatagtcttctgacagaggactccac

SEQ ID NO: 19459 - DNA, 251 bp, Zea mays
  Clone ID: MRT4577_117750C.1
ctcgaaggcggccgggccggggattactcaatgccagacttgcatcccgaccttttccgcgccggccgacgccgccttttcgtccccgcgtcagcgtcgcggctccactgagcgcgcgtgacaccggcgccaggcacagggcagtcgccggcggcgatgggggccgctgacgcgcgcttgcccggcatcgcctcccccatccgcgccatccccgacttccccaacccacgccacatgccccaccacctcac

SEQ ID NO: 19460 - DNA, 285 bp, Zea mays
  Clone ID: MRT4577_117751C.1
cccacgcgtccgcccacgcgtccggaaacaattccgtctatgaagagcataaaacatgacaggataacatctttgtatggagtgggtgtacatccatttagtgcatattcggtgtcccacaacaatttaaggcctgaaacagaagagggtgaattatctcctaatggtgatttcaaagaggaacacttctgtgttttcgaagatgaagctgtagatggaacttctaaacaaaatgaaggttctaccagcagatctccccagggtagacctaagaattatctcaag

SEQ ID NO: 19461 - DNA, 399 bp, Zea mays
  Clone ID: MRT4577_117752C.1
ttcgcgcgctctctttttcgtcgcctctgccgtcggcgactagcttgacttcgggcgggttcttagtatagaagacgacggccgaggcatggagcccatgaacgtagacaacggcgggagagtttgacttgacgcgcagatagaacagatgatgcagggacggccgctcggcgagcgagagggaaggcactgtgcgagatggccaaagagatattgatggaggaaagcacggtcagactgtcaagagttcagtgacaatatgtggcgatatacatggacaattccatgagcttgcagagctgttccgaattggggggaagcgtccagacacccaatacttaatcatgggagagtatgtagatcgtggctactattttggggagactggtactatggtag

SEQ ID NO: 19462 - DNA, 756 bp, Zea mays
  Clone ID: MRT4577_117753C.1
gcgttcgcgaaaatttacgcctggcctcgtcctctctcctcagcgcggcacgctgcctgttccgtgcgatgtgcatgcctgtcgcggcgacagcttgggttgctatgctactactgcaagtgcgtgcgtgtctctctgatctgttttgacctgacagaagattgcacgtctgtgcttgtccgaagaagaaatcgatggtcaggactcatgaggaaacagagatgatgctgtagtggtgcgtcgctcctggctggggctgtcttggctgccacggagggctcctccctgtcccgccctctcgcgtcatcgcctcctcgtctcgcagcaacatcgcggaggaggagccaccgagcctcctgcggtcaacgctgtggccgacgcgggtgctccaaggattggcggcgcggcccggcccggaaaccgcctccgagacactgacccccaacgcgtcgtcaagaagctgcgcacgcgccggcgcgccgcttccaccgccaggctctcgaggtagctagatacggctcccctttgtgccccgatcctttcgttctaggttgcttgttgttattggcgcgtggaaggtgttcgatgagatggtacaggggggatggaagagtttctattgtcatatttatctttctctttatgtttgcatttgatttgaggcgaatgcgtttgatgtaatggtgctactgatggagtatactttcttcttgtcaaaaaaaaaaaaaaaggcgccgttaagatccagttagtacg

SEQ ID NO: 19463 - DNA, 628 bp, Zea mays
  unsure (1)..(628): unsure at all n locations
  Clone ID: MRT4577_117754C.1
ccggccgggagcacagggaaactatccgctacccactcgggagactccagccccgcgacggggccgggccgtcctgttccgaccgacagccacggactccaccgcgacttatgagacacggaagagtacttctatgtatactgcaccttctttcgcggctgtggactagcccattctatcacctttttatatataacaaatctgctgggcttatatactacagggactatggaggacgagggaggatgggtaccactgacagccaagaggagaagcctgtgtgcttcgatgcatgctatatcgcagcaactgggcgctaccagtggatgcgctgctattgatgttttacaagctcataactttgatctgcattgctgtcaatccctaacagggacgaaagcgttcgtactatgccaaactggagctccaaatatggaaatgctgctgaaagcgatttaccagctgcacacagactctgttatgaagaatccggtctatgagatggagatgcccattctgagcgagctgtttgatcacaacctggctcaggtgatccagaaggaccgtgttgcgctcctgggtcgccgaaatatgaaagctntcggtactcaccataccatgtatgttg

SEQ ID NO: 19464 - DNA, 702 bp, Zea mays
  unsure (1)..(702): unsure at all n locations
  Clone ID: MRT4577_117755C.1
ggccgcttttttttttttttttttcttttttttttttttttttttttttttttgagagcgaataaagtctctaaatatatttttgcttcagcaccatattctcccaggcaacacaaataatataacgatgggaaggaaacaatgacaaaaatctagaaaaattattagggacactataactagacaactctagacattcagacgtcttgcaagaatctcgttctgacgatcttcataatattgttgttgcttgtagttcatgttgctcaggtccaaatcaataattctatcctcttctaactgtctttggaacgcaaatttttctttctccaatttgagcctttcttcctgtagagcaaaggctttgttgcacctctcctctttcttcaattctttctgaatgtcagattctttcttctttgcaattagatagtctactgcttccatggtcgaacgttgccggagtttatgtttctccttcttcttaccgtcgggtcttcctgacggttcttcatgatcaacacctcccaaaggagcatctatggcaatagcagcagcaactgatgctggagaagatttggcgntgccttttgtttcttattgcttgattttttttgcacctccaatttcctttcgtctatccatccactttgggcttgtccttcaagattttcgagcaatgcaggaatgaaaatttccttt

SEQ ID NO: 19465 - DNA, 168 bp, Zea mays
  Clone ID: MRT4577_117756C.1
gcacgagattttgcacatgcctacgacgtgtatgttttgggcaagaaataaaacaaggtaccactacccagtccacacagagactacatgcatgagcaacgaacaaacaaaaaaaagcagtaaagtatatatagtgtatatacttatactatacaacagcaacgaacc

SEQ ID NO: 19466 - DNA, 401 bp, Zea mays
  unsure (1)..(401): unsure at all n locations
  Clone ID: MRT4577_117757C.1
aaaaaaattcgtagtacccctccgttggttttggtttgttgctgtttagttcatatttgtcactgtttcgttaaaaatgaactagcgggataacgagaacgggaggtaatatagcttttcatttaatgtaatgtaacgtaatcttatgtttgcagcagtaataatgtgtattatataggggcagcanaaaaaaaaaaaaaaaaagaaaaaaaaaaaaaaaagaaaaaaaaaaaaaaaaaaaacaagattacatacaaaaaacatacaaaaaaataaggggggctgtagagtcaaaaaaattcaatttactggccggcggtttacaacattattgactggtaaaacgggggcgtaacccaaattaaccggctttttatacacaaccctttcgaacaggtaaa

SEQ ID NO: 19467 - DNA, 1880 bp, Zea mays
  unsure (1)..(1880): unsure at all n locations
  Clone ID: MRT4577_117758C.1
ggtaccctccgngggctcggccgggnagtttatacctccccaacctggttcgatagtgatttcatcttcctctaccaggcggctccgtggtccgtgctgatcaactgcatcaaggatcgtcgccggcggcgcgctggcagcagttcgcacggcgagatcggattgatcgagatcttctaggcctggacctgcgctagacctcgaagcctcgatcgcaccgcatcttctctctctgctgctggtccgctccgtcgccgccgaccccgccgccagcttccccttccacctaaaaggacgacctctggccgcccttgtcccgccccgacgcctcggtttccactgcataggcgtggtgcggcgatccgtccgggcctagggttgcgagagacactatagggtacgaccctaggagcatccgcctccacgtgggtgaggcggaagagggaggatgacatcgctcagccgtgagctggtcttcctcatcctgcagttcctcgatgaggaaaaattcaaagagacagtccacaagctcgagcaggagtcggggttctctcgacccggcgggggactgcactgctcaccggtcaccacaagcagcgaagaatcgcccgacccaaaaccttattgccttgctggctgcaatggtcaccagccctctccggctactccccgtgctcttgtcgctctgtataatctccatcatccacctgtgtcctggcgtcgtctccacttcgcccctctccttcgacgtgcagttcataccgtggggctacgacccacaggaagtcggcttccatcagatcatcgccccaagaaacctcagtagcagaatccatgcgagccgtccgtacacggcccaccagaagagtcaagtgctccctcgcaagaagcggaagaagttcgtgcctgacaggtgcgactgctcaaagcagatcgacggggtgatgtacatgcgcccggcgccgctccgggacgaggccaccggcgacgtcgcaagcttcaagatgaccttgtgttacagaatcaaccctcgtcaagcagatgatggtaccgaattcaaccacggtggccgcaacattggtctgttcctgttcctcgtaccttacccctggaattccaatgatgagaggatagaggttgggctcgacagcaagtgcacagaggcgaagatgaagcagtacagcagcatcggcggtgacgcagtagtgtgtgcccatgtccactacgacagcgccaaggagctgctgatcaccaacgtcctcgtggacgactattcctgcacctgcggaaggaaactcaaccggagcagcatgcccagcgaggcggccgtcggttttgcctcgaccaacgccggcgacccgattgagctgcgaaacattattacctgggcgttccattccaagctggagtccaaggatcccccgctgatgacgacgaagcctgctcaagtggaaaccccaaccggcggtgaggagagctcctggccgatagacagggggcagcagcgattccgtgtggatccttggactaggcacgctgaattgaatctacagtaccagcggaactggcaacggaattggcagctcacatgtagtctcagcatctctgtaggctatggaaacacaaatggtgacatggattagaattcaagctaccaattctacctgcaggctagggggtaataatatgaaacctaatgaaaaatcgaagtaatatgaaaaagaaaacttagatgcaggtggtttttttccgataaaaaaaaaaaaaaaagcggccgaaatggctattattatattacttgtgctattgtatatttatatttggaattcaggctcctgcctccccatcctttcactaaaaaaaaaaaaaaaaaagcggcc

SEQ ID NO: 19468 - DNA, 413 bp, Zea mays
  Clone ID: MRT4577_117759C.1
gttttggggttttttaatatttaaattttctctttcttttattttttttctctttttctatcatttcacatcttttcaacaaaaacttccaattcaaaacggacaacactaaatccaccctgtaaaaaccccaacggcccacaccaaccgggggggggggggggaaagcaaatcccctatccccagggccaaaagcagcggggcgccgaaccaaaccacgtcttttttaacggccaccccccaaacaaaaccttatcgaaactggccccccaaggaccaactcccccgtgggggaaaaaacactccgggggaccaaccgccccaccggggggggagaaataataagggggccgggggttccttgggggggctgggctggggccccccccctccccgaacccttcttaaaaggg

SEQ ID NO: 19469 - DNA, 359 bp, Zea mays
  Clone ID: MRT4577_11775C.1
aaccagctacaatctaaccgggttccgtttatatccattcaacgacacaaacaacacacccggggccattcagaacccaactacaccacataccctgcctttccaaccctactgaagaaaagagtactcaccggctgttagctacctgaaacgggccacacatagacgaagagaaactacggaaaccgttaacaactaaccaactgctttacatccaggaccgatcatgaaaactagccacgcttatggggccatgctgacagttccacagcctctcttttaacacatatgaggcttaaggacacccaccccaccctagctatggagctcttgacgcactggcgagataaccggtcttg

SEQ ID NO: 19470 - DNA, 272 bp, Zea mays
  Clone ID: MRT4577_117760C.1
aacgctgcgtcaagaaaccaccgagagcccaaccgcagcgggagcagagagagcacggagccacggacagtagcgtggcgccgaggagcaaagatggaggggaacgaggacgacgtgcgcccgggcgcccacaaggtctcggagccgcaggccatcggcacggaggcgcaaggcgccgtggcacgggacgccggcaaggactacagggtagcccccgccggcgccggtgttcgagcccggggagctcgagtccaggtccttcccacgcgcgg

SEQ ID NO: 19471 - DNA, 330 bp, Zea mays
  Clone ID: MRT4577_117761C.1
aaaataggttatttattttatttttttatatacaattaatactatattttttaatgtatatttttatttaattttttttttgacattaatatatttatatactatctttcttaaagaataaaaaaaaaagcattgacaagcaaggccagaaaaaaaaaaactccaacacattcacatacatgaaagcacccaaaaaaactttaacctgcttgttgtaggacatttatctaaaaaaaaaaatggcctactacactaaagtctggaattctaagaaaaaagaatcatgaggtacctgtgaacagacattttagaaaaaaaatgctgacatat

SEQ ID NO: 19472 - DNA, 153 bp, Zea mays
  Clone ID: MRT4577_117762C.1
gaatgatcagcgtcgtagctcggattcggtagcgcttatgcacatgactggcagtctatatctgttctgtgcaagtgtaatcctcagagctgttcgatcacttatcgcactttatgaccgcgctgtggggattcatgcttcttaggtaaatat

SEQ ID NO: 19473 - DNA, 1998 bp, Zea mays
  Clone ID: MRT4577_117763C.1
cgggggggaagtgggctcgttgagggagctccttggggccctcgaggccggccggggcaccacagttgagcttatttactttttcgaagaaaccacaaccaaacctcggctgctcggtggtcggtgcccaggtgcgccgattatctccatcaaagccgcgcatcccgctgcccccttactcatcctccccgctgctcgaaggagagccaaatccagagcgccgccgcgatggcctcccctgacgcggaacagccggcgccgacggaactcgagcggtggcgtgacctcgacatgctcttgtcccgccctggaaacctcgtggaggccactttcgatcccagccccggcctgcgagacctactggggagcctcgtggaggttttggttgtgggcgcgggcgggcttggctgcgagctcctcaaggacctggctctctccgggtttaagaaactgcacgtcattgatatggacaccatagacgtctccaacctcaatcgccagtttctcttcagagttcaagatgttgggaagtccaaggctgaagtagcagcgaagagggttatggagcgagttaatggggtgaacatagttcctcatttttgcaggattgaagataaagagatagagttctacagtcagttccacataattgtcctaggtctggattcaattgaagctcgaagctacatcaattctgtggcttgtggtttcttagattatgactcaagtgacaatccactccaagagacggttaaacctatggtagatggtggaactgagggcttcaagggacacgctagagtcattatacctggaacaacaccttgctttgaatgcaacatatggctttttcctccacaggttaagttccctttatgtactctcgccgagacaccaagaactgcagctcactgcattgagtatgctcacttgatcaaatgggatgaggttcatcctggaaaaccttttgatggcgatgatgcagagcatatgcagtggatttattcagaggctttaaagagagcagagcttttcggtatttctggtgttacatattctttgacacagggtgttgtcaaaaatataatcccagccattgcatcaacgaatgcaattatatcggctgcttgtgcattggaagccttaaagcttatttctgggtgcagcaaaagtgtgtcaaactatctcacgtacaacggtctggaaggaacgcacattaaagtaactgagtttgtcagagacaaagattgccttgtatgtgggcctggtacccttgttgagctggatacgtcatctactctttcagatttcatcaagatgcttgaagagcaccccaagttgcggatgtcgaaagccagcgtgacgcacgaaggtaacaacctgtacatgcagtcaccggaggtgctggagcagatgacacggccaaacctgagcatccccatgtttgagcttctcaaagaggtcccatacaccactgtccatgccacgggcatggcagagaacaacgggaaaaaagtgtcctcgttgaggaagctccgtgtggccttcaagggcatcgaagacgcctccaagatggatacgaccgtgagctcatgatgccggtcgtcgtcgtcttgttgctaatttcaagtctcccaggaaaagatgaggattaacccaatgtttttggacaggttaagtgtagttttcgagcgccatattacaaattgaaatgtgcgcctgatactgttcaaacatgaagaaatttatcgtagatgatactatggttttgtgagaatctacttcttggtgtttcgaatcttgctcgacaagtaaattaaatttattgtgcgtattctgagttttggagcgtgtacgcggtggagaatgtaagatttatactagttcggacagaacgttcttactttcagtcattgtggcttatgctattggtattattgataaaaaaaaaaaaaaaaaacccccccacaagcgcggccgtttagaggtacccaaaaa

SEQ ID NO: 19474 - DNA, 654 bp, Zea mays
  Clone ID: MRT4577_117764C.1
actccttagggcgattgggtctctcgaggccggccggagcggcgtcggcgatgacgcccccaccacgatgcacgagcgacgacgcctccatcccgccaatgtgcgcatgacgacggttccttgaaggagcgtgacggtggtggccatccgatgcgggagcggcgacggcaacctctcctaggcacgagcggcggcaacgacctcccctaggcatgagcggtgatgacggatcctagatgtgcgcgtgacggtggtggctccccgaggccacgccacggtggcggccatccaagtcgagtgacgccgcgatggccacctcgacgcgtgaacgacgacatatctaggaggccacatgcggcgtcggatcttagaggcgcgcctggtgtcggctctctggagacgcgcgcgacggtgacgacctgctccaatcattgtttatgtatggggttgttggctggatacatattaggactctttcatcaattatgatatgtagtgtagatatttatgtaactttctaagtgagctcaggaacctccgggcgggggtcagcgtgctcgttccaatctgctacttgtgatggtatggtctccattattatgccaacgacgaccccattgcattgccaaaaaaaaaaaaaaaaaatttgcggcc

SEQ ID NO: 19475 - DNA, 696 bp, Zea mays
  Clone ID: MRT4577_117765C.1
ttgggtacctccgaggccggccgggaaaaaaaataaaaaaaaaaaaaaaaaaaaaaaaaaaaactcatcctccccgctgctcgaaggagagccaaatccagagcgccgccgcgatggcctcccctgacgcggaacagccggcgccgacggaactcgagcggtggcgtgacctcgacatgctcttgtcccgccctggaaacctcgtggaggccactttcgatcccagccccggcctgcgagacctactggggagcctcgtggaggttttggttgtgggcgcgggcgggcttggctgcgagctcctcaaggacctggctctctccgggtttaagaaactgcacgtcattgatatggacaccatagacgtctccaacctcaatcgccagtttctcttcagagttcaagatgttgggaagtccaaggctgaagtagcagcgaagagggttatggagcgagttaatggggtgaacatagttcctcatttttgcaggattgaagataaagagatagagttctacagtcagttccacataattgtcctaggtctggattcaattgaagctcgaagctacatcaattctgtggcttgtggtttcttagattatgactcaagtgacaatccactccaagagacggttaaacctatggtagatggtggaactgagggcttcaagggacacgctagagtcattatac

SEQ ID NO: 19476 - DNA, 404 bp, Zea mays
  unsure (1)..(404): unsure at all n locations
  Clone ID: MRT4577_117766C.1
gcgaacgaatgcaattatatcggctgcttgtgttttggaagccttaaagcttatttggggntgcagcaaaagtgtgtcaaactatctcacgtacaacggtctggaaggaacacacattaaagtaactgagtttgtcagagacaaagattgccttgtatgtgggcctggtacccttgttgagctggatacgtcatctactctttcagatgaagatgactggcgcatcgttagacttagtactcgtcaacatcttcgttcatcaagatgcttgaagagcaccccaagttgcggatgtcgaaagccagcgtgacgcacgaaggtaacaacctgtacatgcagtcaccggaggtgctggagcagatgacacggccaaacctgagcatccccatgtttgacctttttaa

SEQ ID NO: 19477 - DNA, 211 bp, Zea mays
  Clone ID: MRT4577_117767C.1
gtaggcttcacctcttgcaccggttcgtgatcagactctggatcgtgttccagaggtatgctatggcggctgcatacgatgagtaccggtgctccgagcgtcggtctcgcctgggccaccgacgaccactagctaacaacgccttcagcccctaccgcgagcgcctcgagtcgaagatcatgctggatcgacagacgcagaggtccctgcg

SEQ ID NO: 19478 - DNA, 484 bp, Zea mays
  Clone ID: MRT4577_117768C.1
ggttctcggcgcttccctcaccaccccaccccgtcccgaaaagcacctcggcctcggcgtgcgcgttcggtcaaaacccaccgcgccgctgcccgcctccccccaaaacgccactacaaatcccgcacattccccagcagccgctcgccagagctcccgagcgtgccgagacgacggaagcggaaaggcggtgcctccgagctcgagggattgcgagctagagacacccaaggatgggggacgactcggacggggaggcggaggagtacctgttcaaggtggtgatcatcggggacagcgcggtgggcaagagcaacctgctctcccgctacgcgcgcaacgagttcaacctccactccaaggccaccatcggggtcgagttccagacgcagagcatggacatcgacggcaaggaggtcaaggcccagatctgggacaccgccggccaggagcgcttccgcgccgtcacctccgcctactaccg

SEQ ID NO: 19479 - DNA, 661 bp, Zea mays
  Clone ID: MRT4577_117769C.1
cattgggtacctcgaggccggccgggtgcctgttcccgttctcgccgtctaatcctcgtcattctgattagactgtctgggcgaatgctgaagaatgtgctcttgtggtacatcaaagtgataaccttgaagcaatgacgacccataaaatcaaaacaaggcaccaagatgtgcagcatgatgtcgccatgcataactatgacacagaactaactacatcctcctctgatcatacaataaaaatcattggagatatagtaacctcactccataagcttgtgactttgagtgtacaccatgaccctgtatgaaataactgatgagctcgatcccaggtttacatccatgctggaatcccgtggatacgaccgcctgaagaacgtacttgaatgaaggaattaagactgatgaatgggcactggtactcaccttctggtgatgacgagtcctccgagaattccatcatctgaacatacacatgagctaagactatgcttgaaattgcggttcatcaaatgccaacatttcatccctcactgctcgttctgatggacgctgggataccacacgtattgatcaggcgcatgcgggagattgtgacctcagtctcttgccctcctgcaaaggaaccggaagctctaatcagcgcgcctgcttctgc

SEQ ID NO: 19480 - DNA, 588 bp, Zea mays
  Clone ID: MRT4577_11776C.1
ctcaatttcttaggataactttgtagtctaaattgtcagtctgagctccagtaatatggaaatactccctccatcctaaattattataagtcattccttgaggagtcaaaagtaattcaaatttaaccaaatttatataataaagtagtaacatttatgacaccaaataagtatcactgtgttctttattaattacatttttatactataactatttgatggcatagatctttgtaattctctctataattttagtcagacttgagatgctttaaccctctaaaaatgttaaaattaacttataatttagaatggagggagtatgtactatgttattcggaaaagcaaatccacgaccaaccgatgtgtcttgtgacgtcactcaatttctttcacaccccactgtctcagtggatgagtggtttctgaatccttctcttagagtcttatctcttccctctgttcctcttctgctcttccattttttcagattgctcatatcaatcttgagtatctattgtgctcccctgctcctggaggttaaaattcagtcatgctattcacagagaccagtaactggatccaaag

SEQ ID NO: 19481 - DNA, 133 bp, Zea mays
  Clone ID: MRT4577_117770C.1
ctcaggctgaagctcagaaaaccgaaattgaagaacttcggagacaactggctgaagctaagagactgcgcactcgacaggtaatcagaatcaggatatggacatagcaggacatgtaagactgcgatcagat

SEQ ID NO: 19482 - DNA, 319 bp, Zea mays
  Clone ID: MRT4577_117771C.1
cttctgtagaaaataaaaaagggcgtccttttccgattcgataaaggaaatggcttccgggacccttatccggtgaaaaatccaattttccccaacccgggggccctgttaggggtttcaccgcgcccttccaagggtccatatctcctcgtgcccaaatgctgggaaagaggccttttttgggtggggacaatccccccttgataggagggcccggggtctcctggggcttttggtggggggggagactcctccattcacattcaatgaacctgaggcgtcgggtcgcccttttcttttttggggtcccgaaaaacct

SEQ ID NO: 19483 - DNA, 422 bp, Zea mays
  Clone ID: MRT4577_117772C.1
cccgcggaccgtcagtagaacaccgcccgcccaggggcgcgggggcgggggcagagggattcagatggtagcgggctgctgcccctttttttttccacacacttttgtacattctataatctacaggtacaaaaggggggggctaaaaataggggcgggcgcccgggatcgtcaggatccttcttgccttggcccggggccccccgggccttgggggggtctctgggcgggccggggggccattattaatagagggcgggcggtcttcagggtcctgggcctcggacccctgcctgccgcgttcattggtcgccttgttggcaccctttgccgttttccttggtcgtgcttaccgatttgagctcgccggaattggttggtttgtccttcataatgcattccttgtcatctggtcttgtctt

SEQ ID NO: 19484 - DNA, 208 bp, Zea mays
  Clone ID: MRT4577_117773C.1
atgattatgttgttcctgaggaaggaaacagcggcgggtcacattaagcccttcttcacccacctcactttagctaccgttgttgttaacatacatagcaataacaccattttcgccttttaaaaaaacaaaaatcatgccggccgaaccctacttcaaactctaaccatggaatgaattgagcacttttacctgactatataccagc

SEQ ID NO: 19485 - DNA, 633 bp, Zea mays
  Clone ID: MRT4577_117775C.1
cattggtacctcgaggcggccggccgggattccaactcgacgcatgtgactgagctgagcgcgccgccgcacgtttcttacaccgggctcccgacaccacctcctgctcccaccgccacctcctgctcacaacgccgcctacttctcgcagctcccactcgctgccccatgcctactggcctagctcctctccggagtcctcgtcgaggccgaggtcccccacgaacgtcgcgttaaggctgccgctgaagcactgtgtgcctcggtgcaaatccatcagatccattagcaattacgcttcagtataagctgtgcgctgatccattctgtagacatcagaatctcctactatgcacgctcaatactaatacatttgtgagagttgttgtccctaaaatatttcatctcacatcctcagaagcacgaaaacccatgtaatcccgataaatcaaatacatcacacgttatcgcgtgaacgagattgctggagacgctgtgcagactataagcttacagatatgattacaattccagcttgatgtttccttggcgagcttggaaaggatatatttgattccggtcagataaagaaaagccgaacatgcgtgctacttgctgtaaactggtcccgta

SEQ ID NO: 19486 - DNA, 798 bp, Zea mays
  unsure (1)..(798): unsure at all n locations
  Clone ID: MRT4577_117776C.1
ggtgatatgagatgatctctattcgcttggaaagtagagataggttaaatttcggtctgaacggtgaaaccttaaataaaatcttaggatgctgtgtgagagaagcatgctggctccctcaaaggtatgtttgattgaagaatcaacggattgaaaatctcttatggatagaagtgcttattaactaaagattttgaagaagaagctgctgtctgctggaggtaggcttccttgaaatctaacgtcttaatgaacctttaagatcataacaacgtgcacgagtggtacatgctaacacgtcgaaacccttgtcacgaaagaatcatgtttctttcttccttccatttcctggcatttgatgctatgatgtgttcctcttgccagagaatggtgtggacaacgcggtaaatttggtgcagatggatggtgtgttcaaattgatcggagttctctggatggatacctatcgagtagtataattcctctctcagctcactgtccagacaattagtgctatctgtgactgttgggcaatcaggttatcgagattttgctggttggagctgtccggcattgctttcatcttttatcaatatgccggtctttggcagcatatggcgattcagaactgtgcgcagtggtttcctcgaatttaggaccccccaactgcattctgtattgagaacattcctgctaaatacatgatacttgcaggtattgtgttgtgnttgcaacgtgatagcttgtactgggaacaaggtcaagatgggcggcttggacctacaccttgactttgct

SEQ ID NO: 19487 - DNA, 824 bp, Zea mays
  Clone ID: MRT4577_117778C.1
ctcgaggccggccgggaaccacactccacaacacctcaccaaaacacaccatcacccccactcccttctctcccaaccaatcacacaaatcaccgcccaccatggccgtgacaccggactacaaattcgaaggatggatgggtctcgacaaggaggccgccaagggcaacatggtctggcaggagttccagcccaagcctttcgaggagaccgatgtcgacattgaaatcacccactctggtatctgcggtagtgacattcacaccatcagctccggatggggcgaggccaagtaccccgtctgcgtcggtcacgagattgtcggcaaagccgtccgcgtcggatccaaagtctattattggcatcacactccgcgaccgtgttggtgttggcgcccagaacagctcctgcttgaagcccgactgtgaggagtgctcggctgggatcgaacagcattgccagggtaacgtcggcacatacaactcccaatacccggacggcagcaagtcatatggtggttacgcgacctaccaccgtgcgcccagccactttgtctttaagattcccgatgcgatccccagcacagaggcggcacccatgctctgcggcggcgtcaccctctacgcgcccctctcccgcgaaggctgcggcccgggcaaaaaagtcggcatcatcggcgtcggcggcctgggccactttgggattctcttcgccaaagccctgggcgccgaccacgtcgtgggcatctcgcgccgcacaacaaacgcgacgacgtcctggcgctcggcgcggatagctacatcgcgacccgagatgaacccgac

SEQ ID NO: 19488 - DNA, 375 bp, Zea mays
  Clone ID: MRT4577_117779C.1
ggcatcaatattattattttctcaaacggggaacttaaaaaacaaaagggcagggtgggagcaggcaaaatgtttttatcagcatcaattcagcctatggggggccaatagacaaatcgggggcagaaactgtcaagaacaggacattactcacaaatggacccccttttgggttagcgccaaccctggggtccaaacccaaacaaggcatgccccccagatttgaattacatcactgaagactggccccaggggaggggaaaataggggacccaaaataggtggaaatttttaatgggaaagaggattttgggttttttaacacttgaccaaccatactttggttcctgggccaaaggacaacatttttggaag

SEQ ID NO: 19489 - DNA, 356 bp, Zea mays
  unsure (1)..(356): unsure at all n locations
  Clone ID: MRT4577_11777C.1
acttgcggtctgtaaggtgattgaaatgtgtcttataaatcagacacccggggcctttccccctgtnggttgttgctgtgggtactttagttgcttcattagaaggctcgggtgcccggtcggttttgttgtggaggtttgtcagggtttcaactggtagagtcgttttaccgtcatagatggtgttatgctttattttgtttttttctgtttttcctatctgttttattttttaatgttttttgggcggtcgctctttttgttcttattttttttgcgcttgggttgctgatttatttatgtttttttttgttgttgcttatttgttatttgtgtggtcggcgtttttctttctt

SEQ ID NO: 19490 - DNA, 295 bp, Zea mays
  Clone ID: MRT4577_117780C.1
tatttattaccaccaaacaccactcatcttagggggataggcaccaaatcaaagcggcaacatcaacaatctaaccccaaaaaccatgaagctggtgcccgaggcacctgccttcactgcttcagaatcaagcgaccacttgcacacagacaggcggctgcagctgaggacaacaacaaagccatgagcagcaacataatccacaacaacatcatcccacaaaacaacaacacgaaccaccaccacagcaacaccagcaggcagcaacaccctacaacaacaagggcacacgcaa

SEQ ID NO: 19491 - DNA, 640 bp, Zea mays
  unsure (1)..(640): unsure at all n locations
  Clone ID: MRT4577_117781C.1
aattcggcacgaggcaacctccgaataccatgtctgttgcctttcagacggtgtagggtagaaagatttcgaactggtcagagctcatgtacacttctgcatcatctaggcttgtagctagtaccttgcaaactctgctttcttcaggcttcaccggtcaagcttatgttaaaaaaaagatttaaaacaagatatacacgaacgtactatattctataataatgcgacagaaatgatatgcgaagtttctaagcgaggaaggaaaaaggtgttctatctcacagcataacncacctgcagggacgtttccttcaacctcggtctcaacggccgaatgcctgctacaatcgggaacctcgcgcagctcaccacgctgtatggcgcctactacactactctccatttttttttccgaccctgcttttccttgtccgacgtacaaaaccaccagagcttaaaactgaactatatacttgtncaggatcctggcaggctgtagcttcaccggaggcatcccacagcaactcggcaacctgcagcagctctcgttcctgtaatcaactaactactaccctgcttattttgttctgatgganaatccatagaagaagaagaagaagaaacatctgtcctgtcactc

SEQ ID NO: 19492 - DNA, 384 bp, Zea mays
  Clone ID: MRT4577_117782C.1
cccaaataatcgtgagctttacatacatcgcattggtcgttctgctcgtttagagctcaagggagtggctatcaatgtggtgcgcaaggatgacatacgtatactgagtgaaatagcgcagtggtgctggggacaatttgaccagaagccagtgtatggtagttttctaagcacaacacgttagataattcgaggggatctccttcactcgctgatgggcaagaggcgcaaattcttgtatttgacgcaaccacgctcttttttagactgatggttaatgcatcctctccccggtagtccattaaggtttttttgggtaaaggggctcataagggtggtctatttttattttagccaggggatttacactagggcaaccaatga

SEQ ID NO: 19493 - DNA, 258 bp, Zea mays
  unsure (1)..(258): unsure at all n locations
  Clone ID: MRT4577_117783C.1
cacgcctacataatctcctaattcttctccacttgcttttttaaccaacacaaaactcacccngactgtttcttacaacagttttatcaacaacaacancaacaattccttccaaatttctccaaccaagaacaatcacacttcttcttacaacttcaacaactcattccattcaaacaacccactaaaaccaactcttatcaataactacaacacttacaacaattacttaattcactatcattccttaacccatta

SEQ ID NO: 19494 - DNA, 2537 bp, Zea mays
  Clone ID: MRT4577_117784C.1
ccggccgggtaatggtggtgctctaaagaattgtggtgaggcttctccgggtttcctctctttctctatctcttcctgcatcgccactcgccagtgcggcggtgacctctagaatccaaagcaagctgtagtgagcagccccttacatactctctgcggactgcggtccgcaccgcacgccatctcagcaagacgagagctccaccgcgctgttcacttcttctgacgaaggatggcgggaaaagaggatgagaatgagaagccatcgttggtggcagccggcggcaagcaagatcggacagcggcgaccacggaatcccttccgcaaaggacgaatcttgagtggggaaaggcagcgtgtagcgaggatgacatccagaagtgtgtagctgccggtgccttccatcccggcgagctggtcgaatggcgagctcccgtcaaggatgagactccgacgctatccaccatggaggatcagtttgttatcctgtctctgacgcacataatttgcggtctgagggtggatgcgagcgatttcctggtcagtgtgctcgagtactacagacttgagtggtctcacctgacgcccaactctattacggcgctgagcatcttcgcccacctttgtgaggcctacgtggaggcgcctccaactgtggaggtcttcacgcacttctacagcctctatcacaataggaaaggcgaaacgacaacactgggcgccgtctacttccggctcagggacaggatgaagaagaattatccattgtactacttgaggtcctcgcagttcatgtgggtttctctgtggttctatgccaaggtaccaaagagctgtcgcttgaccttcaggggtgatatactaaaggaggaaaacaattggaattggaaagatcttttgcctctttcctgtgagcagatgaagcaggtcggccaaatcatgaagctaagtaaccaaggcttgactggtgcagacatcattcatgattacctcaagcgccggattagccctttgcgccgaaggatgcatttgacatgcaattattctggcctctcagatcctaccagggattcagacaaagatctttctgtggaagacattgagagcaagctgagctaccttctagatcttaagaggatgggtgtgaagcagcctacaggtagactggtcagagcatcaaccaatgaccaagccaatcagcctctagacttgctgaatgtttgctcaactcacgaagctaagaaggaagcacaacctcaagtttgtgcctccctacgaagatacacaaggcaatctgctggtcccaggaaggttgcagtacctccacctcttaaaattgaccctccccccactcaaggtccggccccagaagagattctagatgccacaacaaacatagcgactgcagtttctccaaacctgggcgtagaacaaaaatctatagagcaccctactgtggctgaagagcggaaaatagcagagttagtgaaacctacgttttcagtcattggtgccaaaaggaaggcatctgccccccggtctcgttcaaagagaagagcaaagtattcattactttccgttgttacaaagaccaggatgtcatctttggacactggttctataaaagggacttctagaacaaaagaggcagtgttagcgctgaattcacggtcaataggattggctcgatgccctcctgcctctttagcagaagggacagggaacggtggactgttcatgcttgccaaagttgttgaccatactaaggttgttgaggattccatgtcgaatatactccttaatcaacaagttggagattcttctcgcaaggaggttgatcctgcacaatctatcactgagattgtccaagaccaggaggccattgaggtttcagctgccattccggtgcctaataaggaggaaataaacagtggggtgatatgggagcggatgcagaaagttcagagtgaatacgtgtcactcagtatgacagcctcctctgagcttttagaacaagcaaagaagctggtcatggagaataaacgcctgaaggacgtgcagataatgctgtcgcaacaagtggaagacctcgaagacggcagaaggctcttaacagaaaggatgaagaaagccgagcaggagacattcaaaataatagaagaaaatatgaagctcaaaggtgagaacaaagggcagaagcagatgatcgaggagctgagtaagcagaatgagtcaaccctaggggccttggtccataaatgcactctgttggaccgctacaaagaggagtctgctcagctcattagagagaaggaagagctgcaatctcgtgtttcgcgtgtcaatgatcttgtcaagctagtctctagtactttgtgccaagagaaagacagcgcttcctgaattttctgtagcatttgtgtgtttgacaagtgcaaatgagatccacagaaggaatgtgattggaagcgaatgcagattactgatgtatagaaacatccttatcaaaaaaaaatgtaaaataaaatctcaactg

SEQ ID NO: 19495 - DNA, 308 bp, Zea mays
  Clone ID: MRT4577_117785C.1
gggcaaaacctttgaatttaattccaaccaaaggtgggaccccacggaaattttttaatcccgggaacagggttaaatcatacatttaaaaagggtgtttaacaattttgggggacggggggcaggccctttaattgggggccttaaaatgcaaaaaaaaaaacaaatttgcctcaaaaccaaagggttgggggttcaaaacattttttattgggcaagaccacccggtcacggttttagcccctaccaaaaacctttccacgtttggtttccgggtttccctaaaagacccaaaccccctttttttt

SEQ ID NO: 19496 - DNA, 615 bp, Zea mays
  unsure (1)..(615): unsure at all n locations
  Clone ID: MRT4577_117786C.1
tctaggnaggccattgaggtttcagctgccattccggtgcctaataaggaggaaataaacagtgaggtgatatgggagcggatgcagaaagttcagagtgaatacgtgtcactcagtatgacagcctcctctgagcttttagaacaagcaaagaagctggtcatggagaataaacgcctgaaggacgtgcagataatgctgtcgcaacaagtggaagacctcgaagacggcagaaggctcttaacagaaaggatgaagaaagccgagcaggagacattcaaaataatagaagaaaatatgaagctcaaagatgagaacaaaggtagttatatcgtctcttgtcattgaagttgtacacttgatatgtgcattttcaattttcatccgcagggcagaagcagatgatcgaggagctgagtaagcagaatgagtcaaccctaggggccttggtccataaatgcactctgttggaccgctacaaagaggagtctgctcagctcattagagagaaggaagagctgcaatctcgtgtttcgcgtgtcaatgatcttgtcaagctagtctctagtactttgtgccaagagaaagacagcgcttnctgaattttctgtagca

SEQ ID NO: 19497 - DNA, 356 bp, Zea mays
  Clone ID: MRT4577_117787C.1
ggggcaaacatttgaaacacatttaggataagaaccctgggtttggtccaggggggtcaggaaaaatttccaaattttttttttttttggggtaggtgatccaataaggaaaggtacacagattcaaaatatggttgtttgaatgcaggatgcaagataaatttttcataggattaacacccttggggaacttaaacttttggtttaaaagggggaactttgaagacaggaccttaatttggcccttggggaaactgtattcctttgaaataaaaaaagatctgggaattgggaaatggggggtttttaaggattttgtttttcccttggttattaagcaaaaattcaagttgttt

SEQ ID NO: 19498 - DNA, 441 bp, Zea mays
  Clone ID: MRT4577_117788C.1
tggaacctttgggctgatttatgtgcttgtagaaggaatgggaaacggagtgagtaaaccacaggtccgtcgcctagagagtcataagagaagtatacgaaagggtacctgttgaggcctgagtcaaggtcgaaagaacagtaccagaaaggactattctagtatgctaaagagtacttgtagaagtttatgagaaagaagagaaggtaattgtctaagtagtctcggagtaggtcctaagggaagtcagaacgaaagtagaatgcgtagttgccgagagagtaatcgtcgaagtctgggagagggtaaccgaaaaggtaaaagtcgtcgtagacgtaaaggagtgaaccgggaagcctaggcttctccctaaggacagccccaaagtattcaactaggataactaatacgaggtactactctagaagatggtccacaaca

SEQ ID NO: 19499 - DNA, 325 bp, Zea mays
  Clone ID: MRT4577_117789C.1
ctgctaccccgggttcgccaagggctttgtcgcttttttttggaagttgacaacgactgaacaaacgacaaaaacacacgactggtgctgacgactatttgagaaacaatacaaacggttcttatgtgtcaaacaccagccgaatgtgcaaaccatgaaaggcactgtggcccatagtgcttttagtgacacatgcaaacactgaaggaacaactttaaacagagaaactctgcacacaccacatcgatatgcaagctaacgattggtggaagataaaccacaaggtagcgcattttcaagccaaaaatggtaacacagggtatg

SEQ ID NO: 19500 - DNA, 374 bp, Zea mays
  Clone ID: MRT4577_11778C.1
aggagattcttagcaagatgaaccgtggaataactgtgaaactaaaccgtggaagatgaattctcaatcaggtctaaataggcaaccgacagcctagcctggacactgcttggttctagcgggctatagtagggcaggctaaaatatctaaactgaacctgactacaaccattacacgccttctactgctacagctatctggatgaaggaatacgataataggagataatagaacagggtatggaattatgttgtatcattcatatccttttatggtatacgccttcgctctttaaaaaaacttcaaaaggaaaggcacgtataaaaaaaaaaaaaaatacgttgtgtcccgaaatctcagtggtgctttcttt

SEQ ID NO: 19501 - DNA, 835 bp, Zea mays
  Clone ID: MRT4577_117790C.1
cttgttaacagtgccagaatgcattcctttcattagcattatggacaaatagcactactatactagaaacaaatatctactactcccaaaaaataatttcaccattgtcactgactaaaccaagatctttgagtcttctttcctggtagtactcaaggccatctaattcctcctccctctgtttaaaaataccatcaatgtgctggagtactttcttttcaccggcccttactccaattgcaattgcaagtcttggctgcaaattctctcttcccgatagttcttcatcatcaaagtatgcggtttcccccagtccgtttgcctctgcaatgtcaagcttgtctccataaaatggatcagattcagagatttccagggtcacagtaaacgaatcccttgatggatttgattccacaaacccatagtctagtgccagttcagcattactcttgtccagatcgtactggatatatatctgctgtccagatttaacattcactggtgttcgcaaggagaacatgagttccctaccaaaaagaccctttcctttgatctcccaacttgacccttctgaggtgatattaggactgtgattaaccaaatcagcaaatggtatgagagcaagcttatctccgcggagctctggaaacacccttgatctgagcattccaaatgcccataggaaatcatcaaatgttatgctacctgggaacaggtccttatttgtgcttatgatctctgcttgaacactatcaaattcgctttgcacatactctttcacgcccactgtggtgcttagcaactgtgttccttgtatctctaggagctcttcttc

SEQ ID NO: 19502 - DNA, 487 bp, Zea mays
  Clone ID: MRT4577_117791C.1
gcaggaacacagttgctaagcaccacagtgggcgtgaaagagtatgtgcatagcgaatttgatagtgttcaagcagagatcataagcacaaataaggacctgttcccaggtagcataacatttgatgatttcctatgggcatttggaatgctcagatcaagggtgtttccagagctccgcggagataagcttgctctcataccatttgctgatttggtaatatgcaatacatattggcgttttccagattctaatcccacttgctacgattcttcttattgttgttaaatggtcctagttgtaatttccatgcttaaggtaccatgtcaaaaggattcaaataaggcattatttgaatgttggaaatgcattctttaaaattattttgcttgcttcgcaaatcaggttaatcacagtcctaatatcacctcagaagggtcaagttgggagatcaaaggaaagggtctttttggtagggaactcatgt

SEQ ID NO: 19503 - DNA, 494 bp, Zea mays
  Clone ID: MRT4577_117792C.1
ctggctgaagaacacaatttttctgaacagttatgatacatcccacagccatgatggccaccgcctagggggtggaccgactaggaaataacagaaccaccaccaaccaacaaaccggaacaaaaaagggcacagcaccgacagaaacaagggcccaaaaaacaacacgaaaaaaaagggacaaaaaaagaaggaagggaaaaaaaaggaaccgactaaacacaaacaagccacacaatgaagatcggccaagggctggccccaaagatgggaaccttgagaaacattatgactgaaaaaagaattattcaggaaaactagctgcactcaaatccacactaagaaccacagcctttccagggaccaatgtataaatggtcaggacatctgttacaggtgggtcaaaatgtgtgggggcaaaaaaactcggggggacaaaacaattatcaaggagagggtcattcacgggggcataactggcataaatatcatat

SEQ ID NO: 19504 - DNA, 2132 bp, Zea mays
  Clone ID: MRT4577_117793C.1
atcacgcgtccgcggacgcgtgggggttgtttgacgctatgaaggaagcggggatgcagcctaatcagtatacatacaatgtgctgatgagcggtcactgtcagagagatgatgtcaacagtgcagttgtgttgtaccaggaattgctgaagagtggcctgaatccaaatgctgttatctttacaaccctgattgacggtttctgtaaagcgaagaggttcagtgaagcaaaaggtatgtttcttgagatgcccaggtttggggttgctcctaccgttcctgtgtacaacagtttgatggatggagcttttcggtctggaaatgcacaagaagcattggcactttatcaggagatgactgacatattgattcctcattgccaggactcaatggcagttcaagggggccccaaactgaattcctaaagagtgcttccaagagaaatgcatctgctccaccaatgcaaagtaatcgcaggtaagggagcagctgcttacaatgcactgattgatgagtactgccgaattaggaatttggaggaagcgctagcaacatgcactagaatgactgaggtcggaattgagcccaatgtggtgtcatactcctccttgatagatgggcattcaaaacgagggaagatgcaaatagcaatggctatatacactgagatggtggctaaagggattgagcctaatgtggtaacatacactgctcttattcatggccatgccaagaatggtggcatagatgctgcttttcgtttacacaaggaaatgatagagaatggtatttcacctaacgctatcacagtgtcagttcttgtcgatggtctgtgcagagagaatagggttcaggaagcggtcaggtttgtgatggagtactcagggttgaagtgcagtgacattcattctgtcttctcaaactttacaattgaggaagaatgtttaattccaaacagtgtgatatatatgaccttgatatatggcctgtacttagatggtcaacactgcgaagctggcaagcttttctcctacatgagaaaatcaggtatgatccctgatagctttacctatacactactgatacgagggcagtgcatgcttggctatgtcttgaatgccatgatgctctatgctgatatgatgaagattggtgttaaaccaacaaggtacaagatagaatgccctgagatctggtcatgggcaccactgaatgacctccaaactgttgtaagttaagaaatggattttgactacatacttcagatttctagagcaaaagccagttcacaggttgtggaacgttttagtcaaactcagtcatcaatatggtagaccaatctgttacatctgtgcgaccattgtaagatcgttatttggaaagccctctgcttattgaccttgttctcaaggcaaatgaaaatttgaagccattggatttgatttttaattgccgccattttgtggtacgggctctgaacaaaacgagtactgtaatatgatcagcaacaacgctgattaacaggaactggagcagatagatggctgtgatgagggttgaatgtaaaccattgcaaatgacatgtgcacaagcccatctgcaaacgcacctggaagaatgtacatgtggaagcaagtatgcaacatatgctgcacttgcagagatttactgtggcctttctggttctgatgtggattgagagggattgccagagaattgaactaaaaatatccctagccaacccatgcgcaataaaaaaggccttatagatattttacaggactcaatggcagttcaaggtggccccaaactgaattcctaaagagtgcttccaagagaaatgcatttgttccaccaatgcaaagtaatcgcaggtaagggagcatttgagggggaaggggttcgttgaggattacatcaaagtatgcggtttcccccagtccgtttgcctctgcaatgtcaagcttgtctccataaaatggatcagattcagagatttccagggtcccagtaaacgaatcccttgatggatttgattccacaaacccatagtcaagtgccagttcagcattactcttgtccagatcgtactggatatatatctgtaaatgcaaatctcagtgctcagttac

SEQ ID NO: 19505 - DNA, 199 bp, Zea mays
  Clone ID: MRT4577_117794C.1
tcggttgggttctactatcacgacgacaatacatggtggaagctctgcgaagaatcggagagtggggtagtgtacgctcggcagatcggtggggagtctgagggctactctcggacacggcttgatcgagagtgaagagtcaccggccggacatacaagcatgctgctatcccgctcgcatctacctttcatcttacaa

SEQ ID NO: 19506 - DNA, 199 bp, Zea mays
  Clone ID: MRT4577_117795C.1
tgctcatgttggcttcctcactgtacgtgcgggggacccctcccacgggctgacctttcctcgccgccggaaaccaaagcaggtgctaccgattgggcgtactcatggaaatgccggagcctgatcgtatactttcggcataaatctctaatgtgaagctcccatggggcggggcatcaaagagcgagacatgccctgt

SEQ ID NO: 19507 - DNA, 350 bp, Zea mays
  Clone ID: MRT4577_117796C.1
aacctcccaacaacccggcataacgaccaggagggggttgtacctcttacacggtacaaactgtggaaaaacaacaccactcctctgcagctacagacctcggatctaaaaggcacagctcgctcctacttactcactcaagcgccggtcgcaaaggccttctacctaacctacttgaatccaatagttaccactgggatcctgacgaggtggccgaggacgcctttcatggcgatcactccgaaactgccggcgccgggcacggaccatccctgcagggtcacagatagctttctagatgctgcggggaggaccgccaccgcctgaggcgacagcccagggcaacctcc

SEQ ID NO: 19508 - DNA, 354 bp, Zea mays
  Clone ID: MRT4577_117797C.1
gcgcagctacacttcatgctaaccacgatcaagcgccaggaatgaagacgctgttttatcggtaatatcgatctggccagggacgagaatgaacacatggccaagctcgatgaacaggcctaaaggtattaagaactggttgaaactatggtgaaggtggctaaaactgtatacgttggtagacctatctgatgaacagcgcaagctgttgacagacgtataccagaatgcgatcggagctctcacaacttgatacgccattgcgtcttacattgtacaaaatgaagagctgcttgccaacgaatagcctgtgaaccttatgaacgagttctgaacgatgatcgatgctgaact

SEQ ID NO: 19509 - DNA, 603 bp, Zea mays
  Clone ID: MRT4577_117798C.1
cattgggaccctcgaggccggccgggatctctggctctctatcgccttatgattttagccgtagccgctgatactctcacatcccccgagaatacgcctgctcactcgtacgatctatacgatggccgttttctcctatctccacaccgacgacggactcaagtaccgcgaggctcacctcgcacggcaaaagctatgtgtctggacgactccattattaaggtaggacattaaggtgtctccccgagaaggctatcaagcctgtcgttgagattactaatgccgaccactgtgacgagacagactctgcggatgtatgctcaagagacgctgataaggtagccgaagtgaatgctgactgcgatatctgctcctgcatgtagatgctccggcgaatgaggctgaggacgatgatcgagctagatctatgagccgaggaaactgacgaggattaaaacgccgctgaggagcgcgacggcgttgccaaggcctcttctaaaaagaaagaaggaggtacagcatctgcacttatggatgctccaccatgctacgatgagacagaaatgaagaagctgaaggatgctgaacgtaacgtgcatatgg

SEQ ID NO: 19510 - DNA, 353 bp, Zea mays
  Clone ID: MRT4577_117799C.1
ttactacaaaccgtggggaatcatcctatttttttgttgccacaacacagaatgcattgcacttcccagctcattatgagccaatggtcacataaaccaagtgcataatattcctcctaaatatcaattggcaaagactaaatatacgcactaccagcccaagtgcacaagcgcaacaagcactttggaacatggaaacaaactatacacgaactcgattcatcttaaaagcctactttatcggcgaagaaggccttctatcactagaagcatgctactcttcttgcgtgcatgatacagatgctaaatattgagcatcctacgcgctctttctttttcttaccttctcgctg

SEQ ID NO: 19511 - DNA, 565 bp, Zea mays
  Clone ID: MRT4577_11779C.1
ctggccgggccctgcgtgctgcgcgtcggccgtcgtccctgcaggagcctcttcctggcgcctagttttcttccatggcgagctcgcccaagaaatcacccccatcgcagctcgccgtgtctgcgcagccccgacagtgacgatgtccatcccgttcggtgctctaggtgttcgacgaaatgggagaaccatgaaattgtcgtcgtttctcatccgcgaccccgccagtcttgtatgcagtccacatattgtgttcctcatcggtgaggcttgatgttcatgacttggtacctacatctttatattaaccatatatgagtttctgtgtttgatgtggactgaaatccttagcgttttggggagaggaaccccaggatttgggtgatgaagaaaaggtttgtgcgcatcacttgcaagaggttcgatagaaaacttcaatcaaaaggctatcgtcgttcgtgcgaatattgagttgaggtgaattgtgatgtggcgagccttttcgctactctatttagttaatttgattgttgtattgatcaaaaaaaaaaaaaaaaaagcggcc

SEQ ID NO: 19512 - DNA, 219 bp, Zea mays
  Clone ID: MRT4577_1177C.1
gtcagcattatgtgtgctcgtggctatgggcgatctgtgtctttacctccaactctgaaactggactatggcatgaaaggaggccatgaagagaacggagagggatcatcaccaactgaaaaccgtcatgtcaagtgcgctcctgatgtgtaccatccccctgtgacatccgtaaatcattcattgaccaaaagctatcaacgccaggcaaaacaccgc

SEQ ID NO: 19513 - DNA, 478 bp, Zea mays
  unsure (1)..(478): unsure at all n locations
  Clone ID: MRT4577_117800C.1
ggccgctcgaggcggcgggcgggtacattcctagacagagatggctccggcgatcgccgcaaagcctctcctaagcgatctggtggcgcaatccaggcaagtcccgtcgagccacatcagagcggtcggagaccgcccggacctcgccaatgtcgaccacgagtccggcgccggcattccgctcatcgacctgaagcacctcgacgggccggggcgtcgcggggtcgtcgaggccatcggcgcggcgtgcgagaacgacgggtttttcatggtgacgaatcacggcatcccggaggcggtcgtggaggggatgctgcgcgtggcgagggagntcttccacctaccggagtcggagcggctcaagtgctactccgacgaccccaagaaggcgatccggctgtccacgagcttcaacgtgcgcacggagaaggtgagcaactggagcgacttcctccgcctgcattgctacccgctcgag

SEQ ID NO: 19514 - DNA, 486 bp, Zea mays
  unsure (1)..(486): unsure at all n locations
  Clone ID: MRT4577_117801C.1
gggcgnttttttttttttttttttgggggtgagagatattgtttnttttaagtgaacttagtacaaaatttaaanatgagggttaaaaagagattnataatatatgaagctagaataaattagtttttagnaagtttttgtgggtgaagagatatagtatgggataagtattggaaatatttggtgaggaggaaggatattgaaattttgatttttaggtaaatttggtattaatgtggggttnnaaagaagatgtaggatggtggagagatagtttaggtgaaaagtagattattagttgngttgtgagggggtnggtgagagagtttaatttnatgttntttaggtgtatttnttttgttttgggatgatgatgtttagggttgtggtagttttatggtaataaggttttggtttttgtttttgtggggtatgagtaggttgaggtgttttgggttgattttttagtagggtattgttttgggg

SEQ ID NO: 19515 - DNA, 1538 bp, Zea mays
  Clone ID: MRT4577_117802C.1
tcgagcggcccccgggcaggtacgcgggagtataatgacgagtggttgtatatggtgctatcgtctagtgatgcccccatcgtctagtggttcaggacatctctctttcaaggaggcagcggggattcgacttcccctgggggtagggagtattataaaaagaggttaatcatagattatcaaaaagcctagaaaaaattcttcctgggtcgatgcccgagcggttaatggggacggactgtaaattcgttgacgatatgtctacgctggttcaaatccagctcggcccaaaaatttagggcttcgtgaatatgaactaaatctattttttttatggaagaaaaaagatgtattatctatagaaataaaggataaagagaaacggggaaattgatttctaatccgtatctctctgattctttgtcttacaaagaaaagacaaagaaaagagcttttcttatggaaaagcggattatcgtttatttttagggataaaaaatcgcaacatactagttatgccactctcactatacccgcactaagatatgcgggtatgtagtatatggacaattgggcctcggaccggccggggcccccatcgtctagtggttcaggacatctctctttcattgaggcagcgggtattcgacttcccctgggggtaccaattcatgtgagcatatgcatgcacacataaacctgtgttgtttcagcctttcaggatacagcatggtgagcaggaccagttgggcacgtgctccatcgactgcgggtgcatcagaggaggcgccgcagtttttactcacgaaacttcccaggcttgctctcctcagtcctcactcctctcctacaactccaccgtatctgatatgaggcaagcaagaaccgggttctctggagtcaggacaagccgtcaggatggcgagcctgacagagctggtcaagaaggacgagctgctgcggactgcagttggatttggactgcatctgtgccagcaaatgttcggcgcttccatttgcttcaacgaactccaacctgtaacaaagaaggcgctggcatatctttagcatacgtgtagggtattgcatggctttgataccatagttcttaagccaattcacttgaaggggtattttcctcgttccaaactacaagccattttagctttaaatatcggtagtttttagtagctgttttccacttgttctcaattgatgtgaatcaagagcaagacaatacatttgttatatgttaaagaccttcgtcgaatcattattcccttttgggtataatgaatcttagacgaatgtcataaaaaacaagtctttattggttgccaacaaaaaaaaaaaaaaaaaaaaaaaaaaaaaaaaaaaaaaaaaaaaaaaaaaacgacaaacggatcgaatcgcgaccacgctaacactaccggagagagtttaaaagaaacagacatgatcgagtaacctaagctaaatgaaaagtagactgataagatataacaagtgaagccatgagtcaaaaaacaccagaaaag

SEQ ID NO: 19516 - DNA, 326 bp, Zea mays
  Clone ID: MRT4577_117803C.1
gcggctggtatgttggagagaaaaccacttgttgacgtagctcgtgttgatgagctacctgggattattaagcatttggtgagacaagagactgaatatagctactggcacatacacagcaggggcagcgtacactgtgaagtgcagactatgattaagcgaggtgccatgataacggtgcttaatgggcataaaggtcacaaccttcagtgggtacacgctggtgctgctcaggctgatcctggtccgtaccgtgatcgcgctcacaggtgtcacacctgtgctggtgatcttcagcccagtgcttgtgcctgacatcatttagc

SEQ ID NO: 19517 - DNA, 469 bp, Zea mays
  Clone ID: MRT4577_117804C.1
ctaaagtggaggaaggacgccggctggaccgccccggcagaattggcgggacccaccacgcctttctatcttacggttgtctgcccgggaaaggagccagaattcgttggggatgtttcctgtgggaacactggtgctatgggtgggctggatcagatcattaccaagaatgctacacttactaatgagaaggggactggcccttggccaattagagcaatgaaattcttccgcttttctggtgggcctggtgcttgtcaacgccagggtgccttttacccttccaagcttggcgaaaggttgaaacggtttaccaaagtccatcctattggtttcttggcaaaggaagaaatttgtgagcatattaatggttgagcttgggagccttaatttgagaattggctggaggaacttcaagagggcctcattggtggggcttaaaatattggtttcccacccggcggtttct

SEQ ID NO: 19518 - DNA, 208 bp, Zea mays
  unsure (1)..(208): unsure at all n locations
  Clone ID: MRT4577_117805C.1
gcacgcgtacgcaactcaaaattcgaattcagatcgagctaaccaaacaagagcaggaataacaacaacggggcgccgcaagtctttctgttttggtacaaccaaagccataatctncgtaccggccaccttctaatgtgcctattcaccaacacacacataccctagatcagacctcaagaattcacttcactggttcacaagagac

SEQ ID NO: 19519 - DNA, 141 bp, Zea mays
  Clone ID: MRT4577_117806C.1
cacacctgtgtaggaggccaagacttggcagaggatgtagtctaggtgtcctggtatatataaatggtcactcacttcgtttatatattccacactcagaaaagaagtcagagttttttctgagtagtacaaaaaccatca

SEQ ID NO: 19520 - DNA, 262 bp, Zea mays
  Clone ID: MRT4577_117807C.1
tttctttttttttttgtatttgcttgcgggggagaaatatcttgagctacacctactaagcattgcacggcatccccaaaccgggcacctgaggctgtaacacagggagcccacaccaggagacgccgccagggcttgagctcaacacaacagtccaacgttgttagactgatgcgcctacgtggtcgagcacagcccacggacaatccccgtctaacgacgagttgaaggtaatcaggaacatggacatactcgctaaaag

SEQ ID NO: 19521 - DNA, 266 bp, Zea mays
  Clone ID: MRT4577_117808C.1
gccatgtgtttatacgcatccgtcaaggagcaagaggtacgtgttcaagcctccactttctctagctgaccgactgtaggaggaccatcgacaaagtcaggctggggttgatggctcacgctagccggctgccaacatatgggatcgaggggaaattggcagagtacgaggtgtagccggacgctgccaggtattagataatgcggtggcgggggctcacgacgacattctccactgtgatgcctacaagatgtgaacgggggact

SEQ ID NO: 19522 - DNA, 335 bp, Zea mays
  Clone ID: MRT4577_117809C.1
gtgggcccccaaggtttaaaacgggaaaaccctcccccccacttaaaaacccacagggtcaaaaaccggttgttggaaatttaaaaacagaccgggccaatttccccataaaaatttaattcccccgcggtggggaaaaatatagggccacaaaaaaaagggaaattccccccaattccaaaaaaaccctggtggtaggtgttacaccaaataaaaaaaacgggggagccccaataaaactttaatttcccctggcaaaaaaaaaaaagggccctcctaaaaaagaggaatttttttggtttggggaggcccaggcccccaatgaaatttaaggg

SEQ ID NO: 19523 - DNA, 313 bp, Zea mays
  Clone ID: MRT4577_11780C.1
ttcgactccctcgttcgctcacgagaccgtacaggcgattcaccgtgacgcgctcttctgcccgtgcccacctacacgactccacctccgcagcgcccgcggaaacctcctcacgccacgccacatcggcgtgtcgagccaccaactcgtttgcacggtcttactaataaaagtcgccctccgaggttaagatccagttgtacaccagatgtttacgacggaggagggggaaggggaatgaaaagggagggggggagcacagggggatgctagaggcgaagccgtcgtctccgggctccggcgcggacggggc

SEQ ID NO: 19524 - DNA, 255 bp, Zea mays
  Clone ID: MRT4577_117810C.1
gagagaattggtgtgcgcggggtaggatctgggtcgtgcagagaaggcacggttcgagcaaaggctcatcaggttctgcccagcgtcaccaggtcgtaccgtggacatctctgtcctcatctttgtcggtagataggtactttaactcgagttcgttcttacttccgctttaatttcaacccggttgcttttggattaatttgctagggggcggcgacacggccgtcgccggcatgcccgccatcgcggttgcac

SEQ ID NO: 19525 - DNA, 136 bp, Zea mays
  Clone ID: MRT4577_117811C.1
ggcacgaggaagagaccctcgccggacgctcgctcttgccggggacaacttaatcccgagggcaggatgggccgcttccaacgcgccaacacccgggttttaacccaacggccactttttcaaggtcaggaccccc

SEQ ID NO: 19526 - DNA, 1870 bp, Zea mays
  Clone ID: MRT4577_117812C.1
accggaaccagccttcccgggcgccagtccgcccctgcaaaaatccagtgatccagtcaatcggcgcgcttggccgcttccatgggttccatgaggcggagttccgtgcggcttctcatagggttcctgctaattcggctcaattggtgctcggcggtgggcgacaagggcgcggggaaagtaggcgtggctttcccggtggtggtgagcacctggccgttccgtgaggcggtcagagcggcgtggaaggtggtttcgaccggtgaaggatggggttcggccgtcgatgctgtcgtcgctggctgctccgcctgcgaggacctccgctgcgatggtacagttggtccaggtggaagtccagatgagaatggggaaaccactttagatgctcttgtcatgaatggggcaacaatggaaattggagctgtggcggccatgagatatgtgaaggatggaatcaaggcagcaaagttagtcatggagcacagcgagcatactctgctcgttggagagaaagcaacagcatttgcaatttcaatgggtcttccaggaccaactaacctcagttcaccagagtcaattgagaaatgggaaaagtggaaacagaaccactgccaaccaaacttctggaaaaatgttgatcctgtcggtaagtgtggtccataccatcctatcaatttagcctcagttgaagttgagggttctgtaaagaatgaggtagtggggagtcaaggtggtctctgccaggggtattttgaaagtgataatttactggagccaataaagtccaatttgaaggttgttaatcgccacaaccatgacacaatttctatggctgtgattgacaagatgggccacatagcagttgggacatcaaccaatggtgctacatttaaaattccaggaagggtgggcgatggaccaataccaggatcttcttcatatggtgatgatgaagttggggcttgtggagcaactggtgatggtgatattatgatgcgcttccttccatggtaatgaaaacataatttctgttgaaaatgacatttgaaaaaggatggctgagtgtgatgtctagcttgtcaattggaaccggattagttgctccaatctatgatttaatttgaaagaaagatgacagagttgtgctctgattattatgaacttctttttccctcatgtttattttttcaagtgtagcatcctagtacatgatggtatgcaatttcaatcatctttgggcaatcaattttaaacagtccctgatccaactgcaaacactaatgctggtaacagcatatgctagttgtttactctatcgtaactctatcgactcttgtgcacttcgtgccaatcttattataaattctgttgtagctaccaagtggtagagagcatgcgacaagggatggatcctcgagatgctgccacagatgctatatcgagaattgcccgcaaatacccagatttcatcggtgccgtatttgcagtcaacaaggaaggggtgcatgccggggcatgccacggatggacattccaatactccgtacggaattccagcatgcaagatgtggaggtcattacagtatatccttagcaatcgcaattcaacgaaaacaaaagtttgctttatcagcatgtttaaaaatgtcacggctgcccccctgttgatgttttaaaaatgttctgtgcggattatttcaatgttttcttaaagtcgattgttttgaaactagtagtactgtatgtaccaatctgaccttagttgttttttccctggaaagtgttgaatgtcttggaaagtcgaaaccttggatcttctctgttggagttggagttgattgtacagaagttagacttggatatagtc

SEQ ID NO: 19527 - DNA, 1529 bp, Zea mays
  unsure (1)..(1529): unsure at all n locations
  Clone ID: MRT4577_117813C.1
aggtcaatcgcggacgcccgcttggccgcttccatgggttccatgaggcggagttccgtgcggcttctcatagggttcctgctaattcggctcaattggtgctcggcggtgggcgacaagggcgcggagaaagtaggcgtggctttcccggtggtggtgagcacctggccgttccgtgaggcggtcagagcggcgtggaaggtggtttcgaccggtgaaggatggggttcggccgtcgatgctgtcgtcgctggctgctccgcctgcgaggacctccgctgcgatggtacagttggtccaggtggaagtccagatgagaatggggaaaccactttagatgctcttgtcatgaatggggcaacaatggaaattggagctgtggcggccatgagatatgtgaaggatggaatcaaggcagcaaagttagtcatggagcacagcgagcatactctgctcgttggagagaaagcaacagcatttgcaatttcaatgggtcttccaggaccaactaacctcagttcaccagagtcaattgagaaatgggaaaagtggaaacagaaccactgccaaccaaacttctggaaaaatgttgatcctgtcggtaagtgtggtccataccatcctatcaatttagcctcagttgaagttgagggttctgtaaagaatgaggtagtggggagtcaaggtggtctctgccaggggtattttgaaagtgataatttactggagccaataaagtccaatttgaaggttgttaatcgccacaaccatgacacaatttctatggctgtgattgacaagatgggccacatagcagttgggacatcaaccaatggtgctacatttaaaattccaggaagggtgggcgatggaccaataccaggatcttcttcatatggtgatgatgaagttggggcttgtggagcaactggtgatggtgatattatgatgcgcttccttccatgctaccaagtggtagagagcatgcgacaagggatggatcctcgagatgctgccacagatgctatatcgagaattgcccgcaaatacccagatttcatcggtgccgtatttgcagtcaacaaggaaggggtgcatgccggggcatgccacggatggacattccaatactccgtacggaattccagcatgcaagatgtggaggtcattacagtatatccttagcaatcgcaattcaacgaaaacaaaagtttgctttatcagcaggtaaaatatttactcgtgcgtggtatggtcacgaccgcccccctgttgatgttttaaaaatgttctgtgcggattattccaatgttttcttaaaatcgattgttttgaaactagtagtactgtatgtaccaatctgaccttagttgtttttttccctggaaagtgttgaatgtcttggaaagacgaaaccttggatcttttcntgtgttggagttggagttgattgtacagaagttagacttggatatagtcaacttcgtcgaaccagctatcatgtttataataatatatcgtagcctgtc

SEQ ID NO: 19528 - DNA, 182 bp, Zea mays
  Clone ID: MRT4577_117814C.1
atatatctataggcgggggcttccttattcctcgataaaaaaattgttcaaagattcatcaacaaataaacggggaattggaacatatactaagcggccaaaaacgcataaacggctaggcaacattaacatgctcccccaaaagccgggtggacttacttggcacaagggttccaatttat

SEQ ID NO: 19529 - DNA, 188 bp, Zea mays
  unsure (1)..(188): unsure at all n locations
  Clone ID: MRT4577_117815C.1
tttcttaagcagtggtaacagactcaggtatgggggagcaacaattttnttttnaaaaacatcnacaaacacacnaagtctaaaaaacananataaatctatanttacacactaaaacanggcattatcgtaatttcaacttaatattatatgtatatataatcaaagttaaaaatgtgggggggggg

SEQ ID NO: 19530 - DNA, 276 bp, Zea mays
  Clone ID: MRT4577_117816C.1
tatatctcctaccccccccgcttcgggttcggtttcgagaggttctccggggttcgttttcgaaccggaaccactattgaattcatccgattattattaaaaaaagccccggatacataaatgtgaaaaccgttgaagggtgtatttacagcttttagcctttagctcgtccttgccccaacccaagtttaaataatactcttacaaaaaaaggcttgaaaagctctttatttattttcctcctccatttccatttaacccttttactaactcctt

SEQ ID NO: 19531 - DNA, 695 bp, Zea mays
  unsure (1)..(695): unsure at all n locations
  Clone ID: MRT4577_117817C.1
actcctttcatcagtgagtgcctcaagactcatgagtcactccactgttacctctgagcattaactgctgcagctaatgttcagagtcgatgcgaccccgatccttcacattctgaggttattggggctcttggcccacgtggcaaccgcctcagggtccatgcgcaaaaagctgggactccccggcgcgcgtgagagcctagaggatgtactntaggtgccgatactgacaaatggcacaagaacaccatgggggaaattgtgagaaatggggcaactgacctcttccaaaaccaccatgcttcttattgcgatgtacctcctgtcacattactcggacgagggcgttctcctctcaatgatgtacaagttctagggaaaatgattgacaggtacattaaacatgatcagatacttcagcctctacctacactaagaaaacggattcctcggttaccactaaatatactactgatcaatatggcattgactgacttcttacggaaaagatagatactagaggcaaaagcagatacgctagacatatcaaggaatttaacctgcacgattcacaagactgtggtagaaactccaacgattgatgtcaatgcagccatgtgagagatgcaaaaaccatggcaatgaacttgagtacacgcgaactctacctaagtgatctgaagcactcggacacc

SEQ ID NO: 19532 - DNA, 326 bp, Zea mays
  Clone ID: MRT4577_117818C.1
acgacccgtactgcgagcttcactggctcatacaacgacggatactacgaggtgttcggatagctgtgcacatccctatggacgactcttacgacactgctgataacgatgttcatactgatcttcattggaatggtcactgccatctacaacgcgttcaactactgatgtcaattattcggcacgctgttctttaagctctggttgacctttcatgtgatcgcgcatctttacgctctcctcaagggtctgaacaggacgccgaccatgacgcctgccattgccattgtctggtctatcatcctgtctctgatcttgttgctgat

SEQ ID NO: 19533 - DNA, 792 bp, Zea mays
  unsure (1)..(792): unsure at all n locations
  Clone ID: MRT4577_117819C.1
gttcttggtcccanttcaaattacttttatcgagttccgtttaaagcgagcttttggtacccaatgcggaaaagttgtatctgccattcgtgatacaataagggagctgttccatgagtattgtggtctttcaaataacttgggtggtgatacatcaactcgtgaagttgagttggatgaatttgacagtgactcattggaagattgggacgaacatcttaatgcacagacaaggaaccaacaattgagagaacttgacaactaccttgaagatggtattgtcccaaggaaggatgattttgatattttgaactggtggatgagtaattctacaaagtatccaaccctttcaattatggcacgtgatgtcctggcagtgccagcttctgctgttaattttgaggccgcattaagcggtaaggtaaatgtgatacataagcaatggagcacattaaatatcaaaacaattgaggctcttgtatgtacccgagattgggttaaatagaatggtaagctcttctaaccccgggaatacaggatgataccgcaagagtacaccgtgtgctgtatatcagacatctcgcaggcacagagccattggtaatggaatggaagctacgaaacgtgggcttccgggtgttgttcgttcacatgtattgtgcattgttgtctagtgttttcttatggtattagggcagattaattgtacagtgacaatggcgtccgtgctgctctttagcctgattgagagagttcttgtatgacggcaatagaaagcaatttgagtagtct

SEQ ID NO: 19534 - DNA, 719 bp, Zea mays
  unsure (1)..(719): unsure at all n locations
  Clone ID: MRT4577_11781C.1
ttgggtacctcgaggccggccgggcttcagaaaggagagtatcaaagaaacactcagatagcaaggactcagaaacttcagatgataaaagtgaccagagtggttcagagagggaaacttcttatggtcacaggtcccataaaaaagataaaagggcaggtaagaagaagcctagtgtggttgtcatccgaaatatcaatgtaacatcgaaaaggcacggatcatcagacagtgaatcacaaacaggttcagatgtagtatcagaggatagcgacgattcacacgccaagtccagaaagaaaaaaaaaaaaaagcggccttcaaagaaaaaagatgctaggaagatggttttcgagtctgcagatgaatatagcaagaatggaatgtcatatgggcaagatggagaccaagggagctggaatgttttccagagtttcctgctaagagctgatgagaaaagagataatgacgcggacctattcgccagtgagaaaaaagcacccccagcaaggatgaaggagagcacaagcgttgatgttgattcaattctcttggtggagcaaaattctgctggggccaatgaacataatacaacaggtttcagtttggaaaatgagaggattagaccccagcagatgctggctggtgatgaacttatgatgtatggggaaggtgaaagtatgagctttgggtgtgatgacntanaggagattgaagct

SEQ ID NO: 19535 - DNA, 351 bp, Zea mays
  Clone ID: MRT4577_117820C.1
tcttttctgtgagctaaaccatatgccgcgcggcgtgacgcgcatatgtgtaccggagaagacctgtaccaatgttgcacaaggctgcgggagctataccttcaaccagtcctcaggtgtcaattggttgcaagcaaacggcgatcaactgtataacctcaccacaaacactgttgctgtgggggttgggggcgaccgctatactcagcactcataacaggtagtgttatagagaggtgcgccaccggaaccaattgataggagcataaagggatggggcttctcttgatagcactcgacggttcagctactgaaagatctctgtgtgaatgccaatgttgcagatggcaa

SEQ ID NO: 19536 - DNA, 2604 bp, Zea mays
  unsure (1)..(2604): unsure at all n locations
  Clone ID: MRT4577_117821C.1
attcggctcgaggcgttaagtggtgaggcttatgtgatacataagcaatggagtacattaagtatcataacaattgaggctcttgtatgtacccgagattgggtaaatagaatgttcacaagcagttcataaccatagtgcttctaacccgggaatacaggatgatacagaaagagtacaccagccatttattgtgcagtatatcagacatctcgcagccaactgtgccaatgacgtgctgctgctttagcctgattgagaattcttgtacaacgtctctagaaagccatttgatgactgatgttctgttcatgttatcctggcgtgctggatgtgctgtgcccccttcaaaagctgcattttgggtcctgtgggggtttagacctcggctaaaccccacattttacatgtgctttaagcatagttatagaagagtattcaactcttttgtttcaaaattgaaagtttttggtcaatgcataatagtcacgtttgtaccatcgggtttccggatgagcaagtgctagggttccacattgggctgatgcatgacataagtaactctgtatggcagtggatttttgacctgcagcctgtcaacttcaaatgaaaaccatcaaatttggtctgttctagtcctcatctactgatttggtaaggatgatacagcttaaggaggcctgtgtgctagattctgatattggaccatttaatgtcatacaggaacctataagagattggaatcttgatcagaagatttcagctcgaccccctcgagccgaatcggctcgagcgaggggacctcaaaactgatggacttgctcatccaaaggaaatgccttcctattagaggcaagctatacaatatcgcttgtgtgaatgatgtgcttaacggcattgtctcaaaaggtcaaccggtgctttatcatgttggtaacatactagagaaatttattcaggcacaaatgtcctcatctctgactcgacagcaacttctagaagttgttgcacatatgggattgaagtgcccacaggaagatgctaaatggtggcacataatttactttaggcttgaagttcttctgcatttcaagaaggcatttccctcggaagacttgttatctgcagaagataacaaaacttttgagtctgtttgcaggatactcagggctttttatcgcgctgttgaagtgatttgtggtcctgtttgccccacagcaaatatgtacttcaatgaactgtggaaagttagaactgttttgcaagaagaagcatcaactgatcgtgctgcacttgctaacatggttttggagatgctggaagcattcaatgagtattggaaaaattcatatgtgtggctgtcaatacctgttgttcttgatcccagattcaaaattacttttattgagttccgtttaaagcgagcttttggtaccaatgcagaaaaacatgtatctgccattcgtgatacaataagggagctgtttcatgaatattgtggactttcagataacttgggtgccgatacatcaactcgtgaagctcatgatgttgagttgtatggatttgacagtgattcattggaagattgggatgagcatcttaatgcacagacaaggaaccaacaattgacagaacttgacaactatctagaagatggtcttgtcccaaggaaggatgattttgatatcctgaactggtggatgagtaattgtacaaagtatccaaccctttcagttatggcacgcgatgtcctggcgattccggcttctgccgataattttgaggctgcgttaagtggtgaggcaaatgtgatacataagcaatggagtacattaagtatcaaaacaattgaggctcttgtatgtacccgagattggggtaaatagaatgaagttcacaagcagttcataaccatagtgcttctaacccgggaatacaggatgatacagaaagagtacaccagccatttattgtgcagtatatcagacatctcgcagccaactggtaatacaaaccctaccaaacgtgggcttctgagtgttttcatgtattgtgcacattgatgtccagtgattttattatgttattactatttgtacagtgccaatgacgtgctgctgctttagcctgattgagaattcttgtacaacgtctctagaaagccatttgatgactgatgttctgttcaaaatatccgggcgtgctggatgtgctgtgcccccttcaaaaaattttggggcaaccaccagtgctcaaatttatttgatatacgggtcctgtggctgacatcaccatgaaatgattgctggcttcaaatcacattcaggacaatgtggttggttaaacgttgcgttaatcttgagtagcatatcaatactgcaaaagagcggaagaattggaaaatacctttcgctcaaggtctatattcatataggaatgtaaatattactgtcaccagtaagacatcttaaccttccttctgttcaaatcaatagatgcccattccgctggcaaacttttttctcaaaaaaaaaaaaaaaaaaaaaaaaaaaaaaaaaaaaaaaaaancgaaaaaaaaaaaaaaaaaaggcccctagggcc

SEQ ID NO: 19537 - DNA, 341 bp, Zea mays
  Clone ID: MRT4577_117822C.1
attcggctcgaggcaaactttttccatgggcattgtattggaccggatggaagtgaacgccacgagcgaattctacccagcggccacgtgagagatgagccccacggcgggcttccgcgccaccaaaataccgcgcgcccttactgcaaagagcggggagcctgcctgatttttcttggccttagtgtccggtgatacctcgccagtggcccgcatcagtactaaagcagcgcccccatgctgactgtaccttataggctgatcccggaggcactcaacgtacgtctgatttaccaccgcatgtcctagccggatgtcgaaacccaatggctagttaaaaa

SEQ ID NO: 19538 - DNA, 511 bp, Zea mays
  unsure (1)..(511): unsure at all n locations
  Clone ID: MRT4577_117823C.1
tcgcgaacgttgaggtagaggcgcggcaagcggctcagtgcggcaaggacgccgccggcgccaccgcatgcgcggctggcgctgccgcctgcgccgtgggcgacaccgccggagccgcggccgacaccgccggagtcccggccgacagcgcgcagctgcagctgcaccgcgccgccggcgccgttcagcaggctgccgagcaggtggcgcagacggtccagggcgcggcggcggctgtcaaggacaaggtgtccggcggccactgatcgacccacgcgtgaaccggcatgggcgtggcgtaccaacatttccttatgctgcatcgcaagggctgaggattaatataaggccaaagacggctaaattttacccatttccttatgttttccttattattattttaacatgtttcattcacccatcttattgtgattgtgatcgactacgataaaaaaaaaaaggccgtcttacattaaaaaaaaaaaccccnanaaaaaaaaaaaaaaaaata

SEQ ID NO: 19539 - DNA, 533 bp, Zea mays
  Clone ID: MRT4577_117824C.1
ggccgcttttttttttttttttttgttttttttttttttttttttttttttttttttttttttttttttctcttatttcttttttttttcaaacattatccaaaaaactgtcttaaagagcaatgacacaaaggccacctaaaagaagaccccgccaaagatgagccgccgcacatacatagatgggggggacaaaggaagttgtaggagggggacaaagtggggcggagcgaagaggggggccgggaaggacggcgggagcagcaggaagggcaacagcaggcgatgggggaacaaggcggcaggacggagaacaggcagctggaagtaaggaggaaagtgaagggggccgaaaaaatcaaccggaagaaacggtggcaggtacccggaggcgaaaaaatggtgcgggggcatagcagccaggtgacggaaggaacacacggcgcggcaaataggcggaaggatgcaacgcggccagatgattgtagggcagaaaatacgcaagaaaccatgcccccgccgggtgcgcaaaa

SEQ ID NO: 19540 - DNA, 714 bp, Zea mays
  Clone ID: MRT4577_117825C.1
gccgttcctaccgctcctttaggagcgcaatggcaaactctccgctactaggagccagatgagatctgccttcttaccaattgccctgaaccagatcaggctcgcatgtgttgaaaggtataccctaaacaaaccaacacaccaggatcaggaaactagccctgctccggaacataattacggacgatacgattcagatcctgtaggagtccacagaagtattgataacacttataactcgatgcgaaggctgaatgcatgccatagaaatcttagactctgcggccagtgatgcgcgacgagaacctaggaacggaacacccacacattgccgacgataagcggaggcttggtgctctatggaaggaggctccccgtcctacgaatacacaggccacatgcctgaagaatctggtcgcaaccgaccctgatgttgacaccaatacaaatgccgctgctcgctgagtcatctctgacctcaaatgacacacccttgtcactgaaggccacaattggtactaatgcattccaatgcattgggctagcgcatagctatggttacgctcactatggagtacacatattctacatcatgatattgcttaaatcgatgactgtatagtgccagatgctacagatgactcttacctactacctggtcagaagagctatgatgcgttcgccagttgtacctgggtttttattacatacatg

SEQ ID NO: 19541 - DNA, 913 bp, Zea mays
  Clone ID: MRT4577_117826C.1
gaaagagtagccagccagccacatgcggtgtagtcacggcgcctctgtggtgtggcttcctccccaccacaaggctccccaccctttccatctcttccatcccatggttcgtagtcgcaccaccactaaccacccgaccaattcccctagcttcagctgcgcgcttctcttttctctcctatacgttctaggttcgttgctgttcgagcggggtaagcttagccagcctctagcaagagcaagagcaagggcaaagggcatggcggcggctgtctccttctcccgggtgcgagctctcccgacgtggtccagctcggtttccggcgacgaccaccacgcctactccgtgttggcgacgtcgtcggtgtcagccagacctcggtctggcgcgcgaccgctgcggtcgccggcgcagatgatgggcaacgtgaacgatggcaaggggctgttcgcaccgctcgtcgtggtggcgcgcaacatcattggccgcaaacgcttcaaccagctgagggggaaagcaatcgcgctgcactcgcaggtcatcaacgagttctgcaagaccatcggcgccgactctaagcagcggcagggcctcatccgcctcgccaagaagaacggagagaagctcggattccttgcctgatctgatgatcgacgcccacgatgacgatgctaatatatatatatatatatatatatataacaatactaatataagtacaccatcttcaagtagtgacgaacaatgatacctttcttgcttatcccaaattctcttttaagtggtagctatagtacgttccttgatgtaacgatgcttcaattcagcctcagatgtttgtttgtcgaaaaaaaaaaaaaaaaaaagccctactccttgcttgcttcattatcatgcgggaaatcagtatcc

SEQ ID NO: 19542 - DNA, 161 bp, Zea mays
  Clone ID: MRT4577_117827C.1
gaaacgggggtaattcattcactgttggggtgcggtttacagtacaacaggtctgtacaaattactcgtcgccgccgccttttaactcggagaccgccgacaggaactaatccaagcgcgggggcggcatgtgacgaggaggccccttgaagtttcatgcg

SEQ ID NO: 19543 - DNA, 1266 bp, Zea mays
  Clone ID: MRT4577_117828C.1
atggcacccacttcttcctcctcggacacagccctcaccttggcgctggagaaccagacacgttctctgctcgcggagctcgacaagcggttcacggcgctcgactccacgtgggaagcgcgagtcgcggcgctggagccggttcacagcatcaagggcagctacggctccaccgaccccgacgcactgcacgatttggacgccaacaccatcttcctcaacaccggcgaagggcctgattcggacgccgacaacttcttcatcaacattggcgaagggcccgtagggccagttgttggcgatacggtcgtaggcgcgctcggtgatgtgggcgttgtcctagatccagtggtggaggaggtacctgtcgacgcgcccaccaagtgcttgatgagagtcatcaaccgcggcgactactacaacccagacgcttcctccgccgtcgacatggcggtggtgctgctcgccgacgcgggctgcaagctcctcgtcccgccgcaccaccctctggccctcccctcgccgcactcttcgcggctcgcctctcacgcaagctctccgctagcggggacgcctcctcaccctcggcccccaccccgcgcctccttgagggcctcaccgccttcgcggcctattcgcctacgcggctccgccagatgcttctcccgaccgcccctcacgcgtcgagccacgctcgcgcgctcctctccttccctgcactccactgctcactcgagcacttatagagaagagttactggattctacagacaacatgacggagcaatggctgtcagttgtcgaatcctggtacggcaccagctaccagtcatctttgggtcacactccttttgcagtgctctatagttatgaaccaaaacactttggcatcactgctgatgttgttgttcatgtccatgtcttaactacttggttgcgtgaacgcgagttaatgacaaagatgatcaaactgcacctaacaagaggtcaagatagaatgaagcggcatgttgacacgcattgtgcagaatgctactttgttgttggagattcagtacttatccagcttgtgcaacactgtatggtcacacgaggaggcgagctcatcacccaagtgaaggtcttgtggtcggacatggatgaagaactggctactagggacgatgccgaggccttcgcgctacattcccaggggcaccagcttggggggcaacctggctttcaaggccgggggaatgtcagcaactcaaaggaggatggccggtag

SEQ ID NO: 19544 - DNA, 347 bp, Zea mays
  Clone ID: MRT4577_117829C.1
cgcaagttcatgaccaaccgactgctgtccctcatacaatttgagcttgaggttatgcacgggggcttcgccaacgtctgcaaggtggagcagaaggataggcttgccaagatgtacgaagcgcatgactccaacaccatcgctgactcaagttactgaccaacttctgtggatgcaagtcgactgagcttcacctcatttactattaccttcagtctgccaagaagatcaagcccaaatatcctgatgatcacgaatggtattgctacgaacgttgagaagatccgaacgcatatgatagtacggatgatcaagaccaagatgatccttggagtgattatgaccaa

SEQ ID NO: 19545 - DNA, 471 bp, Zea mays
  unsure (1)..(471): unsure at all n locations
  Clone ID: MRT4577_11782C.1
gggtcgaccccgcgtttcttttagcgctcatagcttgacagcgcggggcacgggcggcgcgtctagcctcctcagcggcgcctgcgcgggctcggggctcccggccgtccgcggcccatacctgtgtccctcgtggaggtcaccgatcctcgcggactcggcgcggggactatgggcgcgtactgtatcatgtgcgggggggtcctgncctaccccctggcgggctttcacctcaccccatcaaggaggacatgtcgtacggcgcgatgtcccgtacctacatgactggcacgatcacctactccgtcacctacttcgtgatcatgggcatctgctccgcggcgctgtcctgcctgtacgatctttctttgcacccaccctggcgcattggcatcttgtggcgacctttttcaccctgcaccttcccctgggtgtgcggtcttttgttctcagcctttcggcgcgccggcc

SEQ ID NO: 19546 - DNA, 171 bp, Zea mays
  Clone ID: MRT4577_117830C.1
gcgagtactgaataataagggggaacaagctgtgctctggttattttctttaaaaaacaaaaaaaaaagaatagaaaaattcatatatagcatccaccaaaaacaaaggcttccttaccaccccactagacccactgaaaactaccttattctggggggggggttgttttg

SEQ ID NO: 19547 - DNA, 278 bp, Zea mays
  Clone ID: MRT4577_117831C.1
gtgagcggtccccttttttctttgatcattggctattagagaatgaacggcattaatttcatgcgccacactgatgctttcataaacctaacaccgcaagcaaaagcctccaactaccgccagatgtgagccgtttttttttacagattgtgcggactacttaacatgtcccatcattaaaaacaaacaaatccctctagtcaatagggtggtatcgatccgaaacctcctcgaaaagaagtttccgaatgacgaagacaactgccgcctaaagaagt

SEQ ID NO: 19548 - DNA, 276 bp, Zea mays
  Clone ID: MRT4577_117832C.1
ccctgatcagggaacctccccgatttcctgggcctctcagttgaacaaagcagcaaaacaggggcagtgttatatgacacttagaagcctggaataatcaggcttttgcaatgatgtaattcccactgtaatagcatagggattttggacaaagctgctggtggcttgggacatcagtggggccaagggttctctgtccctggttcaactgtgatttggctttcccgtgtctttcctggtgatgccttgtttggggttctgtgggtttgggtggga

SEQ ID NO: 19549 - DNA, 337 bp, Zea mays
  Clone ID: MRT4577_117833C.1
ctgtctccaccacctagagcatatgctgcccgcagttgtaattcccggagtcgggcgcctccgcctcttgcgtcactcgctgtacggagagcatctgatcctactaccccagacccgcaaagaaggcgcccgccagcgcttacgacacggacacaggcacctcgggcttgttggcccgagccggtacgctcagcgagactctgtcactggcagactgtggagcctaccgaaccacgatcctggctgtattgaccaggtgcatcctgactatggtcgccatggcggactggcaggccggcgcctcttgagagagcgagtgagagtgtgagagagaaag

SEQ ID NO: 19550 - DNA, 156 bp, Zea mays
  Clone ID: MRT4577_117834C.1
tcgctcctctaaaccctttctctcggtccggcgccatcgccaacatggccgtccactacctcctccgtcgcggtgtctccggtggctcactgctccaccctatccgcggactcttctacgtctccaaagagcttgggaggcgtccgttgggctctt

SEQ ID NO: 19551 - DNA, 537 bp, Zea mays
  Clone ID: MRT4577_117835C.1
gctgaaaccaaacaaccccttattgaccgagagggagagttgtataaaacagcacttattcgcaaccgaggattcatacaaagtcccatattgactagcacacatacatacccatggttagccatccaacacaatataggcttatacagagggtccaggcctatccaggcacacaggagtgctagcgccaaaacaaaaactgctcacgctaggattttcaaatctgagttgccagcacacagcgcaaacagccaccttagtacatcaggcggaaggcgtccgtcatgccacccaggctcatggtgggcgtaatgtactcgtccaccttaattgacttgttaatgcacttgagcaacaaggcatgggacctgggtacggctcttgaatccaccgaaagcggttccctttcagacacccccattcactagctgtaatggtcgagtggcaatctcctggccaggagcggcgacgcctacgatgacggatgttccccatcccttgtggtatcattccagtgcagccctcataaccgaaaca

SEQ ID NO: 19552 - DNA, 296 bp, Zea mays
  Clone ID: MRT4577_117836C.1
ggatactcccgtgcgctagtgcgctcggcgctgcctcttgtccgtccgcagaccgtccccgctcgccgaccatgcgctcgccggccgcgcataggcgctgcacaatttgctaccggtgcgtccccgccctacactatggcagtccgccgctgcatgtacagcacgcaagcacgaactaggatcaggatcgtagcgaagactgttacatttgcagtatccatagagaggatttttatttatctcacggcgagcgagctaatagcagctcagatgaccaagggtagcatacacccccc

SEQ ID NO: 19553 - DNA, 132 bp, Zea mays
  Clone ID: MRT4577_117837C.1
aaatttggaaacagtagaaacctatttggggtatggccactgccattatgcaaacaaatcttttattgtatgactgctgaacagaaagctaaaaaaggcccccttctctgactcaggggggccctaaggcca

SEQ ID NO: 19554 - DNA, 334 bp, Zea mays
  Clone ID: MRT4577_117838C.1
aggcaggatgcaactttttgtccaagaaatggattaaattcccaagggggagtatcatttgaatcaaacaattatccaggtcactatattcgacatcgaaactttgaactgtggcttgataaatttagcggatttacagaaagcacaattttcagaaatgacgctactttcattcaaagagatgtaccttaaaatagttgtcagtttttaacccaactcaaagtcgttagcatcgcttattttcagcataatttggctaagtgccttggaatcaataaagcctagttatgcacaaaataatccggcgctctttagcagtaaagtgatttcattt

SEQ ID NO: 19555 - DNA, 760 bp, Zea mays
  Clone ID: MRT4577_117839C.1
cccacgcgtccgcccacgcgtccgcccacgcgtccgggaaacacacgcacgtccgtccctggctccgtgcgagcagacgaaacaagggttttctgctgctgctcttgacttgcaaacacactgcccgggtggctgcaccctgctggtctcgaccccgtggccgaaacctgctcgcgatccgtgatccgctgcgagggtttcagcgccgacggccccgtttctgggcatgtgagctcacatgggtggacaaacggagttcaagggagggagatttggtccagtccagaccagacacggccacgaccaaaccaattctccgtgggcgtccggacgtgcctgcacgggtcagtctgaggagaaatctgggactcggcactcccgagtgacgagcgtagcggtcaatgggtgtggggaaatttgactggactgaattgaattcggccagtgcagccagatgccataccaagtcttggcgctgagttgatggggacgaaaggagcctgtcgcttgacgtcaaggctaaagtagtcccagttctatttttttctgaaacaaaacttaccgcagcgataactacgttttcggaggagtatcctggactcgtggttcgccattctgctgaacccccagctaatatgctactccctccgtttctttttatttgtcgctagatagtttaattttgtactactatctagcgacaactaaaatgaaacgaaaggagtatatagaaataaacgagcccctacaccttttttct

SEQ ID NO: 19556 - DNA, 355 bp, Zea mays
  Clone ID: MRT4577_11783C.1
cgccgactctgcaggtctgcgtggagccgcagttgcgggtctctgttccgcaggatggggttcgtgaaagttgtcaagaataaggcctactttaaaagataccaagtgagatttagaaggcggcgagagggtaaaactgactactatgcacggaaacgattggtgatccaggacaaaaataagtacaacacaccgaaatacaggatgatagttcgtgtaacgaacagagacatcatctgccagattgcatatgcccgtatagaaggggatatgatcgtctgtgcagcatatgcacatgaacttccaaaatacggtgtgaaggttggcctgacaaactatgctgcagcctattgca

SEQ ID NO: 19557 - DNA, 2323 bp, Zea mays
  Clone ID: MRT4577_117840C.1
gttgccagggtgggaggggcaataggcaggttgaactggaacaaggagaagggtgtgctgtctgtgtcatcacctttctgtttgaaggtgttgtcttctgctgaacagccgttctcagggaccagcactgcctgtttgaatttagggggtgatgtttcagctcaactagaggcgaagaaaagtgagcagctattcaatatacatacatggtgagcgatttgtattctagtaaaacagaataaagtaggtcgaggtttttactgtgttgccctcgaatatttatttcttttttaattttgatttgttgtgcttcccctccctgtttttttgtgtgtatggaaaactgaaaagacagtgagtggtatagattatgcagttttgacaaaaaaaaaaaaaaaaaaaaaaaaaaaaaaaaaaaaaaaaaaaaaaaaaaaaaaaaaaaaaaaaaaaaaaaaaaaaaaaaaaaaaaaaaaaaaaaaaaaaaaaaaaaaaaaaaaaaaaaaaaaaaaaaaaaaaaaaagggggccacccttaaaaaaaaaaaaaaatacggggccgcctctttaaaaaatcaaaatttttttaatggggcccccaaaataaatttttttgtggggggtccaaaaaactttagcaggggaaaaccctttttcacccccacgcgtccggtgctatcctccggatagctttgctgtgtcaaatggaggacgtgttggtggtacaccaaacaaaaacccaggtccaaaacaagtatgggagccaatggatgcaagaaagaagacagggaatgggaatagtgctactggggctgctgatggttcagatcaagtagaatgctcaaataatatcagtgaatgtgaaaagcttgaggcagtgtgtgactctcttgttgaaatttgttctgagatatctgcggaaacctgtaagtcagacacagatcaaccatggagacaaggtgagaagaatcagtctgcttgcagcgatgaatctaaatgcgtggataagccaaattgctccaaggacactggtaggacgacaaacttaaccacttcggatagctcctcgtgtctaagtgagggagatagagacagcagcatgacctcactgagtgttcagaatgtagaatcttcatctgcatctgattcagaagagtcttcagacaggaacaatagcagcccaggcgatataccagcgaagaatgtttctcgtacattacttgagatgtgtgcaggaaatggtttcagagagtaccaaccaaaaggcttgaaccctcctaatggtaaccaatttggatttatggtggccccttcacaggagcagatgttataccaacagaaggtccatgcaccgccgtactcgtcaccattcatggggttccacaatcaccccttggcagttccaacaaatgggtacttaccatatactcagccaggtcacttctaccctgcttctatgacccctgttggatatggagttgctggtgaccaatgtgtcgacttctcgatgcagtacagaaataacattcatccttactcgggtcctgaatttggttttctgccttcacagccagttcacaagacctcagtgaacttccatgcggtaccagtgacaccactgaccccgttgtgtagccgcggaatgccagtggcgacaaatcaagagaggcagcagagtcctgccctcttccctaaattaaaacaggcagtgctggtccctgagaccgtctgtgcaggagacaacaccttcaaacagaaaggcgatgacgtagacagcacacccttctccttgttccagttcaacctgccgattgcccctcccaccctggcaacatccaaagagcgaagtggggaactggcaccagctcagatagctcgagtccagccgtgctcgagggaggagaccaacgtcaaggaatacaacattttctctgggtgtgacggggtgatgtttcagctcaactagagacgaagaaaattgagcagctattcaatatacagcgttacatggtgagtgatttgtattctcgtaaaacagaataaggtagatcgaggtttttactgtgttgccctcgactattgattctcttttttctcattttgttttgctttgcttcccctcccagttttgtttttgtgtgtatggaaaactgaaaagatagtgagtggtatagattctgcagttttgtccctaaaaaaaaaaaaaaaaaaaaaaaaaaaaaaaaaaaaaaaaaaaaaaaatttccagagacggacggactaccctaaaatataggtttcgggtgcgaagagggggggggggggggggggggggggggggggggggg

SEQ ID NO: 19558 - DNA, 240 bp, Zea mays
  Clone ID: MRT4577_117841C.1
agcagtggtaacaacgcagagtacgcggggtggtgagtgccgcctgtggttggtggagctcgacgatttgtgataagagggcacagcatgtggtcgtggagaattttgcaatcattggcaccgcctacgacgggcttcagacatttggcaccgtcatcgtggcaattaaaagggtggtattatattcaaaaaaaaaaaaaaaaaaaaaaaaaaaaagtactctgcgttgttaccactgct

SEQ ID NO: 19559 - DNA, 812 bp, Zea mays
  Clone ID: MRT4577_117842C.1
gggcgattgggaccctcgaatggccaggccagcacgcaaagccctgataggcgcgccctccgccgcgcgctcgcgcggcctacggaggcacgcgtttccaagatctgctgtcgctctcttcctcgccctcctcgtcgcgctgtccttggcggtgctataccgtgccgccgtctcgcgctcgctggggacgtcctggtcctgggggtgggactcgctggcgctgccctcgttcgccacatcccaggaggaggagggcgcggaaggcgacgatctggacagtgaacttctcaaacttgagcgagtcctaaagaaggcttcaatgcgagacaatacagttatcttgactacacttaatgctgcatgggcttctcctgggtcattgatagaccttttcatcgatagcttccgttctggtgttagaacaaatttgctgttgaaacaccttgtaattgtagcatttgattggaaagcatatgaggaatgtgttaaaatccatccctattgctttgctctgggaaccgatggtgtggatttctctgaagagaagaggttcctgacttctggatatctcgagatgatgtggagaaggctagatttcctgcggctggttcttgagaaaggttacaacttcatattctcggatgcagacattatgtggtttcgcaatccattcccacatttctatcccgatgtagactttcagattgcatgtgatcactatgtcaggaatgcaaccgacctgagaaatattgctaatggaggcttcagctatgtgaaatcaatgagcgtagcatagagttttacagtttctg

SEQ ID NO: 19560 - DNA, 756 bp, Zea mays
  Clone ID: MRT4577_117843C.1
cccagcgtccgccccgcgtccggcacacttgttttctagatctcttagattgattcaagttcctgattttttccctgcctgttgcagcgctgctagccgatggagggaaagctaagtctgaaacatgataaaacaagcacattgactagaggcgaggactaaaagaaatcaagttttgtctgttcattattggttatccgttattttaaaggtcttttaagctttgttcaaaacttagctccgttttaagtcatgtacgtttcagtttctatgcaaccttacagatcaatgacgaaacatgacacatatcttcgacattttctcctataaatagtctagatatggagtaaacagtttttttataagatcgcatctgttcggcgccattgatgcccagggctatgccccctaatgcaaactgtagatgcttaatgccgagacagaggtaagatttttgcttatcctcttaattgtgatgcaaactgttttgagaattttgaagatgttatccatctgttaagctaatgcaaacttcagttatcttagttttggtgctctcaagacgcagtggagaagatgaaaagtgcatgcgcctccatccgatgtattcgctcagtcgcttgtatattggattaagaagattgcattatgatgtaccgtgtattccgagtttgagacgttcctattatactttagaaaaaaaacaagagttacggttgtcctatgtattaaaaataatactttttgtatggcatt

SEQ ID NO: 19561 - DNA, 236 bp, Zea mays
  unsure (1)..(236): unsure at all n locations
  Clone ID: MRT4577_117844C.1
ntnanctcaanatcctngtgcggctgctgcccatatgtttgaccatcntcatcntntgctcggggtactctcagatgacgaccacattcatccatcatnncatcnccattaacatttccatcctgtccnttccngtggcaacnacgtccatgggctcntttnatgttttcttcctcctcacatgggtactactctacagcaaggttatcgtgcctgtgctcaggggcttctccacc

SEQ ID NO: 19562 - DNA, 1302 bp, Zea mays
  Clone ID: MRT4577_117845C.1
aaataaatgttttgattattttttgtccaatcctgccacagctccggtttcttacatactcttgcccataaaacatcagcatagcacaaatcaacaagtaaattggttatgtacaatccctcgaccctagttgatcccatcagtaggtgataaaatcttcgaacatccgtaggtcttgagaacttcactggacctagatagcacaagtttaacaagtaaactgagcagagcaaactaaaaaatgttggacatcaaaatactttaatcgtcgaactaaaaaatttacaacgaaggcaatattaaagcagtcatcctacggcatcctatggttgcccaacaatagaaaaaccacatacacgtcactagaagaaattttgcaaattgttcgagtttgcaatggggattgaagcaaatgttggacatcgggatgcacacactgtttaaggacagtgaatgcatgataacttattccaaactgctattggcaacgtacagcgcttgatgcactatggaaagaagcacatcagagactctaatttgttgcctcaagacaaacaacattaccagtgataattactgaacagaaacatcaaaacaagattaacatttgagatacagggtaaacaagctagatacacacaatataaacaactcagaaaagtggatgctcagttaaacatgactgactaccagtgaaatgttaccaaactatctgcaaaagaacatggcttgcatttgaaacgagacacagaaattcaaaatgtaaaattcattatgcaactcgaaaaaagatgcaagtgatgtatcatcagaaaagtattgacttctcattagtagcacgaaattactgcgccgtgtgaggtgttcttggttttcgagttttcaccgtctgatatagttgtgtcagaataatgttctctggtcccttttaaaaggaataagccagggataactgtattttactttggtatcatcatccacaactctaagggcctgttcgacacctctagagataattgttagaagataaaaacagtcaaaactactagttgaacacatggctgatgaattagtttgacatataggtagctaatgaatcgttgttctaagcctgacaggataatatgttgcaagggatggtgcaaaatatgcggtatgaaaccacagaagtaaacaatcttgtgctgttatttaactcccaactcacagcacagagccgaagctgatgacaacacgcattctccgagtttttcagcctcaacacgaacaataacactcgtgtaaggatagttaaactgaaca

SEQ ID NO: 19563 - DNA, 551 bp, Zea mays
  Clone ID: MRT4577_117846C.1
gggtacctcgaagccggccgggccgggactctactcgtgactcgcgagtcgcgatgaccgactcggctggactcccctctatcgaccgattgatccatcagtcaagaagtgttctctctaccgccccctttcctctggacatcgcacacggctccccgctactgactccacccgcgccacctactcctggaacgggcccccatgtttcatctccgacaccaccagctgcaccagatccatcagatctacctgctaaaccccgccaaaccgcgagattaacgaggatgactctcatctcccaagcgtcagataacataacaatatgatatgtgaattgtagagagaaggcggcgcatttgtccgctgcatgatgctggacatgcatccatatttcaactggcaatgattgcaggacatgacaatggtgggcatttcagcaacatgctatagtactggaagatcggcgacgcttcaaacatgtccatagacaaccttaatatcatgcaaaccatgacatatggtggctccattgctatgtctgtggcacacag

SEQ ID NO: 19564 - DNA, 434 bp, Zea mays
  unsure (1)..(434): unsure at all n locations
  Clone ID: MRT4577_117847C.1
gaannnccgggnggacgcgcacgcgtccgctccggatggttaacgtcagcttcagctgtagcgccgaggcgctgcgctcctacgtcgcntggctttaaccggcggtgccgctttctgtgcctgatgcgcgtctcctactagctgcaacaggccttccaccgctaccttgacgtcatggcttcaccgctgttactgacatctccttcggatcctctacctgtagggagaacgatctgtctaccgttcattgacagagatttcatcctgtcttttctgcgtcgtaagtgtggttggagcttacccatctttttttgtccaaacctgtacatatttctatctgccttcttgtttagttctggaataaatagttcttggtaattgaatggatcattgttgtttagtaaatcacaatgagttagcttcttttctttttt

SEQ ID NO: 19565 - DNA, 146 bp, Zea mays
  Clone ID: MRT4577_117848C.1
gcaccttcacttcccctccgagcctcagctcgcatgtgcgcgaagccaactgtcgcctagcacgttcgaccctcgcctcaacatggatgccagggcccctctgactagcggtaatcttctgcctattgatgggtgcttcctcagct

SEQ ID NO: 19566 - DNA, 492 bp, Zea mays
  Clone ID: MRT4577_117849C.1
gtgggcccaaaagccctaattttgaacaggccacagaacgggccccgggttggtacgggagcccaaaaaaaagctttttcgccctctttttctggagggcaaaaaatggggggactgggggaaaaagggccaaaaaaaacttttttcccagcgcaaaaaacagattacctttttttgggggccaaaggacaaaagcaacaccccctcttctctaaaggaaaggcaaaacaaaatacccaccaaagagttcccaaaacacaaaacgaaggcaaaaggcttttgagggaaaggagacttttttgtcccccccaacaccaggacaaaaaaaaaaggaatgtactacgtgtgtgcaaaaaaaaaggtttttttggatacttaaccccccagaaaaaagggggacccaggcacatctgggccccaaaaaaaatgggggccctaaaaaccaaaaggcttttttttaagtttgttaaaacaaaaattcccctttttttt

SEQ ID NO: 19567 - DNA, 134 bp, Zea mays
  Clone ID: MRT4577_11784C.1
ggtgacctatagaagatatatgtctgaggatgtctgcgcgcgtactcaaggtggctctctagtagggcggccgtcctttttttccttttttggtgaagcccacctagtttgtattcatgacatgttggacaacc

SEQ ID NO: 19568 - DNA, 474 bp, Zea mays
  Clone ID: MRT4577_117850C.1
aaaaggaccccaggttttaatttcaaacatcaaacttattcatgatttgccatagttcgggggagaacccacacacaacaaaaccggtccttttttaaaccaaccctgacccgacttttgacccaaacagcaaattctttgacaccctccttttggagagggggccccaaacaacccaggccctttgggagtttaaaccacccttgatttactgccccccccggaaacggaccccaggggggggggggccctccttttggatgttgaaacctgctagggggcggccatcctccagctgtttgccggaaaaaatcaaacccttttggcccggggggatcccctccttgccctggatcttccccttcacattggcgagggggccccacctctcaacccccagggttttggtttttccaagcagggtttttacaaaaatctgcatcccacctttggggcggaaaacaaggggaaggg

SEQ ID NO: 19569 - DNA, 468 bp, Zea mays
  Clone ID: MRT4577_117851C.1
ttcgtatgatagtgaaagtgggatgagaaatgatgttgctcatggtgtcggagtcagctctttctcatatgaaaaagctaagatgtatataattgagagactaaatgatcaaggcgaagaaagttatcaaattgtacagaaatctgaatcttttgagagattgatttcactgcccgagaatggtacattttctccaatcgatttccctcaagaggagaaaattagcatagcacatgaagctacaaaaccattgaacttgcatactgttgagcaagaggatggttcagcaagcccttactcaacaaggcagtacgaggagacagaatcagccgacactagcaacttaggtacagaaacgttgattgagcccacgatagatcatggtagctatccacaaaatgagggcgctatctcacaggagttggtccgtgaaggggttaagatcatgcaagatacaatggacaactc

SEQ ID NO: 19570 - DNA, 920 bp, Zea mays
  Clone ID: MRT4577_117852C.1
cggccgcgtgggctggtttgcagtttggttcatatgccactcgtccgcgttcgatgatgacatggaacagatataaatattcgcatcttagctttggaagcgaggatgattctgtatcaagtttccagctatttctttgtgggtttgctgctgggacattttcaaaggctgcatgccacccacttgatgttgtaaagaaaaggttccagattgaagggctaaaacgccatccaaggtatggtgctccaattgagagcagcacatacaagggcatgtaccatgccctaaaggagattgtcgcaaaggagggatttggaggcctttataagggccttttcccctctttggtgaaatcggcccctgctggtgctgtgacatttgtggcatatgaatacatctcagactggatagggagcaaggctggagttgagtgaggtcttgatggatcatggagctatcaagataccatgacgagaactttttgcacaccgtggacatggaggatggagaccggaaggtcaatcgtcaagtgcatacaattcctagagatccgatacatgtaaagccttacatagaaaagagctgttttgtcgtttcttattctttccccaattgcctaatgtggtggtagggcattcgttggcttgtaaaacaaggctgactacaactaacttagtgatcgcgacgcgtcatacatgactaagtcaaaagcagccggcagttttgctgggatcgtgttacgaatcttttctcggctgcagtcatgttttccttgcggcttgttggggctgcgtcttctacagtcttttttatttatatggattgcacctgcaacagactgcagcagctacggttgtagggcagccgaacaaatttcatggttgatggcagtcgtaatttattcaaccattttgttgagc

SEQ ID NO: 19571 - DNA, 206 bp, Zea mays
  Clone ID: MRT4577_117853C.1
ctttctcccaccttgttaccatgtcgggttcatctaactggcagtgactgtagttcttttggccaaattggtgggtaactgaaaatttcttgctggtactcaccaccctgttaggttatcttctacatcaaaatgcatgtgcttgttctaaaattcaagtctccaaaatttctatttgaaattcacacatcaagcgagagcagctt

SEQ ID NO: 19572 - DNA, 1814 bp, Zea mays
  Clone ID: MRT4577_117854C.1
cggattcccggtcgaccacgccgtccgggacgcgtgggctgctcgacgcgtcggcgtcggcccccgacccccgtgcgcacgagaaaacaaatcgcctcttttccaggagccaaaccaccacaccttatatctgtcatactttctcgccccccgtgagccgtgaccccgtcgaattccttgggaccaccccccgtaatctctcgctctcttcctttctcacccccgtgaccctgtctcgccccttctcgcctcgccgccgcagccgatgggctccggggaggagccgtcgcagatgcggagggcgctggtggactcgctcgcgggtgccatctccggcggcatctcccgcaccgtcacctcccccctcgacgtcatcaaaatccgcttccaggttcagttagaacccacaacctcgtggggtattcttcgaagggatatatatggaccttccaaatacactgggcttctgcaagcaaccaaagatattctcagagaggaaggtttaccgggattctggagaggaaatgtaccggctttgttgatgtatatgccatatacagctatacaattcactgtcctacacaaactaaaaacatttgcttctggttcatctaaaacagaggatcatttgcatttgagcccttacttatcctatgtaagtggagctctagcaggatgtgcagcaactatagggtcatatccatttgaccttctgaggactattcttgcatcacagggtgaaccaaaaatttaccccaacatgaggtctgcatttgttgatataattaaaacccgtggtgttcaagggctttattctggtctatctccaactcttgttgaaatcataccatatgctggtttgcagtttggttcatatgacactttcaaacgttctatgatgacatggaacagatataaatattcgcatcttaactttggaagcgaggatgattctgtatcaagtttccagctatttctttgtgggtttgctgctgggacattttcaaaggctgcatgccacccacttgatgttgtaaagaaaaggttccagattgaagggctaaaacgccatccaaggtatggagctcgaattgagagcagcacatacaagggcatgtaccatgccctaaaggagattgtcgcaaaggagggatttggaggcctttataagggccttttcccctctttggtgaaatcggcccctgctggtgctgtgacatttgtggcatatgaatacatctcagactggtgtagagtcgatactgatgtgaaaatcttcaatgcagatagggagcaaggctggagttgagtgaggtcttgatggatcatggagctatcaagataccatgacgagaactttttgcacaccgtggacatggaggatggagaccggaaggtcaatcgtcaagtgcatacaattcctagagatccgatacatgtaaatctttacacataaaagtaaagccttacatagaattattctttccccaattgcctaatgtggtggtagggcattcgttggcttgtaaaacaaggctgactacaactaacttagtgatcgcgacgcgtcatacatgactaagtcaaaagcagccggcagttttgctgggatcgtgttaccaatcttttctcggctgcagtcatgttttccttgcggcttgttggggctgcgtcttctacagtcttttttatttatatggattgcacctgcaacagactgcagcagctacggttgtagggcagccgaacaaatttcatggttgatggcagtcgtaatttattcaaccattttgttgagcaaaaaaaaaaaccaa

SEQ ID NO: 19573 - DNA, 1083 bp, Zea mays
  unsure (1)..(1083): unsure at all n locations
  Clone ID: MRT4577_117855C.1
gcgcctctgcccctgctcgacgcgtcggcccccggccgcacgagaaaacaaatcgcctcttttccaggagccaaaccaccacatatctgtcatactttctcgcccccgtgagccgtgaccccgtctcgcctcgccgccgccgccgttgggctccggggaggagccgtcgcagatgcggagggcgctggtggactctctcgcgggcgccatctccggcggcatctcccgcaccgtcacctcccccctcgacgtcatcaaaatccgcttccaggttcagttagaacccacaacctcgtggggtattcttcgaagggatgtgtatggaccttccaaatacactgggcttctgctcgaggccggccgggatctcagtcctgctgttatacacttgtgtctggaagaggctgcagttccattggatcttgcagtccatacgaggtttgggacttgggagcctgctaaaatcaactggataattcatgcctgtaaggtcctctcatgggttttggcaaactattaggcgttacacaaatcggcaatcgagttggtcaccgaaaatttgcatttctagatgtctatgcactgagccctaccttttcttcaaacctgaagttttacgttttctttgttgatgtgtgcatgctcgttcatgtccggagcagtgatagaacctgaaactgatttgcaggatagggagcaaggctggagttgagtgaggtcttgatggatcatggagctatcaagataccatgacgagaactttttgcacaccgtggacatggaggatggagaccgcaaggtcaatcgtcaagtgcatacaattcctagagatccgatacatgtaaagccttacatagaaaagagctgttttgtcgtttcttattctttccccaattgcctaatgtggtggtagggcattcgttggctttgtaaaacaaggctgactacaactaacttagtgatcgcgacgcgtcatacatgactaagtcaaaagcagccggcagttttgctgggatcgtgttacgaatcttttctcggttgcagtcatgttttcccttgcgcttgntgnngctgcgtcttcta

SEQ ID NO: 19574 - DNA, 579 bp, Zea mays
  Clone ID: MRT4577_117856C.1
agcaatggtgahggcgtcgtcgagcgggcygaggagcygcagcvccgtgggcgtgcccagcctkctggcgccgkcgtcccggtccggssgsctggcgscgkgctgcgccaacgccaccacctctrgccgcgtcaccatgtccbcsgagtggrtgcccggccagccacgccckgcccacctcgacggskcctctcccgggggstkcggcttttwtyytctgggcctcgcgaccsttccggagaacttcgagcgggtcaaggagtagargggtaccacttccgcygggccargctttccggccccsggatcctggggccggaagckcttggccttggcaacttggttaaggcgcaggakttggcggccgtccccggcgggcaggccacgtaccttggcgccccggtgccgttgggcacgctgccgaccakcctgggtgakcgagttcktkgccatcgccttckccgrgcrccagcscaccaaggagaaggrccccgagaagaagaagtacccyggcggcgccttcgacccgctcggcttctccaaggacyctccaagtkcgaggagtacaactcaaggaga

SEQ ID NO: 19575 - DNA, 342 bp, Zea mays
  unsure (1)..(342): unsure at all n locations
  Clone ID: MRT4577_117857C.1
gggctagcctgctaataaaggcgcggcgatttgcgcatcattcgtcgccgtggatttccctagtcgaatacgccgaaacccaacagcatatacacntacaagcggatttatgccggaaaacgtgccgtgctccggaaagctgcgttgactctacctcgtttgctggagtgtctgggtgggtcgtggaattctgaccgagcgatttggtgccagttgttggttcacggcnctcgagctgcaattgacaattncgtnagtagtcagttgctcgntatttcatttgttcnagaaatgagataatatttttgttnctttcaaggatcccggttcatccgttgttgc

SEQ ID NO: 19576 - DNA, 312 bp, Zea mays
  Clone ID: MRT4577_117858C.1
tgcttgcgtgcgtaagctcggatcctctatagcggtacagccgtcgacctttttttttttttttttttttgggaccatctaattaccacagtttataagggccttaaaacagaaaatgggcctgatgggtgtgtgttcttaagagcatcatagaaataagtgtgaactataataaattactcgttgctaggaaagatatgctggcttcaatggccatacttaataaaacgtataaaagggttactttgacttatacgaaggttatttcttccggcccttaacacacaatgacagtcaggtgtctcctaacct

SEQ ID NO: 19577 - DNA, 763 bp, Zea mays
  unsure (1)..(763): unsure at all n locations
  Clone ID: MRT4577_117859C.1
gggtggggggttttttttaaatgaaaccagcatgcaaaattaagctccatgcgcgcatggtggtgtacatcgtgtctgtccatcagcttcctggcgttggcgtacacaagctcatccaagcttacttgctggacgacgattcacttcatcggccgctgccccacaaggccacaagcactggccttgtcgatcgttcgtacaacagactagagtagtcacgaagcggcaagcttgtctgacgggcatttggggtcatgcatctcagattgttgcccggccagcttcgcttcgcctgctagttcgtagctagttgttgggaccccagttgctgaggtacatgaccgtccggagctcctcctcctcctgctgctgcctggctctcctcctcgccgccgcggcgcagcccgagggagcagaagcaggcggcgcgtgcgcgctgccggggccgactgagccgctcgcgcctgctggcctcctggcgcgctgcttctgctgctgcgccgcctgccggaacgcgtagttccagcggcacaggccggcctggtccttgagcgcctccacggtgccgacgctcatcgccgccgcccacgacgacgccttcgccttgccgctcccgctcgccatctacctctccgctccacaccccctgtagtgttattatgcttctatggccgggccggtcgaggagtactggctcgatcgatgcgcccgctggtccgatgctgcttgcttggttncggtggccgtgtgnccggacgcgggg

SEQ ID NO: 19578 - DNA, 1230 bp, Zea mays
  Clone ID: MRT4577_11785C.1
ccgttcgcttcccctcccagttcggcgaagtcgaaaccctagccccgcctcaccgccggcggtggtggcagcctcagcaccggcacacagcccgccgtacctctcctcgtacgctcccttccggtgtgccgtcgccccctcgaccggtccatcgttcgtcggctcggtagccgccggatcggatcgggatcggccggcgccatgtccaaggccagggtctacaccgacgtcaacgtgctgcgccccaaggagtactgggactacgaggcgctcaccgttcaatggggtgagcaggataactatgaagttgttaggaaagttgggagagggaaatacagtgaagtctttgagggtattaatgttaacaataatgagaaatgcatcattaagatcctcaagcctgtgaagaaaaagaagatcaaaagagaaattaaaattcttcagaatctttatggaggccctaacattgtgaagctgcttgatattgttagagatcagcattcaaaaacaccaagcttgatctttgagtatgtcaacaacacagatttcaaagtgttgtacccgacactaacagattatgacattcgatattacatctatgagttactcaaggcattagattactgccattcacaaggtgttatgcgccgagatgtgaagccccacaatgtgatgatagatcatgagcttcggaaactccggctgataggaaaggccggacaaagtttctttatgcagacaaccaacactaattgtctcatgaggccatagatttccacgacaactgtgtgcgttatgatcttcaggacaggcttttagcccgtgaagctatgacacacccatacttccaacaagtgagggctgcagagaacagcaggacgcgggcatgagaggccaaagaccaaagaccaaagaccaaagactggcgctaaccctggatcagatcatctgctcttggtggagccatgctcttaccagtgacttgcttcagtcgtatgtgatgaatagtggtttgggggtttacttggcaaaaacaaacagtagctatggcgcctgttgtgcccttaaccgcgtcgagacgtgactgaattactcaggtcatcggcttgtgggacgtgattgcgaacgagattattcatgtaagatgtttgtcataaaaggttgtcgttggctgattgttctgcttgtattgttgagcttgtaaagaatatccaacatttgtttggactt

SEQ ID NO: 19579 - DNA, 798 bp, Zea mays
  Clone ID: MRT4577_117860C.1
ggaagcttttttttttttttttaatgaaaccagcatgcaaaattaagctccatgcatgcgcgcatggtggtgtacatcttgttcatcagcttcctggcgttggcgtacacaagctcatccaagcttacttgctggacgacgattcatttcatcggccgctgccccacaagacactggccttgtcgatcgtatcgttcaacagactagagtagtcacgaagcggcagcgcctgataatctagctagctagaggcaattagcttgtctgacgggcatttggggggtcatgcatgcatctcagattgttgcccggccagcttcgcttcgcctgctatagttcgtagctagttgttgggaccccagttgctgaggtacatgaccgtccggagctcctcctcctgctgctgcctggctctcctcctcgccgccgcggcgcagcccgagggagcagaagcaggcggcgcgtgcgcgctgccgggggccgactgagccgctcgcgcctgccgctggcctcctggcgcgctgcttctgctgctgcgccgcctgccggaacgcgtagttccagcggcacaggccggcctggtccttgagcgcctccacggtgccgacgctcatcgccgccgcccacgacgacgccttcgccttgccgctcccgctcgccatctacctctccgctccacccccgtagaccgtagtgttattatgcttctatggccggtcgaggagctactggctcgatcgatgcgcccgctggtccgatgctgctcggtttcggtggccgtgtgcccggccgcgtggg

SEQ ID NO: 19580 - DNA, 338 bp, Zea mays
  Clone ID: MRT4577_117861C.1
gccaccacctctccttctacatcaacgcggcgaaaccctaacgccggagtcccgctccctcctcccactacccatggcgttagatatggcgtacgctccggctatgaacgctgccaaggccgagttcgaagctgtcatgatggatccgcagcacacgatccgcatcacgctctactccaagagcgtgaagaacctcgagaaagtctgcggggatctcgtgaagggcgccaagggtaatgatctcaacgtcaacggccccatgcagatccctaccaacgtgctccacatgaccaccaagaaatctccctgttgctaatgtaccaacacctgagatctct

SEQ ID NO: 19581 - DNA, 757 bp, Zea mays
  unsure (1)..(757): unsure at all n locations
  Clone ID: MRT4577_117862C.1
aataatacgattgtatccactgtgtgttcgcgtgagtttacctcccaccgatcggagttttatcataataaccccgtagtgtacatacttgcacaaagagctgttagcacccggccatggccaagagcactcccctcctcagcttcgtctacctgctgtgtattgcccatgtcacctcgattagcttcgactacaacttctccatccccggcgttctcactagcgcaaacatcaagtacatgtctaacggcagtcgaggcaccgatcggatcgacctgaccaaggacgcgatctggagcaccggccgggtggcgtacgggcagcctttgcagctctgggacgataccgccaaggtcgccagcttcacctccaacttcaccttcgctatcaagccacacaacagcaccggtgatttcatcgaacgacaccagatcctttcttggtcgttcgagtctactctcaccggcgtcgtcgtcaacgtcaacaacaccgataacaaaagtgcgaagacgagaaagacaagcctaatagccgaagtgatggtatccactggggtcgtcgttgtactgcttgtcgtagtggtgtggcttagctatcgccgcagatgcctaaaaagacagaatgggaagcaaatacaagaggcaccagaaggcacacatattccaatcgagggagacatggacgatgagtttgagaaggggaccgggcctcgtaggttcacctacagncaattgtcacgagcgacacgcggattctc

SEQ ID NO: 19582 - DNA, 704 bp, Zea mays
  unsure (1)..(704): unsure at all n locations
  Clone ID: MRT4577_117863C.1
gccacgaagtgcgcatttataaagtcctatataanccatggacacttgatggaatgaaaccagcatgcaaaattaagctccatgcgcgcatgttggtgtacatcgtgttcatcagcttctggcgttggcgtacacatgctcatccaagcatacatgcctggacggcgattcatttcactcgcccctgctccaaaaggactggccatgtcgttcgtacagcagactagagtaagcggcagcgcctactagcatagctagctagaggcaaggttgcttgacacgggccctcggagtcatctcaggttgttgcccgcccagcttcgcttcgcctgctcgatcaccagctactggtagttcgtagctagttgttgggaccccagttgctgaggtacatgaccgtccggagctcctcctcctgctgctgcctggctctcctcctcgccgccgcggcgcagcccgagggagcagaagcaggcggcgcgtgcgcgctgccgctgccgctgccggggccgactgagccgctcgcgcctgctggcctcctggcgcgctgctgctgctgctgctgcgccgcctgccggaacgcgtagttccagcggcacaggccggcctggtccttgagcgcctccacggtgccgacgctcatcgccgccgcccacgacgacgccttcgccttgccgctcccgctcgccatctacctcttccgc

SEQ ID NO: 19583 - DNA, 394 bp, Zea mays
  unsure (1)..(394): unsure at all n locations
  Clone ID: MRT4577_117864C.1
gcggggattcacatctctaccctagtgcgcttcccttataaaacctatctcctaacgctcccacacatataacatacttattttctttgaagcaaaaattctataacaaggtttgagaccttgtgtttgtatctatttctctttttgtggcgaggggaatttcattgtattggcttctttcttacatctaaatgcagtgncatagagaaatacnnacagcgcttnnctatcccgtcgcataattacgtnttctatatcgcacttccacggnnnncatncgcactctctcctcctatccctctcccctctgcccgctttcctttatattcnntgcccgcccctccctcctttgcctgccccgcgtccctgccctgncngtccctccccccctatg

SEQ ID NO: 19584 - DNA, 1000 bp, Zea mays
  Clone ID: MRT4577_117865C.1
ggccggccgggccgggtatggccaagagcactcccctcctcagcttcgtctacctgctgtgtattgcccatgtcacctcgattagcttcgactacaacttctccatccccggcgttctcactagcgcaaacatcaagtacatgtctaacggcagtcgaggcaccgatcggatcgacctgaccaaggacgcgatctggagcaccggccgggtggcgtacgggcagcctttgcagctctgggacgataccgccaaggtcgccagcttcacctccaacttcaccttcgctatcaagccacacaacagcaccaatcaggccgacggtatggcgttctacgtcgggccgtggcccccaaaactgccggaggactccaacggcggcttcctcggtctcttcaacaaccccatcggcacgaacattgacttcccgccgaccatcgcagtggagttcgacgcgttcaggaacgactgggaccccaacaacaccatgaaccatattggcgtggacgtcaaaagcatcacgtcccgtgcgtacacgccgctgccggacgggagcttcaacgggaccatgtcggcgtgggtcagatacgacgccaacgtgagcacgctgtcggcgacccttcggttcgacgatctgccgcagctgggcctctacaacgtcagcgcgatcgtggacttcaaggacgccgggctgccgccatacgccgcggtcggtttctcgggagccaccggtgatttcatcgaacgacaccagatcctttcttggtcgttcgagtctactctcaccggcgtcgtcgtcaacgtcaacaacaccggcaagtgcctctccctgtctttattatctttagctattttattgcaaaaagaaaattaaaggaatcttcgtcatgataatctataccgttggtcaatggtttagttggatcttaggtgggccacaaacatatattatgtatttatatgcaattgctttgctgaaatcaaatacatgtgttggacacc

SEQ ID NO: 19585 - DNA, 588 bp, Zea mays
  Clone ID: MRT4577_117866C.1
cacgcgtccgcgggcgagctgtgagcatcgctgttcctctcgcgctctcggctgtctcgatccttcccgcggtcgcctccgcccgtgcccgtgccccgtcccaactcccacccaacatttcccaatccctccgggctccggcaccgcgagatgtttcgttagccattcccacgacacaatcagcaccaccggtgccctcgctgccaaggcgcccgctcgtgtgacgagtggcgctccaccaccgcccattgcgcgctcagctccgaggcctcccgctcgccgcggcatcatctccggctcctcccgccgccgtgggcgtcatgaaatgaacctgacttgcttgagttgcttcttgacaccataagaaggcgatccatctgtttccagttgtacacagaaagctagtgccttgaaagataagaatggtaaggggggcggtaggtgtcctaagatgaaactgcggttgcatctgttggtcctgtgcgtgatcatcatattcctggtgtacaacatggctagctttcaacataagcagacatcgtcggaagcaaaatcccatccatttgatacagtgacggtctctgacag

SEQ ID NO: 19586 - DNA, 122 bp, Zea mays
  Clone ID: MRT4577_117867C.1
ggtcgatccatcggttccctgctagcgaattcgatcgatcgggtacctgctgctagcgatagaagcagcagccagcagatcccgtcgctgccggcacgatggccagcccgatatcgtgcccc

SEQ ID NO: 19587 - DNA, 269 bp, Zea mays
  unsure (1)..(269): unsure at all n locations
  Clone ID: MRT4577_117868C.1
cngacgntcggcagtncatccacactaacgaacgaactgangtcgacgacgatttntcgagcancntcnatngcngcngggctgaacagcaggaagacgccgcaggtggggtgccgtnctggtggcggcggcgcngctggcgncnncngcnncggcggcgagcacctgcgggcangtagggtcttcgcgggctccgggcatcccgtacgtgactgtgantggccatctggctccntgngncggtntgcanngtctttgaagagcntcna

SEQ ID NO: 19588 - DNA, 322 bp, Zea mays
  unsure (1)..(322): unsure at all n locations
  Clone ID: MRT4577_117869C.1
cccacgcgtccgtacacatactccgccacttatttcttaaactagaatattcaattacggattctcggggctggcctgcatgtccacagaaggagcctacttccacactgtcttgnaccctgctcctgatttcttagccccacaacagacaaggtccatatgaccttncttttaataaaacccataaagctacctcacatacacctactgtcatccatctatcttcattaaaagcaaagatatcgcaacatgctagaaatttcacaacaacaaacacatcagcagattaagctaggtccatcgatcttgctcatcgctattt

SEQ ID NO: 19589 - DNA, 643 bp, Zea mays
  Clone ID: MRT4577_117870C.1
ctcgaggccggccgggccgggaaaaaaaaaaaaaaaaaaaaagatacacccaagcttggcatggtacttgcaataatcgaagaaaatggcgaaggcatacaccattcttgtagcccttagcatggtagctctgttatcctgcaatgatgtggagggtgaagcatacatgatgcatgaagcgctttctcgcaaaggtctaagggaagacatcaagctaggcactaatggtgccgtgaatccttctgctatcagtttgtctggacaggcatctagcatcaccactggcgtgaacagcaacactgaaagcagcacaagcattgagatctcaggcgctgctgcagcctctacctcgatgaccgctactaccgcagatacccaccgtgggtaccctatcacccgtgacccaaaacactaagaaccatgaagaagctcgggttcatatatcaggggctcagggcaactgaatcgtcagttaccaacgagtatccataaagtgaataccggtactgtattacaagatgtattctatgtgcatgtcatatactcctatgttatatacacatattggaatagggcaataataaagcatgcagatgcctatactgttagcctaaaaaaaaaaaaaaaaaaggcccctagggcc

SEQ ID NO: 19590 - DNA, 231 bp, Zea mays
  Clone ID: MRT4577_117871C.1
aagcccaacagctaagggaaaaatacttcagtagggttttagcacccagcttgcccaggggcgggacgtagcctacttgcttcaaaaattccgaaacgttgcttacgacaaaataaacttaaaacccatcctttggcacaatacgaacagaccccgggcctttcccctcatccaaagcagaaaaaagttggggttttttaacaaaaacaaacttctttttccagaaacctt

SEQ ID NO: 19591 - DNA, 215 bp, Zea mays
  unsure (1)..(215): unsure at all n locations
  Clone ID: MRT4577_117872C.1
ccacgcgnccgcgcaaatagcaccaagaaatccttcgtgaggccgtcgtcttntnntcgtgtggggtggtcttcttgcttcatcctccgccgtctcatcctcgcagccgccgtcctgctctccgtgctcgcggctgcctgcgccagctcctgtaccttctgcgtgccggggtgggcctttcccgcacttcccgctcctgtgctgccgtttgttct

SEQ ID NO: 19592 - DNA, 440 bp, Zea mays
  Clone ID: MRT4577_117873C.1
gcccttaacgaagcatggccctattgggcaatttgggggggcgcagaacaccccccagtcttcagtaaaaatacagctgactacggaaaggtacctttgcaaacaggttggtcacccccgggtgaacaccccaccgattccagaaaacgaaaaatttagttacctgccgccaaatgtccaaaaaaaccgggccccaatgacccgcacatgggcgttcaggcctttttgggggggaaacccaggatgaaccctttggtctcgtcgggggcccgggcgagcgccctccggccgtcgacgtccttgacgttaaacctggcgccggggcggagcaactccttgatcttggggggggcgccctcggaggctgcccgcatgagggggatgtccccgggggggatgtcctggttcaacaacgcctccattttggcggaggggccccc

SEQ ID NO: 19593 - DNA, 445 bp, Zea mays
  Clone ID: MRT4577_117874C.1
gattggaggctgcatgtgtgtctatctgttatacttacttacatatgctacgattaataaggatcacctaaaaactatcttttacgaaccgagggagtatatcaattacacaaactgacgagcttattacctcctttaaaccttatgtactctgtaactaatctagacactgttctccacttcatcaaatctaactgcaccatccttggagaaccatcattaagctgcatctgattagcaatagcaaagtcgccccaccactcccttgtgggctttagacacaccagacacaacacggttgagccttcttgatttgattaccaccatctttgttggctaaaaaagctgattgccaacaatgctcctttcaccgactgtacagcctcacacaagatctttcttaactggagctaacacttattacttggctcagtgtctaaataca

SEQ ID NO: 19594 - DNA, 253 bp, Zea mays
  Clone ID: MRT4577_117875C.1
cgcatcccttagcctgacgctggcgcttcagctttccatgtccgccgccccgccccggcgcgtggtcatctgctgcggcggcgtggtgggcgcgtgcacggcctactttcttgccacccacgccgtgttccccaccgttcagacgctcgttgagaggtgcgccccggcgtgcgccgactcagggaaagcctgctgcttcctggcgctggactggtgcgactccactccggctctttccaggctcgcgcgggcc

SEQ ID NO: 19595 - DNA, 536 bp, Zea mays
  Clone ID: MRT4577_117876C.1
cgaggaggggtaatcaatttttcaaggaagaaaatgcatcaattgtttagcacacaactcctatcacctaatgcatgaaacaaggtgataaaagattttaaaacatcaaggagttggcaaatgcaccggggcttgcctggagtaacactaggttagtgtttgttaggcgacgtccacctgacgaccatcttttgttctgatacttgtttcgtctgtccatcttcagttccgttcatcagcaccatcttgtggtcgactcaattctggttctttgcatcatgtggttaattcacgtacctaaacccgatctgaaatcgtgagattgacgacgatgtccggtgggaacatttttcagcacaccatggaagcgacggatgggattcgctttttctttacccagatttccctagatttctttctcgcggagtactgaacaataacgaatgaacgtggctattgacggaattgacggtcgacgataccgaccaccagagccgaccataacgagcacgacatctagggcacggcaggggatg

SEQ ID NO: 19596 - DNA, 839 bp, Zea mays
  Clone ID: MRT4577_117877C.1
ttttgtgtctttctctgtcgatgtaaagggcaaaagcttataaagtgacaatcacagacaatctatctgcgcctataaggctttggattaatggcggtgtgaacaagggcgactctggccaccgtgtgtccatcttccccctactatacacactcctccttcacgagcgatactgctaggtacaggtccacgagcttaccacagacctgccaacgtcctccgcagacaaattctctttatcgtgggtccgacttgccgtctcattctctccaggacctcattcttttgcttctccagcatttcgacctgtttttttgcaactcatcgttcaactctttaagttttgccacctcagcttccaactccatcatatacgcctgtttcctcccacgcgacctcgcggccaactcccggttcttgatcatccggcgttgcctcctctcaaccaccttctccacagctggtggcttccttcccctcaaaccagcacaaaaaaacgtacgacaccggtgatggcgacagatgcgacaagtcgtctccttccatcttcccgaacccgcttgccgtcaccggccgcggcgataccgccggggcctcaagaacacctccctgctgctgactgagagcccccgacacaaacccattcccgaattggagcggaggcactaagggagcaaacacattgccatgtggaaacagcattggcggttgcagatgaggtggtgggcaacccggcgctggtggtacgggcgccgccgccatcatgtcctccctcaccacgccggcgcggacgaggaactcctccagcatgatctccccgagcgtcggctgccgttggg

SEQ ID NO: 19597 - DNA, 717 bp, Zea mays
  Clone ID: MRT4577_117878C.1
tggaattcggcacgaggaaaaacttgaaatgtgcatttgttgattccgttgtattgtgtttttgggattgcatacttttgtacatgattcattttgtctaaagtaatttgattagtctccaactgcaagcggaagagcctctaactgagttggttagatgacttgagtagcactccttagaccctgattttgattcttcgtgggatcaaatttcaggcttggattaaataatcccctcgcgtggctcacgccaaaacataggtctaagacttggcccttgtcattgtggttctcacataggttacgatgctgttgtgtataaatggggcaggggttcgagagattttccgacatgcatgagatctttttaatgcaatgcccaatggctgtcttacccccataggtcgagtttttttagtctccatcttcaaatatgataaattgataattgggtattgtagtcatgtttgtagcagctttaggtagtaacaattggttactattgcattatatagtcgtaatgaattgtttctttgtccttttttttggagctagcctccaaggtaatggtttgccattacttgatattagagctttgtccagttgatactataatgctagtttaggcaatttgggagcttaaatatgcatttaaagtttccagtgttcctcaacttagggactacattctcagtttttggaatgacatgctacctg

SEQ ID NO: 19598 - DNA, 229 bp, Zea mays
  Clone ID: MRT4577_117879C.1
cacatccacctgcattccacggcttatcattcatatgggggtacctatatccaagagagtgggcaggcgccttcaacgctgcgactgacaccactctgtggcctcacatcttaatgcgctggcaccacattgccctttcactatctaacgacatagcaacgagcccctgaacagatcctccttcgaacagagagacattctgcatgatgaatgggactctcgctgtata

SEQ ID NO: 19599 - DNA, 477 bp, Zea mays
  Clone ID: MRT4577_11787C.1
gatttacatgatacatatgccactacgactctagcatggcttctgtcgtacgaccaccctttcgccaccccgctactattttcacgcgtcttgatactcgtgggtcaacctctcctacctccgccacctgtcattgaagtgcatggcggacctttgtcatcactacgatcctctaccgccatgtggttcttgtcgcagatcgcatgagctggcaagtctactttgtctccctctccactaacatggcacagccttcggtcaactcgcatgaatctcctctccgcgtagctttctttctaccggacattagcggaacatgatggaactgcgacacctgatcgctgccatgctgttgctcatggagaggatcatcccttgcgcgccatgcatgatacagagtgcatccggcgctcattggtgccttgacatcacacatccagactcctatatccctgccgatgagtgtcttgaggaact

SEQ ID NO: 19600 - DNA, 356 bp, Zea mays
  Clone ID: MRT4577_117880C.1
gtctgactgcaaacatgcacagcgacactgtagcgatccctatgtgtgaaggagctgcgactgcaaagtctgcgtgtaatgcacctgaactgaccaatatttacatatttgccagtgagtctatcagaaaatcgttggttattgacaaacccacgtggtcatctgatagatgctatcgtaagcagcggctcttgccatactacggctgcctttgatagcatgaatctacgaagcacgcgatgaacgaccgtacgggtgtgtacacgtgctataacatcgattcacagtcattccacaacttctaatgggacctctactaatattacatcaacgagtgcgatacttttgccctatat

SEQ ID NO: 19601 - DNA, 1582 bp, Zea mays
  Clone ID: MRT4577_117881C.1
ctcggccgggacacgaggccctctggcccagcgccatggccacgcccgccgtgatgtcccgatgagcacccatgtcggcagcgccttcgctacaccgtcacaaagttccggaaaccacacgaaaaccaccggccgagaattctgcaccgaatcttgacaacgtcatctcgaggggcatgccctactcgtgtgcataaagcttgcgcaggccaggattcacctcgcccttgcgcagaactgcataaaaccccaccccatctgcggcgagggttttcctcgaagcctcggatctccgccgagaaagcatctccagggggatttttgggaagaagagggagtggttgagccatgggcaaccttcacgccaaaggtgctggaacgggcgccaaaggtgctggagcagcaaacacttccatctcgaattctggggactcgatgtccaatgccgctacaccttctcccgtagagcaggcaaccttcaagtgggtcattgatggcttttcctccctgcttgacaaggatcaaggatggacatactccaacgtatttgagctcatgggtgtagaatggtatctgaaactgaatccaaagtacgaagtcagtaatgaggagtgtgtctctctcaggcttgaactgtcgcagagttcagtgaaactcgacactatctttgaggcatctttcaagttcatgatatatgatcagttaatcggaaagcacaaggtgcatctaggtaaccacagcttccagactgcaagtacgagctctgccatcgcattcatgttacctctgaaagcactcagacagtcctctagatttattgtcaataacagctgcgtatttggcattggcttcatcaaagttgccactatcaaagtcaacacgacgctagaaacactgtttgtcaggaagatgaacatcttcaacgaggccaaagtttacacttggaaaatcgaggatttctctgctctgaagaacccgtgccactcaccagagtttgagatcgctggatacacatggattatctctttgaatccatcctacgatggtaacagcctgtccttattcctgaaaatgaagaagacaaacgacgtccccaaaggctctgggagcctggtcgagttcgctttatccatcaaagaccaggaaaacggcaaggacaggaaatatccaggcaggtgccagttctcgagcaaacaccatcgctggggatggaagaagttcatctcgctggaggacttcaaggactcgtcaaagggttatctcatcaagggcaagtgctgcatcgaggctgaggtcgcaatcagtggctcttcgaagacggagtactctatgtaatttgatttgtgagagctcatgattagtgtttattctcgctagaaccaactatatagcgtgttccatatgtattagcatgccatcgagactctagcttgctctatagatatctcgacgtatccgctcttcaagcttcgttctgtcgagttgaatgtggtctaataagtgaatatatgcaaactgggatcttattattttggacacttctagccacctatgtcgattgcgacgaatgctatcaagaatc

SEQ ID NO: 19602 - DNA, 347 bp, Zea mays
  Clone ID: MRT4577_117882C.1
attattcacggggggggggtcctgccgacaaaaaatcgtctgtggtgctgggcggacaacctcctcataaatactccccccaccagagggtggcggtccttggggcccatcctccccacaagaagtttttttaaattattaaaaccccccgcaaaaaagagggggaacaccactggcgggaagcatcttttttgggaggaatattacaactcccgggggtttttttggaggaggtgccccccccatccttggataataacaacgccttgtggtctactaacaacctccccaattttttcttggggggccaaaaaatctgaaggccgccgattgctggggactttttt

SEQ ID NO: 19603 - DNA, 333 bp, Zea mays
  Clone ID: MRT4577_117883C.1
atgtactaacatacgcccgagcccatccaaggggagagaaacagaacgaagccccggtgcccaaaacaacacggggacaggatagcatccccaaccgggacggcagcgagggagagaacacagagcgggaacacgaaccacaacgccaacacagcacacattgacgacgcgagcaccggaaaagccaaccagggccatcggaaaaagaaaggccagaaactgcagctccaggaagccaccaagggcgcggctgacagcacaacgaccctgaccgcgaacgacgagaccgccaagcacgagatataggacacagcggggcaggagcggaaccac

SEQ ID NO: 19604 - DNA, 301 bp, Zea mays
  Clone ID: MRT4577_117884C.1
ctttctgtttggacggcgggtagaagatgatggccgtcgggtggcagaagcggatatgcacaacctatcctacgtgtccgacagggatggggtggtttggccgatctgcagcgacagcgacttcctgggcgtaaaggacggagaggacgcaaagatcaagtacggtgccaacgagcactcagaagggctctacttcgtacagtagaacgcgcgggcgttgcatgccattccttcttgacgtagagggtaaactcatagtgaagacaggctaggtgacatatgacagtgaagacatggagga

SEQ ID NO: 19605 - DNA, 448 bp, Zea mays
  Clone ID: MRT4577_117885C.1
gcagtgtgtcttaacagactgaaaaagatttcctcaagcacccgagggatatcctcaagtctcaccaatctggcaagcgtaacaaccctgagaaggacgacaacagattctggaagagcataggcctagccttctggactcccagggcaagcaataaaccggacctacattgacaagacatgcccattcactgaaactgccactatccgaaggacaattattgctgttacgtgccacaccgctaaaatgaaccgacctatcattgatcgcaagaactacctccactttgcatccagataccagacttatgacaaaaagcactccaacattcctgctcacatctccccatgcttccgcgcgaatgaaggagaccatgtcatcattgcacagagcaggcccctggaccaaactgcgacgttcaatgtccataaagtcattccaactggat

SEQ ID NO: 19606 - DNA, 2166 bp, Zea mays
  Clone ID: MRT4577_117886C.1
ccacgcgtccggtgtccttgatgctgttgaaagtaccttccaatgtggcatacctggtgttgtggttgaacaaaaactgcaggaaactgtcagtaaatctgttgagcttctcccagaactttggaagcaagctggggcctatcaagaagcacttgcttcataccgccgtgctcttctaagtcaatggaatcttgatgatgaatgctgcacaaggattcagaagaggtttgctgttttcttgttgtacggtggtgtagaggcggcccctccaagcttggcttcacaaactgaaggttcatttgttcctaggaataacttagaagaggcaatcctactgctcatgatactattgaagaagtggttccttgggaagacacactgggatccatctgttatggagcatttaacctttgcattgtcactgtgtggccagacatctattattgccaagcacctcgaagaggttttacctggaatataccctcgaaccgagagatggtatagtctagcgttgtgctattttgcagtttctcataatgaagctgcattaaacttgttgaggaaatctttgaataagaatgagagtccaaatgacataatggccctcctgttagctgctaagatatgtagttccaataatcttctttcttctgagggtgtagagtatgcaaagagagcagtcagagatgccgaatcatcagatgggcatttaaagagtgtggccctccatgttctggggagttgcctgtccaggaagtctaaggttgcttcatctgatcaccaaaggtctgtcttgcaggctgaggctttgaagtcactcaatgaggcaatttctcttgaccgtcacaacccagaattattatttgaattggggatagagtatgctgagcagcggaatatgcatgctgccttgaaatgtgcaaaggagttcattgatgtcactggtggatctgtctctaaaggctggaggttgctattgttggttctttctgcacaacaaaggtattcagaagctgaagttgtaactgatgctgcattagatgagaccgcgaagtgggaacaagggccattgcttagaataagggctaaactgaaggttgctcaagcattgcctatggaagcagttgaagcatatcgcacccttcttgctcttgttcaggcacaacggaaggcttatggatctgtcaaaaatggcacagaggataatgaggataaagtgagggaagttgaagtttggcatggtcttgccaacctgtactctagtctttcctattggagagatgcagaaatttgcttacagaaggctaaagccctcaaaacatactctgcgacaacccttcatgtagaaggaaacaaacacgaactgcatgagaagatacaggacgcggtagctgcatacttcaatgccatctctatggaggtagagcacgtcccatccaaggtctctatcggtgctctcctctctaaacaagggcccaagttcctaccagtggcgaggtgtttcctctccgatgccctgaggcttgaacccacgaaccgcatggcctggttctaccttggggaggttcacaagcaggacggcaggctagctgatgccgccgactgcttccaggcggcctcaatgctcgaggactcggatcctgtagaaagtttcagatcactctgatgggtcatctgcaacagcgtgaggttccctttttttgtcggccggttttctcttcgtcttcccccattttcgaggcacagctgggcagagaccaggtgcccagctatctgtaacttgttgtatctacagttgtcagtgtgtaccaacagatgctgtaattggttgttgagtggcctacatgattcttcaaccgatagctccatcaggatcagagtggcactggaacagctatgcaatcatatgagccattattattacgtgtattacacagtatgaatatatgattataatgagtcatcagctaacttaaaactaccgttgctgatattgtaatgttttgtaatttttattcctgttttgtttatcaattaccagacgtgctgaacagtgagcaccccacgggtaaatgaaatggatgttttccaaaaaaaaaaaaaaaaaaaaaaaaaaaaaaaaaaaaaaaaaaaaaaaaaaaaaaaaaaaagggcgcggacgcgtgg

SEQ ID NO: 19607 - DNA, 572 bp, Zea mays
  Clone ID: MRT4577_117887C.1
tacacggtcgatcaagctcgactactcgatccatcacacaaacccttgttacacacggcagcagccaacccggcccggtccagaaccagcaggcggcagcagggagaagagagggagatcgagtccgtttgctgacgacatatcatgccgtggttcccagccgtgccgccggcgctggcggccgccgacgaggcgcggatcgtcaagaagcgcgcggggctgccgaggctgctgcacaagctcttcatcaaggtgctccgcctgaggccggcgttggcggcggaggagtactacggcgcctaccggatgggcatgggcgtgggcgccgcggacgaggactgctgctactactacagctacggcggcgcggggtcgtcgtcgtgggccggcgtgctctcctccatcccggaggaggactacgacgacagctccgacgagggcacgcccgacgtcgccatgcccggccccgccgtgctccgcaaggccaagtccgagcggttcgtcgtcggcccacccgacggcgccgccgtcctgcacgtcgaggtcctcctctagcgccagagcacacgcac

SEQ ID NO: 19608 - DNA, 541 bp, Zea mays
  unsure (1)..(541): unsure at all n locations
  Clone ID: MRT4577_117888C.1
cgggccgggnaacacactggtagtattagacactttgtgccgcacgcacgccaggggaaagcgctagcatctacaccatcatacaaggacatctcgatgctcgccatggtgcttatgacatcgtgtgctatggatgcacacataataagggtggaaaccagagaaggctaccactacatggaggcagacagtgatggtcatgatgggggcaaaccgacagatgaggggagataatgaacaaatatcgtgctatataagggctctagagcactgccagggcgaggaccagacatggctacagatgacataaagaagagctcggagcattgccgagggtgaaaggggtgataaaggatatgctggatgagcagctcatccggagaacaaaagaatgggctaccaatgaatgcatgtgccaggggcaagtatgacctgctcaataaaaaaaagctaataggccgctgagagccgatagctcgagctgtcggttccttcaaggaggcatagaagcgcgcacgcacgagtcatggccatagatgca

SEQ ID NO: 19609 - DNA, 134 bp, Zea mays
  Clone ID: MRT4577_117889C.1
cgacccactcgtccatgacatgcgtttactgcccggcttttcgttttgcctggcatggaaagctccggggcgcaagctaacagcaagaagcccgacctatcctacaaactggttggtgccataaacgacgcccg

SEQ ID NO: 19610 - DNA, 336 bp, Zea mays
  Clone ID: MRT4577_11788C.1
attcgtctcgagaaagctcacgcagcaaacttttttgcgggagacgcatatctttactttcaggggctctttaaacccgcgccggggtccttggagacgaaaatgtccaggactttgcaaacttcaacataggacatacctgcccacagggaggcacgacctatactgcagatatgataccaactacgacttggtattctacaagcgggccctatgggtcatgacctcatcaataaaagggcgttaatatggcctgcctcacctggacagatgcaccctgatctaacataaccgatgcatgtgtctgcctgccctgaccataaaactacactgcct

SEQ ID NO: 19611 - DNA, 571 bp, Zea mays
  Clone ID: MRT4577_117890C.1
ttttttttttttttttttttttttttttttttttttttttttttttttttttttttttttttttttttttttttttttttttttttttttttttttttttttttttttttttgaaaaggaaagggggggggaactttaaaccactagccaaaaaaaattttcctttaaaaaaaaaaaaaaaggaaaaaaaaaacccccagggggcccccccccattaaaaaaccccggtttaagttggaaaaccaacaattttacaaaaaaaacccgggggtggggcaacccaaaaagaaaaccttaaaaaaggggaaagttttggagaaaaattttaaacccctttaaagcaaatgggggtttttaaagaacttgcccccggggggggggggggcccccccaaaaaaaaaaaaaggggggcccttggggggccccaaaaaccatttcaaaaccaggccccggggggggggggatggggtagttgggaaatccaaaaacgggggcccccaggggggggaaaccacccctaggaagcccaaatcccgcctcctttattttttcccggggaaaaaggtggacc

SEQ ID NO: 19612 - DNA, 456 bp, Zea mays
  Clone ID: MRT4577_117891C.1
gggaaacaaaaataaaaagcggccccagagcccagggtggggggaacaggggaaacagggaaaaaacgaggggaacccccaaatggatccaggcccccaaaaaatttttcaaccggccctaaaaaaaataaaaagaccaggtgggggaatccccaaaaagcatttgttaggggggggggggggccccattacagggcacgggaacattagactccccacagctccccggggggcatgggggcccgccgaacaagggggaaacctgggtttttaaaagacgggggggggggcctaaagaaatccaaccccccgggggaaaggcccgatggggaccccaggttccagccccaaggggggggtatttaacgacccaacaaaaaagcatgggtttttcggaggggggggaaccaatttcgaaaaaagggggggggggacccctttaaattgggggggggg

SEQ ID NO: 19613 - DNA, 394 bp, Zea mays
  unsure (1)..(394): unsure at all n locations
  Clone ID: MRT4577_117892C.1
ctggctttcactggtttctgttcatatttattgaaggntactttccntatcggtctacgtttaatctcaacttaatctcaatcaaactaaactcttatttatcattataaactatcttccaactgtcttttaaattgtaacttgaaggaaccccatataatacaatcccacattacaaaatttaatccaatcacgaaacatctccaatatatcaatctatttacatccaaaaaacaatcctaaattagttgatcaaaattattatgaggatgaataataacatgtccacacctttttcccgatttttggtggaagatataattctcattagttttggatcacttgtgacaactttgaaccgtcttaccatttaatagttcgttaatattacacc

SEQ ID NO: 19614 - DNA, 2404 bp, Zea mays
  Clone ID: MRT4577_117893C.1
atgaaagtagcacacaacgcctatagcatgactaattacgaacagaacctagacggcgatgtctgtggtcagtcaaactatgcgtcttccaagcacatgtttggcacggtgaacaatactcgtcgctcgcgaagagacggtcgatctacggacatgtttggttctatgcctaggacaccacagcctaacattaggacttgttgcaagctgagggcaccaggagacccttgtttgctactgctcaagttcacaggatgcgttgaggattggaccaaggaaatgaggatgcaacacctcaaaagaagtcataaaaagatgcatagaagtccaagactcaagaacaaaagaagcccaaagaaatcagcgaagaaacctgagaagagggctgtcagccagcgactggtgacgcaccggacagtgcatagtacctgtccggtcgaagatcttctctttaatattgacaggaaaaagcaaaggaagagaggatgcttcgcatgtggggagaagggccacttcagggacaactgtccaaatatggccgaacccaagaaggggaggagcaaaggcaaggcgctaacaagtgttagaacttgggatgactcttcaagtgaagatgaacctccaaggacgcgcagtcaccggtcctcatcacgctcatcacggtcatcacacaaatgccttatggcaaaaggtttgctagaaaaatttgaaacttttgcaaacttaaatggtgaactgtcaactaaaattgagctattagagtctagtgctccatccattgctaccgatgatggccttattaaaaagaatgaaaaacttaaggctaagttagctagctctcaagaagctattgaaaacttgctagagaaaatggaaattcttagcatacacaatgatgagctaactactaagctagaaaacattggtagcaccctaggagcatctttagttgaaattcctgaaattattaagaaagatgcttctacttcttgctttgatttaattgatgactctaacccctgcaaccaagttcttgttgagaatattgttgtagaaacatgttcggacgaggttgcaaaggaaaatgaacaattaaggcaagaagcggctcgccttggtaaggctttgtatgacaagaaaggcaaagccaaacaaatccgacctccaaaggataacaccactacgggagtgaacaagcctatggaggtagaaaccgtgatttgtaggctatgccacaaggaaggccacaaatctttccaatgcaaggcgatgaccggggataggcaaaagcaaaagctcaagcaaaagccaacaagcaaaatctccaacacctacataaaaaaggtggacaaaaagactgctacaccatatttgatcaagaagaaaaagaatggaaaggtgatagcaatcaaggccaacaagcaagccaacaaagaaaaggggggcaaacgcatctgggtgccaaaggaaataatttcaaccatgaaaagcaccaagaagttcacaggatgcgttgaggattggaccaaggaaatgaggatgcaacacctcaaaagaagtcataaaaagatgcatagaattccaagactcaagaacaaaagaagcccaaagaaatcagcgaagaaacctgagaagagggctgtcagccagcgcctggtgacgcaccggacagtgcacagtacctgtgtgccgccaccgtgtatcggagggaacgaggcccgcggcgtttcggccggaagctcgatagtggagacggcggggagcgtccgagaggagccggaagcggagcaccacttgcgcgtggagaaggcccgtggctctctacggagttactcgaccgtggtgcttggccctcgcgtgggctaaccttttcgtaggggcaccaacaaggattagtcggaaccttgtgtggttccagatacctcggcaaaaatatcggtgtcatccatgagagtttgatttctctactagctcttttaccttccgcatttacattaagtacttaagtttcaatctctcctttctaattagaatatttaggattgaaacttaggttttgtggtagagatagcaacacttagacaaaacctagtttgcacattctggattgcttatttacataagttttgttctatggatttatttgtggcttagtttagaaagaagttttttagaagtcctaattcacctcgctcttaggcgtcaccatttcccatagcatgctacatacacaagttgatcttgcgaaattccaaatgaggtatagatagttcaccaagctagaatcaaactctagtgcatgtgaatacctagtgattaattggaacattattgggtaaagaagagtgatcaagggcacaacttgccttcaacgagctcctgcttagtattttccacatgctga

SEQ ID NO: 19615 - DNA, 1784 bp, Zea mays
  Clone ID: MRT4577_117894C.1
atggggatgatccgcaagattaatctaatgggtgtgcccttgcaggtcgaagatattctctttaacattgataggaaaaagcaaagaaagagaggatgcctcgcatgtggggagaagggccactttagggacagctgtccaactatggccaaacccaaaaaggagaggagcagaggcaaggcgctaacaagtgttagaacttgggatgattcttcaagtgaagatgaacctccaaggacgcgcagccactggtcctcatcacgctcatcacgatcatcacacaaatgccttatggcaagaggtaacaaaagcattccatcctctagtgatgaaaatagtagtgatgatgaaggtttgctagaaaattttgaaacttttgcaaacttaaatagtgagttgtcaactaaaattgagctattagagtctagtgttccatccaatactgctgatgatgaccttattaaaaagaatgaaaaacttaaggctaagttagctagctcccaaaatactattgaaaatttgctagagaaaatggaaattcttagcatacataatgatgagctaactactaagctagaaaacattggtagcaccccaggagcatctttagttaaaattctcgaaattattaaaaaggatgcttctacttcttgctttgatttaatggatgatactaacccctgcaaccaagttcttgttgagaatattgttatagaaacatgttcggatgaggttgcaaaggaaaatgagcaattaaggcaagaagtggctcgtcttggcaaggctttgtatgacaagaaaggcaaagccaaacaaatccaacttccacagtataacactactgcgggagtgaacaagcctatggagggagaaactgtgatttgtaggttatgtcacaaggaaggccacaagtctttccaatgcaagacgatgaccggggataagccaaggcaaaagctcaagcaaaagccatcaagcaaaatctccaacacctacatcaaaaaggtggacaaaaagactgctacaccatatttgatcaagaagaaaaagaatggaaaggtgatagcaatcaaggccaacaagcaagccaacaaaggaaagggggccaaacgcatctgggtgccaaaggaaataatttcaaccatgaaaagcaccaagaaggtttggatcccgaaagggaattcacaggatgcaagaattacttggactaagggattgaggaaagcaacacctcaaaagaagacattaagaacatcaagaaagcaccggactgtccggcggcacaccggactgtccggtgtccacacgccggactgtctgatgcaccagggaacagcagcccaacagctagttccaggtggcacccagagagaagaccaccggactgtccggtgtgaggaccggactgtccggtgtggaaagcctgcggcgccaacggtcacctgctctgacaaggcaacggctaggcgcaccggataggctacagtgcgctgtccggtgcaccaccggactgttcggtgtgccgcaaagaactgcagcttttctctaacggctagaattgagttggggcctatatatatttcacccaaccggccatttgaaggtgtgggagcccaagcaacatactgaaagtcgcctaaaggggggtgaatagggcaaaactgaaatttacaaagttaatcccaactacaagctaggttagcgttagaaatagaaatgagttcgaagagagggtgcaaaacaaatcgcaagcgaataaagagtatgacacgcggatttgtttt

SEQ ID NO: 19616 - DNA, 351 bp, Zea mays
  Clone ID: MRT4577_117895C.1
ccctcattttccctcaactccttcctgcccccggcgtgagaaccccccatgggcggcgtgaatctcgccggtacaataaccacgcctgcccttaactacagatgcccgactttcaaacccgacaccttctattatcccccgcaacgagctagcatcacgccagtggttatttctttcattgccgtcaccgaacatccacaagtaggcgacttacctccatagtctgcggttagcatccaaatattgcctacgaccccatccataataccccatttcatttcttgacgcaaccttttcaacgacaaatgccctacctttcaacccaacaaggccgtggcaattacctccttt

SEQ ID NO: 19617 - DNA, 5262 bp, Zea mays
  Clone ID: MRT4577_117896C.1
atggatacccataggccaccacacttcgacggcactaacttcccatattatagtgctagaatggcttgctacctagaggccgttgatctaggtgtttggagagtcactcgtgacgggatgaaacccctcaagaatcccgagaaaccaaccacgagtgaggaaaaagaaattcacttaaatgctagagccaaaaattgcttgtatgaatctcttagcatggatatttttaatcaagtatttaccttgaaaactgctaatgagatttggctaaaattgcatgagctccatgacggcacatccaatgtccgtgagcaaaaacattgcctagtcttaaatgagtataattcttttgctatgaaagatgatgagcttgttagagacatgtattctcgtttgaatctaattatcaatgagctcaattctattggcattaataagctaggtgatgcggacattgtgaggaagattatctccctactaccacaacgaagatatgggagcatcatcactatccttcacaacatggaggacttgggtaacatgaccccaaccattgtaattggaaaaatcgcgacttttgagatgtcgcgaaaaatgtgtcggggagaggagccaacttcctcaaggccatatgcttttgcatgtgatgaaaggaagggcaaaaagaaggctcccactccaagttcctcaagtgaagaagaggaggaagaagaaattgatgatgatgaagataatcaaccatgcacatcatcctccgaggacgaagaaacaatccgacgcgtcggaaaggtaatggggatgatccgcaagattaatctaatgggtgtgcccctgcaggtcgaggatcttctctttaacattgacaggaaaaagcaaaggaagagaggatgcttcgcatgtggggagaagggccacttcagggacaactgtccaaatatggccaaacccaaaaaggagaggagcaaaggcaaggcgctaacaagtgttagaacttgggatgattcttcaagtgaagatgaacctccaaggacgcgcagccaccggtcctcgtcacgatcatcacagtcatcacacaaatgccttatggcaagaggtaacaaaagcattccatcctctagtgatgaaagtagtagtgatgatgaaggtgagggaaagccctctctagatgagcttgcggaagccgtagaatttttccaggatgtttgcactaagcaaaaagctcaacttaaaactttgaaaaataagttggttagctctcaaaatgattacaaaggtttgctagaaaaatttgaaacttttgcaaacttaaatagtgagctatcaactaaaattgagctattagaatctagtgctccatccactgctaccgatgacaaccttattaaaaagaatgaaaaacttaaggctaagttagctagctcccaagaagctattgaaaatttgctagagaaaatggaaattcttagcatacacaataatgagctaactactaagctagaaaacattggtagcaccccagcagcatctttagttgaaatacctgaaataattaagaaagatgcttctacttcctgctttgatttaattgatgattctaacccctgcaaccaagtcgttgttgagaatattgttgtagagacatgttcggatgaggttgcaaaggaaaatgaacaattaaagcaagaagtggctcgccttggcaaggctttgctatgccacatggaaggccacaagtctttccaatgcaaggtgatgaccggggataatcaaaggcaaaagctcaagcaaaagccatcaagcaaaatctccagcacctacatcaaaaaggtgaacaaaaaggatgctacaccatatttgatcaagaagaaaaagaatggaaaggtgatagcaatcaaggccaacaagcaaggcaacaaaggaaagggggccaaacgcatctgggtgccaaaggaaataatttcaaccatgaaaagcaccaagaaggtttggatcccaaaagggaagtgtaaagattttgacattgatgcttgtagtgaacacctagtttcaatttccaaacttaatgatgaattggctagtcttaatgctcaacttaagactaacaagagtaattttgataagctaaaatttgcaagggatgcctacacaattggtagacacccctcaattaaggatggacttggctacaagagggaagccaagaacttgacaagccataaggctcccatctccgccaaggagaaagggaaggcccctatggctagtagtgtgcaaaagaaccatgcctttatgtaccatgataggagacaatctagaaatgcttataggagatgtaactcatatgatgcttttgattctcatgacatgtttgcttctagttcttcttatgtgcatgatagaaatgttggtaggagaaatgttgttcataatatgcctaggagaaatgttgttaatgttcctaggaaagtttatgcatccgggggttcaagctggattatcgacagcggatgcacaaaccatatgacgggggagaagaagatgttcacctcctacgtcaagaataaggattcccaagattcaattatattcggtgatgggaatcaaggcaaggtaaaagggttagatgtgtctgtctttagaagaagtgatggttcactagcctttaagggtgtattagacggcaagctttacttagttgattttgcaaaagaagaggccggtctagatgcatgcttaattgctaagactagcatgggctggctgtggcatcgccgcttagcacatgtggggatgaagaaccttcacaagcttctaaagggagaacacgtgataggtttgactaacgtacaattcgaaaaagatagaccttgtgcagcttgtcaggcaggtaaacaggtgggaggagcgcatcacagcaagaatgtgatgaccacatcaagacccctggagctgctacatatggacctcttcggacccgtcgcctatctaagcataggaggaagtaagtatggtttagttcttgttgatgacttttcccgcttcacttgggtgttctttttgcaggataagtctgaaacccaagggaccctcaaacgcttcctcaggagagctcaaaatgagtttgagctcaaggtgaagaagataaggagcgacaacgggtccgagttcaagaaccttcaagtggaggagttccttgaggaggaagggatcaagcacgagttctccgctccctacacaccacagcaaaatggtgtggtagagaggaagaacaggacgctaattgatatggcgaggacgatgcttggagaattcaagacccccgagcgtttttggtcggaagccgtgaacacggcttgccacgccatcaacagggtctaccttcatcgcctcctcaagaagacttcgtatgagctactaaccggtaacaaacccaatgtatcttactttcgtgtatttgggagcaggtgctacattctagtgaagaagagtagaaattctaaatttgctcccaaagctgtagaagggtttttgttaggttatgactcaaatacaaaggcgtatagagtcttcaacaaatcatcgggtttggttgaagtctctagcgacgttatgaagaagatgttccgacggccgctatatgaaccatggcgattggagaagtgcggccacaggaacaagatgaatgagatcaaccttcttcctcaacaacggtgcatccctcaactcaagacgatgaacagggtagaggaggccttgctagatccggattgggtattggccatgcaggaggaactcaacaacttcaaacgcaatgaagtttggacactggtgcctcgtcccaagcaaaatgttgtgggaaccaagtgggtgttccgcaacaaacaggacgagcacggggtggtgacgaggaacaaggctcgacttgtggcaaaaggttatgcccaagtcgcaggtttggactttgaggagacgtttgctcctgtggctaggctagaatcaattcgtatcttgctagcatatgccgctcaccattctttcaggttgtatcaaatggatgtgaagagcgctttcctcaatggaccaatcaaggaggaggtgtacgtggagcaaccccctggcttcgaggatgaacggtaccccgaccacgtgtgtaagctctctaaggcgctctatggacttaagcaagccccaagagcatggtatgaatgccttagagatttcttaattgctaatgctttcaaggttgggaaagccgatccaactcttttcattaagacatgtgatggtgatttgtttgtgtgccaaatttatgtcgatgacataatatttggttctactaataaaaagtcttgtgaagagtttagcagggtgatgacgcagaaattcgagatgtcaatgatgggcgagttgaactacttccttgggttccaagtgaagcaactcaaggacggcaccttcatctctcaaacgaagtacacacaagacctgctgaagcggtttgggatgaaggacgccaagcccgcaaagactccgatggggatcgacggacacaccgacctcaacaaaggaggtaagtccgttgatcaaaaggcataccggtcaatgatagggtcgttactttacttatgtgctagtagaccggatattatgcttagcgtatgcatgtgtgctagatttcaatccgatcctaaggagtgtcacttagtggcagtgaagcgaatccttagatatttagttgctacgccttgcttcgggctctggtatccaaaggggtctacctttgacttgattggatattcagactccgactatgctggatgtaaggtcgataggaagagtacatcggggacgtgccaattcttaggaaggtccctggtgtcatggaactctaagaaacaaacctctgttgccctatccaccgctgaggccgagtatgttgccgcaggacagtgttgcgcgcaactactttggatgaggcaaactctcagggactttgcctacaatctgagcaaagtcccactcctatgtgacaatgagagtgctatccgcatggcggaaaatcctgttgaacacagccgcacaaagcacattgacatccggcatcactttttgagagaccaccagcaaaagggagatatcgaagtgtttcatgttagcaccgagaaccagctagccgatatctttaccaagcctctagatgagaagaccttttgcaggctgcgtagtgagctaaatgtcttagattcgcggaacttggattga

SEQ ID NO: 19618 - DNA, 1261 bp, Zea mays
  Clone ID: MRT4577_117897C.1
ttttttttttttttttttttttttttttacacgaactaacatttcattgatatttcattcctacacatatgtctagtcagtgaggaaatatggtgaggaaaagtgtcgccaccaccggagtctcaccacctatagcgtccttcgtaaggggactccctctaccctctcatttttctttggttctacgttttggggtatacgaagatcctacacgtctaacaccaacatcggcgagtgcaccagatcatagctctgactaaaaaataacatatatcagcacccgcaaatgcaagacagtctacagttgatattgtttcagccaagaaccatacatggttaagataatatccagcaaatcaaaattgtttgtcgcgagtgaccatcctttggccatctttaagatttgagcagaattagtaaggcttgaatttcctctgggccctaagttcctgtatccttttcttatcctgctcgaacttgctctgcaacattgccagttcactgaggtgggcttctcttttctgaaatctgtagaagttcatatcaacttccttgggtttcattttagccattttatgttgcattgcaccaagagatacagagccaacagctgttccagtttcagtatctgtggtctttttcctccctttgtgatgaaccacaactgtccatccatcttctgctgcacgggcctctctctctttcttctccttctcttgttgttcctcatgagcaacaataaattcatctattgcttcctgcaaggctttcaagccaggtctcttctgtttgtactccaagatccattttttcattcctctagagcagtcttcatcaactaatggaatctcatcagcgtttgcagtactaacatcaacatgtctctccaagttgttattatctttacgcgatgcatgcttgtctttcttcttggccttcccagattttttaacttccattttctttcccctctttaatttctgaggctcttcattatccacatcttcactcagtgctgcaagttggttgacatcagcactagtttcttcattttgattttcatgcagaatttcttctgcgtcagtaatcccagcagaggccttccctccctttaccttccttttctttttcttcagcttaggtgctccagcatcttcagtaacaactgaactttcatatacgactgcaggactgctactttccatttgcttctttttgctcttcttctttagcttcagtggagcatcaatttacgtctgac

SEQ ID NO: 19619 - DNA, 311 bp, Zea mays
  Clone ID: MRT4577_117898C.1
ctgcccttgccgccgccactgcccgatccaggtgtgcagactgctccttcctcgtgtccgttccgaatgcccgcacaaagcaaacggcgcgcaagtcgaccggcggaagggccccgggaaagcagttgcccacaagggcggcgcgcaagtgggcccggcccacgggcggggtgaagaacccgcaccgtttccgcccgggcaccgtcgcgctccgggagatccgaaagtcccagaagagcacggagctgttaatccgaaagttcccctccaagcgctttgtccgagagatcgcgcaggactaaaagacggac

SEQ ID NO: 19620 - DNA, 544 bp, Zea mays
  unsure (1)..(544): unsure at all n locations
  Clone ID: MRT4577_117899C.1
ctggatggtattgctggctgtaatataaatgtcttccctgaggagaaggacgttttgaacaatcttattagtgcaatatgttcaattgatcctgatatcctagtcggatgggagattcagttaggatctttaggatttcttgccgaaagagctgcttatctgggtataggcttactgaaaagaatttcaaggggggggatgagttgaatcatccacctaagatcccagttgataactctagtcaggtgctttctgaaacatcttctgcggatgatattattgatgatgtcagtgagaatgattggagccatactcatgcgagcggtatacatgttggtggaagaattgtgcttaatttatggcgtctcatgcgtgcagaagttaagcttaataattactcccttgaagctgtagctgatgaagtactgaggccaaagataccactgataccaagcaggatattgaaccgatggtttgcaacaggtcctggacgaggaagacaccgatgcatanaatacattanctatagagcttgaatcaacct

SEQ ID NO: 19621 - DNA, 203 bp, Zea mays
  unsure (1)..(203): unsure at all n locations
  Clone ID: MRT4577_1178C.1
gcagaagacaaacgttttctttgtaaatcaaatgttctctttgtggcatctgcggctttttctcaaggctgtcgggtctgggctgtgggtcggcgcctgtcgctcgtgttttttttttttttaccgttacgggggcgttgggtgcccnttggttgggggtgggtccctgtctttgggaattttcccgtggcacgccggctttg

SEQ ID NO: 19622 - DNA, 3522 bp, Zea mays
  Clone ID: MRT4577_117900C.1
atggatacccataggccaccacacttcgacggcactaacttcccatattatagtgctagaatggcttgttacctagaggccgttgatctaggtgtttggagagtcactcgtgacgggatgaaacccctcaagaatcccgagaaacccaccacgagtgaggaaaaagaaattcatttaaatgctagagccaaaaattgcttgtatgaatctcttagcatggatatttttaatcaagtatttaccttgaaaactgctaatgagatttggctaaaattgcatgagctccatgacggcacatccaatgtccgtgagcaaaaacattgcctagtcttaaatgagtataattcttttgctatgaaagatgatgagcttgttagagacatgtattctcgtttgaatctaataatcaatgagctcaactctattggcattaataagctaggtgatgcggacattgtgaggaagattatctccctgctaccacaacaaagatatgggagcatcatcaccatccttcacaacatggaggacttgagcaacatgaccccgaccattgtgattgggaaaatcgcggcctttgagatgtcgcgaaaaatgagtcggggagaggagccaacttcctcaagaccatatgcttttgcatgtgatgaaaggaagggcaaaaagaaggctcccactccaagttcctcaagtgaagaagaggaagaagaagaaagtgatgatgatgaagataatcaaccatgcacatcatcctccgaggacgaagagacaatccgacgcgtcggaaaggtaatggggatgatccgcaagattaatctaatgggtgtgcccctgcaggtcgaggatcttctctttaacattgacaggaaaaagcaaaggaagagaggatgcttcgcatgtggggagaagggccacttcagggacaactgtccaaatatggccaaacccaaaaaggagaggagcaaaggcaaggcgctaacaagtgttagaacttgggatgattcttcaagtgaagatgaacctccaaggacgcgcagccaccgatcctcgtcacgatcatcacggtcatcacacaaatgccttatggcaagaggtaacaaaagtattccatcctctagtgatgaaagtagtagtgatgatgaaggtgagggaaagccctctctagatgagcttgcagaagccgtagaatttttccaggatgtttgcactaagcaaaaagctcaacttaaaactttgaaaaataagttggttagctctcaaaatgattacaaaggtttgctagaaaaatttgaaacttttgcaaacttaaatagtgagctatcaactaaaattgagctattagaatctagtgctccatccactgctaccgatgatagccttattaaaaagaatgaaaaacttaaggctaagttagctagctcccaagaagctattgaaaatttgctagagaaaatggaaattcttagcatacacaataatgagctaactactaagctagaaaacattggtagcaccccagcagcatctttagttgaaatacctgaaataattaagaaagatgcttctacttcctgctttgatttaattgatgattctaacccctgcaaccaagtcgttgttgagaatattgttgtagagacatgttcggatgaggttgcaaaggaaaatgaacaattaaagcaagaagtggctcgccttggcaaggctttgtatgacaagaaaggcaaagccaaacaaatccaacctccacaggataacaccactgcgggagtgaacaagcctatggagggagaaactgtgatttgtaggctatgccacaaggaaggccacaagtctttccaatgcaaggcgatgaccggggataaacaaaggcaaaagctcaagcaaaagccatcaagcaaaatctccaacacctacatcaaaaaggtgaacaaaaaggatgctacaccatatttgatcaagaagaaaaagaacggaaaggtgatagcaatcaaggccaacaagcaagccaacaaaggaaagggggccaaacgcatctgggtgccaaaggagataatttcaaccatgaaaagcaccaagaaggtttggatcccgaaagggaaatgtaaggactttgatgttaacgcctgtgatgaacatcttatttctattgctaaattaaacgatgaggtggcaagtcttaatgctcaacttaagacttgcaaagttgaatttgataaattaaaatttgctagggatgcctacactgttgttccacttttgttcatgatagaagtaggcctaggagaaatcatgttgtgtctcatgcgcctaggagaatgtgcaatggaccttctactgtttatcatgcttgcaatacttcttttgtactttcatgtttatgcatccgggggctcaagttggattattgacagcggatgcacgaaccatatgatggggcagaagaaaatgttcacctcctatgtcaagaacaaggactcccaggattcgatcatctttggagatgggaaccaaggcaaggttaaaggtttgggaaagatagccatcacatccgagcattctatctccaatgtgtttttagttgaatcgctcgggtacaacttattgtctgtgagtcaattatgtaacatgggttataattgtttattcacaaatgtagatgtatctgtctttagaaggagtgatggttcattagcttttaagggtgtattagacgacaagctctatttagttgatttttcgaaagagaatgacgatctagatgcatgcttaatggctaagactagtatgggctggctttggcatcaccatctagcatatgttgggatgaagaaccttcataagcttctaaagggagatcttgtgttaggactaactgatgtctgttttgagaaagatagaccttgtgcagcatgtcaggtagggaaacaggtgggaagcactcatcacagcaaaaatgtgatgacaacatcaagaccactggagctccttcacatggacctctttggacccgttgcctaccttagcatcgggggaagtaagtatggtcttgtaattgttgatgatttttcccgcttcacttgggtattctttttgcaggacaaatcagaaacccaagggaccctaaagcgctttctaaggagggctcaaaatgaatttgatctaaaagtgaaaaaggtaaggagtgacaacgggtccgagttcaagaatctacaagttgaagagtatcttgaggaggaaggcatcaagcatgagttctccgctttctacacaccacagcaaaatggtgtggtagagaggaagaacatgacgctaatcgacatggcgagaacgatgcttggagagttcaagacgcccgagcggttttggtcggaagctgtgaacacagcctgccacgccacaaatcggctctatctgcatcgcctccttaagaagacttcctacaaacttctaactggtaacaaacccaatgtctcttattttcgtgtatttgggaggctacattctggtgaagaaaggtaa

SEQ ID NO: 19623 - DNA, 503 bp, Zea mays
  unsure (1)..(503): unsure at all n locations
  Clone ID: MRT4577_117901C.1
gcaggcggcggccggggggggggaggcggggctcatgggaggccccagccccagtggccaccgaagaagctgctgaggaggccgtggagctgcccgcggtcgacgtcgtgaaggcggaggacacggccactgtttttttttttccgtcnaagatgacgatgatggggagggggggcggttttttttggncnacncccacnggcgcgcgcatcgggtgcctccagaactacccggccgtcgtccagagcatggctctggagcaggtgaacctgtcgccgaggcttgcgggagcggcgccgtccccgcggctgcccatcccgtcggcgcgccccagccccaagatcaggctgtcgcccagcctgcgctacatgggctgccccaccccggcgggcagacgctcttccctccagcgggagcagttcatgggcttgtacacggggccggccgtggggctcacccttccccggcgcaagggcaagtggtctggttcttggcacgacacc

SEQ ID NO: 19624 - DNA, 493 bp, Zea mays
  unsure (1)..(493): unsure at all n locations
  Clone ID: MRT4577_117902C.1
agcagtggtaacaacgcagagtactttttttttttttttttttttttttttttatttttttttttttttttttttttttttttttttttttttttttaaaaaaaacaaaatttgggtgggggggaacaaaaggggggaacgggccgatcttatccgggatcccacccagggggggggggggaaaattaacgggcctctatttaatataggggggtcagggtaaaaaggggaacaaatattggggtaaacatttaaggcccaagccagaaaaaccggggtaaaatttgaggggaacccgggggccgggggggggaaccagggggaaggggggaattctagaagatgggggggcggtagtgggggggtnggttggggtaaaaagatggggggaatagtgggaatagtggtggtttgggggggaaggggggggggggagaaaggtgcacaaagaagtggggagggggggggggacaaggggagggagggggggggg

SEQ ID NO: 19625 - DNA, 118 bp, Zea mays
  Clone ID: MRT4577_117903C.1
gttccgatgtgacaaatttgcagggagaaaaactggttgcgtccaaagttctaactccgggctgctccgcaccttgcttgacacaacattacacacgcatcacgccggtgcacaacag

SEQ ID NO: 19626 - DNA, 331 bp, Zea mays
  Clone ID: MRT4577_117904C.1
aaaaaaaaaagggctcccgcttttccatttaacatcccaaagaacaaggtcaaaattttaaaatttaactgggcccaggcccccaggcaatgcaatggggcccgggggacacaaagctttcctactggttgggattggggcccactttttggggttttaaaaagcgatcaggggttcttaggggtcaaatgggccccccccacttccaaatgatgggggtttaaaactccgtttccaatggtccaaaagccccctttgggaatttgggggggggggagggggcttttcccttttggcacccttgatttgtttaagggggggtttgagcgct

SEQ ID NO: 19627 - DNA, 353 bp, Zea mays
  Clone ID: MRT4577_117905C.1
agtcctactagcaccctagcctcctctttctggcaccaactaattcagagagaaagattttgtttacttatgctggctattctttgtacggttctctcttccgcttccattttccctctatgctctcatgcttctatatcttgccttcttggccccattcccttctccatcctcatgatcttacgcttgtataccccatccttcatcccttctgattcccacatgcactcgaaagcagcatgtttccactaccaccattgtcactacatcaaccagatgcccttctaccactttttcctttaggacacttgggggctcatatcctaatggctcatcatcttcataatcttgtg

SEQ ID NO: 19628 - DNA, 303 bp, Zea mays
  Clone ID: MRT4577_117906C.1
gagaatctgaaggatgcatcctcattcttggctgagtggcaaaatatcaccaagggcttcagtgaagacaggctcttgattgcggggactaactcctccgaccttcagcagatcctgagcctactcgaatccaacaaagacttgctgttgactagctcatacctgtctgattccggttctactggggagcatacaaaatccttagtcacacagtatttgaatgccactggcaatcgctggtgcagctggagtttgtctcaggcaaggctcctgacttccttcttgccggctcaacttctccga

SEQ ID NO: 19629 - DNA, 390 bp, Zea mays
  Clone ID: MRT4577_117907C.1
gaaaaaaaaagggtctttttttgttttgggggcccccacgacaaaaaacccggacaaggtctggggcaaacccgaccatacttttttggggcccgtacaacctttgggccaaagggcgggaggaacaaaaaaagggcccccaaaaaacctacccccccctcttctttttttaaaaggcctccacggggcccctaaacttggccccggagaaaacgggggaatacccgagcttttcctcaaccctgaacaaagggatgtttttgcccaggcccacaaaccggaaaggggttccctctttgatttgccccgaaaacaggccaccggaaaggtcagaaataaaggggccctcgggcccgccattccggaggattgccatctttccccaaaagg

SEQ ID NO: 19630 - DNA, 506 bp, Zea mays
  Clone ID: MRT4577_117908C.1
cacctactggcggccgggactggggacttccttatctctgcgaagccacaaacataaatagacatactttattatctaactataactgatatcaaatcaaaaaggggcacaccatcaaagatgggatgatggtataacactgctgggttggctaaagaaagatgtatcaaagacaacttgtgttgcacttactatacggtgccaaggttagaaacaacttgctggaagaacggtaacaacatgcggtctgtcgccacagaagatagcagggctgacaccagctagctgtttgactggctcgatcagttactgattgaaataagcacgatagctcagtgctagctagttgagtgaatggaagaaattgctgacggtaatcacacagatacatggctgaatggtagatggagcaggtgcacataagacccacagttcactgaacctagttggaagaacggaagaaatctgctgttgctataagcatgcaccaaggtgacgataacaca

SEQ ID NO: 19631 - DNA, 185 bp, Zea mays
  Clone ID: MRT4577_117909C.1
ctcttatcttgcataagcataagaagagagatccacatgtacaatgtagctgaatcatactgctacatctctatcgaagctatagccatagggctaagcccatgccaattcggcagccataaagatctcgggcccctgctgctgctgctggtactcaatctctcaaccctgaacgaaatacccat

SEQ ID NO: 19632 - DNA, 1914 bp, Zea mays
  Clone ID: MRT4577_11790C.1
ccggccggaccaagcctcgcgcccccagccgcggacgcggagagacgaagctacatatacgcttgatgtttccgccgggagtcagtgcatcgaaaatttggtcgaaataaacaagcagagcagaaaacccccacacgctttagttggccgtccgtccgtccgtctctgaggagcacacagcagtcgattttaaactgcagctacagaggtcaggtcaggggacacagcctgagcggctggctggcgggggctagcgagcggcgccacagcgcagcacgcagagagccagggcggcggccatggcgagcgcggcgagtggcggcggcgggtcgctgaagcggatgggcccgctccgggtacagtactacatcgtgatgggcgcggtggcagcggctgtggtgctggccacgctgcgctacatgccggggccagccgtcccggcgaccaccgcccgtaccagcggaggcggcgtcgtgcgctcggccccagcagccgcggccgtccctgtgcccgtgcccgccgtggaggtagaaacgggggaggatgagcaggcgcagaggaggaggaggaggaggaagaagaagggggacggggtcgtgctcttcaacttcggcgactccaacagcgacacgggcggcgtggcggcggtcatggggatccgcatcgcgccgccggagggcagggcctacttccaccaccccacggggcggctctccgacggacgcgtcatcctcgacttcatctgtgagagcctgggcatgccgcacctgagtccgttcatgaagccgctgggctccaacttctccaacggcgtcaacttcgccattgcagggtccacggccatgccgggagtaaccaccttctcgctggacgtgcaggtggatcagttcgtcttcttcaaggagagatgcctcgactccatcgagagaggtgagagtgccccgattgttgagaaggcgttcccagatgctatatacaccatggacatcgggcacaacgatataaacggtgttctccacttgccctatcatacaatgctcgaaaatctccccccagtaattgctgaaatcaagaaagccatcgagaggttgcacgagaatggagccaggaagttctggatacatggaacgggagcattagggtgcatgcctcagaagctttctatgccgagggatgacgacagcgacctcgatgagcatggatgcatcgcaagcattaataatgtctgcaagaagttcaattccttgctgagtgaagccttggacgagctgcgtttgacactgaaaagttcgactatcgtctttgtggatatgttcgctatcaagtatgatcttgttgccaaccacacgaaatatgggattgagaagccattgatgacatgttgtggtcatggaggccccccttacaactatgaccccaaggagagctgcatgacttcggacaaatacctgtgcaagcttggcgaaaagttcataagctgggacggggttcacttcactgatgctgcaaatggcattgtggcttccaaagtactcagtggtgagtacaacattcccagggtcaagctggccagcctcgtccccgttccaaaatctgacgattaatggtgatgcagcaccttaattggcctttagtttggcctatcaaggatgatgaagatgaaactactaacaaaactgacaccaccgaagtttaattattttgaggttcttacgttacatccattgtagaagaagactttccttttgtttacttctctttttgtacaatcggcgcatatgtatatcctagggttaatatatggcgatgcaggtgtctgtaccatgtataaaaaaaaaaaaaaaaaaaaaaaaaaaaaaaaaaaaaaaaaaaaaaaaaaaaaaaaaaaaaaaaaacacggggggcgggttttaa

SEQ ID NO: 19633 - DNA, 349 bp, Zea mays
  Clone ID: MRT4577_117910C.1
gacatgtcccaccaatgactataggacaacgggctatgaatctctgcagaggtttccgtctcagtatcttatggttaatatatagtcttacatttgcacacaaacgaaggattaatacttagagatgtaggggccacaagtttctaccagaatttctacacattcgtgaatggttttattgttgctactgaatgttgtaatagattcagtatactactatgttcgcaaggatgctaaaagcactcatgctctgttggtgcacaaggatatgtcctaccaatgacttatcaaaagcaaagtttaatcctaatgaatgtggatgggcataccgaatgaatttctttgatct

SEQ ID NO: 19634 - DNA, 168 bp, Zea mays
  Clone ID: MRT4577_117911C.1
gacaaaaaaggaaaggtggtccaatcaaataaggaaacaagaatcaaatcataaccgtattaaaaacattgatgaaacacaaacggagaaactctgcctgtggcgtgtcaaggattaataagaaaattaacaagctaactttgcgaagatccaaaggtgcatgactgc

SEQ ID NO: 19635 - DNA, 171 bp, Zea mays
  Clone ID: MRT4577_117912C.1
tcgccccgcgtccgcccaacgtgcgggggcgggtgcggccacaaacatacgcgcctctcggtttagctccagcagatctgcctggctatgatgatcgccgtgggaatacacgctcctgtcttcggagatcggccgctcgcgccttttttttttttttccctctcactcctt

SEQ ID NO: 19636 - DNA, 859 bp, Zea mays
  unsure (1)..(859): unsure at all n locations
  Clone ID: MRT4577_117913C.1
cctcgaggccggccgggactcgtctccttcctccccttccgtctcgaacaggcgaggcgagagaactcgtcgtcgaagcgaaatatagccagggcaccaatcccaattcccaacccgacgcaacgcaacgcacctcatcccggttgcttgcgcaacgtaggggatcgccccgccccgccccgcttcgcgcccctccttcctgcctgccgtaaccacgccgtgcaactgtgcaagggtggggtggtggtgccatggcgagcacggtgtggagggaaggcggttgtggccagcatgtacttttctgtttcggtactctggttcgatcctgatggggttttcgtccatcgatcgcgtctcggtcctgcacgcaatgcagagggggttacggttctttctgttcttcctccccgcggtccgcgtcgggatgctggtctggtcgatgctttttttgggttaccgcggacgcgacgggatgcttcggccgttgttttcttttgatctctgtgacccttctgggaatcgattccatgccggattggtcgcaatgtgcngggaggttttttcttgtcctgttttttcctcgctggctggttggattctgccgcgaaaagttctcccccttatgcacctttccccccctcaagatatctttattcgtcgttttcgtggttccttatgggtgcttgcctgcttgngttcccttgtgtggttaaaaggccaataagctgcagtgtttttgttctcaagagttctttccttgtgacagggggacatcacagattctttggtatcttcctggaaattccatcaattgttttctcctcaacattgctggtcatgttgtttgtagtgattgtct

SEQ ID NO: 19637 - DNA, 467 bp, Zea mays
  unsure (1)..(467): unsure at all n locations
  Clone ID: MRT4577_117914C.1
ctaccgccacgccagtctccaggtactgcgccgcccagtactccgangccacttcgctgctgctgctatgtcctgcgcgcagccgatgcggcgccgatctccatggttgtgcgaaacctaggcggcgggcgcgagcgaggccacaaggcggcatctgcctcctgagtggggagcgggctcccccgatccacatcgtgcgggctggtggctgcgtcgcgatgaacccgttatgctgcatcgcgccggtctcgctcgagcacgctgcggatcagctccacgagcacccgcagcgcatcctcgctggtgcaccgccggtgacgccggtcccaaagcaggatgtggttgtgggggtgctgcacaagtgggtcaactatgggaaggggtggtggtcgcggtggttcgtgctgtaggatggggtgctatgctactacaaggtttggggatttggtgctgggggggtagatttg

SEQ ID NO: 19638 - DNA, 858 bp, Zea mays
  Clone ID: MRT4577_117915C.1
atggcaaaccaaccagaaaatggatttgaaccagtgcagctcgccatgggacaaaagtacaccatggttttggctgacaatgtggatggcggagacgatcttgatcttattgttactactatgaacggcaacgtctttagcttttccactccctcaccacaccatccactcaaggaatggagatcatcaaaccaaggaaggaataatgctgcatatcggtacaaccgtgaaggtttttatgttaagcatgattccaggaccttccgtgacgaagagggcaagcatttctgggtagagtttgagattgttgacaagtacaggcttccctatgggaatcaagctccttataatgtgacggtaactttacttgtccctgggaattaccagggagataggcgcattgtggtcagtgagatctatcatcaaccaggaaagcaacggatgaagcttcccactattcgtgttagaacgacaggaactgtgctcgtggagatggttgaaaaaaatgggttttatttatccgaaaaggtacgatttcactatggacatcctgatgtgttcgacaggatttttcacattacaagaggaggcattagcaaggcttcctgtggtataaatttaagtgatgacattttagctgagccagatcaagatgatatgaatgttcgaacgagtaacacgagctatagactacttaagtctttttacagaaagcgagtgaatagcctaagggtgcttcgaacaaaggaaatccgaagaaggttttcttcaatcaattatgaaggaaagaagcaggagaggaggcccctctttaaacatatgccagttacgacaaggattgtgaagaaagcaatctag

SEQ ID NO: 19639 - DNA, 526 bp, Zea mays
  Clone ID: MRT4577_117916C.1
ccgctctctgtgatgctcgagcacaatcgcaacgggtcatgctattgatgctgatggccccacccctgacgctgctgctgctatcgccgagatgtgtcgaaaagacgcacagaatccgtgagagaactgatgctcctgatgctgctgacaagaatactgctgctattggaacgccataagacattggacccacctgctcttgtcaccctgatgattttcgaagcctctctcggcacagttgaattcaacgtcgccgacaacatctcccccaagaccttccttgtttttattgctcacgccacccttccggactgggtctctgtcatgaccatcaagactgtcgaaggcgctcccccgaagatggagaagaacgtccgcatgcagatcactgacattcctggggtgctgaagctaacacccaaacccgactactgcccctgtgtgaagatctccactgatgcttccatcaaacaacatgtatccctccgacccgatctttgacatagcatgactccccgtcatcgct

SEQ ID NO: 19640 - DNA, 435 bp, Zea mays
  Clone ID: MRT4577_117917C.1
cccacgcgtccgaaattttatagcaagacttcttatttctccgatgtcgatcttcgaatgggacgggagtgccctaataaccctgggagggaaagaactggtctaaacattgtcagcgatcggagactcctagatcagctgcaaactattgccagaaaagcattgggttaggctttaagacacccagagaggccattgaaggaacatatattgataagaaatgcccatttactggcactgttgctattagaggccgtatccttgccggtacttgccatagtgcagaaatggtaaggactattatcgctcgaaggaactaccttcactacatcaagaaatacgcaagattcgagaaatggcacagcagtatcccagctcatatatccccctgctttcgtgtaaaagagggagatcatgttataatcgggcaatgca

SEQ ID NO: 19641 - DNA, 256 bp, Zea mays
  Clone ID: MRT4577_117918C.1
ctatgccgaggtcatgaggctggtgaagggcatgaacttctcggaggtggtatttgacacggcacccacgggccacaccctgaggctgctcaacttccccaccatcgtggagcggggcctgggcaggcttatgcagatcaagaaccagatcagccctttcatctcacagatgtgcaacatgctgggcctgggggacatgaacgcagaccagctggcctccaagctggaggagacgctgcccgtcatccgctcagtc

SEQ ID NO: 19642 - DNA, 210 bp, Zea mays
  Clone ID: MRT4577_117919C.1
attcggctcgagatcgtgttctccttctttttgcacactgtagccacgtccaacttggggggatgcatacacccgacgggtgcagcaataacggagagcacaaacctttgtccacagggctcctgaattgcagcatcatgtagtacgacccattctgactccggtttctccaccaagatgcccgtacattgcattctctctgaggcattt

SEQ ID NO: 19643 - DNA, 293 bp, Zea mays
  Clone ID: MRT4577_11791C.1
attcggctcgaggggcgttacacctctgtagttttattttggacgatcggctggtgcaaagcatggccattgttataggaatcaccatcaccgtaacacaggaactggcgataacactctcggcaagcgcaagcatgatgttgggacatgaaccctgcatgctataattaaaaggattgcaggtggaaaaacgaaaaactgtagagagcacactaagccctgaaatatgtttgctcggcctttgcctgaatcacctgggtgcacagtattcgataggaataaaaaaggctctg

SEQ ID NO: 19644 - DNA, 322 bp, Zea mays
  Clone ID: MRT4577_117920C.1
gactactcattttttcttctgttaacagggatgccgtagtgaggaggagctttttgtgttgttacgagggtgacatcaaagctcccgaggtggtaacccatttatactgctgtatcagccatattggcgattacaaggcataattttccatgtccgattatctgttaccacatcatagtatgttctcgttggaaaatgatcctagactgtgactgttcttgtgttcaatctgttgcagcatcacacttttggtattttagcttatttcatcagaggatattcatctgtttgagagtgccttcctaccactttgattttacat

SEQ ID NO: 19645 - DNA, 377 bp, Zea mays
  Clone ID: MRT4577_117921C.1
cggcccaacgcgtcagcagacccttgggcaaagatgacatggactttccgcggcggctggcaaaagaaaaaataatgggtggtcctgcaagatgtgccgtccggtacaaaggatgggctcccaacaaccttggcaatggttcaacctccccgggaaaaggggcttaaaaggtccaagtcctccggctggcgatacagaaagccaacaaattgataagataaagtcaccagttctatgcaacagagacaaaaattgttatgaacttctgcacagatatatgatattgtatcatcttcactcgaagatgacatgtttgatgctctttgtctatagtaaataaatgatgtctcttcaaaaaaaaaaaaaaaaaataaaaa

SEQ ID NO: 19646 - DNA, 512 bp, Zea mays
  unsure (1)..(512): unsure at all n locations
  Clone ID: MRT4577_117922C.1
ccggccggngagaattactcagcagtcagcacggatcacggatggatggcatatggcaaggcgtgacgccgtgacgaagccacgagcagctcaggcttgcagagttgcagtgctgctccagtgtccagggctccaggctaggctctataaaaagtcctggtcgtccccggccgacacggacgggaaagtcgcaaaacaaggtttattgggaatggtttttccttggccgggngccgccccgggggccaaacttttcaaagggggcgggtccgaacaaagggaaagggaaaggggccccccccccgccctttttcggggaaaaaaccccccggccccaaagggggcaaaaaggggggaaaaaaaaaaaaaaaaaaaaacccccccctataaagaaaaaaaggggggggggggaaaactggggggacaaagggggtttttctccccccccccccgggccctttttctccccgccacacctttttataaaatctccccccccccacccgggggcg

SEQ ID NO: 19647 - DNA, 344 bp, Zea mays
  unsure (1)..(344): unsure at all n locations
  Clone ID: MRT4577_117923C.1
ccccccccccccccccccccccgcccccccnccccnccnccncnnnnggccnnnngccgaatagggccccccaggggcgggcagggagccttccccgcagaggcgcacagaaggcgcattcgtaatcccctatctccgcgcatcaaagcttgtgcgatgtcctacaggcgccgctgcatcaccaccccattccgtggacaccctgagggagagcatctcgatccacatcggtcaagccggtgtccaggtcggatacgcgggctggaagctctactgcctccagcatggcattcaggctgacggtccgatggccggtgacgagaccattgggaggtggtgatgat

SEQ ID NO: 19648 - DNA, 156 bp, Zea mays
  Clone ID: MRT4577_117924C.1
aagattgttggtcaatttatagatatattttctgtatagaatgacactgcatcatgagcaattcagatactatcctgcagctgtcgacccccgctcatatccaagcggagtcgatcgcgtatcgacgctttgtaaggagactgtcaattactttgg

SEQ ID NO: 19649 - DNA, 443 bp, Zea mays
  Clone ID: MRT4577_117925C.1
aaaaaccacaaatccaacaaaatctaatatgtacccgcacaaaaataattagccatatatactttttaatttaggaacctagcgaggcgccacccatcgtgtttcctctgaggctctgcgatcgtcgttgtcttgttgcatgcactgaggctgaacgcgctgctgctgctcctctgcctgtgcgcgttccccgccccggcgcggtcgcagaacacgaccatggccacggccgcgccggtgtccatcgaggggttcaactgcaccgccaaccgcacgtacccatgccaggcgtacgcgctctaccgcgccggcttcgcgggcgtgccgctcgatctcgcgcctcatcggtgtacctgttcgtcgtcagccgtttcatggtcgagtacgccaacaacctatccacgacggccgagctggccatcagacaccagcccacgcgccag

SEQ ID NO: 19650 - DNA, 503 bp, Zea mays
  Clone ID: MRT4577_117926C.1
ccggccgggccggggttccacaaaagggactaaaggactgctttcttagtttcctatggtctcctccacaaaggcagtcaacaagcaacactgaataaggcaggtagagggcatacagactgtcctgtgtctgcgctgcagaagagcagatgggggtgagggcggcagcaccagacatcggctgctgtcggggtgatgccccacgttgaagccccgagtggctgctcagactgctaactgggcgcagaacctggtccagtgctcatcctacatgacacacgacggggacgccgccggacacctgttgcagaccgctcaaggatgccgtcaagaacgacctctcagtgcctctgcgatctctaaaccacaccgaagatcttcaaggtcttcttaatcagcctcgaataggccctcagttcctccaagccttccgtcctcagtgacacgacccccgcctgctagacactatcacctacccaatctactacaggttcaccatcagg

SEQ ID NO: 19651 - DNA, 655 bp, Zea mays
  Clone ID: MRT4577_117927C.1
aatcgaacgattcggacgataatgatgattggtccaaactgatttggaccattaatctcagacgactcgaaaacattggttcagagacaagcgcaagcgcattgggcaaaccacagttttgttcaggctcgtcggtgaacaacagctttgcctgccttgtcctgctgcagaggcttcatgggtggctgatggagttgcaagtttgtgacagcagctcgtcagtcccgcctttgcttcacggtcacagggagcccgtccgccatccgcagcgttagcgacgcaacctgccggggccggtacgcgccgtcaaccgccacatcgagctcctccagcacgcacgccacgatggacttcatctggatgtacgccatctccttgcccagacaaagcctcggccccgcgtgaaatgccacgaaccggaaggggctgtccggccggaacatcccgtcgctggggttcagccaccgctccggccggtattcccgcgcgtcgtcgccccacaccgactccatccgccccatcccatatgaattgtacgccacgaaccaccctgcacgcacggctgtgccgtccggcaggacgtcgtccgtctccgccagcagcgagttcaccggcaccggcgggtacagccgcatcgactccgctcgagccgaat

SEQ ID NO: 19652 - DNA, 122 bp, Zea mays
  Clone ID: MRT4577_117928C.1
ggggggggggaaataacctttcatgccttatttatttttgacacagacccttattggacacaccaaggtacctaaaattggccctctggctgttcgcttattcccaaaactacatgaaacta

SEQ ID NO: 19653 - DNA, 193 bp, Zea mays
  unsure (1)..(193): unsure at all n locations
  Clone ID: MRT4577_117929C.1
tcccgtgtctcctggcgcttgttctcatggcagcctcctgcttggtgttgccggggggggcaacataacaaacanccaccggtgacagagctgctcgcccagcgacagcccctccctggcgatcgcccccgcccccagccatggacaccgtcggcctcgacttcctctgccttcttcatccttcctcctcccc

SEQ ID NO: 19654 - DNA, 843 bp, Zea mays
  Clone ID: MRT4577_11792C.1
cggacgcttgggctggcgttggccacggagccccccaacgacgagctcatgaagaggactcccgtcggaaggaaaggcaacttcatcagcaacaccatgtggaggaacatcatggggcaggccctctaccagttcctcgtcatctggtacctgcagtctagggggaaacggctcttctggatcgacgagggcgccgccgacgccgacctggtcctgaacacggtcatcttcaactgcttcgtgttctgccaggttttcaacgaggtgaactcgagggagatggagagggtgaacgtgttccgaggcatcctggacaacaacgtgttcgtcatggtcctcggcagcaccgtcgtgttccagttcgtgatcgtgcagtgcctcggtagcttcgccaacacgacccctctcagcctcgcgcagtgggtcgcctgcgtcgccatcgggttcgtaggcatgcctatcgccgtggcggtgaagatggtgccggtggagtaggccggccttcagtggaggcagccaggcagttttggccgttgttgcttgccctcgtcatacagacatcttcctcgcttatgatctagacttctctggaggtcgagccgccatggcgatcggctcgattctgaaaagtgttgggtagaatcttgtagctttgaaagtttcagtttcagttttttttttgttcccagacgttcttcatttggaagtagtaactgttggcttgaaatgtttattacagatgtactgattttttttaagaacagaacaggttttattcatttgttattctacaaagggttcctgtgtcttgagatatatatagtgttgtaatttctagttttt

SEQ ID NO: 19655 - DNA, 939 bp, Zea mays
  Clone ID: MRT4577_117930C.1
ccggccgggccgggtttccgaaggcaaggacgtgtgcgcggcggcgagacgaggaggcaagcacccaacggcgacgagaaatccacggcggctagttcactccatccggcgcgcgcgcctccctccgcctcgaccaaaaccgagggcgtttcgtgtccccttgtggccatctctaaactcccgagcctacctcctcctccaatttccactcacctgcaccacccccaccccgctccccaataccctaggtccttcgatctaatgctgtgacctctcgaattcccaattgccccagcctatccatggaagaccccgtggcggcgccctcttcgtcttccgccgccccagctgcttccgcagcggctaggatttcggcggcggcggcggtaacatctgccgttacctctgcgccgcccgctctcgctccgctgcagccgtctggcaccgctgctgcggtccctgaagccgcgtcgacgtgccggaggcagctgttcacggtggagctgcggccaggggagtccacaatcgtgtcgtggaagaagcttctcaaggaggccgggcacaccgccacggcaccgccagtggcgccggagccaacgttcgctgcacatgcgggcccatctggtgctgcacatcctgcagaaaatgacccaaaggatccaatgcagccaaatcgattcaatgcagtcattgaaaaaattgagtgcctttacatggaaaaacatagcagtgacgaacaggatcttaatgatgtaccagatgaggatcagtatgacactgaggattctttcattgatgatgctgaattggatggcgctaaaaaatctactcgtttgtcccacgccaaagcacaagtctaaggcctgggctcggacgcgtccattttcacatgagctacggagccactgacccactgtgtatgggtggggtagccggcct

SEQ ID NO: 19656 - DNA, 626 bp, Zea mays
  Clone ID: MRT4577_117931C.1
gtactacccaagtcatattggggttccattggttgccttggggtattctgtaaatctgggcacacacttactctttccttctatattgatgatatttcccagatcataaagattgaggagggaatgactacagatatgtgagtctcagcagatcggctcactctaatttcataggcttatgtactacttttgttctgattaattttcacctatccaaccatgagtgtgacatgtgcgtaattgcacacatgtctatcttaccttgtagaagcagatgacagaagcagtttatcggttttgcacaatgatgctatgttcgaaacttctaatattgataactaaggcctcgagaaagtactgattttactctgaacaaagcagtaccattctcaccatgaaaggaaaacttaaagtcacctgtatttttaaaaaccaaagttggcagcattgaaagatgaacatattgattacttgaaatttggttgaacaatgcttggtaattggatggtgttttttctgtcaaaagtttgattattattttttgaataagtaggcatcatatccttcaggaattttttgatatggaaatcctaaacttgggacatattggttttttaatcttaaat

SEQ ID NO: 19657 - DNA, 258 bp, Zea mays
  Clone ID: MRT4577_117932C.1
ggtaatgaccagggcatgagcgttaaccacccattcataagggcgacacacctgattgacattacaattctcctcatgttcactgcgaacaactaccaaatgaaaatttgcgcagggaaccaaacctgctgtcaccgagcagtcctagagcactattctgctgacatggtgaaacaaaagcacataaccacatcatcttcattcataagcgtggtaaacactgcatcctccatgggacaggtgccaccacctcatggt

SEQ ID NO: 19658 - DNA, 561 bp, Zea mays
  unsure (1)..(561): unsure at all n locations
  Clone ID: MRT4577_117933C.1
caggaccccggaagaatataaagctgattagtaacatctagcttcttcaaattatgagtttccctttgaaattctccattcttaacttgtttctcttatagactgcatgattatgtgttnnnnnnnnnnnnnnnnnnnnnnnnnnttagttttgacaatatgcggttatcagaaannnnnnccaaaatatctaacagacttgttttcttcaggccaggaactcagggtctacacatcttataactgnnnnncacatgagcaatatgcggttcacannnnnnnnnnnnnnnnnnnnnnnnnnccattagacccatgtaacnnnnngcagattgtttatatgttatgctcacttaatatggagatcctcaagtatcttagaatcagttatgtgttggataaatatcttggttatttactcttctattagtactctgtgcttgttatctgttggataaatgtcttggttatttactcttctatcctcaagtatcttaggaataggattcatgacaatgagccattgatttctgaagnnnnnnaagctaacctatttgctttgta

SEQ ID NO: 19659 - DNA, 289 bp, Zea mays
  Clone ID: MRT4577_117934C.1
aaaaaaacaatagcttcgcgcgaatgacaagggaccaatatgccgccgggcctcagtcttagtaaaacattctcactccctcgggtggtatctacttgccgaggggcttgaaactctccgaccaccacaacaaaaatgtccgacctctttgtgtccccaccgaatctataaattgccgattggaccacagccccatgacaactgaagatatcttctatcctggcttaatatttacagcctcccggttttctttaaagccctttgtaaccccattagcctttgaccccaa

SEQ ID NO: 19660 - DNA, 1447 bp, Zea mays
  Clone ID: MRT4577_117935C.1
cattgggtacctcgaggccggccgcgaatattccgcggagatgagaaggacgtaggatttttgcgacgtacaggcgtcctccttccgcttccgcacggaaggggaagatactgtcggaatcggcatcttcccctccagtccctcgctctaccaccagcagcaaccgctgtcggaggagggcgtggttgggggaagtgccgcagcgggaggagataaagcgttctccaatcttccaatccccttcggctgccacttgttctagtatctagttagttgtgaactttaaaataggttaaataaatacatgggagtccaagaagattctaggccttctggggccctgggtggcctatacagggtacagtttgtgggccggtcaatatacagtgatgacgaagcagtcaagactagcattatggattcttcaacttgtgaaccacaagaggataatggctccggccggcgtttgctaatctggagattatggcagcaaagacccccatgcttgaagcccatacactgtagcctctcatgcgataaacatgttggtgaaactattgcaaatgttgttacctcacttcctttcattgttcttggactgcaaacaccaagaaagaacttgaatacaacactttatgctaactcattgattggagttggaatagcttctagcttgtatcatacttcacggggagacatcagaaaatatttgagatgggcagactatacaatgattgccacttcaactctatgcttatcaagagcccttcgggatgagaatccaaaatttctgatggcagcatcaacattgctcctaccatttcaacccctgatggtttcagctgtccacactgggataatggaggtttcatttgctaaacgagcatcaatagatccagagctcaagacggcacataacctacacaagatatcgtctctcctgggaggtgcgctattcgtcgctgatgatgtcttcccacaaacttcctacctccatgcagcatggcatttagctgcagcgctgggtgtcggcacatgcaacaagctgcttgagtgacaaaggaggcaagatgcaagacgagtccgtgaaggccttcaaccttgctgctactgctgttatcaacaagctgttgatactgatttatcagcatgtcctcactaaatgcagaatacggtgcagttccattgttttacgttgacccgaacattggaggaatcctcgagacagattaatgcaccagatattagattacctggcatcagtttgttgcctgtatttgttgtatgctactgtattgtttgtgccaacataaactaaatactgtttgagaatcagatgtgtatatatatagatagaaacttcggaacgtcgtttggattttattctgcagaaatcaattgaagtttagcatcatatttataattcttttaaaaaaaaaaaaaaaaa

SEQ ID NO: 19661 - DNA, 775 bp, Zea mays
  unsure (1)..(775): unsure at all n locations
  Clone ID: MRT4577_117936C.1
aatatttatatcttccttcatgttacttgtttctaattcgttcaggcaatagtcctctgtctttttaaattttttggctcgaaattcattggtccaattttgacctcggaaaggtttcgaggccggccgggccgggtaagccaaaaggatattgttttccttctcattctactatgctataactatttctcctctactgttttttaccctacgaactgtgttgctaattttaatctacactacatctacttaaactcaattgttcagtgtcatagctttgctggaagccacatggcatattacttacatgccttcttagagtcttttagttatttcggtaatctgtattataggaatcataattaatgttgttttataacaataaatttatattgttgttttttagtcagaaaaaatgcttgtcatttggtcaattagctagcgacatgatattaagtgttgtagcgtggtcaagggttagctatgtctatgtgccatgtgttaaaagtattaggctacaaaaatccgaaaatgtcttgataaaagcaaaaaatagtaggaccattgaaaatttaaattaagtatcgtttgttacaagtttacccaacttcgagtataagagagcatagttcagcccctcgtctatcacttggtatgtaaggtgaacctggttttgttttttctatagccccgaccaatgtgcctctaagcatattcccaacaggnactttagtgtgttgaaaacgccgagtcagaaatttgcacacatttttga

SEQ ID NO: 19662 - DNA, 775 bp, Zea mays
  Clone ID: MRT4577_117937C.1
agccccactacccaccgccgctctccgagtctcctgaaagttgcaacctctccctctcggcgaatttggggtttctgaggcgcgcgaggtaaaccaaggttttgctcatggctcgtactaagcagaccgctcgtaagtccactggaggaaaggctccaaggaagcagctagccaccaaggctgcccgtaagtctgctcccactactggaggagtgaagaagcctcaccgttaccgccctggaactgttgctcttcgtgagatccgcaagtaccagaagagcacggagctgctcatcaggaagcttccattccagaggcttgttagggagattgcccaggacttcaagactgacctccgcttccagagccatgcggtgctggcccttcaggaggctgcagaggcctacctggtcggtctcttcgaggacaccaacctgtgcgccatccatgccaagcgggtgaccatcatgcccaaggacattcagctggctaggaggatccgtggcgagagggcttaagatgctgtgcttgccttgcctgtgggaatcgctctggcgggcatctgtgtctgcttttgctgctgaacgcttatcatgtgtcgtgaactactaatacttgtcgtgtgtagtaatgtcagtagcgtactctgtgccatactatgttcgtagagctggatcatttgttcgttggtcgtcctaaatcatccacctggtgggtgcttatctgaaccttgcattttatgtctgagaattagtgattgtgtgaaccattatta

SEQ ID NO: 19663 - DNA, 179 bp, Zea mays
  unsure (1)..(179): unsure at all n locations
  Clone ID: MRT4577_117938C.1
ttgttcgctctcggtctctcgcctgtntttngccttggncggnngtttctgcccggtttgggctgcnttcccnnncggcccgtctcgttgtcggcgccttgcggtgcgtctgggttcggtccggtcggttttgtctccctcccggccgttcgtggggggtgtttgtcgccgcccccccg

SEQ ID NO: 19664 - DNA, 255 bp, Zea mays
  Clone ID: MRT4577_117939C.1
cgctccttttccctttcttgctccctccgccgccctgctggctgccgacagtgctgcgcctgcgtgcgagaggagcgcatcaccagcagctcccgaattctccgccattggatcgccaccgccgacgcccttgactagctcgcctcgtatcgtctcgtctcgaccctaatctctctctgtcccaaggatcaggaacgcgcgagccatcggcgcctgagtcctgacgcagaagcccaccgaacatgccgagcaacg

SEQ ID NO: 19665 - DNA, 3017 bp, Zea mays
  Clone ID: MRT4577_11793C.1
tcccctccccagccgtcgaaagtcgaaaccctagccccgcctcaccgccggtggtggtggcagcctcagcaccggacacagcccgccgtacctctcctcgtacgctccctcccggtgtgccgtcgccccctcgatcggtccatcgttcgtcggctcggtagccgccggatcgggatcggccggcgccatgtccaaggccagggtctacaccgacgtcaacgtgctgcgccccaaggagtctgggacttcgaggcgctcaccgttcaatgcttctgtgtaagcagctagaatgtattattctgtaaagaagtcttggtattgctaactcttgctttggactaaaaaggctaggttgttgctgttggattcttggcaatttcaaagcattgatatgtatcaattttaagttccggtgtccagataggtttccgtctgtgtattttgaaggcatgttaattgtttgcaaggaaatgataactcctgtgcatatgccactaaaatgaccacaccaagttactgctgaacaagtcatcaacaaattattaaggaaccttagtgagtttgacttgcctaactgtttttgttctctggatacaggcattagattactgccattcacaaggtattatgcaccgagatgtgaagccccacaatgttatgatagatcatgagcttcggaaactccggctgatagactggggccttgctgaattctatcatcctggcaaggaatataatgtccgtgttgcctccaggtagctgcagatatactagactttcattgttggttcacagttaatgacctttgaattgtggaattctgaagtggtaattagtgaaactataaaatgttttgtcacaatttatatgtttctgcttctgcccttattttggatccaaatttcagttgatctgaactcacatctgtcatttgtggtttgttcatgtagtttgtttattcagcaaccatataaattaagaacattctgataaatagtatttatgttttaactgcactatagccgcctgacgtcacatattaagttgacagaatgaatgaatgcttttctacagtgaatcatatggcttacatcacatgtctctagaacataaatttccatgttttctctctggcagccctctttccctcactattttctttccaaacattttttcaactggaattcaggtacttcaagggtcctgagcttcttgttgacttgcaagattatgattactctctggacatgtggagtctgggctgcatgtttgctggaatgatttttcgtaaggagccatttttttacggtcatgacaaccatgatcaacttgttaagatagccaaggttgacattcagtctatttgttctttgcaatgaactagtcaactagctatgttgtttacatttcccatgtcatgtagccagagatttcatttctgtcaagtgcgatctcattagcttgcagtcagaaacgaacagtttgcatccctctcggaacttatgctctggacaaatttagttttttatctttagtaagagctttgcacatgtactagatgctatgttgttggctacatatgctgttattataccgtgcatgacgtgagaccatttagatctattaaatgcctctctgttagttattgctacatccatttattatcaggtacttggaacagatgggctgaatgtctatttgaacaagtacagaattgagcttgaccctcagctcgaagcccttgttggaaggcatagcaggaaaccctggacaaagtttattaatgcagacaaccaacacctagtgtctcatgaggccatagatttcctcgacaagcttttgcgttatgatcatcaggacaggcttactgcacgtgaagctatgacacacccatacttccaacaagtgagggctgcagagaacagcaggacgcgggcatgagaggccaaagaccaaagactggtgctaaccctggatcagatcatctgctcttggtggagccatgctcttaccagtgacttgcttcagtcgtatgtgatgaatagtggtttgggggtttacttggcaaaaacaaacagtagctatggcgcctgttgtgcccttaaccgcgtcgagacgtgactgaattactcaggtcatcggcttgtgggacgtgattgcgaacgagattattcatgtaagatgtttgccataaaaggttgtcgttggctgattgttttgcttgtattgttgagcttgtaaagaatatccaacatttgtttggacttcaaaaaaaaaaaaaaaaaagcggcctatgatcatcaggacaggcttactgcacgtgaagctatgacacacccatacttccaacaagtgagggctgcagagaacagcaggacgcgggcatgagaggccaaagaccaaagaccaaagaccaaagactggcgctaaccctggatcagatcatctgctcttggtggagccatgctcttaccagtgacttgcttcagtcgtatgtgatgaatagtggtttgggggtttacttggcaaaaacaaacagtagctatggcgcctgttgtgcccttaaccgcgtcgagacgtgactgaattactcaggtcatcggcttgtgatcatcaccccagaccgagattattcatgtaagatgtttgtcataaaaggttgtcgttggctgattgttctgcttgtattgttgagcttgtaaagaatatccaacatttgtttggaagtcaggtgcctaccgtggttcagattatctgctcgtggtcgagccatgctctaaccagtgatgaatagtggtttgggggtttacttggcaaaagcgaacagtagctatggcgcctgttgtacccttaaccgcgtcaagatgtgactgaattactcaggtcatcggcttgtggtacgtgattgcgaacgagattattcatgtaagatgtttgtcataaaaggtcgtcgttggctgattgtgctgtttgtattgttgagctagtaaagaatatccaaaatttgtttggacttc

SEQ ID NO: 19666 - DNA, 695 bp, Zea mays
  unsure (1)..(695): unsure at all n locations
  Clone ID: MRT4577_117940C.1
ccgggncgacccagcgnccgtttttgcgtgggcggacgcgtgggcgggcgcgtccggtcaaagagaacgatccggtcgaagagcccgaggaattcgcaggagaagcccctgagcagcagtcgtttggtggagattgatgtaggtgacatgcttggtggccatgttgatgacatggaagcagattggacaaaacctattgtaagcataagtttgggctgcaaatgcatctttcttttgggaggaaagactcgagatgaagttccaacagcaatgttcctgcgcagcggtgatatagttttgatggctggggaagcacgagaacgcttccatggtgtaccgcggatcttcacagagagtgaccagcaagaaatccctgcactgatttcacaactatctagtggagatgacgtctttatcttggagtatatcaagaattctaggataaatatcaacatcagacaggtctactgaagatcagattggttgcagacttacacatgaaagtttggtgggaaatgctgctttcttgctgcagtcaggtccattatcgtagtatatagctcgattaggggcatctggaatagcaactgaggacctgaagggttggaaggtgctacaatagcagtgaaactaaccatatgtgtaacttccattggatgagagtttttttttttaaaaaaatttgataacctggc

SEQ ID NO: 19667 - DNA, 174 bp, Zea mays
  Clone ID: MRT4577_117941C.1
ataactccttttcaacctctttttagcacttttacctaccagccaaattcggggttcttaggtgaccatttctagtgccatcatcactcacacgccaacctccctacttataataatcacactaagtactatatcaccttaatcttgaccattccatccttcacttcatgcacc

SEQ ID NO: 19668 - DNA, 361 bp, Zea mays
  unsure (1)..(361): unsure at all n locations
  Clone ID: MRT4577_117942C.1
aatctttttttttagaactgaatgtacctnggaaggtttttattaacttatggtgtcgatcccaaaaaacaaaaacaaaaacaaacggttcaaaacagacgtattgttttacagttacaccaaatatttcctggtactttcagtgcaccaacaaggaccatacgcatattcagaagacaaaattcctataattccacccccctacgtggtagcagatctcctatacacatttcacgggctagcgactagttccttgggccgacacatttatttttttacgcaaagaaggccctctgattcccttggtgtagggaattcgcacctcccactgaaaggacttggccatgttatacagttcatt

SEQ ID NO: 19669 - DNA, 277 bp, Zea mays
  Clone ID: MRT4577_117943C.1
gtggctccatcctggcctcactgtccaccttccagcagatctggtcctcaagcacgagtctgtcgagtcaggcccctccattctccaccgctaatgcttctcgatggactgagcaggtgccaggcatctgctgcatcagctgattctgacctatcgccctgccctggcaaagtacacacctcatgctagctcatgaaactggaataagcctttgaacagcaatttgtccttgacgcttttatctgatatcagcactggctcgtagaacttgttgctg

SEQ ID NO: 19670 - DNA, 577 bp, Zea mays
  Clone ID: MRT4577_117944C.1
actcaaacaagcccaaagataacttgaacgtgcctataccaaaatagcaacagggcaccaacgaaaacaagctaagcacaaggggtttctatgtacaaggaggggggtgatatatccaaaggggtttgaatgcactaaaccggataataggggcacacctccataaaatatttaaagggggttaaaagcactaaacctaataataaaggcacccctccctaaaaaatttagagggggttaaaaacactaaaccaaataaaaaaggcaccccacctaggagcattcgggggaaacaaatataattttgaacccaacaaagttacaagacccgcctttttttccgacttcttgaattcagggtgccaacaccggaccaaaggtggaggaccgattttgaattttgaaaaacaaaaggactttcacaaaaaaaataaatgcttgcaacaccaatcttggtccgccaaaaaaaaaatcttttgcccaaaaaaaggccagcttggctctgcagaggatccccatccgaagaggcacactttactgaatgggaaacgcccaaaagttccaaccaagccctttc

SEQ ID NO: 19671 - DNA, 757 bp, Zea mays
  Clone ID: MRT4577_117945C.1
acacagggtgcaaaacgttagccaaatggtaggaagggaaaccctacaaagtaaccaaccaagagagctaagactacgagtctgcaacttaaagctgcttcttccttctctgagattttgtgctagcttttctccaaatttagttagtctttgataagagcagagccagtgcttagtgacccaccttgtttggccccaaagaaatatatggtagtcccacactgagtggaagaaagggttcgttttagctccagtaatcagcagaaaccagaatcttttagctacttcctaccgagtgaagtttgaccatacagattaaccgttaggttttgtagctggtaacttcttgtaactagaagcaggtgagcactgcttgagatatacagcatctaaccagtagtttgttgtactgtgtaaacatatggatgccatcagaagtgatgacatagagaagcaagatgaagttatgttacctggattcaggtttcatccaacagatgaagagcttgtcaggttttaccttaaaagaaaaatccagcagaagtctctccccattgagctcatcaggcagctagacatctacaaatatgatccatgggatctcccaaaactggcgagtactggagagaaggaatggtatttctactgtccaagggataggaagtatcggaacagcacaagaccaaacagggtaactggagcaggcttctggaaggctactggaactgacaggccaatctactcttctgatgggagc

SEQ ID NO: 19672 - DNA, 707 bp, Zea mays
  Clone ID: MRT4577_117946C.1
cattgggtacctcgaggccggccgggatttctatccctttcttactcgcgggtctaccacattactatcctctcgcggacagaccgagcaagcggcagagatggctcgtacccttcccattgctcgccaatccacgataggtgaggctcccatcaagaagattgccaccgatgctgcccgcaagtctgcccccaccactgcgcggagaagaagaaggctcaccgctaccgtcctgccaactgatgcccatccgtgtacatccgcaccgtatcaaagagaacactgaactgctgatcctgaaactgcccttccagacgttcgtcaggaaaattgcacaagacttcaagactgatttgcgttgccagagccatgcggtgcttgccctcgcaggaggctgctgaagtataccttgatggactggttgaaggtagccaaccgtgctgacgactatccactgctaaggcgcgtgaccatcatgccaaacgacattcagttggaaaggaggatccgaggcgagaggctgctagtctccgcctcaaacatcgtgaccaaaacatgaagtgctgcggatattgataatctggtgcctgtgaagacatatgaatagttttgttttgtggatcacaagattctcttctgctactgatgctgctacctgtgcgtgggtgattgctcaggccgaatacttaagctagctatgcactgac

SEQ ID NO: 19673 - DNA, 628 bp, Zea mays
  unsure (1)..(628): unsure at all n locations
  Clone ID: MRT4577_117947C.1
ccggccgggcgcgcattgcactagctcccccaggctccaccggagccgccgccgtttctgggtctcttgacggcgagcagcgactcgtccggtcgtccctcagcactgggcttggcggacgcgggacaagacacaggatgagggctgtggtgcagcgcgtcctctcggccagtgtcgaggtcgaggggcgaatagtgtctgcgatcggccctggactcctcgtcctcgtcggcgtccacgaggcggacacggactccgacgccaactacatgtataacactcttctcctttcattcgcctcccacttcctccagttactggtttatactgctagccatcgtctcaattattgtctgtttaggtatgactatatctttatagctcatcagaatctgcagtggggatgtgttcaccggatatcagttagcagtgtactgtgttgattcagtaaccagtcatttgagctgacggagtgattgcagtgcanaatgtaatgatgatccttgataaatgaatgatagcattagtcacttgtactgctaacgtaatctgttgtgtggnatgttttttgtggttagtaccacatgcggcatgcattcggtgccagctttcgtattagaattctttg

SEQ ID NO: 19674 - DNA, 920 bp, Zea mays
  unsure (1)..(920): unsure at all n locations
  Clone ID: MRT4577_117948C.1
gagtcgtgatcgatggaagcatccctcgattaatngtagccctacaagcatagtgtatgatgtacaatataatctgctccttgggattgtttggactctggattcactctcgtattcatttcaataaagccaaacaagaccttaggaaggtcaaaatagccaatagataagtttcagccttagttactaactagcgttttcctttaaattatacccttattcgttttcatacagatctcctggacgaataaacatacaaaagctacatcaaaatcaaacggctattttgttctccttttgctcattacgagggctctccagttggctgttcgtgtcaggagacgtatacgctttgtccacatttctgaacccaagctctgacatgtcttgcttcgccatcaagtttctctccattcgacattccagatacttctttgagaactgtcgacatttttcagattgaaaccctgtagatttcaggcaggcaagatagtccttcttctccaagtcgcactcatgtaagtggtccaatgggaatacacctttttcagggggtacaggcctcagccccctatttccaccaaaagcaccaccggcactcatttccgaaaaagttcagacaaatgccttcaggaataaagtcggatctctaacagttgcgcccacaatgctcagcacaagcccgagcccgagctcctgcggacctggccgctggtgccttgcccacaccgcaacggagatgccggcacgccgctcggcgcttacggctccggcctcgaggtcaatgcaacagcataatcaggtcagcgatgccagtagcattcacacagttcatttggcaagcactttatactcggtaaatgcagtgtaaacccacgcgtccgcccacgcgtccgcggacgcgtgggcggacgcgtggg

SEQ ID NO: 19675 - DNA, 264 bp, Zea mays
  Clone ID: MRT4577_117949C.1
caacagaaaggaatttgccgccgggcatccaatatcgtgcggatagaagcctgtcctttcatttgaccacgcagactaggcgcgcaccgcgctaggtgactgggtccccgccaccacgggtcacaccccgcaggaccgattggaacgggggccggtagggtctccggtccgggaccagcgggcacatgcgggctcaccccggagccacgtgggggagccactcaagggggagaagcatctgcgggcccccgggaggaaactccc

SEQ ID NO: 19676 - DNA, 251 bp, Zea mays
  Clone ID: MRT4577_11794C.1
cgggtcgtcctgtgcctcatctggatggtcacctttgcatttgtcagggagaaaatgttgtagagcccacctcgagctgtggaaggaataggatacactgctgtacatgtttgtttgttaatcagttgtgtcgtgctgtacatatacgatcgagtgagtttctcatatgcgagatgagatgacgagtacatgttttttatgtcggttgtacaggagtggattcaaagatgaaaatgggattggagcaattc

SEQ ID NO: 19677 - DNA, 571 bp, Zea mays
  Clone ID: MRT4577_117950C.1
gaagcagcgtccgtggtcaatttatagcctaccggccgaaatcggatgagaaccgcggacatttgattgcgcaggtgagctcgccgcgcggcggaacctggggatggcacggtggccgccgttcaaccggggcctgccacctcagggaggctttgacacgtcgccggtaacctttgccgtggctgccgacgtcttacccgagccacggcgacgtccttatcgccggcgagccaatccttatccacggcgatgttactgaaaaccgatgaacagtgcgcccaattcagtaaatagcttgtctgacagaccaagttgaagcttgattttctcttaatttcaaatggcaacataagtcaagctctgcaacaaacctgtagagcattataccatctataatgttgccatatgacgctgccacaaaaacctattggagcatgcttaaatttaggcttaaagttgatgtcagttcactgtcagcctgattttcagacttaatcagcctgacagccaaacttcaggcttggttttctctaatttcttcttaacaactaagctcacaaccttaagcaaa

SEQ ID NO: 19678 - DNA, 223 bp, Zea mays
  Clone ID: MRT4577_117951C.1
tttttattttttttttttaaaaaaaaaaaaaaattgtggattttataaaaaagcccgttgaaaaaaacaccttccccaacacactacatactttccaaaaacctttacaatcaatatccctacacaaacacccatatttcaatacccaacacacaactatctatgcccccacataccacacttcttcaacctacttcttccctacctaatttccatccaattt

SEQ ID NO: 19679 - DNA, 334 bp, Zea mays
  Clone ID: MRT4577_117952C.1
gtgtcaaacagggaagagaatggattgtgctttgagggtggacccagtgccggtaatgagcagaacagtgatgcatgtaagtgaccggttcatgccatgccagttagtcataattgttccagcaatagccaaggactagagcttggcagtgtacttctagtgctgcgaacagcctctttgattgaatccaacctacatggttattgagcaaaggcgactaggacacactactttttgtaaatcgctggtggatgatgaattccattttcaaagtctgggaggcatccaggcttgcttccaagtgtggggggctgccaaactcctgatcatcata

SEQ ID NO: 19680 - DNA, 294 bp, Zea mays
  Clone ID: MRT4577_117953C.1
ctttgatgagatcaccactaacgccagtgttcactccaataagtattgtcacttagaggtgccaccacattaaaattcagcgtactaccacgcctgccttgactctcacaactgcaaggggttggtgaacattctgtagtactccccttcaatcgtacaaggtatccatggttccttaaccaaacttccctctatcatagctgcttgacaccagagtctcaatttaacgtatgctacttaattgactccttattttatgcctcttacttatattcttgttacttaattttttgc

SEQ ID NO: 19681 - DNA, 112 bp, Zea mays
  Clone ID: MRT4577_117954C.1
cgcagcaatatggcttgaatcctcatgaagtcaggggtgtgctctccatttttcccgaaactcttctacagcagtatggcttgaatccttatcaatattgatgtttgaactt

SEQ ID NO: 19682 - DNA, 351 bp, Zea mays
  Clone ID: MRT4577_117955C.1
cacacgcctatcttacatactgacacctctctagccaagcatcatactggcattcttcgagcactttaccctttcagcaagattgtctatcctgatcaagacagcaataacccaaatcatgccgatgacaacgaccattgacacgcaaattcctagattcccgaaactcacactgcctttgattctgttcctgctcagcttacacactacgtacaccttctccaaacgctcttacattatccattacacctaactcatgtttattaaacagcacctttttcaacaacagccttatcacaatccattctatcacgaactcaaaacttattactatatatactattattatcc

SEQ ID NO: 19683 - DNA, 288 bp, Zea mays
  Clone ID: MRT4577_117956C.1
gtaataaaatcaattttttttctttttcattttatttttttttaattccttctttttttaaatttacatgtagggtattggttacatataaaatgggtgcaaagtgtttggagacaaaaaaacaggaccatggggacggacctgcaaagctgcggtaagtttcaccatagctcttccaagaccaaaacaccacagggcaggccgggaccacaaatagtattgaggttcttggttaaccgaggggggggagcacttggttttaactggcaaaaccttgacaactttgcg

SEQ ID NO: 19684 - DNA, 279 bp, Zea mays
  Clone ID: MRT4577_117957C.1
ttaaatccttctatattattcccacctcaatttttatttcttaacttacctcttattcatctattgtcaattctctctaattatttgacgttaaccttaaacatatcaattatatatcttcaatccttctaattcctttttattcctacattctttatttcttttccttatttttctttacaacatttttctttcacatttaccatttttcctttcacattataattcatttccattttaccataatccatcctttccttattctcattacacacttta

SEQ ID NO: 19685 - DNA, 609 bp, Zea mays
  Clone ID: MRT4577_117958C.1
ttttatctaaaggatttaagtatttttataattatgagtacaacagaacttgcattatctcattttagtcctttgttaaggttggtcaatgcctgcctttcaatcaaacacaacagttttgtttttgttgtctagaattgctcctattttgctagattgtcagcttcttgcactgaactcatattactttttaactatctgccctccttataaatgatatacgctattatctttctttaggatatatacattttattatagcatgtcttctgtgtctgaatttgtctctatgcaaagattcttgaagtacttaaccactgcgtccctaacaacactttaccaacaacttttgtaacatctgtttctgcctaactactttgcactacaggtctgaaagattttgaattgcagttaagaagtttaaaatctgattctacttttgatctagtatgcaaggttagttctttattcaatcatattgaaactcaagacttattttggtacaatgagtgctccaaaaattctctatgccttcttgtaggttgttcatgtccatgaagataacgacaaattgatattttatgtttgggatggaactgatacccctgc

SEQ ID NO: 19686 - DNA, 472 bp, Zea mays
  Clone ID: MRT4577_117959C.1
cgcccggttggtttggtggttttttccccaacccaattttttttggggggggggggaaaaaccaggaacccaaacatttgggggttttggctggggaaaaccaggccccccccaccccccctggggggaaaatcgaaaaaaggataatgggaagggcattggccgcggttacatttttaaaaaaaaaattcccgcttgggggttgggggtttccccaaaactttaaaaaaaacgttctttttaaaagttaccccctcaccggcggggaaaccccctttgggccgccctgggattgtaaaaaaaggtttcctgggccttgttttttgcccgggggaagtttttgggcccggggggggggcccaagtctttttggtttttttgggggggaaccggaaaaaagctagcgccctgggtttttttcctgctttccccaacggattattgggggtaaaggcccttcccaaaaaggggg

SEQ ID NO: 19687 - DNA, 1956 bp, Zea mays
  Clone ID: MRT4577_11795C.1
cattggcgtcctcgatgcgggccggggcctgctggccccgcgcaccgcgacgcttccgctagcgccttcttcgctgccgcggggaacgatgtgttcggcactaggggggttgtcggcgcacacatcggctcgtgcggcgagattgatagtaactttgcgcagccggagtggttttcaggcctcttcgacgacgcatccatcccgcacgagccggtgttcccgggcgcgacggcgggcggcgcgccgcccatcatgacgagctttgcgctggcggccggcgcgctggtgttgccggacgaaatggaggacccactgctgttccacagctccgcctccatctcggtgctgttgcacggcagttctcgcagcgccggcgccagcgccaccttaccttcgttctcttcctcctcttcgtcaatcgcttcctcggagtccttcttcgggagtgggagtgggagagaaagagggcggagtgggacggcacaggcaggagcaagcccggcgccggagtggttgctccatttccgggggcgcggcctgcacgatcgctcccgtgcgtcagcgagcactagcgccgcagcaggcgccggcggatctagagaggacatcctcgtgccaacgcccatgtactcctccgggtcggcccactcggaccccgagagcatcgccgagtccagcccgcacccggcgccgcccatgaagaagaagaagaaggccaagaagcctgcgccccccgcgccagctgcctcttctgacgacaacgatggcgacgccgactacgaggaaggtggcgagctagcggagccgcagggcggcgccgtcaggaggtgcacgcattgccagatcgagaagacgccgcagtggcgcgcggggccgctggggcccaagacgctctgcaacgcctgcggcgtgcgctacaagtccggtcgtctgttcccggagtaccgccccgcggcgagccccaccttcgtgccgtccatccactccaactcgcacaagagggtggtggagatgcgccagaaggctgtccggagcggcgacccgtcgtgcgaccttctccatttcatccgccgccgggattgacgtcccggcacggcgtcgccggactgtcggtcggtctcgtcccccatatagctatatatgtatgcatgcatggttgcttcatcagtcgtcgtcgcccatcatggtcatcatcaccgcttcaccggtcaccgccatggatcgtctcccgcccatcatcacatgcattggtttgtgtcagcatccatccaatcccaatccatcgccgggcgtcccggcgttgttagttcattaggtcttttttttcctcatcgggggctagtgttattttacctttgatccttttgtctattggttaattggttccccctggatgttttttgtttgtatagagagtgaaaaagagagaagaaatagatgagtcagagtggttgctgcattgcaattgcagttgcttgcaagctaggtaggtgagaaggagagctaaaccagcagcagagggagacagatttagagaggaaactttgcagctagtcagtcagtcacttagaaaaaaaaacaaggagagtgcttgaagcaggtgaaagggcaatttgttggtttgctaattagaagagaggttctgtcaggtcaggtcaggtagttgctatcattattcatgaggattttcaaacttaatagggggacagccatcatccatcatagtttgtatttggaacttggtatactgaactctgaaaattctttttgcagttcatctatgcttagggattgataagtgttgtctggtttcttctatattgatagtgctaccttttagccaataattagttatgtatgatttgctcttggtcttgctctgcctgctacaggcattcctacgaaaaaaaaaaaaaaaaaaaaaaaaaaaaagtactctgcgttgttaccactgct

SEQ ID NO: 19688 - DNA, 411 bp, Zea mays
  Clone ID: MRT4577_117960C.1
ctattctattgtattcccttcagaatcatcagacctatagatcggtatggtctcgggagcttgactacgagggataagaggtagaggttctgagtgctcccaatatagtatgtcatgacgcatgtcttgagctgtactacccattgcttagagagccagattagttgctgggaatagctggacctataaagaactgcaaaatgtgattgagaggttccaaactaccgttgatacatggccttataggaaacctgtggataatcgtgcacttgctctcagatcaagaaaggagaacatgtccagcatactgattgagccgctagttgtttggaaacatcactttcgctgtctactttctagtgatcaacatgcagctactttacaccttactatccatacttactagaaatc

SEQ ID NO: 19689 - DNA, 307 bp, Zea mays
  unsure (1)..(307): unsure at all n locations
  Clone ID: MRT4577_117961C.1
ccgctccagggacaaaggggcccccgcccccggcccctcnaaacaggtcagcgaaacacggaggggggggggggaagaccccccgaagggacccgactaccccccccaaaaaacaacctaaaaagggcggcgctcccaaacccaaactccttaaaggcccgttaaccaaaaaaggaagggccctaaaaaaggccccaaaccgaagggcccaaacccttttaaagacacgcgagaaagggcccacccgcccaaacccaaaaaacccaagccccggtggggtcttctgggcccctagcccgacaaaccc

SEQ ID NO: 19690 - DNA, 158 bp, Zea mays
  Clone ID: MRT4577_117962C.1
cttcccgtgcttcgcgaccgcgtgagtgataagaacagatggccagtgaaggatggacggaccgtgctcatcggcagtcgacctcgtgcacgactctactcgttgcgtcgcgcgtgtggcatgcacgtatcgctgctcgcagatcattcgccgaacga

SEQ ID NO: 19691 - DNA, 404 bp, Zea mays
  Clone ID: MRT4577_117963C.1
atccgaataaatatctggatccatccctacttttgagtaggtttaccaaaacgcatcacttgtaatttctcggaagcacctgtaattctaaaacacgcagacaactttacagcaaacctcaccaatttggatcaaagacaattccagattcacacaattaggtgctaatttggtaaacactactgtggggaagttcatacatagttgacatcttgttcataaatcaagacatcaagttgatacataggtggacaaacagttaggtgctaattttttccttcttactctgtgtcaatttcttggtagtccttttattatttgttggagtactctttcctggagatgcatcaccagtgggctgcccaagcaacattgcgagctgtctggcacttgagattccagtc

SEQ ID NO: 19692 - DNA, 343 bp, Zea mays
  Clone ID: MRT4577_117964C.1
gatggctccctcgggtgtgcgagtggtggcgatcccaggggcgagaggcggtggcgccccgaggtgggcgatcgacgacgatgctcccgaggtgggtgggaaagcggcggcggcactccccttagaccgagtgatggcgtcgctcccgaggcagacgggcaagtggtgagaacgctcccgaagcgggcgagcggtggcagcgcaccctaagcgtggaggcgacggcggttgcgtgaggtgaggtaagcttcggcagcagatgtggcggccacaagagacgcgggtggctccaggagtcgcgcgaggcatggtcaattttgccatggcggcctcaagaggcatg

SEQ ID NO: 19693 - DNA, 377 bp, Zea mays
  unsure (1)..(377): unsure at all n locations
  Clone ID: MRT4577_117965C.1
caatttgcatttccgtttacatgcataatgcttgggttgtacgtaacaaaccatgtacctggcatagtgaaggggattgaccaatcacagtgcantatcacttgatgggacacacgatcatttggctcatgttggtgtatgtcggtatttgctgaaagttgcagcctcattagagttgaattgtactcattgtcattggttaccatgggcctattcatttaaaccctcagatagatgccgttttgagctacaatctgctactgctgctgtgaggattgaaatctggttaaaactattaaagctagcaaaagtgatgtatggcttttgacatgatatatcatgtaacctggtttttctaggatgccctcctgtgaatg

SEQ ID NO: 19694 - DNA, 282 bp, Zea mays
  Clone ID: MRT4577_117966C.1
gccattccacattggtccatcggcagcgagcgaacaggctaaaaggagaggcctagaagcgctttggcgggtagagtggtgcaccgcgtagcgggacgacatggctgacacggcgtactccgaggcgctcctcgactgcgcacgcctgccggccgtcctgctgcctcggcgcagcagcgtgtgccaccaccagcttcaccttcaagacgcaccgaggctctaccttgcaccgtgccacggccgcttacgaggacacgtcggccttcgacggcgacgagctca

SEQ ID NO: 19695 - DNA, 1231 bp, Zea mays
  Clone ID: MRT4577_117967C.1
ctcgaggccggccgggccgggagtataatctgcttctacctctcgatcgcttcccagttgcctccgctcaccactagcttctctctgccagagtgcaccaggtgctctctccctcgcacagaacacacacacagtaacaacactccccggagtttcaccagctagctagcgcccggtttaagcaggcattaaaaacctatccttgcaggccctcctccgtgctctcctcacgcacctctcgggccgctcgcacgcccgccactcgaggacgtccacgcgccccgcgcctacgtaggcgggccgagctgcgagagggaccgacgcagggaggacgaggaggaaacgatccaggggctgtagcttccgagcgcggctggtgtctccgagcaagctactgccgtcgtcgccgccggaaatatgtcgtcggggcgacgtggcaggatcagcgacgacgagatcaacgagctcatctccaagctccaggcgctcctcccggagtcctcacgccgccggaacgcgagccggtcgtcggcgtcgaagcttctcaaggagacgtgcgcctacatcaagagcctgcaccgggaggtggacgacctctcggaacggctgtcggggctcatgtcgaccatggacaacgacagcccccaggccgagatcatccggagcctcctccggtgacccggccatgccgcccaggcgcgcgcgcggggggctggccctcttcgattctgcctgccatctagtagctagctgcagcagccagcgcagctgcactgaagacgacgacgacaacgcgacgaccttaattatgttcctttgttcttcttccggtgtgtgtgagtgtgtgtgtttccgtgtttaattaatttgagagcgaggagctggatggagccttcgttcagaagaggatgaccaagagggctctcgatcctctcgatcgtgtaccacgccttggggttagtagagatatatatggacttgtattaaccggcgaggtaccacgtactggtagcttgtagttgcagttgcagtagactactatagcagtttctacgttgcagacgtgtcctaagagttgttgttttgtagatttgcacgctgctcttgtctctgcccttagcttgccaatgggcggacaagcagcttaacgtacgacgactactctggagacaaatatatatactatcatgtgcttttccggtcaaaaaaaaaaaaaagccagtaaaaaaaa

SEQ ID NO: 19696 - DNA, 1459 bp, Zea mays
  Clone ID: MRT4577_117968C.1
cccaccctcatttgacgctgatgataaaaaggccctcgcggtcgcaccacatacaggcaaccagcctcttgatcacttgatcctcctgcacaccagagtaccagacaccactgcgcatcagtgcaaaagaggtagctaccctatctgccatggctcaagagctccacgaaacgtcctcttgctctgccaccaccacctcgtcgtgcaccacatcctgctgctcgtccactgtcacagactcgtcctcttcgcccccgtcaccggcggcggccaatgccgcgcccgcgacacggaagcggcaggcgttggaggccgaggccgaggccgaggcgggcggtgaggaggaggaggaggaggaggaaggctgtgctggtaataaggcggcgccggccaagaagcgaccgcggggcagcgaggggaagcacccgacgttccgcggcgtgcggatgcgggcgtggggcaagtgggtgtcggagatccgcgagccgcgcaagaagtcgcgcatatggctcggcacgttccccaccgccgagatggccgcgcgcgcccacgacgtcgcggcgctcgccatcaagggccgcgccgcgcacctcaacttcccggacctcgccggcgcgctcccgcgcgccgcgtccgcggcgcccaaggacgtccaggcagccgccgcattggccgctgcgttcacgtcgccgtcatcggagcccggcgccggcgcgcacgaggagcccgctgccaaggacggcgccgcgcccgaggaggcagccgccgacgcacaggcaccagtaccagtagcactaccaccgccggcggcctctcggccagggacgccgtcgagcggcgtggaggacgagcggcagctgttcgacctgccggacctgctcctcgacatccgggacgggttcgggcgcttcccgccgatgtgggccccgctcactgacgtggaggaggtggtcaatgcggagctgcgcctcgaggagccgctgctttgggagtagcggtcagagatgctcgttgcctgcattgcaaacgaggtctaaacaatagtagcagtggtatcccatttcttcttcgttttgcttctcgccctctcctttttttctctctttcttgcttactttggggggaaaacagctagttctttttttcttcttcttcttcttcttttattaaattgagttttaataagtataaacatatataaacgagagagagatataagctgtgtacttaaaagtgtaagacgagtacctatcagttcattattacgtatctactagtggtaccagtagtgatcatgttgtcccggccgtgtgtgaattccagcggtagttgttgaccttgctagatttttatagttgcttgtgttgtgtgctgtaccaaaattccccagggaaaaagggcaggaagcaaacgaatgtaacgggaacacaagcagcatctaatctctattactgctgac

SEQ ID NO: 19697 - DNA, 223 bp, Zea mays
  unsure (1)..(223): unsure at all n locations
  Clone ID: MRT4577_117969C.1
ccacacgccagccagccatcgtgacactggtgatctctgcactctgcttagctgcgagcttcagtgccttcgttgtttggtccacggggggcacacacacacaccantacgtcacagatcgactgaaccaatggacggcgagaagaaacaggaactatctgaggagacaaaaaaggaaagaggaaaaagaagaaggaaaaaaaaaaaaagggtggagaggggg

SEQ ID NO: 19698 - DNA, 510 bp, Zea mays
  Clone ID: MRT4577_11796C.1
ctaccagatggaagaaaaagaaagcctatccagaaaatgggcaccccagcacgatcctgtacttgttatagaaaattcaggtttacaagatgctggtatttcacaaattatgccaagtgatgagctaccacaggtttctggtgagactgaaccatctcagagcacaaatgaaggcaacacggatccatataaatctcagttcacaatactagaggagcactatgctgtttcggaagaaggaaatataaaatgtattctggaacaatttgacgtgacagaaattactagcagatcaggtggtgagtttcgtcaaagaagtgcgtcagcagctgattcacatacaaatgcactggtactagagaatactcatcatggtgcttcagaagatgcagaacagaaagataattgtggggatatccgtgtttcacaagtaggtgctggatccaaacgagtggtgaagttgaagattatactaagaaaattgaacccactggtgacatgggagaacat

SEQ ID NO: 19699 - DNA, 803 bp, Zea mays
  Clone ID: MRT4577_117970C.1
aggccggccgggccgggaacagatccgccatacgcccatcccatcccctctcctcactcagctctcctcgcccaaaatctccgccgtctgcagttccggttgcgagtccacacagctcatcacgcttccttcacaaatcgaacgcagccgccagccggatgtcgattgcggcggtcagatcctcgtccccgggcccgtcgccgaggccgtgctgcggcctcaggaggagcgctgattccagccccttcaggcccgccgtgtccccactcggtaaggcgtcttccttccgttgccgcggctcgtggcttatttcctctttatcgctggattacttccctacttagacgcgatctgccgatttctctcgtatcccataaagctccgtgtctcgatctcttattcttacttttggatttggacgtccgtttttcaagaaatcttggtctgccgattccttacatattttttcggcgattcacttcgcagattcgccgcagaggagctcctccgtctgcaagaacagcggccgcgcctcgccgcggacctggggcgcggagaaggagaacgaccggcgcgacgcggcgccggccgcgagcgcgaggacgcacaaggtgcgctccagcggcggcggcggcggcggcgccaaaagcttcatggcgcccactatctcggcctcctccaaggccgtcgcgccggctttcacgccaagaaagaaggtactcggcgagcgcaacaacgatgccgtcccttcgtcgccagtggaccttgcgcacagcagtaagcccagggctgcgcatccgctg

SEQ ID NO: 19700 - DNA, 496 bp, Zea mays
  Clone ID: MRT4577_117971C.1
ggcacattcaactaggatatgcattgctcagcataactttgtttattattagacatatgttacacgggccgaacaaacaagaacacgctagggaccataaatctttctcaaacgggaaaacaatgaggcccccctggctgaatcccaaaccacggaagcgtcctttcacgccccccaaacaaataaccggggggggcccccctgctggagtggaaaaaaaaccggccccctttcttggcccctccaaaaaattgacgggggaaaacccccccggggggccaccttaaaaacccactgggggagccggccttccccggggcaagaaacgggaaacccccgcttcggcccccccttttttaaacccccaggcggcccacgcttgttggcgttaattacagggcttccccccggaagttacccccttattactttcacgctctgccatgggagggcccgcgccttaaaaaacatcacctcgatcgtttttttcataacc

SEQ ID NO: 19701 - DNA, 473 bp, Zea mays
  Clone ID: MRT4577_117972C.1
agcgacgagggggaaatgtgttacgtaagtatctgttcttcgatgcgttacaacctctcgttcatttatctctcttatactcccgtgacaacggtccagtccaatcccctggcacgatcactcggacccattaactcgaacgttggtaccctctgacttctcctgttaacgcccctgttcacatccctagttctctttttcaggtgtcgttgtcacatgcgttgcctgctttggctggcagccctccggctgtcacagggtgccctcgccatcgccgccttgctttccggcgatccactgcgctggctcacgtctgacaaaggcgcgttggggcaacgggtcgtcacacccatgtagtggtcgatcgccggcgacggcgagaggaaaacggatgcatcaaccgaaacgcgaggagcgcccccgtccacgcggcaagcttcctcatggtgggctcatactccctgtcctcctcg

SEQ ID NO: 19702 - DNA, 815 bp, Zea mays
  Clone ID: MRT4577_117973C.1
atattccagggcgcacaccgcacaggctggcactctcctcccccgacgacgcgcgccgagtcgacacgacaaggagaaggagaagaagaagaaggacgccgtccaggtcgtcctgccaccgcggggcttcatgattctggacgtgctcagcctcatgggcgcctacggcgccggcaccttccgggacaagagctccaccgtctacttcgcggtgcttgtggccaccgtcttcctctacatcgtcgtcgtcaagttgctggactggtggtcaggcaagcactccgactcatccggctccggcgttttgtcccagaacgagaaggccctcaaggaactgaaagagaaagaccaagaacggctccgcaagatcctgatgctcctggcgactttcgctgcgagcatcacctatgttgccgggctgaacgctccgggtggcttctgggacagcaccggcggcagccaccgcccgggcgatgcgattctcaacgaccaccacaacctgcgcatgagggtgtttttacactgcaacaccacggcgttcgtggcgtccctgctcatcaccatgctgctcattgtcgacagcaagaagctccctgctcgatctttcgtgctctacgtgtgcatcgtcgtcgcgcttgtcggcctcgtcggcgcatatgcggctggcagctgcagggacactggtaccaccgccatagtggtcagcctggccggcgtcgtgctggcattggcatgcatcctactccgcactttaccgtcagaatccttgtcttgttggtcctgtagaacaagaaaactgatgcaactcagcacag

SEQ ID NO: 19703 - DNA, 323 bp, Zea mays
  Clone ID: MRT4577_117974C.1
ccctttcaatggcgctacggaggtcaccgcagtcagtgtccgctgtctagtcccgcacgtccgccacggcctccgtaacgaccaccggatccactacatcctcgactacgtccgggtccacggacggatgcaccggcactatctcgcggggccctaggagggccccaaggagatcttacgggacatctttggggtcgtaataggcctcctctgtggagcgctcagcggtgctctcagccacgttgtctggtacatggtcaggtgcgtggttgccgtatctgatgacgactagctgtacgacgacgtgtacgacgattacgaca

SEQ ID NO: 19704 - DNA, 1822 bp, Zea mays
  Clone ID: MRT4577_117975C.1
gtgggatcctcgaggccggccggggccttcgacttggtgggatgtgattctccaccacctccgagcttgcaagaggactccacctctttcttctcgcatgcctccttctctttccaaacacaaagccgcagcaaagaaagtgcaaattataaaggaagatcagaattcaaagcagccgaaaagctgactagctagaagagtaaagagagagaagtatatctcagcaagacctccatggtcttcccttcaccttcagtgcaggtctacctagatccacatccacctaattggaataaccagcagcagcaaggtcagcagccgagggcgaatgggggagctgatgcaccgttgctgcccctgggtccggcggcagctacatcggcggctccggagcaaggtgggttgcctagaagctcatcaatggctaatgccgccgtggctgcgcacgcgaggcccaactcaatggcggagcgcgcgcggctggcgcggatgccgcatccggagccagcgctcaagtgcccgcgttgcgaatccaccaacaccaagttctgctactacaacaactactccctctcccagccccgccacttctgcaagacgtgccgccgctactggacgcgcggcggatcccttcgcaacgtccccgtaggtggaggctgccgtcgcaacaagcgttcgtccaagtcctcctccgccgggtcttcctcctccaaagatgtctccctcaggaaggctactgggtggtccatcagctacaccgtccaccaccccaggcactaccggtgcgatcattactccgggtctcagctctttctctcaccacttgccgttcttgggctccatgcacccgtcagggcccaacctaggtctagctttctccgccggactgccgctagtcggcatgcagcacctggacacggtggatcagtttccggtggcaagcggcggcggcaccaccatcggtgcatctctagagcagtggagagtgcgacagcagcagcagcagttcccattcatgactaggggaatactggatctgtcgcaaccatcgacgtaccaactgggcttggaagctagccgaggaggcagcggctcagatgcagtggcgttcactttagggcagtccacgaccagtgctgctaccataacggcaaggcaggaagggtcagcaatgaagatgggggacgatagcaaaggacaagacgcgagcttacagaagcagtacacggcacctctacgccacggatcaggatcacacggtgtctgggatgggagtgctggtggcactggcagcaacggtggtggtactggcaatggcggttcaagttggccaatgaacatgattcctggattccattcttcgtccactagcggttgcaatgacagtggcttgtcgtagtactccagctgggggttaggccagtgtcctatcaagaatatgaagatattggagatgcatggttgagtttgagcaaatgctagctatagctaggacgatggaggaacaagagatggtcaatcagccggcctattcatcaactgctgttcctcatcagaactgtaaaaaacactgctctagctcatgatggtcacaggtaggagtttaaagtagaccctttaaagtaaggttgctctttggttaaccctttttctgccatttggttttgaacttaaaggtgttctctgcattgtgtccatagcggtcgccacttttctacttttcacactattgttcacagggattaattaatcaaatttggtgcctggtatactatgtgataaggtatatttgacatggacgaaactgattagttgtttcatc

SEQ ID NO: 19705 - DNA, 296 bp, Zea mays
  Clone ID: MRT4577_117976C.1
gcctgcagtaccggtcctgattgccgggcccgacccatccgcgttcgtaaaataaaaaaaatatttacacaaaaaacaagcttagcaagctagttaaccaatgcggggtgcgaacagatatagtggagtctatcctaaacataaaataaaatgtaaaataaattaaatgggggggcctttttaggagtcccacattttacgttccctgcctttgagcgcttaaacttttttttaagtccccctatataaaattaactggccgagggtttaaccccgtggtaacaagaaaaaccccg

SEQ ID NO: 19706 - DNA, 236 bp, Zea mays
  Clone ID: MRT4577_117977C.1
aaaaaaaataatataacctagccctaccctcccgtcgtcctgacgcaatgcgattacactgtcggacgggtcattcaaaaacctataggtgtgccaaaaagggggccggctgtaactcacattgacaaccttttaaaaaactcgtgtccggcaaaaatcaggcgataccaaacctagcagcgtttcagcaaataaccttttctatacgcggcctaaaaaaaaatacgcgccacccc

SEQ ID NO: 19707 - DNA, 448 bp, Zea mays
  Clone ID: MRT4577_117978C.1
gccgccctttttttttttttttttttttttttttttttttttttttacccgtcaacctaggtaaataatccaaaggtaaaaataccacaaagcattttctcggacttgttccatgttaacatgaatcctaaaacgcaactttaaactgacaaggttgcatgcatcccaggcatgcaacacgggttggcagcgtgtcacaaatattttacctggcaccaggttcattctacccgttggaattctcatggacggccggacgggggctttttattaaaaaaaggcaaaaacatgcgtagattttaccagttcaaggaattcttggactggttaaacttttcgctatatgcactttccaaattcttcttgcatgcttttaacaatgggtgcaggaaggaaatcctgaaaaaactgatggattttcccaaggaccttctttaccaattatttt

SEQ ID NO: 19708 - DNA, 1829 bp, Zea mays
  Clone ID: MRT4577_117979C.1
gagcaaaacaaatactaaatgccgccaccgcccaccgccgtatcatcctgctggcgcggcacaagacgccaccgagccaagaatttgcatcctcatcctgcggctgtcagtgtcaagcagccaggctcaggggtaaggtttcagcaattcagctccctcgcctccgccgcggcaccggcactacgagtgcttcgctaccagccagccagcacactctacgagtcgccatcttccactccaccgaggcagctccaagccatggccatggagaaggccgcctccttcctctcctccctcttaggcggcggcggcggggagccggcggcgactgtgaaatctatcttcatataccctatcaagtcctgcaggggtcttgccgtgtcacaggcgcccatcacctccactgggttccggtgggatcggcagtgggtggtggtgaacgccaaagggcgagcatacacccagagggtggagcccaagcttgctctggtccaggtggagttgccgccggaggccttcgccgagaactggcagcccacgcccgacgaccacctggttatcagagcacccggaatggacacactgaagatacctctagtaacggaacacgccacaatcgatgatgtctctgtctgggagtggtctggctctgcgtatgatgaaggggctgaagcgtctgaatggttctccacttactttgggaagccaagtcgactagtgcgcttcaaagaagcatcggaaactaggccaaccgatccagattatgcccaaggttataagatcatgttcaccgattgcttcccatttctgatagcttctcagggttcactggatgcactaaatgagattcttaaagaacctgtaccaatgaaccgcttcagaccaaatattttagtggatggatgccacccatactcagaggacctgtggaaaaccataaagataaacaacctaacattcctaggtgtgaagttatgcaaccgctgcaaggtgccaaccattaatcaagaggatggagtacctggtactgaaccaactgaaactctacagacttttcggtccgaccaagtgcttcgtccaagccacaaaaataaacgacaggtgtactttgggcagaatttagtctgcaaggaatctctatcaggtgaaggaaaggtcatcaaggttggcgatccagtttatgttgtgcaggcattcgcttcttctaatgaagccccagcctgattcagggttaaaagtagtgacagggtgttcaaaataagtgagtttgtcttgcacactggataaacaaaaaacagtgggctgttgaaactgttaatgagacaataaaacacttgccgctggacagtaattatgaattagctgtaccttcatcaggggcttatttacttctatgatattacataccttgtacatcagaataatacaaaacaataagaagtgccaaaaaaggaggtgagttagaagagactgtctaaataggatggaatggatggctgatggagtcttttgtaccctatacaaaatcagtgacccactgcaagttccttcagtaacatcagaacagcatgtttgtctatagttccaaggatcttccaaagctcttcaggccacgattgatactaaagaaattgtcacatgaacagtgcagtggctgctttgtcggtgagactggcgtgatcacatcaaaatgtagtggcagccatcatagcctgaaaagaaggcatgcatggtttagataacatgcattgagctgaataatttggtatgaatatagacgcacatgtgcattgcaagttatctctaaaaaaaaaaaaaaaaaagcggcc

SEQ ID NO: 19709 - DNA, 144 bp, Zea mays
  Clone ID: MRT4577_11797C.1
gggagacgtacgaaacaaccgtccagctgctgcagatctacgaccagctgatacccaagctgatacgggaccaagaggtggaagccggtgtgcgtgcccttcgcaacatcgcggaaagcatgcgagcacggctggaacatcatg

SEQ ID NO: 19710 - DNA, 434 bp, Zea mays
  Clone ID: MRT4577_117980C.1
gaatttgcatcctcatcctgcggctgtcagtgtcaagcagccaggctcagggggttccggtgggatcggcagtgggtggtggtgaacgccaaagggcgagcatacacccagagggtggagcccaagcttgctctggtccaggtggagttgccgccggaggccttcgctgagaactggcagcccacgcccgactaccacctggttatcacagcacccggaatggacacactgaagatacctataataacggaacacaccacaatcgatgatgtctctgtctgggagtggtctggctctgcgtatgatgaaggggctgaagcgtctgaatggttcttcacttactttgggaagccaagtcgactagtgcgcttcaaagaagcatttgaaactaggccaaccgatccagattatgcccaaggttatcagatcatgtt

SEQ ID NO: 19711 - DNA, 977 bp, Zea mays
  unsure (1)..(977): unsure at all n locations
  Clone ID: MRT4577_117981C.1
aaaaataaaaaaaaaaaaaaaataactgagtttgtcatgcacactggataaacaaaaactgtgggctgttgaaactgttaatgagacaatanaaccctggccgctggacagtaattatgaattaaaaaaaaaaaaaaaaaaaaaaaaaaaaaaaaaaaaaaaaaaaaaaaaaaaaaaaaaaaaaaaaaaaaaaaaaaaaaaaacctaactctaccttcatcaggggcttatttacttctatgatattacataccttgcccatcagaataatacaaaacaataagaagtgccaaaaaaggaggtgagttagaagagactgtctaaataggatggaatggatggctgatggagtcttttgtaccctatacaaaatcagtgacccactgcaagttccttcagtaacatcagaacagcatgtttatctctagttccaaggatcttccaaagctcttcaggccacgattgatactaaagaaattgtcacatgaacagtgcagtggctgctttgtcggtgagactggcgtgatcacatcaaaatgtagtggcagccatcatagctggggtccttggtgatgagcatggcggtgccgccgaagtcacaggtggcaccgttggccttggtgcgctgccagtagctgttgaaggcgtaagaggcatgcgccagcatggtgtccggccggaagcacgggtgcgacggcaggattgagtcgcagtccgcccccgagccgcaggcgtagtccatggcctgctgcacgatggcccccggcaccgacggcttggccacgcaccactccgagcccgtcgtcccccctggcaacggtgtcgcgaacgggggcgggaacaccaccggcggcaggaagccgcctcccggggaggggacggccgggggccctggcggctctggcgcgaactctggcgggccaggcacgaccgccggcgggctccggacgaacccaggtggtnctggcgcgactacc

SEQ ID NO: 19712 - DNA, 695 bp, Zea mays
  Clone ID: MRT4577_117982C.1
aaaaaaaaaaaaaaaaaaaaaaaaaaaaaaaatataaaaaaaatttttttggttgtttgattttttggctcggttgtttgtctgcaagtgtaaccagttgtcgagtgtttaatttgtcggctatatagactattttcaagtttcgctcaaaaaaaaaaaaaaaaaaatcttccactccaccgaggcagctccaagccatggccatggagaaggccgcctccttcctctcctccctcttaggcggcggcggcggggagccggcggtgactgtgaaatctatcttcatataccctatcaagtcctgcaggggtctcgccgtgtcacaggcgcccatcacctccactgggtttcggtgggatcggcagtgggtggtggtgaacgccaaagggcgagcatacacccagagggtggagcccaagcttgctctggtccaggtggagttgccgccggaggccttcgccgagaactggcagcccacgcccgacgaccacctggttatcagagcacccggaatggacacactgaagatacctctagcaacggaacacgccacaatcgatgatgtctctgtctgggagtggtctggctctgcgtatgatgaaggggctgaagcgtctgaatggttctccacttactttgggaagccaagtcgactagtgcgcttcaaagaagcatcggaaactaggccaaccgat

SEQ ID NO: 19713 - DNA, 190 bp, Zea mays
  Clone ID: MRT4577_117983C.1
aatatcaagtagcaatgcgcatacacacattctctttaaaaaaaaagcacatccgctttcctggccataccccttcgagaaagaaaaaaatggcgtcaacttttcatccttttcaaacagactatggtacccgttcaactaacaactatacttcaaacgattcaaattataagagggttttccttttttt

SEQ ID NO: 19714 - DNA, 604 bp, Zea mays
  Clone ID: MRT4577_117984C.1
gtcttcttcctctgctgtggatataaagaaggcctaccgcaaagcagcactaagacagcatggagacaaagccagtgggtttcttgtcagaagtgaaaatatcagtgatgctgtatggagagatataacaaatgaaatacgcagggatgctgattatttattcaaaataattgggaaggcatatgctatgctttcagaccctacaacgagaagggaatgataacctggaggtggagtgatagaaaagcagtgcacatgtaacatgagcagcgggagcaatgaaaatgatgacaggacctcttagtgagagcatttaatcattaagttggtacagcacaaagctaccatactggagaggtcctatgtggaattttgtgtgctctcaccaacgatatgatgccactggtgtcgtccaatacctaaatcacaaatgtcagtcggaacgtgtcccacttttctgactgagtgttaataccgttatcccggggagcagtggatctttgtgttcatgcctgatcactgtttcgtgctctctgatgttccatttggatatgcagattggatgagtctgagcacccgtgcaaaaggctagttttttttgttt

SEQ ID NO: 19715 - DNA, 718 bp, Zea mays
  Clone ID: MRT4577_117986C.1
cagcagcagccgcctacacgcttccttccgcgcatccacaagagcagctccccttcctcatctgttcttcaagaacagcacccaggacaagacagaaaagatgagtagcatgtcgtgctataccctggcagaaggtggaagcatcttcccatctggcgacgaacttgccgggaatcaaaagacagagcaaggaaattactggacacaatggaattcaaggctatctgatgatttgaacacaacaagcctatactcagacgagcatgagaatggcatcgagcaatgtttcgacgacgccgaggaacatgagaggagcagccaacaggagaggtcttcagcatgtcccagagttgcatcttcagattgcagcacagggccttcagaagaacattctgaggggccagcgccgttggaactacaacactccaaggaaacaaacgacatcttcttgagtcaattttcagatgatgaaatgaggatgatggatgcgccgtttcaggcacttgatatgttccctggctccatgcacaggctgctgtcctatgagaacatgctgagtggagtattgactgattctcagaatcaagaaacaaatccgggtcataatgaaatggacaccatggatacttgcggctttcctttgttcagccatgacttgcaaaatgatcctagcagcgctgatggcagcttacaaacactactgagtgcctcccaggac

SEQ ID NO: 19716 - DNA, 450 bp, Zea mays
  Clone ID: MRT4577_117987C.1
acgagtctccctagcaatctctagcatcagatcctcgtgcaaagcaaagcgctagcgtatctagtgtccccatggcccggacgaagcatacagcgatgaagtccactggcggcaaggcgcctaggaagcagctggccacgaaggcagctcgcaagtctgccccggctaccgactgagtgaagaagccccaccgttttcgccccggcaccgtatcgctacgggagatccgcaagtaccagaagagcactgagctgctgatccgcaagctgccgttccagcacctggtgcgtgagatcgcccatgattccaagaccgaccttcgctttcagagcttcggcgtcgcctctctgcatgacgcatgctatgcctaccttgtccatctcttcgaggacaccaacacttgcgccattcacgccaagcccgttaccatcatgcccaaagacattcatc

SEQ ID NO: 19717 - DNA, 843 bp, Zea mays
  unsure (1)..(843): unsure at all n locations
  Clone ID: MRT4577_117988C.1
cggccgctcgagccggccagccgggattctccttcccacctgttctagaacccaaaccctagcggccatggatccgtccaagctgggcgagctgcgctccttcgtggaggcgtgcaagaaggacccggccctgctcgccgaccccgccctcgccttcttccgcgactacctcacctccctcggcgccaccctccccgcgtccgccgccgccgccggcaagcccgcgcccaaggcgaggtccatggacgacatcgacgacgacgacgacgaggaagaagaggaggacgaccaggacatgcgcgaccccacccccgagcccgacgagctcgacgaggagatcgtcgagtccgacctcgagctcgacaacgacggcgtcgtccaccccgaccacgacgacgcgccacagaagatgggagactcttccgtcgaggtgaccgaggagagccgtgacgcctcccaggaagcaaagggccaggcaatggaagcaatgtcagaagggaaactggaagaggccgtcgagcatctcaccaaggctatactgctgaatccaacctcggcaatcatgtatggtaccagagcatctgtgttcatcaaaatgaagaagcctgctgctgccatccgtgatgcgaacgctgctctagagatcaacccagactccgcaaagggctacaagacccgtgggatggctaatgccatgcttggcaagtgngaggaagctgctcgtgatctgcatgcggcgtcaaacattgactacgatgatgaaatcaatgctgtgnctcagaaggtggagcctaatgcgcancagatagtggagcatcgcaggaagtatgacagggctgagaa

SEQ ID NO: 19718 - DNA, 260 bp, Zea mays
  Clone ID: MRT4577_117989C.1
gaggaagcaatgcagtcagcttcaaagggcaaggttcagaccattcgccaaggctatctatctaagagatcttcaaacttgagaggtgattggaaaaggaggttctttgtcctcgacagtcgaggaatgttgtactattatcgcaagcagaacagtagaccatctagtggatattctaaccaaagaactagcattccctcagaacatggttctgggttgctcagcagatggttctcttctcattatcatggaggcgtgca

SEQ ID NO: 19719 - DNA, 615 bp, Zea mays
  unsure (1)..(615): unsure at all n locations
  Clone ID: MRT4577_11798C.1
ccggccggacggaccctagcagaaccccgattctccctcgctccagacctcccttttttgcgcgcgcatgggacctcttcacaagggcgggacagtggctgactcacataagccatagaagcagatgacgcaccaaccccagatcttgaacagccaatgcactcgatgactgctctgaaattggggatcaagaaaacactatgctgatgatggacttgggaaaggtacacgcgaggctgtcacagccattgacaatcatgctgcttatctttgcccacatgttaaggactgagaccaaccatattatgtcaagctgctgaaagaccgctgtgctgaacacaaagcataccttggcactgatgctgcagataagactattcgccagcgttgtggtctatgacagatcgactccgagctccttgaacggaacgaagaaaggtgctcctgagctcgaagctaggactacggcgaataatctganggccttagcatagagcaagagtgtgatacgacatactagatgcaacacgttacaggaatactctacatttgcatctgagatcagtactattgctcgtggatacatctggttaggctactatgacagtgtacgac

SEQ ID NO: 19720 - DNA, 409 bp, Zea mays
  Clone ID: MRT4577_117990C.1
ctgatgttcaggactaatactaacacgtgagagcgtggcgctcatctatcctttagaccttgggagttatgaagctagagggtgcaaaaacgttaccacaagcttaaccgcctcggggcatacttacgttcatagcggcggagcttcttgatactcaagtggcagatatagatatcagtgcaaatgcagaattaaagaagacttgggattgtcgatgcacaatttggcaacacgagctcattatatacacgagcaacaacactgttacgtgtacagtactgcaccacatgacaatataggttcgtactgtatcacgtgattgaccggcaaggtacacattcagcgatacaagtacaaatacatgggcactacctgtatgcttctgtattcagaattgctactggacgat

SEQ ID NO: 19721 - DNA, 232 bp, Zea mays
  Clone ID: MRT4577_117991C.1
gttgagccttcaaagccgtaccctacatcatcatagcaactagacagcattcgccacccccactgaaggaatcccaaagagcctaaacccaccagggctacactgcgtgcttgctgtggggtaagtggttggggcgaaaaccgatattatcgacctaccagcgaatagtaggtaaccacggaggcattcagctgcaggggtactactaagctaatagcaacggctctgaatg

SEQ ID NO: 19722 - DNA, 516 bp, Zea mays
  Clone ID: MRT4577_117992C.1
ctggctacatgtcaataagaagacatggagatcaaccctgagaacgccatcatggacgagctccgcaagcgcgccgacgccgacaagaacgacaagtcagtcaaggacctggtgatgctgctcttcgagacctccctgctcacctccggcttcagccttgaggaccccaacacctttggcaccaggatccaccgcatgctcaagcttggcctgagcattgacgaggacgatgaggcgcctgagaacgacaccgacatgccgcccctggaggacgacgctggtgagagcaagatggaggaggtcgactaagcgccaagtctgcctgtcgtcggatgttcatgccctgcaccgcctagttgtttttatctttagtgtcgacgttggatggttttggcacgtttagctgtatcggttttgtcttttggctggccaaacattaagcgcggctagctgtttgtggtactcgtggaacagttcgttattgttggttctattatatgttagctatatttctat

SEQ ID NO: 19723 - DNA, 253 bp, Zea mays
  Clone ID: MRT4577_117993C.1
caacaacccatacaaaatgtgcgacgacgaagttcaagccttggttattgacaacggatccggcatgtgcaaggccggtttcgccggagacgacgcccccagagctgtcttcccttccatcgttggaagacccagacacactggtgtcatggtcggtatgggacaaaaggactcctatgttggtgatgaggcccaaagcaagagaggtatcctcaccctcaagtaccccattgagcacggaatcgtcaccaac

SEQ ID NO: 19724 - DNA, 318 bp, Zea mays
  Clone ID: MRT4577_117994C.1
cccaggcgtacgtaaagttgaaatttcattactactggtatgaggactgattgcctgcggcataagatgaactgtaggtgaagtgggtcctgcaattggtcatcttcatgtctattcacattcctggtggacttccactcacatctacatgttgaaaaccattatgggactcttcatgtgtagactcgtgtagagactcttggacatccatattgacaacgatcattaaattaaccacttctggagcaaaaaaaaaaaaaaaataaaaaaaaaaaaaatgaaaaaaaaaaaaaaaaaaataaaaaagggctggccatt

SEQ ID NO: 19725 - DNA, 335 bp, Zea mays
  Clone ID: MRT4577_117995C.1
gttctttccttcccaattcccatgttacaatggagtctggattcattaaaaaaaaaaaaggaaaaataaaaaaaaagaaaaaaaaaaaaaaaaaaaaaaaaaaaaaaaaaaaaaaaaaaaaaaaaaaaaaaaaaaaaaaaaaaaaaaaaacaatataaaaaaaaaaaaacttaaatacaacaaaaatacaaaaaaataaaaaaaaaaatagggtcacctatattcaattcactggttcgaatctttacatatcttcaagactgtggaaaaccctagtggttacccaaaattaatttccttggaccacatttaaaaaacgccagctggggaaaaac

SEQ ID NO: 19726 - DNA, 318 bp, Zea mays
  Clone ID: MRT4577_117996C.1
taataaataccgaggccagctaaaatgcaggaggggaatatttaaggggagttccgggtcacaaatacaggaagttattaaagctgttagaactagcaagggcattaatctgaactgacatgaacagtaatttcagccttagagagacactatccagggaagcactgcatggaccgtgacccaaatacaacacacaataattgagtgagcagaatataggctatacctgcaagcacacacaggaccttgccaacccaaagagagaactgcacagcgtggtggaaaacgcacgctcatatacttcaagaatcatatgat

SEQ ID NO: 19727 - DNA, 255 bp, Zea mays
  unsure (1)..(255): unsure at all n locations
  Clone ID: MRT4577_117997C.1
cctctcggcatgaacccgagttgccagggttaggcaggtgccgttaacgcatgaaacagataaccttctttcccgaggctccaccgctcggctgttcttccggacccttcctaatcgnntcgccgtcttggccgccacagtcccaggcttcgtggagaactcttaatccnncgattcccttcttcgggtgaccgcgcccgtgatcgcgtctanntctgctcgggtttctccctcgtcccctttagggaaatcggc

SEQ ID NO: 19728 - DNA, 1066 bp, Zea mays
  Clone ID: MRT4577_117998C.1
cgatgatgatgtaagcgtactcgaatcccagacgatgaacaaagaaactgaactcgatgcgttgtttactgcgtttcttttttcccccttcttcttcacgtacatactgtactgctcttggtccaggtctcaaagggccagtaccactgtgacggatgtggaatatgtagatcaactccaccccgtcgattccccgtacatactgtacggctcgcggtccaggtctcaaagggccagtaccactgtgacggatgtggtctatgtagtaccagcggcgtggagaactttttccactgtgataaatgtgggtggtgctacagcaatgtcttgaaggattcccaccactgcgtcgaaagagcaaagtatcctgcaatgtgggcataccatcctggagtgcatgaagagagcacaccatcacttctcatgcccagtgtgctcgaggtccgcctgcgacatgtcggccacatggcggaagctcgacgaggaggtcgcggccacgccgatgcctgacatctaccagaagcacatggtgtggatcctgtgcaacgactgcagcgcgacctcgagcgtgcggttccacgtgctggggcacaagtgccccgcgtgcagctcgtacaacacccgggagacgagggctgcgtgccccaggatctgaggcgaaccagaggccatgtcacaaaatgccagggagatgccgtccaacgatcatctgtctgcaggacgttgctgcgcttaaggttaaaggctagcgcgagaccaggcctggtagtccagtcttgagtttggtgctggagcatttgtaatgttccggtaaaatgtaatgcgtccatgagtgctgtccaggcagtaagcacacctgtggatcggggccggcgcaaggtccctaggcaagctgcaggattagtggggctattcatgtttagggcgcgaatgcaacgaaattacccgtgggccgtgggctcggtatgtaacagaaccgattatttctattacaataataacatgcagttctattgggccgagcctaaaaaaaaaacagaaaaaaaaaaaaaaaaaacccgcggcc

SEQ ID NO: 19729 - DNA, 603 bp, Zea mays
  Clone ID: MRT4577_117999C.1
ctttcacttgtgcaaccactgacaaaagccccctcctcgctgaattaggtcctccggcatgagcagatgtgacaaaacacaatgacctatctcacattactctgatggcaatctgtcctgacaccgatgtgaagctaaatggcatggagtgataaaagatagatgactcttggtcaccaccccgctcaacaccaagatcgttcattaataggacagcgacgtatcatactcgtgtcactgcagcattgaacgacgtagtgcgagcgtttgcttcgccttgatgaactgagatattacacctcgtcgaaaggtgctggtgcatgcactgagaatcatttgtccaaggtacagcttggctatcacacctgaaaactggaaccttttcagcgttagcgatacaatgattgtgacaggtctggatcacctttcacggaagattaagctcgatcactaggctggtgacaatgatgctgctccacaactgcctgattagataatgactactcacgaagaataactgattgagaaatctgctgactaaacatcttactcttgacttttctcgacaaagcatgatatgtctcgatccagacacacccatga

SEQ ID NO: 19730 - DNA, 159 bp, Zea mays
  Clone ID: MRT4577_11799C.1
acctccgtagctccatatcatgggctcaactgcattttcaacctatcatctcccggcctcctgcaaatcctctcaacttcatctaaccctaatggattccctgcatgcaggtatgttcggcctaccccaacaagaaattcgagactctctcatacctac

SEQ ID NO: 19731 - DNA, 507 bp, Zea mays
  Clone ID: MRT4577_1179C.1
gccggccgggtttccgcaaaaaaaagaaaaaaaaaaaaaaaaattaaaaaaaaaaaaaaaaaaaaaaaaaaaaaaaaaaaaaaaaaaaaaaaaaaaagggcccttgggacccggcacgaaaaaaaaaaggcgcataccccggggtgcgggaaaaaaatatggagtcccccggtacgggggaattcaagggggggcccgggaccccattccccctaaaggggggggtattaccccatttcaccggaagggggtttaaaaaacgcggactgggggaacccggttttaacccacctaaatgggaaaaaacagggccccccttatttcaaattggggtaaaaaaaaaaaggcctctcaccgatgggccttatcaaaaaatggcccgcctgaatggccattggaaatgggaagggcccctaaattggggaaaagtaaatgtaaaaatgttagttaaattgcaaaaatttttttaaaaaatatgggaaaaaacgcccaaaatttttttataaa

SEQ ID NO: 19732 - DNA, 302 bp, Zea mays
  Clone ID: MRT4577_117C.1
gacccaactagagggctgcatgaggatgagcctccgccaatccaagccgggctgacttctgcctaacgttggagcttggaccgtcccttagggagaatcggttccgcggacgaagacaaggaggaggtggagcacgacacctgatgggagggaggaaccgcatgggagcaagcggcagggtaggtggttgccggaacctgggcggcagacggcgagctgttggtggaatgaggggcgccgggtgatgtgggaggcaagggggtgggagacgagggggcgggagcttttttttgcagtgtgtg

SEQ ID NO: 19733 - DNA, 169 bp, Zea mays
  Clone ID: MRT4577_118000C.1
acccacccctccgcacctctggtggaggagagcctgaaagaggaaccagcagcagagaggccatccctcggaaccgctaagcgccgatctcttgaagcttgccatcgagggagtgctgagtctcctattgaccgtcgaccctacaggcatgcggcactgcaggaggaag

SEQ ID NO: 19734 - DNA, 1041 bp, Zea mays
  Clone ID: MRT4577_118001C.1
gccggccgggccgggatcagccgcagtcgcgtcgcgtcgcgtcgcgtccagtccaatcctcggagcctcacacgggcggacgagcgggagcttctcccaatctcccctgcccagccctgccctgccgccgcgcttagcttcgcatcttcccctcctcctcctcctccttcctcggccaagcgaggagcgaggcgcgggcgcgagcgcgtcgttgagatggattcggaggcggtgcagcacgggtgagctgttctctctgctccaaggaacaggacgtgcaacagaactgctccagctgtggggcctgcatgggcaagtacttctgtaaagtatgcaagttcttcgatgatgatgtctcaaagggccagtaccactgtgacggatgtggaatatgtagaaccggcggcgtggagaactttttccactgtgataaatgtgggtgttgctacagcaatgtcttgaaggattcccaccactgcgtcgaaagagcaatgcatcacaactgccccgtctgctttgagtatctgttcgactccacgaaggacatcagcgtgctgcaatgtgggcataccatccatttggagtgcatgaacgagatgagagcacaccatcacttctcatgcccagtgtgctcgaggtccgcctgcgacatgtcggccacatggcggaagctcgacgaggaggtcgcggccacgccgatgcctgacatctaccagaagcacatggtgtggatcctgtgcaacgactgcagcgcgacctcgagcgtgcggttccacgtgctggggcacaagtgccccgcgtgcagctcgtacaacacccgggagacgagggctgcgtgccccaggatctgaggcgaaccagaggccatgtcacaaaatgccagggagatgccgtccaacgatcatctgtctgcaggacgttgctgcgcttaaagttaaaggctagcgcgagaccatgctggtagtccagtcttgagtttggtgctggagcatttgtaatgttccggaaaatgtatgcgtccatgagtctgtccaggcagta

SEQ ID NO: 19735 - DNA, 1225 bp, Zea mays
  unsure (1)..(1225): unsure at all n locations
  Clone ID: MRT4577_118002C.1
aggtctcaaagggccagtaccactgtgacgnatgtggaatatgtaggtaagcacccacccccactgaggctacgcctaagacttgacgcgcagaagtgtaaaacttctgtcagccgttcaaaactgataaattcggattcctcgtcttcttgttgtttacgcagaactggcggcgtggagaactttttccactgtgataaatgtggtgagtttctgcacggacttctttctgctgtaaccaagctatgcagcaaagatttcactcgcgcccttattgtccttgttgccgtccgacagggtgttgttacagcaatgtcttgaaggattcccaccactgcgtggaaagagcaatgcatcacaactgccccgtctgcttcgaggtgagagatctccgtttcaacgttccaatctcttgatctgaatgttccaatctcttgatcttgagaaggtttccctctgttttttttttcagtatctgttcgactccacaaaggacatcagtgtgctgcaatgtgggcataccatccatttggagtgcatgaacgagatgagagcacaccatcagtaagcatattccgtcctccttcggagctgagaagcggtgtcacctgacatgacagcatcctcttttagtcgcagtgatctcagtgtcggccctgtttggtctttcgcagcttctcatgcccagtgtgctcgaggtccgcctgcgacatgtcggccacgtggcggaaactcgacgaggaggtcgcggccacgccgatgcctgacatctaccagaagcacatggtgtggatcctgtgcaacgactgcagcgcgacctcgagcgtgcggttccacgtgctggggcacaagtgccccgcgtgcagctcgtacaacacccgggagacgagggctgtgtgccccaggatctgaggcgaaccagaggctatgtcaaaatgccagggagatgccgtccaacgactggtggagatcatctgtccgcaggacgttgctgcgcttaaggttaaaggctagcgcgagaccaagcctggttgtccagtcttgactctggtgctgtccaggcacacctgtggatcggggccggctcaggattagtggggctgttcatgtttagggcgcgaatgcaacgatatttcacgtgggccgtgggctcggtatgtaactgaaccgattatttctattgcaataataacatgcagttctattgggccgagcctaatccggc

SEQ ID NO: 19736 - DNA, 717 bp, Zea mays
  unsure (1)..(717): unsure at all n locations
  Clone ID: MRT4577_118003C.1
aattatcctatcgcacaatatcctggggtgggggctataaaacggagcggcccgcgtggggcgcgcctccatcagccgcagtcgcgtcgcgtccagtccaatcctcggagcctcacacgggcggacgagcgggagcttctcccaatctcccctgccctgccctgccctgccgccgcgcttagcttcgcatcttcccctcctcctcctcctccttcctcggccaagcgaggagcgaggcgcgggcgcgagcgcgtcgttgagatggattcggaggcggtgcagcacggccttctccctctgtctgcctgtcctcctaccgccaacagctgcgcgcattacagccgtgggtgcagcgtcgtggcgccctgctgcggccaggccttcggctgccgccattgccacaacgacgccaagaactcgctggaggtcgacccgcgcgaccggcacgagatcccccgccacgaaataaagaaggtgatctgttctctctgctccaaagaacaggacgtaagttgtctaccaaaacgtactcctacaacagttttttcaggagcacgcatcttttggctgtactactgctgctctgctaactgcatggaaactgctcattcccatcggcaggtgcaacagaactggctccagctgtgnngcctgcatgggcaagtacttctgaaaagtatgcaagntcttccgatgatgatgtctcaaagggccaga

SEQ ID NO: 19737 - DNA, 260 bp, Zea mays
  unsure (1)..(260): unsure at all n locations
  Clone ID: MRT4577_118004C.1
aataaccgggccgacgagctcgtttctccggcggccgcccgcccccantactgggggggttattaaaacgggcggggatgtctcacccaccagaaggcgcgagcgacaattcacgaaagagacgggccgagccccacacctgagagaaacaagaatcccaaatacacaaggacaacagaaaacgaggaaataaacggatgaccaaggattcacacgttacaaagaacaaagcttgaccaagcaggaccccacaaaaagtg

SEQ ID NO: 19738 - DNA, 2304 bp, Zea mays
  Clone ID: MRT4577_118005C.1
ggcgacgttcgtccaattcgacccggcaggcagcaggcagcagctgtgctcctgtgggtgggtgggtcatgggtgaccacatgcatcgatggagccagggccgccgtgtgcgcagccaactctacctatccccgcccccgggatgggcgatggcaactatcctatcgcaacaatatcctggggtgggggctataaaacggagcggcccgcgtggggcgcgcctccatcagccgcagtcgcgtcgcgtcgcgtcgcgtccagtccaatcctcggagcctcacacgggcggacgagcgggagcttctcccaatctcccctgccctgccctgccctgccgccgcgcttagcttcgcatcttcccctcctcctcctcctccttcctcggccaagcgaggagcgaggcgcgggcgcgagcgcgtcgttgagatggattcggaggcggtgcagcacggctgcgcgcattacagccgtgggtgcagcgtcgtggcgccctgctgcggccaggccttcggctgccgccattgccacaacgacgccaaggttcggtggtttccctccttccgttttcgcttcggctccggttcagcagatgttctgaaacaaccctgtcccgtgccccggcagaactcgctggaggtcgacccgcgcgaccggcacgagatcccccgccacgaaataaagaaggtgatctgttctctctgctccaaggaacaggacgtaagttgtctaccaaaacgtactcctacaacagtttttcaggagcacgcatcttttggctgtactactactgctaactgcatggaaactgctcattcccatcggcaggtgcaacagaactgctccagctgtggggcctgcatgggcaagtacttctgtaaagtatgcaagttcttcgatgatgatgtaagcgtactcgaatcccagacgatgaacaaagaaactgaactcgatgcgttgtttactgcgtttcttttttcccccttcttcttcacgtacatactgtactgctcttggtccaggtctcaaagggccagtaccactgtgacggatgtggaatatgcagaaccggcggcgtggagaactttttccactgtgataaatgtggtgagtttctgcgcggacttctttctgctaagattctgtaaccatgctatgcagcaaagatttcactcgcgcccttattggtgtccttgttgccgtccgacagggtgttgctacagcaatgtcttgaaggattcccaccactgcgtcgaaagagcaatgcatcacaactgccccgtctgctttgaggtgagagacctccgtttcaacggaacattcactctgaatgttccaatctgtcgatccatccaatttgactgcatgaacgagatgagagctctctgtcccacttcatgacgagcatgagcgtgctgctcctgggacatgccggccatttggcggaaaggcgcggggggagcacccgccagccggaagcttgttgccctttaggttcagggctagcggaagccgtgacctgacatgaccgggatttagtctcgggcgatccacggtctccggcacgttggggccgtgacaggttaaggcgagctgtggacgaggcgtgctcgtccgctctggagtttggtgcgggaggcgttcgtagtgttccggtaaaacgaaatgggtccatgagatctgtccaaggcagtaagcacacctgtggatcggggccggcgcaaggtccctaggcaagctgcaggattagtggggctattcatgtttagggcgcgaatgcaacgaaattacccgtgggccgtgggctcggtatgtaacagaaccgattatttctattacaataataacatgcagttctattgctccaacccgcggttccacgtgctggggcacaagtgccccgcgtgcagctcgtacaacacccgggagacgagggctgcgtgccccaggatctgaggcgaaccagaggccatgtcacaaaatgccagggagatgccgtccaacgatcatctgtctgcaggacgttgctgcgcttaaggttaaaggctagcgcgagaccaggcctggtagtccagtcttgagtttggtgctggagcatttgtaatgttccggtaaaatgtaatgcgtccatgagtgctgtccaggcagtaagcacacctgtggatcggggccggcgcaaggtccctaggcaagctgcaggattagtggggctattcatgtttagggcgcgaatgcaacgaaattacccgtgggccgtgggctcggtatgtaacagaaccgattatttctattacaataataacatgc

SEQ ID NO: 19739 - DNA, 340 bp, Zea mays
  unsure (1)..(340): unsure at all n locations
  Clone ID: MRT4577_118006C.1
gaaacaagcngggcagaagaccgaggcatggactgcctccaccgggagaccatggaagaaggacgcaaaaccccttccttgcggcgaagatagataggccttgtgctgcaatctgaggcggggggagcaaacttcacaacctgttccattggaggcgcaggcctaacatcaaccgggagggttaccaagtcaatcctgccagaggaaatagcatctggcagagccgcgtgacagaagcgaacggttacagccgccgcgcggagatcgacaagaggcggatatcctggacccagtaaccacgtgaggccttcgtccggcaccggaccaccaacccaaaagg

SEQ ID NO: 19740 - DNA, 349 bp, Zea mays
  Clone ID: MRT4577_118007C.1
agcttcatatgatcatgaggattaagaaactcacgggaactacaggacaggtgtctgattcaaagcctaaccagatcagaatcacaatggatcatatgtgcactctggtcagcgggattgggaacgagccatcaaaaccatatttaaaacgccaaaagaacaagctctgaagtttcattaacaaaaacctgaatgggttcagccaaattaagctaagtaacatgaacaaaaaaatcgcaccttgtttgcgccccatagtgtagattgtgcagcacgaaccaagaagaagatgaactaataaggggacgattctttctttttttttacagatttttttttcctgcgagaa

SEQ ID NO: 19741 - DNA, 340 bp, Zea mays
  Clone ID: MRT4577_118008C.1
cgggacccaagccatgcccacccaaacatatggccacaaaagagggaccggtgccccacacgaggcaccgccccgcaaacacaaaccccaacaaaaagaacgggggccaacacaggcgatccagggcgcaagacccggaaaaagaacctgacacaaaaacacgacattccccgggggcgagggaccctgggtggctcgatacgcacaaaaaaacaaacagagactcgtgcaaaacagggcccccccaggccaggacgaacggggcccccaggaacctgatcgcgcctgagggggtacccgaccatcaaatgaaaacactcccggccagggcaaaaaacaa

SEQ ID NO: 19742 - DNA, 367 bp, Zea mays
  Clone ID: MRT4577_118009C.1
aagtccccaaaatgggtcctatctaaggtggaccggatgccaagcaagcaatggcccaacggggccaagaacaacttcaagtacaagtgggaacccaatggacaaattcggaactttctccacttcccgtcaatcggatgcaacgggcggcaggcgggtacggcgccatcagcgtggtgagccccctcctcatcacggtcgccttcgaccagccgccgccggagagcgaccacgcggtgctcatcggcgactggtacaccaaggaccacgaggtgctggggcgccagctcgacgccggcaagagtctgggccgccccgcaggcgtgctcatcaatcgcaatggatgcacagatcaggaagccacaac

SEQ ID NO: 19743 - DNA, 1059 bp, Zea mays
  unsure (1)..(1059): unsure at all n locations
  Clone ID: MRT4577_11800C.1
cccagcgtccgcccagcgtccngatattttatggaaatgactcattttatgttctgttcaggctacatcagatcttttatgagagaatattgtcagctaagacaaactgttccacatcagacaataactggaaagcttcaaggcacataaattctccagatcaatattcaaggtttatcagtgcactatacaacttgcttgatggttcttctgaccacaccaaatttgaagatgactgccgctccatcattgggactcagtcatatgttctctttactatagataaactgatatacaaaattgtgaagcagcttcaagcattagcatctgatgaaatggacaaccagcttctccagctttatttatatgaaaagtcgaggtctcctgggagcttctttgatctggtttatcacgaaaatgcacgagcccttctacatgatgacaacatataccgttttgaatgtcattctgatcctacagaattaactattcagctcatggagtatgggaatgaaaaacctgagttgactgctgtctcatttgatccaaccttttcaccgtatctttataatggttatctgtcaagtattgatgataccaaattggttgatgacgtcttccttaggaggaataagcggaagcaagggaggaatgatgactcccctacttccttgaagatcatggacaatgtcatgtttgctaatggtcttgaatgcaagatatcttgcgaatcttcaaaagtctcttatgtcctcgatactgaggatgtcttatttcgtacgagaaagaggagaagctctatctagtggaaccatgcctgcgctgcaaagacaaattttgtgaaaattaacaccgtaaaatcgatagtttcatttatctcttcagaccgtatagggtcttgtggtagagttatgttaattacaatggcatgcactggtgggatcctcgtgttgttgatctgtcacttcactggaatatattggtgattctttgtgttttactcgctaccaattatatatgagcgtgtagcatgggcgagtcacggaggcagtgttccgt

SEQ ID NO: 19744 - DNA, 610 bp, Zea mays
  Clone ID: MRT4577_118010C.1
ggccattgcataggttctacgcccatgtaataaaaaaaatagaagggaaaagagaggaatgacaaatagataaaaaattatccaagaacaccagtaataaaaattaaaactttcaggttaatccatcagtacagatcaaaggcacgttgtcaggctaagaggtccacagaactataggacagtacagcatacggcatattacaagggattctagtgaatttaactcctcgagacaccaatcacatgcctacctgccattaacgtatattgtcaatccaaccaccaaactcgaaatatggtaagcacaatatctacccactttaaaggggagtcaaatacttcatctaatttaccccataaaatgtcctagaatactaggataccttatactttgggacagaggtagtataggatcagcactaaattttactataacagtatattacctccacaattgacatcatacagacagaaataaaggcttatagcataaggtagctcaaaagtaatggagagcccattgcgggagactcatacctgaatcgagggtaactcaaaacagacataattccagtaatctactaacttgtgatcttttgaaccacttcgt

SEQ ID NO: 19745 - DNA, 733 bp, Zea mays
  unsure (1)..(733): unsure at all n locations
  Clone ID: MRT4577_118011C.1
gggcgattgggttcctcgaggccggccgggacgtcccgccgtccggccggtcaggcggcaggcaggtggaacgcgtggacacagaggccggcagggcggctagacggacggagtcatcaaccactacctgatcgagcaaagacgcatcgcgcgcccaggcaggtcattggctggtcgatctggcagatgatgcccacctcctctcccctcccgcctctttctccttgcgtcttgccttgtcctgctgtgcctgcgatttgtgtctgcattattttgcccccgtcgtgcgctgtacctggtttcttgatgaggcggcttcggcgagacgccgacgtctcaaccattcctcttaatctttgcgattattattttctttctcggcttacgtacctgcgtccattcgtattgtatcgtcgttgccgcgcgcgcgcctattaattcagctgttgggcttgcctcgcccgnccgnccgnccgctcgctccattgccagccaagttaattacgtgatgagctgggagctcgggtgtctagtcgtccatggcgccgatcggtgcagaaggcttgcgagattgagaggtggtggcgttgaactggttggctgagagagtgcgatgttggcatggttcaatcaaatcgccggccgggttgacttgttgattgagccgtgccaatatcacaaccttctctagcctaggcggncgggctacagtttttgaatatgctactacttc

SEQ ID NO: 19746 - DNA, 549 bp, Zea mays
  unsure (1)..(549): unsure at all n locations
  Clone ID: MRT4577_118012C.1
caaaagaaccccagngacttgttgaagcnganngagangcggagacccggcgaacaaaccnggaaggancaccanaaggacaaggangggggcagagaacangagagngaagnngccncancncaaccgngcngnncgcaaggcnggannaanngncacanggannacnganccnangcanggaaacaccancaaggccggggggggccngaagacncgnccanncgacncaanncnggcngaagggcgcgcanncnncgacgngcangaacaagaaggaagncacccaggaggcanccaccnngaaangacngggcagaacgngaccgagngcannggnggancacggacngngaccnncgangaccnnagngaccgcnaccacacccacngngacccaaggcngaacgccncccagncccgggagcncgccnncaacanngcagagaggcncaggaagaggaggangcggncggggcncaacaacagccngccacngccaccacgggcnnncgaagnagccgaagcngaacagagaaggaagagggg

SEQ ID NO: 19747 - DNA, 1338 bp, Zea mays
  Clone ID: MRT4577_118013C.1
tccagccgcggacgcggtcggccccacaacgcacgctagctcttcagaacttgcggacgaaagactgaccgtgcaccgctagcagatcgatcgaccatggcgtcgtcctctcttctcctcctcgccgccgtcgccctcttcgccgcctccgcagacgcggccaccttcaacgtcatcaaccgctgcaagaacacgctgtggccggccgccctccccggcggcggcgcgcgcctggacccgggcaagacgtggaccgtgcaggtgccggcgggcacggcgcacgcgcgggtgtgggcgcgcacggggtgcagcttcgacggcagcggccgcgggacgtgccagacgggggactgcggcggcgcgctggcgtgcaccgtgtccgggagaacccccgcgacgctggccgagtacacgctcaacaggaacggcccggactacatcgacatctccctcgtggatggcttcaacgtgcccatgtccttccagtgccgcggcaggggccccagctgcaaggccgacatcaacgcccagtgccccgccgcgctcaaggtgcccggcggctgcgccagcgcctgcgagaagctcggcggcgacacctactgctgccggggccagtacaaggacaagtgcccgcccacggactactccaggttcttcaagaggctgtgcccggacgcctacagctacgccaaggacgaccagaccagcaccttcacctgcccacagggctccaactacgatgtcgtgctctgcccgtgagccacatgttcgagagatcaacgaccatgcatttgcagctcgcaacaagtgcacactagtacaactatacacaagaaataagagtcgcgatatttattattatcgcgcgtggagtagttggtaaataaatcgcttattgcgagtattttggcccatgaataaggccttacttactggccatcatttccgacatatatacgtttgttcatgaataaagaaactttgcaaaaaaaaaaaaaaaaaaaaaaaaaaaaaaaaaaaaaaaaaaaaaaaaaaaaaaaaaaatttgctaaaatgctacctaaattgctacctaaatgaacgctgctgcggttaattaattaacatccggacggacgttgtaatccgtctacttagaactccctccgtttttttagttataactggatagttaaattttgcactatctagcgataactaaaacaaaacgaaggaagtactagctagtatatatattggttgggtacgtctctaagtcttatctaatatatgcatgcacagtggggggggacaaattaaataataacaagtataaccaaacctttttttttatttctt

SEQ ID NO: 19748 - DNA, 2356 bp, Zea mays
  unsure (1)..(2356): unsure at all n locations
  Clone ID: MRT4577_118014C.1
aatncagcctttctggaagcctgcctgatattaaaagcccttcactaaacaatttagatttttcttacaaccagctctctggtagctttccttcttgggctacccagaataatttgcaattgaacttggtggccaacaacttcattcttggtagcagcaacaacagcattctgccttcaggcctaaactgtctccaacaagatattccttgtttccgtggctctccggaatattcctccattgccgtagactgtggaagtaacaaatcatttaggggcttagataatactttttatgaaatggatcctacaaatattggagctgcatcatattatgttactggtcaaacaagatggggtgttagcaatgttggaaaatttaatgaggccccaaatggaagttatacaatagatagttccgagcagtttcagaatgcactggattcacaactgttccaaacagcaaggatgtcaccatcatcgctacggtactatggcattggacttgagaatggaaattatactgttgagcttcagtttgcagagtttgcttatccagaatcacccacctggcaaagcactggaaggagagtttttgacatatacatccagggtggtctgaaagaaaagaatttcgacataaggaagacggctggtggaaaatcatatgttgcagtatataagaaatacaatgcaactgtgtccaaaaacttccttgagatccatctcttctgggcaggcaagggcacttgttgcattccaactcaagggtattatggacccatgatctcagcattgagtgtgacaccaaattttactcctactgtgcgaaatggtgttcccaaaaagaaaagcaaagcaggggcaattgttggaatagtaattggtgcttctgtcttaggactagccgccttagctggaatctttatgctggtacagaagagaagaagagcagcacagcagcaagaagagctttacaacatggtgggaaggccaaacatcttcagtaatgctgaactaaagttagctacagataatttcagttctcaaaatattcttggagaaggcggatatggaccagtttataagggtaagctacctgatgagagggtaatagctgtgaagcaactttcccaaacatcacatcaggggaaaagccagtttgtgacagaagtggccacaatttctgctgtgcagcaccgcaatctagtgaagctatatggttgctgcattgacagtagcacccccctgctggtctacgagtaccatgagaacggaagccttgatcgagcactctttggtgacagtggtacgatccttgactggccaactcgcttcgagatcattttaggtattgcaagaggcctaacctatcttcatgaggagtccagcgtgcgcatcgtgcatagggacatcaaggccagcaatgttctacttgacaccgacctcacgcccaagatttccgatttcgggcttgccaagctctttgatgagaagaagactcatgtcagcactaaaatcgcaggcacgtttggctacctggcgcctgagtatgcaatgagaggccatctgactgaaaaggccgacgtcttcgccttcggggtattggcaatggagactgtcgcaggtcgaccaaacactgacaattccttggaggaacacaggatctatctctttgagtgggcctgggagctgtacgagagggaccaagcacttggcatcctggacgcaaggatcgaagaatccgacggtgaagaggcagtcatcagagtcatcaatgttgcgctcctctgcacgcagggttcgcctcaccagcggccaccgatgtcgcgtgtagtgaagatgctcaccggagacatcgaggtgcctgaggtggtgaccaagccaagctacatcactgagtggcagcgcaggggtgggaacagcagctatgttaccagcggctactctggcgacacgaccggggagttcagcgtgcagagggagacgactgcgcctctcaccccgtcgccggcgatgactggagtcatcgacgacgggcggtgatttgatcgcaggctgatgcatgctgtgtttggtttgatctcaagggaaaatctttgaaccatagttgataaagcgcggtgcgcggaaaataagagtcagctttacatgctacttggctgggttaatgatagatatcatataacataacgtaatgtaatgtaatatgctacttagctaggttaatgatagatacgatatgatatgccatcacaaaatggcgttcaccgtctctccacagtggcggacgattttttatacagggtgtgccgtaataccctttttatatgcaactgtacccccagttttatagt

SEQ ID NO: 19749 - DNA, 211 bp, Zea mays
  Clone ID: MRT4577_118015C.1
ccacccagtaacgagccggcagtgagccgggcaacacgcccatgcaagcggccacacagggcaggtacacaacttctccaccgatgaacgcgcccgctgctcatcaaggggagtggacaagtaacaccacatccaccttaattctcataataatgctcaccaaacacacccaagatttaatcagaaacttccttgcaaaccacgccagcac

SEQ ID NO: 19750 - DNA, 235 bp, Zea mays
  unsure (1)..(235): unsure at all n locations
  Clone ID: MRT4577_118016C.1
ggaagttttcccgaacggcgagcgcaacaaggagtacncatcatcaagaacccaggaaagtatatgagaactcgccacgccactcctcgttgcctatatactccgcctccgggggggggggggggggggggggtctatgatcggcagatccgctgccttacctgatctccccgccctcctcaccgcccgccccagatgtcaccgcccaaagggacaccaagcatcggatcggatc

SEQ ID NO: 19751 - DNA, 334 bp, Zea mays
  Clone ID: MRT4577_118017C.1
gggcgggaacactccccggggggggggatgagggtttcaccttttactggcaacccccacaggggggggaaatttcgttcaaaaatgaaaaaggaaagacaggccccctccacctacgttgatcaaccaaccccgtgttttatgttttcaaaaaacgcacgcacgcacgccggggattccgaaacgggcccttggttgctaggtttaatcggaccccattcggttgaacttgtttagcgcccgctggaggatgtttaaaagcacccaccccctgggggggcgcacaaccaaaaaaaagaggagggcccggtttttcttcgggggcgcggggggg

SEQ ID NO: 19752 - DNA, 275 bp, Zea mays
  Clone ID: MRT4577_118018C.1
cgggagccaaagctgcaggcagctggaagaatagatacggggtgggctggatttgacagttaagcacgtaaaaacactgctcgaatcttgcgtgatgatgctgagccagtagatgccacacctccgccatcggcggcaccccagcctgcagatgatcaggatgtgaacgatgagctatgatcgcaggatgttctcacgcttgatgttactgaatgaaaatttggagactcgacagtcatcacttcagagcacatgcacacagtattgatgggcgc

SEQ ID NO: 19753 - DNA, 390 bp, Zea mays
  Clone ID: MRT4577_118019C.1
agggagtaccttcacattttgtgagatttactgagaaggcttattggaggtgagccccaatgcaaaatacctgagggtgtgttgacaccccaaacacaatggaggaagctggagaaattacagatctgcttttgcacatagatagcgaaactacagtcggtgctatacttgtgccacagaataatgatttatccgtcttgaggccctacttccactttcgctgctaaagaagggcttgtagcggaacttgggtttgctatctgatcactttttctttttgctgacagcatacactaggatctgcgcgaaggattctttggcaccaggagttcacgagaacatgaagggggggaccctgtcaaccaaagttttgagctcccccttatttga

SEQ ID NO: 19754 - DNA, 735 bp, Zea mays
  Clone ID: MRT4577_11801C.1
gctagtggaattagctagctaactattaactaatttactaaaataggtaatagttgaactattaactaaggtgtttgatgtatccaactaattttagccattaactattagttctagtgcatttaaacacccccttatttgttcaagcaacgctgcagagatgtcgactgtcgactcgggtatgaggttcttgggcttcttggtcgaggcgttcaaaaaatctttatggttttccataagtggtggagccaagctagctagggtagtggaacctggtagttgctccaaccaatggcgagctcctataattgcaccattgatgggcagatggcgatgtttctcggttgctgtcataagctgctgcccgacacctcggctaaaaggagccgtccaaccgagccttttgtccccgaacacgcaggtgagatgagtggtaagtaaccaacctgagtgacagggaggatcatggcatcaagaatttagaggggaggaaggccacgatgcaggctgcagcggatctctccatggatcaaggtgtccgcgcatgattgagcacgaggcagagtccaagcacactacgtacgataacacttgtcgaaagctgctattatgggcgtttctgtgtgggatttgggcagtcaacgccacgagatttcctacgaaaactgactggctcaggggtttcatgcatacgctgcttcttttattattattattagtattattgttgttgtt

SEQ ID NO: 19755 - DNA, 563 bp, Zea mays
  Clone ID: MRT4577_118020C.1
tcgaacggccgcccgggcaggtaaaaaaaaataaaaaaaaaaaaaaaaaaaaaaaataaaaaaaaaaaaaaaaaaaaaaaaaaaaaaaaaaaaaaaaaaaaaaaaaaaaaaaaaaagtggaaaacaaaaaaacaaaaaaaaacataaagggggttgtccccctgaggcccaaaccaccggaggggcgaatttgcaagaatttcaaaggccccggggggccctatagcgagccttaagaagggcccaatggcccctattggaaaacgtttaaaaaggaaaagcccgggggttaccaaacttaaaccgggaaaaacccaggcccttcccaacaaaaggggttagaaaaaaaagcccctttccgaagggggttaaaaacaaaaaaggcccccacaaggcgactgtcccaaccctggaccaccccaaaaagcaaagggacccccccggtaacgcccaataaaacccgtacattggggaggtccctaccaccgggacctttccatttgcaacctccctagccccccccctttgcgggttttccccttcaatttttaaaacgggggccg

SEQ ID NO: 19756 - DNA, 414 bp, Zea mays
  Clone ID: MRT4577_118021C.1
cacgatctctaatatagaattactttcatgatgacacagatcaaaccagattttctcaagttgttattttgaaatgattaatgagctctatgtatttaccatttgtcttacagagtagccattacaattcttttttgttcacaatataataaaagcatataagaactcttttaacttcaaattttattggctggagaaagttttcacaacaataagcatctcatttgtttttaatattctgatgctacaatattgagacgcttagctctctgctaaatgaaccatttctcttcattctttgttggttcattggatatggtcaggtatgaagtcattttggttcctggcgtgcaatctttgtcaaccatggtaccattgtcatagtccacactcctttgtgtccgtacaggtttg

SEQ ID NO: 19757 - DNA, 412 bp, Zea mays
  Clone ID: MRT4577_118022C.1
aggaaactggagagcttagaggctctaaagaagactttcaagaaactagaccacgatgtaaatattcaagactttctaggctcgcgggttcagacagtcgaggagctatcagcagagcttgtctcgttgcagggtcaggtggcggagcttcaaaagcgtgtcagtgattggagcgatcctgagaaagttgacaatatcgacaatataagagcaatggagcaatctctcaaagaaactattaatcatatccaaatccataaggggaacttcggaaagcaacatctaatcgggctacagtatgctgctacccagttccagaccgacatgcagttgcctctaggactgcccggcgagtcaggcccttcgtcgtggttccaaaacggcggcactgatgggcaacaagccatgatgc

SEQ ID NO: 19758 - DNA, 691 bp, Zea mays
  unsure (1)..(691): unsure at all n locations
  Clone ID: MRT4577_118023C.1
aattcggcacgaggcgcacatatcgatctcgtcgtcgtctcccccggtggcatgctccgctcccgctagatccgatctattatctatggatccccgccgtctccccatccttctctccctcctgcttgccttcttctccgccgttgtcgcctctgacgagatccacggatgcggcggcgtcgtcgaggcgagctctggcttggccaagtcgaggaaggcatcggattccaagctcgattactccgacatcacggttgagctctgcactgttgatggtttggttaaagaaagcacacagtgtgctcctaatggatactattttatccccgtctatgataagggttcgttcatggtcagagtgaaggggcccaagggatggtcatggaagcccgaaactgtaaaataattccttaactgaatctttcctttgtttccctccttactttgtctttactaagcactaagtgcatttgttcttttactggatgacatgttcacctaacacttcaggttcctgtcatcattgatcacaatgggtgcaatggaaatgcggatataaatttccagttcactgggtttatgatatccggtanagtagtgggagctgttggtggtaagagctgctcaaaacggggagacctgctggtgtgaaattgaactgatgacagattctgatgagntgattgcatct

SEQ ID NO: 19759 - DNA, 384 bp, Zea mays
  unsure (1)..(384): unsure at all n locations
  Clone ID: MRT4577_118024C.1
acgcacttnnngagtattcaagccttcaaactcaagtatcaacaacacananagggtgcgtaaccaatatttatattctagtctncctaacaatanaaacaatnccaaacaaatacgtctacaaaatgaanaagaaaactacttcaataaacatattcattaaaaacattcaacctccaaccggctggataaacatgcacacaaccagcatatcaagcctaagcccaaagtccctaatggaagtaaaactcatgacactcatgtcgcctctaaacctaaatctgctggacctgttgactataacgattatcaccatcaagacttcaatccaccaccaatggaacctcctacacctacacaaaataatatacccttaaacatatc

SEQ ID NO: 19760 - DNA, 698 bp, Zea mays
  Clone ID: MRT4577_118025C.1
gaacacttgatttaatcaagaatatttataaattaaaatcgtattttttttcctcctacactgatgtagtagtattacaatcgttgactttgatgtgacagcctacagcagctaacctaaccgtatcttcagaactgagattttgtaatggacatctatcacaatcaaacaacaagcccacgcggcgccggcgccgacgacgatctccatgctcctcctggcggcgctcttcgcgcaggagctgttcgtgttccacgtccactcctccaccgaccacgccggcgtagttccagcggcagaggcctgcctggtccttgagcgcctccaccgcgccgacgctcatcgccaccatccacgacgccctcgctgccgccgccatgtccggattctcctaccgctcgctgtgctggtcgctgattgactcgcagtagtgctcctctgaggttgtgttgatgcttgggagtgagctgggagaccggcgggtgggttatataccggagggaggccggcggaaacaggtggccgcggacgctggttttgctggacaccgggggctctcagtctccctgcttgtttacgctttctccagagctgtttcgctggataccaggggctctcactcaccactgtccctgcttgtttacactttatccacagttctggagagaagaacgagattgctttctctgtttccccgc

SEQ ID NO: 19761 - DNA, 449 bp, Zea mays
  unsure (1)..(449): unsure at all n locations
  Clone ID: MRT4577_118026C.1
cacaaccacaaccacggccacggccacaatcacgcccttgttcacggacacgctcatgcgcacacgcatggccatggacatggacatggcccagggcacgctcatttgcatcaccacggccgtacgccgtcaacaggccatactagccatgtctcctcctcgcggactcattcacaccgccattcaaaatcaccgtcctatcaaaagagccccagcctcgagcgtgctcaacagcaaaagcgtgagcaacaaacctcagatcaggcacggcgccggtctcagattttggcgctcccagcaccgcagccgcagctatccacgtttacgagtggttcgtcctgtcgggaaggcttcgcagtanggtcagataccaacggctttcatcgtccttcaagtccgtcaatacagaggcaggataagcgctcgccatcgccagcgcatgaggatgt

SEQ ID NO: 19762 - DNA, 1183 bp, Zea mays
  Clone ID: MRT4577_118027C.1
ttctggaacagaaacgaagacgtttgtagcacatggtaggtcggccatcgatctgtcatcggacggctcacagaaaattggacgacgtggacatcctgcccgctccgttttgctcccgcggttaatatagagaataaatccttcccgatcgagcatgcattgcaaacaaagaaatcagcaagccagcatcaacagtttagacgactgacatcgatccgcatgacgatgctgccccgcggcgccgcggataaaatcatcagccacaccctggcaggcgcgatgctctcaggcctcggcctatggcacctcttcaaccacatgaggctcttggtctccctcgccccgaccccgtcgtcctcatcgtcgcgcgtcgtcgtcctcgcgccggcagcatggttcccggcgccacggggtgcgtcgcctcgagcccatcgccatgctggccgcgggagcgtacgggctggccacccagatgctcgcctactcgccgatgccgttccgcgccgacggctccatcccgcctgagcggctgccgaaccacgagcacgccatcatctacgcctcgctcctcgtctacaccagctccaacatatacctggacgacgacgacgaccgcgccacgcggcgccggcgccgacgacgctctccatgctcctcctggcagcgctcttcgcgcaggagctgttcgtgttccacgtccactcctccaccgaccacgccggcgtagttccagcggcagaggcctgcctggtccttgagcgcctccaccgcgccgacgctcatcgccaccatccacgacgccctcgctgccgccgccatgtccggattctcctaccgctcggatcttgggctcttgcttttgagttcggttgctgtgctggtcgctgattgactcgcagtagtgctcctctgaggttgtgttgatgctcctgtgctgtgtattggggcttgggagtgagctgggagaccggcgggtgggttatataccggagggaggccggcggaaacaggtggccgcggacgctggttttgctggacaccgggggctctcagtctccctgcttgtttacgctttctccagagctgtttcgctggataccaggggctctcactcaccactgtccgtgcttgtttacactttatccacagttctggagagaagaacgagattgctttctctgtt

SEQ ID NO: 19763 - DNA, 442 bp, Zea mays
  Clone ID: MRT4577_118028C.1
tttcctacgtgcgaaccagacctatgtcattgctgggttaactaaagatgacatctgtggtgctgacgtcaccaagtttgatgacaagtactttgccagggagaagaagcacaaggtgaagaagaccgagggccagcttttagagacataaaaggaggcatccaagtcactgactgtcttcaagaaggatgaccagaacgctgttgatattgctcttatcaaggctatcgaggctgtcccggagctgaagacctatcttggggcccggatgtttctcatgaatggtgacatgccttatgagatggtaattctaagcttctagttatggagctcgtaggaagctgatttgtatgagttattgtaatatcgagatttgaaccaatagcgaacttttcattgcgcttggagttgtgctgccatatttttatagatctatgaaagt

SEQ ID NO: 19764 - DNA, 2739 bp, Zea mays
  Clone ID: MRT4577_118029C.1
atgacggccggcgctggcgagccccgccgtatagtcctcctcctagacctcgataccttcctccccacttccagctcaagcacccccgctgccgcctcctacctcgccgaagtcctgcccgccgccacctccctgctcgccgcctgccggtccccggcgtccctctccgcggggcgcctcttcttctcctccctctccccgatcctctcctcctccctcctccctaggccgctcccggccgcccccaccccgctctccttcgacctccacccggccaccctcgcgtccctcgccccgctccgctgcctggcgctccgggcgacccccgcgcacccgcgcgcccccgcctcctcgtcagtcgccaaatctctcctccagcttgagcacgactactcctgggaccacgacccccctcgccgccgtcgctgccgcggcttcgatccgccgcccaatctggtggctctcttcacgcccgtcacggaattcgatctgttcggggacgacgccagcttcgtcgagaaattccgcaaggttttcggtcctgtcagggaccgcctctcggcgattggtctacaggtgtgctgggtcgtcgtcccatccgcctccgtctccgcctctgccgccgccagtgaggggatcaggagggcggtcaccgagctgggctggtggttcactaccgccgatgcggtcgcgttggggtcggccgttgcaccgccggcgctcgtgtggggaggtgttggacttggcggcggggaaggtggacggcgaggggaggtggtgttggagatcgcggatgtggagggcaaaccacttgtctgcaagggctgtgaggtcgaggtggttggctcctcacggttgcagcaggccagcggcaatgccgtgtccaggatacatgtcaggtcggtgtgtgaggcggggaattgggagcggttgatggatggggatgttgccgtggttcgagggttccaacgggaggggagcaaggctgacggtgaagaagctgtagataaggagtattttcctcatcggattcttgaattggtccttggtgacgagaaggaccgattaggggttgccaagccaatttggcagctaattttggtgttccttagtagaaggaactattgtgcagtagtctcagtttctgatggagatggaaactccgtagatggtgttctcatgcccttctcgatgaactgtgccttacttcatcttgagaagaatgtcatgtctgccaaagcctccgagacgccaagttgtggtgcatctgatgagacaaaggtccagagtgataagaagaggagaagcaggctggtcggtaagctacttgaggtgaccacctggagtaccttctgtgacatgcttcgcaaacgtgctgatggaagcatgccggtggtggacttggaggatctatatttcagcaggtatggcaccacatccaaaaagttgcggtttctgaaatgctggatgaaacaggtgaaacagtcacgtcttagtactctatcaagtatacatacagaaggagagcagcgtcttccctcgaaggatgattcagaagcaagagttctggtttcagaagaagatgcttcagctagtcttgtcaatttttcgctggatgaagcagattgccagaaagtagacgcactagtggatgtagcaggctgcagtgaagtgggcatacctgtcgatgaagcagattgcagtaaagtggacatatcagtgggtgaagagagttccatgttctcttctatggaagaattagaagcatttctgggagctgtcccacataagattgagcaaagtctttgttctgaagatgctgatctggggagtttagctgaacgtttggttgacttgtccgtccatgcgatgttggttaaacacggaaagattgcagtgcggtactttgaacacaatgaagcggaagatggttctagtgcaaagattgcctcatgtaccaggcatgagctgcagatcttgcttagaatggaaatgatcaaatctgaactcgggtctgccatagaggaaggttcaaaacagaaaatgataaaagacatctgctcgcttctgcaatttattgacatcaatctccaaggggattcttttcagtctgacggtattcttgagtatgctgaaaagaccataaagtcgaggtacatcaactccatggaggatgtgatcaagaagatctacagggagatggagtttgatttatttgatgacgacgacggagttgactactcagattctctacccagcagcagcaaccaggacgacggcaggtgccgcagccagcggggctccgacagcgcgagcgcctccgcgctccacctgctgcagcgggacgccaggagcagccggcagcgcgaggacgacgaccggcacgacaagctgacggcgagggcccgggagcggcgggaccggcagaggcggctctcctccttcaccagctgggtgcccgacctgcgccgcgtctgggcgctcaagcacccggggaaagagccgtgcgcgtgggtgccgcggtcccggtccaggtcgtgcgcgaagcggcggcgggccgcgtgcaccgatgtcgtcctcgagacgccggtgacctccggcaaaaggcacatgagcgggtcggagtccgacgacgccagacaggtggcggcgaggaggtccgccgcgctcggggccgtgtccaagaccttgtttgacgacgaggtggtcgagactgacgttagctcgagtagcacgtaa

SEQ ID NO: 19765 - DNA, 174 bp, Zea mays
  Clone ID: MRT4577_11802C.1
ctgaagttattggcggtggtgaattgaaatctaggcggcatctggatgttcgtcgagggagtggaaccttgccatcaatcactgacaaggactgggacgacattaagttcggtgtggatactcaatgttgttactatgctgtttcttttgtgaaggatgctcaagttgcccacg

SEQ ID NO: 19766 - DNA, 240 bp, Zea mays
  Clone ID: MRT4577_118030C.1
cggacgcgtggtttgacccaggcgtccaagagatgttcacagggacccaggggatgtcatgtatgatggcaaaaatctggattcttaatttttcttgctgaggacaggtgaaccaccatccccagaagaaacccttcgttaggagatttccccaatggctgacccacatgaagagcaggtatggggtctttgactaacacaacaagttgaatgatggttgccaaaccgaactgactgaac

SEQ ID NO: 19767 - DNA, 740 bp, Zea mays
  unsure (1)..(740): unsure at all n locations
  Clone ID: MRT4577_118031C.1
gccggccggttcgggaccgaaggacggcacctacgactacgaagcggcgagctccatcttcttcccggcgcaaaccatacagaacgcctgcgggacacaggcgatagtctcgcttctgttgaacagagaagaggagattgatatcggcaaggagctgagagagttcaaggagtttgcgggtgacttcccaccagatctccgtggtgagactctctccaactccgacctcatccgtgaaacacacaactcattcgcacgctcctcgccattcatcgatgagacgcagcgaacagcgactgaagacgacgatgtattccacttcatcgcctacacaagcataaacaacaaactctacgaactcgacggcctccaaccagcgcccatttcccatggaccctgcacttcttccgaattcccccagaagatcattcccgtactccaacgccgcatcgcccgctaccccgccacggaaatccgcttcaacctcatggcctgctgtcgcgacctacgtatccgtgcccgagagattggggacgaggaagagttggaggagcaggaagataagcgcgcaaggtggctgtgggagaactcgttgcgaaggcataactttgtgggctttgtgngtgagctgctgaagagtngtgtgagggcaaagttggatcaaggcggcgatgcgtatgacaagtgggttgagggaggccagggaaagtcgacncagaggagggagggactgagaaaca

SEQ ID NO: 19768 - DNA, 1192 bp, Zea mays
  Clone ID: MRT4577_118032C.1
gctgggggtgtggttttttttttacaaaaaaaaagaagccgcttttataaatggctccacaccggaggggccaaggactggcgcggccctatccctatccggctatccccatcggcttcctccccacaagtcgtgtccaccaccaacaaactcgtggggtgggtgccacgagacagtgcgtggccatggcctctcgcgacggcgccaccttccaagtgtaccgggccatgcccgcgccgacgccgatgtctctggcgtccgccgctccagccgcagccgccgccgacgccgcggcgccgaagaaggcgggcgcgggcgcgggaaaggaccggcacagcaaggtgaacgggcgcgggcggcgcgtgcggatgccgatcgtgtgcgcggcgcgcgtgttccagctgacccgcgagctggggctcaagtcggacgggcagaccatcgagtggctgctccggcaggccgagccctcgatcctggcggccacggggtccggcaccacccccgccgtcttctcctgctcctccgcaccgtccacctccgcggccagcgccggtgccggcgccggcgccggtgtctccctcccgctcctcgggaagcgcccgcgcgaggagcacgagccggcggtggcggtggcagtggcgccggcgccgttctgggccaccctgcaggcgcggcccgtggcggcggcgtgggggctctcgccggcgcaggaggcggcggcgcaggcgtacgcgtcggtggcggcgcagggacaccacctcaacctgctctccgtgctctccggcgccgcgaggcagtcggaggaggagtcccggtgactgcctgcatgccgccgccgccgcactgttgctacgtaatcgcatgcgtcgacgcgtggtggcatgccgcgcgcatgcgtctcgtttccgtgcatctccggggggtgcgttgcgcgtgttttccctgtggttttgcggtgtgagaggaacgcggcgagctggacaaggaggatccagagcgcgagatcggatcggggttagcggctgtagatagcattcgtcaggttcgtgtttgtgataatgagctcgccgtagcgcgcgcggtggttatgtggtgtggttatgtatgcatgcatgcatgccgaattgtcaactgatctgaatcctaacactaaataatgcattgcacgtcccggtgtgtgcaattccgc

SEQ ID NO: 19769 - DNA, 409 bp, Zea mays
  Clone ID: MRT4577_118033C.1
cggacgcgtggggcgctcccgccaaggccagcgccaacccgcgtcggctgctgctgctggaggacaacagacacccaggcccacggtcccgtcgccgcggcgccgcggcgcgcctcagggtctcagcctccgccgccccgtcggacgtgccggacttcctctcttccaattcgcttacagagcgctgctgggccacaaaggaagaaacatactaagcactaagcagcttatgggttgaagaggaccggtttaaacaaagagtttggttagaaggagcccggccagaggaggaagagatatttcaatccacagtggttcagagagtcggaagctcatgggatggttactggctaacggagagcttaataataaacgatggagacgcatttctcggtcgcttactgatgta

SEQ ID NO: 19770 - DNA, 363 bp, Zea mays
  Clone ID: MRT4577_118034C.1
tcgggcacgaaatctaacccacccgcctgcggctcctaagcgacggcggcggcagccatggagccgtggcgcgtatgatacggtggctcggctgatcggcggcgcacggaggcatcacgggcgttgcaacactacctggaccgctctgcaccttacacggcgtggcggtgcacgtgcactctcgtaggcggggcggcgtacgcactacgggtctactacatgcgcagcttgtacgtcgtgacataccgactgtgcatgtacctgctaaacctcatgatctgcttgatctactccatggtcgagcctgagctggaagcgctctaagctaggcccgggctatggatgcgatgctcctaaaagatc

SEQ ID NO: 19771 - DNA, 554 bp, Zea mays
  Clone ID: MRT4577_118035C.1
atcgtccgctgctgcaaacacgaagccgatcgcgctcccgccaaggccagcgccaacccgcgtcggctgctgctgctggaggacaacagacacccaggcccacggtcccgtcgccgcggcgccgcggcgcgcctcagggtctcagcctccgccgccccgtcggacgtgccggacttcctctcttccaattcgaagaagtggttgaataccagcttgagtccttaaaatacaatgaccagccccggcaagattatgggatagaggtcatgtaccggtttgcaggctttgaaccccttcgaaaggtcaacttagtttggatgacagtttggtctaggacaggtggtctgaaacctattcctactggctttacactggcagccagactgtgttacttactgattgccgccaatactgttcctgtttgaacgcttccggcgtctggtccaccattcagcttacagagcgctgctgggccacaaaggaagaaacatactaagccctaagcagcttatgggttgaagaggaccggtttaaaccaagaggttggttagaag

SEQ ID NO: 19772 - DNA, 789 bp, Zea mays
  Clone ID: MRT4577_118036C.1
ccggccgagatcccgccgttcctcggcgccttcccgtggctccgcctgctcgacctctcctacaaccgcttcgccggcgggatccccgccgcgctcttcgacccctgcccccgcctccgctacgtctcgctcgcgcacaaccacctcaccggccccgtcccgcccgccatcgccaactgctcgcgcctcgccggcttcgacttctcctacaaccgcctctccggcgagttcccggaccgggcctgcgcgccgccggagatgagctacatctccgtccgcagcaacgcgctctccggggacatagccgccaagctcgcctcctgcggcagcattgacctcttcgacgtcgggagcaacagcttcaccggagctgcgccctttgcgctccttgcctcggtaaacatcacctacttcaatgtctcctccaacgcctttgacggtgaaatccccagcattgcgacttgcggcaccagattctcgtacctggacgcgtccggcaaccgcctcacggggccggtgccggagagcgtggtgaactgccgcggcctcagggttctggatttgggggcgaatgctcttgctggagctgtaccgcctgtgattgggacactgcggtcgctctccgttctccggctcgcgggcaaccctcgcatttcaggttccattccagctgagcttggagggattgagatgctcgtcacgctcgtcgcgggccctcaacctggttacgaagcactgaaacataagcgatggcaagcaagaccaagaaaagagcaccaccaaccacaa

SEQ ID NO: 19773 - DNA, 187 bp, Zea mays
  Clone ID: MRT4577_118037C.1
ccaggattaggccaggattcattccaacttatcaaaacttatataaattagagaaacaatccggccaggaaccgttccaggccttcaatccgtgaaaaacgaacaggccctgatcgatcgttcgacggaacttctgcacccccttccttttcgcagtccgggcgtcgtctccatcgatcgcatcttt

SEQ ID NO: 19774 - DNA, 235 bp, Zea mays
  Clone ID: MRT4577_118038C.1
atcctcctttcgaccagaaacaaaaaaacatgggtggtatttataagttttatccccttttacaccctggaagattcacaggaaaggggaaaaaacggacacgggatcagcaattctacgagcagctgtgctaaccatggttccataagatgggctacgaagaatacggtggtggaccacatccaccagagccatgctgcccggacggccatgaggacggacagtgcaacaaacc

SEQ ID NO: 19775 - DNA, 581 bp, Zea mays
  unsure (1)..(581): unsure at all n locations
  Clone ID: MRT4577_118039C.1
ctcgtctacgagttcatgccgcgcgggnagcctcgnanaaccacctcttcaggaggatctcggcgacgctaccgtggggcacccggctcaaggtggccatcggcgccgccaaggtctggccttcctccacgccgcgagcacgcccgtcatctacagggacttcaaggcctccaacatcctactcgactcggacttcaccgccaagctgtcggacttcgggctggccaagatggggcccgagggcgaggacacgcacgtgacgacgcgcgtgatgggcacccacggctacgcggcgccggagtacgtgcagacgggccacctgaacgtgaagagcgacgtgtacagcttcggcgtcgtgctcctggagctcctcacggngcggcgcgccatggagcacgtccgcgggcgcagcgcgcacgccgaccagcagctgaagctcgtggactggacccgcccctacctcagcggcggcagccgccgcctgcgctgcatcatggaccagaggctggcgggccactactccgtcaagggcgcgcgcgcccgggcgcagctggccgtgcagtgcaccgcgcagcagccgc

SEQ ID NO: 19776 - DNA, 309 bp, Zea mays
  Clone ID: MRT4577_11803C.1
cttggacgaggcgacatggcggcggcgctgctgctggcgctggccttcacgttcctgagtggccaaggcgcctgcacggcggcgggcaccatcgtaacctctgtccaggaagttgactccaagacacagcttacctgctttttgaacagcagtggcattgacatcgttggccaccgctggatgagaggtggcaaggtactgcaggaagacacgctgcccgatctacagatgaagtacacggtggatgcagatgaccgctctggagaatattcctgcatcttccttcctgagcctgtgggcagaggcaac

SEQ ID NO: 19777 - DNA, 523 bp, Zea mays
  unsure (1)..(523): unsure at all n locations
  Clone ID: MRT4577_118040C.1
acggagtacggggcgaggacagcaactgcaggtccagctccatccacgacgtacaacatccggatacaacnactaggccgccactgatgactaccctcagaggtgggtggtgtacaacaagtccgccggggatgacaactacaggcgcgtcagagggtgtgggtgcggcaacatcggcgacgacgactacggacggggcaccggcggcgcgtggctacgacatgtgcggtcggcgacgatgactacggccgtaacggcggcgaccactacggccgttacaccggcggttgacggctacaacaagtgcggaaacgacggctacgacagcgggtacaacagatcgggcaccaccaacgacgacgaatacggtgcgtggcaccgggcggcgactacgtgcgtcgaggccctgtggcgacgacgtcgtacgcccggcggcgatcagagtgcgggttacgggcaagctaggccggtggtaggcgccggagtagggccggggtaggacatgttcccttcccgggacgac

SEQ ID NO: 19778 - DNA, 579 bp, Zea mays
  Clone ID: MRT4577_118041C.1
tccgaaaataaggatttttgctctcgctttctctgatctgcggcagttcctcccccttcatatgacgaaacacacccagaacgcggaatgcgctgaaaatatgctaccaccgtatggcgcctctttacgtaaacacgatcaagaagatggacgtctcaaagcattccaaatacttctgtgacttctgtgccatgttcgacgagaagatgatagcagctggtatctgcggattcaacgactgtgccaagcatatcgccgtcgaggcctacaccatgatcactgtctagagcgaccactgtgtataagcacaatccggtgcctgacgaagcagaccgaaccatgattgcgcacagctcgaaaatgacacctgagatttttgtaaatcagccaagagccgagatacttctttgcctttttagctacatgaacaatacatgttcatctatcagcagcgaccactatgcactcatggcttgtcaagctacattgatgaaatgcactatgtatcactcgatatccattcatgtatgaccctattgcctcctgcgttctactactacgatatgcccctctctacat

SEQ ID NO: 19779 - DNA, 293 bp, Zea mays
  Clone ID: MRT4577_118042C.1
atctattacacaactctcatacatcatgtccaccttgcaaagggttcgttgatgcctgatgtagacagcacagtcgttatctgtgtgaggggatcgttgtgattcaaaaacgtgcgaagatactaccattactcgtacttggactaccgttctgtgcatagtctgaaggctgctatcaatagaggactactttagctaatgggatgcagactgactatgagactgatagctgacaatgaaacttccttgctcgaaaatggatggcattcccattcggtatttgggaaagaatt

SEQ ID NO: 19780 - DNA, 537 bp, Zea mays
  Clone ID: MRT4577_118043C.1
cctcgaggccggccgggacctgcactgctactaactgcgacgaatcctccactacctacctgcgcagcgatgccacccaaaaaaatgccatggcaagactcagaagactgtcctccacggagaaccacaagcgacctgcgtgatcatacctcagcatcctctactgcgtgatcacggaatgacacccacctctctgagggagacagcatcctcacacgcgtgcactccatgatccgagagctgaatgacaatatgctatacgatattcgtggtaagagggggatattgaggctctactcgaaatccgatctagcagaggattgcgacaccaacaccatgataactaaaggatgaacgggcgtgtgatgggatacatcctctacattaaccggcaagacaagcgcccctctcgatataaagcactacaatgtgctctgtgtgactagagagggagaggaaaagcagcgtctccaactatgaaggaattgagaccgacgagagaagtgactagagtgagaatagaaccggtcctactga

SEQ ID NO: 19781 - DNA, 275 bp, Zea mays
  Clone ID: MRT4577_118044C.1
actcttactctaactttttacaacacacaaaattatatcagctttggtcttattctaaatgtccatggcacacaaaaagtcataatatcgtataacctgcacatctccactaataaacatgaaccttctatacatatccagattatcaaattatattctgaacgtgacaatagtaatgataatgttaataaaataattaaccacaatatatacataaacttaataaccataactatcacaaatcataaataattttcatcattaaaaataaaacc

SEQ ID NO: 19782 - DNA, 241 bp, Zea mays
  unsure (1)..(241): unsure at all n locations
  Clone ID: MRT4577_118045C.1
ctctcctcaccaaangagaaggatagctctggtaacatatctgggtgcttatctaacgctaaaaattaatattaacaaggaaagtctgccttctactctacgagctgaaacttacgcccccaacgacaacttggcccacaaagcacattgacatcagatgggactgattgggaaaccagcactcccctagcccggatatacacatgctcactctggccctcggggcattaggctcaacata

SEQ ID NO: 19783 - DNA, 176 bp, Zea mays
  unsure (1)..(176): unsure at all n locations
  Clone ID: MRT4577_118046C.1
gcctccgcctctccttccgtgtccgccgtcttgcgctcgctacccctctccgctagggctgggccggcgaagagcgcccagtcgcggaccaggatgaagtttgttgctgcctacctgcttgctgtnctcgctgggaactnnagcccctctgncgaggactngacagncattctgga

SEQ ID NO: 19784 - DNA, 181 bp, Zea mays
  Clone ID: MRT4577_118047C.1
tttcaatcctgataaagcactcatacggtggggtctttttaaccgatgggagggcaatcttacttctttgtatcagatgcagactttcaagacctctgtttatgtcactcatgctgacatcctccttatcgacatgtagaaatgtataaaaacctttctaactcaaaaagtggactaaata

SEQ ID NO: 19785 - DNA, 367 bp, Zea mays
  Clone ID: MRT4577_118048C.1
cacttttatatatgtaaacaatactagatcgaaaaaaacctctctcgcatcagaggggagttatatatctagggatattacccactatccttaataatctctaatcctctatcttcacatgatgcactataactccaccttatttaccgctatcattggcattttacaccacaacgttagaaatacatctttcattgaatctgctccaactgcaaagcctaaaaaatcatctatctctggccaaaactaaccctgtcactgtctatcccatgattgcatcagaagacttttcccacaaaattactgtaacgaacaattatttttatggaaacaccctgattttatccaatggcacaccttcgctgat

SEQ ID NO: 19786 - DNA, 348 bp, Zea mays
  Clone ID: MRT4577_118049C.1
cgcttaagtacaattcaatgcactccttcttatctccactcatataaactagtaagggatggttctaatacccttcccgcctgttgaaaaaccacctcaattaccctcttacaccaaacgaaacaccattcatcctccaaactctaagcatttctacaaacacaaacttttatttaactgcttgtgatagactaatcgaactctacggtttcacgtccctttacaataacacgtacaccaaatcctctctccttacccatcaatctttctagaacatgcattgcaacacaaatgctgctctcgactactatgtttcagtcaacaactactcctatgtcttcacattct

SEQ ID NO: 19787 - DNA, 250 bp, Zea mays
  Clone ID: MRT4577_11804C.1
aaacaagccctgggtaatcattcaaaaaagagagggggggggggggaaacacaacaccaccgttccattaggcatttacagaaaaaggcccaatggggcaattcccacacgcccagggtttccaaccaatgaaggggacattaacaataccatgccttgccggggggaaggtttgccccccgagaatttacccgagggaaacaaacattttttggctggggggccaatgccaaatttatttttttttggg

SEQ ID NO: 19788 - DNA, 675 bp, Zea mays
  Clone ID: MRT4577_118050C.1
ctgacagagaagatagatttaagccaagcaagaatgacacaaacgccgggttaggaacaccactctgtgaaagaatggtccttgccttctgtcactatcctgctcaaaataccttccctcgtcgttctcagccagcgagcccaagcctgctttcccgaccgctgcaaatcatctcccttgaccatcatccggaaagcccagtcagacctgactatgatcctaaccaccacacaatatacaaaccgactcaaagccatagcctgtggtatcgtcaacccgtcgtcttgctccccaatatacaggtatttgattgtcggacattattcattagcagttcgtgcaagtaggagagccttgtagttgttccctggagttcagtccaagcatagtccgcatcattgcatcctctttcttttcctgtcgtcgtcaccacgggggtcatcatcttcgtcagaacgctccgccgtatcacttgggttcaaaatgtgcgccatgctgcctcgcctcgttgggggcgctgacgagtccttgacacctagcttgtcgcgtgtggcagagccccaattccaattcccgaatgtgtcgcctccactactcccattgctgccgggctgcgcgaacggtggccctggtggtgtcgtaggccgtgaacttgcgtggggtaaaggcgcgggt

SEQ ID NO: 19789 - DNA, 510 bp, Zea mays
  Clone ID: MRT4577_118051C.1
acccgtgcggagaccaacatgcaacatataaagtggccttcactaccttttttttttccacaacggcgaccaatacatggggggggcttatgctccatgcactttctgcatctgcatctaactccacaataactcctcaatgcatcacaagctgctataaattctcttcagtccccataccttacatcaatgatagccttcgcctgtgaaaacccagctcttcaactctataggatccaacaagcaatcaccgcaagcaacagacctgtaccacccttgcttcaacaatcgccagccctatatatggagccatcatcggtccaaaccatcacggcacaccagctgcagtaactcgtgctccctgtgaataaccacacaaccttggcaaaccttttttcctattcttagtaacaacaatttattccattcaaccaactggttacatagaaccgtgctgcttacttgcactaacaactactaccattcagtcagttacctactgcccacttt

SEQ ID NO: 19790 - DNA, 289 bp, Zea mays
  Clone ID: MRT4577_118052C.1
attcggctcgagaattaattaatggccggtccttttttgagaccccaaaacaggagggagatgggagaggtctttatactgtggagcctagagtcgaatctctgactgtaaaggaagatgggaaagaaggcgagccatatgatgacgagggactcccgagatacctgtctgaacatttgagaaggacaggtggggatccaggcacggaaattgggatcacgaggcgagagacctactgatctggaactgagtgcacagagatgtctggagtgacagacgaagcacagag

SEQ ID NO: 19791 - DNA, 1422 bp, Zea mays
  Clone ID: MRT4577_118053C.1
ttgggaccctcgaggccggccgggagctgttttgagagggaagttttcagaacgtctgtgtgccgttggttctgggcctatgggcggcattcagggggaaatgggtgagtcccaagctcttcctctcatcaacttcttcccgttccacgcagaccaaccagacattaagaattgagatcctgcaaccgcaacaatggcggccatggcgaacacctctcgtctccccaccccctgcagcctcccaaccatcagcatcggcgctaagagcaggaggctagctgtggcggccgtcagatgcggtcccggcggcagcaggagccaccggaggagccttggggtcttgctgtgtcgatcctcgtccacggccggagcccaagggagcacgaggatggaggactataacaccgccatgaagcggatgatgcgtaacccctacgagtaccatcacgatctcggcatgaactatgctgtcataagtgagagcttgattgttggctcacagcctcagaagcctgaagatatcgatcacttgaaaaatgaagagcgagtagcatatattctttgcttacagcaggacaaggacattgaatattggggcattgacttccaatccattgtcaataggtgcaaagaacttggcattcagcacatcaggagaccggccgtggattttgatccagactcactgaggtcgcaactgccgaaagcagtttcggcgctagaatgggctacgtcgcagcgcaaagggcgggtttatgtccactgcaccgctgggcttgggagagcacctgcggttgcaatcgcttacatgttttggtttgagaacatggatcttaacacggcttatcagaagctaacctccataaggccctgtggacccagcaagagagccatccgcgccgcaacctatgatctagctaagaacgatccatccaaagagccttttgagaaccttccggagcacgcttttgagggcgttgcagactgggagaggaagttgattcatgaccgggtgcgtgctcttcacgaagcatgagcagaagaaactttctccacgcgtcaagaaggggggaactaagcttcctaatgaggcaatggctgtgcttcggcaccagatcattagatgtcgaaacgataaagtttgttctcaataaagcttatacgacgccatatttgttgctgggtagtttgtaatagtcactaataggaaggaaataaagagggccttgcatgagattccagctggtgtcttcacctttgtggtgactgcaaatgagatgcccatccattaatggcatggcgcattgtaggtatattgtgtaaataaacctgtggatcttcatttgaggaacatcacttctgtaaaagtttatttgaagatacggccagctttgcaaatctaccaaaaaaaggcaaaaaaaa

SEQ ID NO: 19792 - DNA, 268 bp, Zea mays
  Clone ID: MRT4577_118054C.1
agcagtggtaacaacgcagagtacgcgagtcatcctggtacatacaactcaagatttatttgtaaatatgtaaacaaatttatttgtacaagatatgttacctcatctccatgtacagcgctcaacagctctcgacgtctgttgctgcttgaagaactgccctgaaaaaggtccaggcccttgaacagccccttcactgacttctttgattttggcggcatcctgcgtccacaatcaggaattatttattagtgcgtgcctcttgaca

SEQ ID NO: 19793 - DNA, 252 bp, Zea mays
  unsure (1)..(252): unsure at all n locations
  Clone ID: MRT4577_118055C.1
atcgtcgggagaggaaatcgcaaaagagggcccgtctcatcncgagttataggaagccatggagcacataggaggctgtggtgccaaggtcccccgagaggacccaatcctctgcatcaaataactgtgagcttcttcggcaagcgcggcgaccaatgaacatgtgctccaagtgccacaaggagatgataacgaagcatgatcaggccaagctggctgcctcctctatcgacagcatcgtgaacggcagcg

SEQ ID NO: 19794 - DNA, 762 bp, Zea mays
  unsure (1)..(762): unsure at all n locations
  Clone ID: MRT4577_118056C.1
ccggccgggtttgtcaggctctcgctcgcatccgccgtcatgctctgcctcgagatgtggtacatgatgctgctcgtcgtgctcaccggacaccttgacgacgccgagatcgccgtggactccatagccatctgcatgaacatcaacgggtgggaggggatgctgttcatcggcctcagcgcggccatcagcgtccgcgtgtccaacgagctgggttcggggcggccccgggcgaccaagtacgcggtggcggtggtgctggcgcagtcgctggcgttggggctgctggccatggcgctcgtgctggcgacgcggggccagttcccagccatcttcacgggcgacaggcagctgcagaaagccgtctccagcatcgcctacctgctggccgtgaccatggttctcaacagcatccagcccgtcatctcgggcgtcgccgtgggcggtggctggcaggccgtcgtcgcctacatcaacctcggctgctactacgccttcggcctcccgctcggcttcatcttcggctacctcttcagattcggngtcaagggcatctgggcgggcatgctctgcgggacagcgttgcagacagccatcctcagctacatagtctggacgaccgactgngaagcagaggcgtcgctggcgttggagagagtcagaatatggggcggccaccnacgaaagcttcctacctctgattcagaaacaggaggtcgcgggtgtctgaccaagatccggcaaaagacactgttgcttgca

SEQ ID NO: 19795 - DNA, 562 bp, Zea mays
  Clone ID: MRT4577_118057C.1
ggggccgggggtcccatttaaaacgcgaattctttacttttttttcaaaagtttttggggcgggtttcaattttcaaaaacaaacccaatgggaaaaaaggggaaataaaaacccccccccaattaaaaaaaatggggaagccaaaaacccccccaaaacaaataagggattgtttccaagttttggagaacaaaacctgggactgggggaaaaaaaaaatcgaaagggggcaaaaaaaatgggtttggggcccctgggccttatttaaaaaaaatttggttttaaatggaaaaaaagcccacaagatgcccggcccgggaaatttaaaagaaggcgattttgtgggccacataaaaagcattttatgcggggttaagctttaaggaagccttttttttttctttagggctgagaaggggggggaaccttttggcgggaaaggaaaaaatttttttagaaaaaacctttgatttttttttttgcgccctggggggcaaaaaaaaaaaaaaaaaggggtgaatctttaatttttttttattgacaacttattggggggggggg

SEQ ID NO: 19796 - DNA, 275 bp, Zea mays
  Clone ID: MRT4577_118058C.1
cgagcttgcagtccatatactccaacacatgaggacggttatttccgagtacaatggaactcccaattgccttttgaagctctcaagaacagccaaggagtcatcttgctgctgtgcaaagtcacacttgatgaaaatgtggtctactgtttcttctacacactgggtacataggatacagtcataggaggggagatcatgttttttctcctaagaacatttctagtactcagtctctcttttaagagcagccaaaagaaaaaaggaaatataaa

SEQ ID NO: 19797 - DNA, 240 bp, Zea mays
  Clone ID: MRT4577_118059C.1
ctcactcgtcctaacgccttacggaatgcacttcgatgtgcttgctcgttcaaaagctactgggtgagggacttggctctaaagctcgccatactcttgatactctgccacctattgattacttcgtagctcaaaagtacacgtatctttaactcgtgcttacacacaatggggttacgcatgtcaagatcaaccgtatttttaaatcaccatctttgagaaaacggttgaaattatttt

SEQ ID NO: 19798 - DNA, 1381 bp, Zea mays
  Clone ID: MRT4577_11805C.1
tgtgtaaaagcctgctgagtaaaaaaaagtgaatattttttatgctggcttcatcagtgctgttttaatgtgtggcggctggtcccaagctcggggcgggcgcgacgcgcgagcaccgcaccgatgccgatgctcctcccaccccctcccctcctcctcatcacccaactactacctcccatcccatccgcgccctccttcggtcctctcccatccgctccgctcgcagcccctccccttgcccccgcgatgtcgtcgtcgtcaccgccgccgcggcccgacgacgacgacggtgcgcaggaggtgggcgccggcgatgggaggtcgctgggctacggcgaggcggagtactgggacgcgcggtacgtggaggagggcggcgcgccgtacgactggtaccaacgctacgacgcgctccgccccttcgtccgctgcttcgcgccgccggcgtcccggatcctcatggttggctgcggctccgcactcatgtcggaggatatggtcactgacggctatgtggagatagtgaacattgacatttcgtcggttgtgattgagatgatgagaaagaaatacttcgatgttccgcagctgcaatacttgcgcatggatgttagagatatgagtatgtttccggacgaatcgttcgattgtgcaatcgataaagggactctggactcattgatgtgtggtgtggatgctcccctcagtgcagctcagatgattttggaagtggacaggcttcttaaaccaggaggaacctttattttgataacatatggtgatccatcggtacgaatgcctcatttgaatcaatcggcatgtgattggaaagttgtactttacattctaccaagacctgtgttcactggaaagataacgaggcgtgtactggatcctgttccactgaccgagaggggtagactccctgatggatttgtcccagaggatcctgattcccattatgtctatgtctgcaagaagatgcagggattaacaggcacaggttccccaactgtaaaccacatagagaggcaaggggaagaataaacaaataggctgatttcacctcccacaagattagtggattgttatgatttatatacatgatcagatacgtttccaccattgttatggccatccaaatgtagaagcgtgccattgcatatctaactgatcttgtaaaagttgcaagaatccgggagtaaatgctttgtgcaagagctgtctttttttctttcttcctttcttttctgtatcatcttggaaaacacaacggaattgtttggtacattcgaggaagagatttatttttattattgttcgaagaaagaaaggaattggcgggcgaagtgaaaaaaaaaaaaaaaaaaggccccta

SEQ ID NO: 19799 - DNA, 121 bp, Zea mays
  Clone ID: MRT4577_118060C.1
ggatgatgtcttccttagtgttccttgcattttgggacagaatggaatctcagaccttgtgaaggtgactctgacttctgaggaagaggcccgtttgaagcagagtgcagatacactttgg

SEQ ID NO: 19800 - DNA, 524 bp, Zea mays
  Clone ID: MRT4577_118061C.1
attttttgtttttttttagcaaaaggtcgtcaattaattaactcaataacaaatcagctgctcgttttgatttgcattacacgctgcttctacagttccactacctctttcatcatcttcttctctctaccactaacactgggggtcactgaactgaacgtgagctacgacagaaagcatcatgtagttcatcataaggaggattgcgaaaggggggaaaacgagggggagcgattaaattagagcaaaaggaacctaagctttggggttggactttctgggcgtacggtggtgcgttactcttctgggctggagtcggacaccggctcgtcgtcgtcgtcgtcgtcttcttcctcctccggatggttgacgtcgctgcgaccgccgcgctgctgctcgtgggacccggaccccaggtgcagatgctccgagttgctgttgtgagacaagctaaatatgggctgctggccctggaagtcggcgacgttcaccgccgcggggaacacggcggcctgcgcgccgcg

SEQ ID NO: 19801 - DNA, 691 bp, Zea mays
  Clone ID: MRT4577_118062C.1
ggtacccgggcccccccctcgagttttttttttttttttttttttttttttttttttttttttttttttttttttttttttttttttttttttttttttttttttttttttttttttttttttaccaaaaccccccaggtttttaaaagttttaaaaaaaccggccccccgggggggtttttgaccccaaaaataaaaacaaatttttccccgggggaaaaaatttccccaagggggggggggtttttaaaggaaaaaaaaccaggaaaacaaagcccggttcttttcccatccttaaaaaagcccaaaaatccctacctaaaaggaaaagggggggcaaaataagggaaatggccttttaaaaagaacatttataagccctaaaggctggggggggccccccaaagccggggggggccggggggacccccactacatttttttttcctatccgggggaaaggttttacattcccccccgggaccattttttgggggggttttgaaaagccccccccccgcaactttggaccccgctttggaaaaccccccgattttttttgggggccggggaaaaaaaaacataaatttttcgggggccccatttgttggccggggatcattggccctaagggacaaaacgggtgctgggggaagggaaaaattctggccccattttattcccccttttt

SEQ ID NO: 19802 - DNA, 137 bp, Zea mays
  unsure (1)..(137): unsure at all n locations
  Clone ID: MRT4577_118063C.1
gtcgatttgacggaggcgaaggacancgggtcgggctggtagctgctttactgcggcagaacaagcttcaacgccatggttcggaaggtggtgggcggggcccagggcaacctgtggtcgccgactcggttgccccc

SEQ ID NO: 19803 - DNA, 505 bp, Zea mays
  unsure (1)..(505): unsure at all n locations
  Clone ID: MRT4577_118064C.1
ggattgaacaatgtcgttcgnaccacgagggcaggggagggagaaggagcttcnacctctttcttcaacgatggtcgtcaccaaatacaaggactggcgcccgaaattcttgaacaacgcttcttaagctgggtgtgtcttgagtgccagccaaaagccaagattggtgacctttttgagaagggggacttttttattaaaaagcaaactgggaatgtcttcaagaatgccaagagggagattggaaggggcattggttttccaacctgtgtttctgtgaacaacacaagctggcactttttcccgcttaccacaaatgatgcagttctggaagaaaatgatatgggtaaaaatgagatggggggtcatattgatgggtgtattggtgtgggggggcatacacatgtaattgcaaatgggcctgtcacaggaagagcagctgatgttcttgctgttgccaacacagcaacaataagttgcaatgagggttgtcagacctgtgaag

SEQ ID NO: 19804 - DNA, 204 bp, Zea mays
  unsure (1)..(204): unsure at all n locations
  Clone ID: MRT4577_118065C.1
actcggatgaggctcactatggggagagctggtgcgcctgccangtgccaggtcgcggggttgcgcgggtcggcccacgcggtcgggtccgttcgccgcgccgtgccggtggggagcccgccagggggtgtaccgcaacatggtcagcatccccaaggacacctcgccgcacggagtgccgggcgcgtacaagaggctcgtcag

SEQ ID NO: 19805 - DNA, 514 bp, Zea mays
  Clone ID: MRT4577_118066C.1
gccggccgttccgagaatcttcttccgtttccgtctcccctcttctttgttacaataaacaaccaatcgaagccccaggcaacatcgaccgactagagtagatagagctcagtggcggccgccaagaaacacctgcgccctaaggcgagcagcggcaggcataggatgggcaggtccccgtgctgcgagaaggcgcacacgaacaagggcgcgtggaccaaggaagaggaccagcgcctgatcgcctacatcaaggcgcacggcgaggggtgctggcgctcgctgcccaaggcctgtagctgcaagtccccctcgccggcggcggcggggttccggtttctccggccgctcgaggagggccagtacatataaggcaggcgtcgtcgatcacagtaggccggcagaagcaaacctgtaaaaacaaccacagaacagagtttctaatggagatgatgactgatgtggatggatgatgagagattgagaacaaaaaaaaaaaaaaaaaaggccccta

SEQ ID NO: 19806 - DNA, 1411 bp, Zea mays
  Clone ID: MRT4577_118067C.1
cggggttatagtttgtttgatggtacgtgctgagcgagccgaggtatcttgagctccaattcattggcgcgcgcgagcccgcaccgcaccttgcttagaacccacttgatcgctgcctcaccttgctcgtctctcacctcacctcacaccagaccagagagtgtagtgtggtgtggccagggctgcggggcagctggttcttggtacgcacgcttcctcatatataccccccacgcccatacatagagctagccacaagcagacaccgatcgccattgcaactggcagcagcgggtcgatcgacgacgacgttgccccccgcagtctcttaatttgtcgccgtcgtcgtcggggcaggcagatcgtcgagagctagctagctgctagcgcgggagggagggagagggagaatgggacggctctcctgcggcggcggtggcggcggcggcgtgcagcccaagctccgcaaggggctctggtcgcccgaggaagacgagaagctgtacaatcacatcatccgacacggcgtcggctgctggagcactgtccccaagctcgcagggctgcagcgctgcggcaagagctgccgcctgcgctggatcaactacctccgcccggacctcaagcgcggcagcttctcgcagcacgaggaggagctcatcatccggctgcacaagatcctggggaacagtggtcgctcatcgcctcgcacctgccggggcggacggacaacgagatcaagaactactggaacacgcacatcaagcgcaagctcctcgcccgcggcatcgacccgaagacgcaccgcccgctcggcgccggcgccgacgccgccgcgccacccggcgtggtcgcgcaccgggcgctgctgcaccgcgcagccctcgtcgagctcgccgtgaagccggcgccggcggagtcatccgacgacgggagccggagcaggggcaccagcagcggggtgcgatgaggcgccagcgtggaggagcgcgggtgccccgacctcaacctcgacctgtccgtgggcccgccaggaccgcggactgcaactgcagtagcagcagcttcctcgggctcaggaccgccatgctcgacttcagaagcctcgagatgaaatgagcgcttctccctctctgtgtagcttctccccacgccgtcctcgtttttgttttgccacacctcacatggatgatgaattgatgatacatggttggttagttttttcgtaggtgaaaaatacgcgatggtgagcgagtgaaagagagattttgtgccctgggtcctcctccctgctctctcttgctgctccattttgcctcctctgtcccccctctctctctctgtatctctgtaattaccatcgccaaatgatcatggggggcaatataatataatacatgctgctaatgct

SEQ ID NO: 19807 - DNA, 713 bp, Zea mays
  unsure (1)..(713): unsure at all n locations
  Clone ID: MRT4577_118068C.1
ccggccgggacacccactgcgccccggcctgctgcccggctcccatatgtatgccctccgttgcacttgcactgcaccccctgtctgtccccacccttctgccctggcttatctctttccgcttccccctgttataatagcaaccaaaccaaaccaaaccagagctcaggaggagcttccacgcaaactcaggggaggcgcgcgcaagcaagcacacgagggagaaccaggcatggggaggtctccgtgctgcgagaaggcgcacacgaacaagggcgcctggaccaaggaggaggaccagcgcctgatcgcctacatcagggcgcacggcgaagggagctggcgctcgctgcccaaggccgcgggactcctccgctgcggcaagagctgcaggctccgctggatgaactacctccgcccggacctcaagcgcggcaacttcaccggcgacgacgacgagctcatcatcaagctccacgccctgctcggcaacaagtggtcgctcatcgcggggcagctgcccggccggacggacaacgagatcaagaactactggaacacgcacatcaagcgcaagctgctcagccgcggcatcgacccgcagacgcaccgcccgctcagcggcggcgcgggcagcgcgctcaccaccacgtncagcaccgccggcttcccgtcccccggcccgcgtccaggtccaggcccacgcccacgcc

SEQ ID NO: 19808 - DNA, 653 bp, Zea mays
  Clone ID: MRT4577_118069C.1
aattcggcacgaggggacaatcacagatggtaatgatgtggaagatcaagaggtgcacagagagaaggttggtctctctgaagggtacccacagaagcctggtaaactgaactgtcgtttttacatgtcaacagggaggtgctcatatgggtcatcgtgccacttcaatcatccacggctcaaagcaaaactagaagtttcaagtttcccttctgaacaaagaaatcatgaagctgaatttctggaactgaaccgtgttggcctccccattagagaaggagcaaggaagtgtatctattacatgcgtaatggtacatgcagatatggaaagaaatgttgttttaaccatccagagcaagttcttgatgttcaacaccacactgcaacaggatgggatgatactaacttgcaatcttcaccacactcaaagaagttacctgaacataaaactatggatgacatatcgtctggatctgaggttcttcctccaaacatacttcggatgcttttacctccccagaatgtgccccctagtacaaaagaaaaggaaatcaggataaaaaaggatcctgattgggcttcagcttcagatgattctgatggctgctgctcggcagatagttcaaatgggcctttgtgcaagcaggaacatg

SEQ ID NO: 19809 - DNA, 1424 bp, Zea mays
  Clone ID: MRT4577_11806C.1
atcccatccgcgccctccttcggtcctctcccatccgctccgctcgcagcccctcccccttgccccccgcgatgtcgtcgtcgtcaccgccgccgcggcccgacgacgacgacggtgcgcaggaggtgggcgccggcgatgggaggtcgctgggctacggcgaggcggagtactgggacgcgcggtacgtggaggagggcggcgcgccgtacgactggtatcaacgctacgacgcgctccgccccttcgtccgctgcttcgcgccgccggcgtcccggatcctcatggttggctgcggctccgcactcatgtcggaggatatggtcactgacggctatgtggagatagtgaacattgacatttcgtcggttgtgattgagatgatgagaaagaaatacttcgatgttcctcagctgcaatacttgcgcatggatgttagagatatgagtatgtttccggacgaatcgttcgattgtgcaatcgataaagggactctggactcattgatggtaagtaggagtaggtaacattaagtcaccatgtctttttccttatttctggacttcttcagcaatgccgtcttgctgctttcatagtgtggtgtggatgctcccctcagtgcagctcagatgattttggaagtggacaggttttttagtgtcttgctgcctttctgaagtatcactctgcagtgtcatctgggccaagatatcttgtaaatttcaacagccctgcagccttatcagttatacttttttattgcaggcttcttaaaccaggaggaacctttattttggtacgcacttttgtacatttgctctgaaagtagtgctgttgaggacaattttgggtctgagttctagattatttctccattcctcttcttagtcatgggcctatgggccttagtcacatacacagcccagcatcaacaatgttgaaaccctgcaagacctgtgttcactggaaagataacgaggcgtgtactggatcctgttccactgaccgagaggggtagactccctgatggatttgtcccagaggatcctgactcccattatgtctatgtctgcaagaagatgcagggattaacaggcacaggttccccaactgtaaaccacatagagaggcaaggggaagaataaacaaataggctgatttcacctcccacaagattagtggattgttatgatttatatacaagatcagatacgtttccaccattgttgtggccatccaaatgtagaagcgtgccattgcatatctaactgatcttgtaaaagttgcaagaatccgggagtcaatgctttgcgcaagagctgtcctttttctttctttcttttctgtatcatcttgggaagcacaacggaattgtttggtacattcgaggaagagatttatttttattacgccccgtttggatc

SEQ ID NO: 19810 - DNA, 292 bp, Zea mays
  Clone ID: MRT4577_118070C.1
gcgtcgacgcccacgtcgcagcagcagcagcagcagcggacgacgaccatctgcctgtgctaccacctcggtgtccgcagcggggaggcctgtagctgcaagtccccctcgccggcggcggcggggttccggtttctccggccgctcgaggagggccagtacatataaggcaggcgtcgtcgatcacagtaggccggcagaagcaaacctgtaaaaacaaccacagaacagagtttctaatggagatgatgactgatgtggatggatgatgagagattgagagcatagcatc

SEQ ID NO: 19811 - DNA, 871 bp, Zea mays
  unsure (1)..(871): unsure at all n locations
  Clone ID: MRT4577_118071C.1
ccgggttcnacccaacgcgtccgcccacgcccgtccggccgatcagcgagcgggcctctgggagaggtagggagccatggggaggtcgccgtgctgcgagaaggggcacaccaacaagggcgcgtggaccaaggaggaggacgagcggctggtggcgtacatccggtcgcacggggaagggtgctggcggtcgctgcccagcgcggcgggtctgctgcgctgcggcaagagctgcaggctgcggtggatgaactacctccggccggacctcaagcgcgggaacttcaccgacgacgaggacgagctcatcatccgcctgcacgccctcctcggcaacaagttcgtggtctctgatcgccgggcagctgccgggccggacggacaacgagatcaagaactactggaacacgcacatcaaacgcaagctcctggcccgcggcatcgacccgcacgcgcaccaccgcccgcaggcgctgcaccacgtggcagcagcagccctcgtcccggcccccgccgcgaagccgaagccgaagccggcggagtcgtccgacgacggcgggcgcagcagctgcagctgcagcggcagcggcagcagcgcgggggagccgcggtgccccgacctcaacctcgacctgtccgttggtccgccggacgcgcccacctcgccgccgccgccgtgcctgtgccaccgcgcctgggaagcgtgcggctgccaggcaggctgacggctgaggcagcaagagttcagattttttttttgttaggcagttgaaacaaggctagtgtgaaccgagaggagatcagtagctaggacactgtctcagagaaagaaagaaaaaaaaaaccaaaaggattcttgaatatctggctc

SEQ ID NO: 19812 - DNA, 1223 bp, Zea mays
  unsure (1)..(1223): unsure at all n locations
  Clone ID: MRT4577_118072C.1
acccactgcgccccggcctgctgcccggctcccatatgtatgccctccgttgcacttgcactgcaccccctgtctgtccccacccttctgccctggcttatctctttccgcttccccctgttataatagcaaccaaaccaaaccaaaccagagctcaggaggagcttncacgcaaactcaggggaggcgcgcgcaagcaagcacacgagggagaaccgggcaggcagccagccatggggaggtcgccgtgctgcgagaaggcgcacacgaacaagggcgcctggaccaaggaggaggaccagcgcctgatcgcctacatcagggcgcacggagaggggagctggcgctcgctgcccaaggccgccccacgcgtccgaggccgccggcctcctccgctgcggcaagagctgccggcttcgctggatgaactacctccgcccggacctcaagcgcggcaacttcacggacgacgacgacgaggtcatcatcaagctccacgccctgctcggcaacaagtaagcactcagtctcagttcgccgcccgcccgccggtaccattatttccctcctcctcgactcaatcattttcccatcgtcggccggcccgtcgcgcgcaggtggtcgctcatcgcggggcagctgccggggcgcacggacaacgagatcaagaactactggaacacgcacatcaagcgcaagctgctgacccgcggcatcgacccgcagacgcaccgcccgctgagcgccgccgccgccctcaccgccggcttcccgtcgcccgcgcgcccgcccaccgtgctgttcgcgcgcccggcgccgtcggaggacggcggccacagcagcggcggcgggagcgcggacgcgccgcggtgccccgacctcaacctggacctgtccgtgggcccgccgtgctcgccgcccaagacgccggcggccaccgcgtcgacgcccacgtcgcagcagcagcagcggacgacgaccatctgcctgtgctaccacctcggcgtccgcagcggggaggcctgtagctgcaagtccccctcgccagcggcggcggggttccggtttctccggccgctcgaggagggccagtacatataaggcaggcgtcgtcgatcacagtaggccggcagaagcaaacccccccgccgcaaaacctgtaaaaacaaccacagaacagagtttctaatggagatgatgactgatgtggatggatgatgagc

SEQ ID NO: 19813 - DNA, 618 bp, Zea mays
  unsure (1)..(618): unsure at all n locations
  Clone ID: MRT4577_118073C.1
cctcgaggccggccggaggcgacgttccgctgcatcgccgggtgcgacggtgagaaggctgcctcttccttcgtcaagggtagnttttttttttttttttttttttttttttttttttttttttttttttttttttttttttttttttttttttttttttttgaaaaccccagggggatttccccctttgaggaaaacataacaaaaaagaaaggggtgttgaagggacatggggcccccaaaaattggaagtttcccctacccaaagttatggcccatgggttatgggtgaaaaaaaaaagagggggcacaaccccggcggggaaaaaagggaatccaattatcaaaagcgggaccctccatttttactttaaaaggccaaggtggggtcaaaaaatttgcccaaaataaaaaggcacgggaagggggaccaaaaaataatcggctccgggaaaatgatcaaacttgaaaatgggcttggagaaatgggagatcaaaatcagtctgggcacaaccccattggccccccccgggagggggcccccatcccaggtgaaaaaatttaagccgagatcgcaggccgccaccatcttaaaatggcaacccttggtgaatgcc

SEQ ID NO: 19814 - DNA, 1255 bp, Zea mays
  Clone ID: MRT4577_118074C.1
gctctcgaccgatcggcgccacgagtgctttgctttctggctgctgggagcgcgccatggggaggtcgccgtgctgcgagaaggcgcacaccaacaagggcgcgtggaccaaggaggaggacgagcggctggtggcgtacgtccgggcgcacggcgaggggtgctggcgctcgctgcccaaggcggcggggctgctgcgctgcggcaagagctgcaggctgcgctggatgaactacctccgcccggacctcaagcgcggcaacttcaccgacgacgaggacgagctcatcatccgcctgcacagcctcctgggcaacaagtcagtgagcgtgtgccgggctgccggcgtccttctgtctagctattactctattagctctcgtcgtcgctgttcctattcctagtcgatacggttaatacaacaataatgctcccggccgggcgcttcgatgatcgcctaacgccacaacgaacctgctctcttctcttaccccccgcaggtggtccctcatcgccgggcagctgcctggccggacggacaacgagatcaagaactactggaacacgcacatcaagcgcaagctcctcgcccgcggcatcgacccgaagacgcaccgcccgctcggcgccggcgccgacgccgccgcgccacccggcgtggtcgcgcaccgggcgctgctgcaccgcgcaggcgcagcccccgtcgagctcgccgtgaagccggcgccggcggagtcatccgacgacggcggccggagcagcgccagcgccagcagcggcggcggcgccagcgtggaggagccgcggtgccccgacctcaacctcgacctgtccgtgggcccgccatgctcgccgcccaagacgccggcggccaccgcgtcgacgcccacgtggcatcagcagcagcggacgacgaccatatgactgtgctaccacctcgaagtccgcagcggggaggcctgtagctgcaagtccccctcgccagcggcggcggggttccggtttctccggccgctcgaggagggccagtacatataaggcaggcgtcgtcgatcacagtaggccggcagaagcaaacccccccgccgcaaaacctgtaaaaacaaccacagaacagagtttctaatggagatgatgactgatgtggatggatgatgagagattgagagcatagcataagatttcgtgtccacgtcgattcaaaccgatctatttcttaagaaaaaaaacaaaaagggcggccgtcgactagtga

SEQ ID NO: 19815 - DNA, 340 bp, Zea mays
  Clone ID: MRT4577_118075C.1
cggaccccagcaacccgcttctttccttctgcctattcctggcgcgcaaggtctcgttggtgcgcgcgctgctctacatcgagtcgcactgcctcggcgccatctgcggcgtccgtctcgtcaagggcttccagagcgccttctacgtgcgctacggcggcggcgccaacgagctcagcgcctgctactccaaggccacctgccttgccgcggaagatcattgtcaccggttgtcgctcaatatacccattgctatccttctgatccggattcgagatgaacgcgtcccagaactacatgcactcgccgacagtcctaatgcttctctacccgcaatacg

SEQ ID NO: 19816 - DNA, 683 bp, Zea mays
  unsure (1)..(683): unsure at all n locations
  Clone ID: MRT4577_118076C.1
ccggccgggagcatccaaccaaaccaagcagagctcaggaggagcttccgcgcaaactcaggggaggcgcgcgcaagcaagaccacgagggagcagcgggcaggcaggcaggcagccatggggaggtctccgtgctgcgagaaggcgcacacgaacaagggcgcctggaccaaggaggaggaccagcgcctgatcgcctacatcagggcgcacggcgaggggagctggcgctcgctgcccaaggccgcgggactcctccgctgcggcaagagctgcaggctccgctggatgaactacctccgcccggacctcaagcgcggcaacttcaccggcgacgacgacgagctcatcatcaagctccacgccctgctcggcaacaagtggtcgctcatcgcggggcagctgcccggccggacggacaacgagatcaagaactactggaacacgcacatcaagcgcaagctgctcagccgcggcatcgacccgcagacgcaccgcccgctcagcggcggcgcgggcagcgcgctcaccaccacgtncagcaccgccggcttcccgtcccccgcgccggcgttcaggcccacgcccacgcccccgcccgccgtcgncgtcgtcccgcccaatgcgatcttcgcgcgcncggcgcccgtcgtagacggccacagcagcagcggcgcgagcac

SEQ ID NO: 19817 - DNA, 235 bp, Zea mays
  Clone ID: MRT4577_118077C.1
atcaaacaataaatccaaataaagggggggggaaggggggggcgtgcacggcagacgaacaattattcgttccacttatattccactaaccagaccccctcaaaataaattgtccatcctatttccgccattactactattattctggctcctccaaatacatacatcccacaccacccgctagtccagttgatggtggacgtttaatacaacacatacataatccaaaatgcac

SEQ ID NO: 19818 - DNA, 256 bp, Zea mays
  Clone ID: MRT4577_118078C.1
gccgcttcccttgcgttcgcggagagtctgtctgtctgtctagctagctagctagctgcacgagagcgtgaggaggaagggggatccatggcgggggaaaaccaggaaaaggatacggcctgcgcgcaatacaggcacgggccgccatgggtgttcaaaggcagaccatattaccatttttatttgatgaaggctacatcgcttcaaaattaaatatgacttactatcatatgatttaattattaactaaattata

SEQ ID NO: 19819 - DNA, 354 bp, Zea mays
  Clone ID: MRT4577_118079C.1
gggaaccactacatctgtttgtgtaactctgttctcactgctaacaggacatcagaatctttcttaccaatctgcctaccaagatacaacgctcaggcctttttgcatgcctatgtccacttctttgatgtgagtcaaatacttgtaaagagcttcttaaattcatccacagtgcacaatgtgaaatattaacttactcgatggtgtaggatgatacatatgtaatattgcttaccacacgttcagatgcgttccatcatctcaaagattgcaggtaataaaagctatatcatacttgaaggtactcgtgttttttacatgagaaaatgcttaaaataagcatgttattgattt

SEQ ID NO: 19820 - DNA, 498 bp, Zea mays
  unsure (1)..(498): unsure at all n locations
  Clone ID: MRT4577_11807C.1
gcgttcttggncgcgtgggnaaaaaaaaaaaaggggggggagagaagaaaaaaaaaaaaaaaaaaaaaaaaaaaaaaaaaaaaaaaaaaaaaaaaaaggggggggcggtcctatataaaccaatctaactttccgcttccctgccaatgcaatagcatatttttttgtgtagcgctaacttaaattcaatggaccggcgtgggggaacgcaacgtactggacaaaacaaaaccctgtacccaacttaattggatttgcattacaatccctttcttctttaggctggcgtgaatatcataaaagagacaggcccgaaccgcccttcccttcaaaagagttagccctgaatggaaaggtggaacggccccctgccctgtgagcattaaattacagcgcggtgtggtgtgttacgttacagcgcagacctgttccatttcacctggccacctaccctaccggcccctttccgtttngctttcctttcctttcctttccacg

SEQ ID NO: 19821 - DNA, 474 bp, Zea mays
  unsure (1)..(474): unsure at all n locations
  Clone ID: MRT4577_118080C.1
cccacgcgtctctaagtaggcactctaccttatcaaacatcacagttgatagccaccgttgatgcacaccttgggaaaaaacagactgtgatccgcgctctacattgcaattctaactggatattctgccaagaggttctttcagaggaacattcaaaaaaagcatgctcacatgcttgagcgcttttgacactgtgttgaaccccggggctaatttatgggcggagtgacctcaagagtacccagatgtatgcgtaaacactggtctaaacactaatatggagaatgggctgaggaatgggctagtccatcctcttctcactcggtttattaaatggaatgagaagttctatgagttgatctaannnaaaaaaaaaaaaaaaaaaaaaaaaaaaaaaaaaaaaaaaaaaaaaaaaaaaaaaaaaaaaaaaaaaaaaaaaaaaaaaaaaaaaaaaaaaaaaggggggccgtttt

SEQ ID NO: 19822 - DNA, 722 bp, Zea mays
  Clone ID: MRT4577_118081C.1
ccctccctcgagttttttttttttttttttttttttttttttttttttttttttaaacaaacagtcccttggttttttagttaatattttttgcccaaaacagaaagttcatttggggttacaacggtccattcacaaacaacacaatagtagggggggttttcccacctttccacatcgcccaggttaaaaggaccaaacccccccacatcctcaataaaagtttcaaacattttatgagttatgatacaaacaagtaacggaatctccttgcccttcaaaactataaggaaccttgctatgaaaggtaccgacttaccagtaaaaataggcaaaaaaggggcctcccctaccagggttaaaatactggtttatcaaggatcccctttaaattgaaaggcttgcaaaaaaaatttcaacctcctcatcttgaaatgaacccctctgctttggaaagggtaaaaagtaaaaaaaaaaattgccaaacaaacttgataaaaaataaaataaccggggacaaacctttctcatcaccaaaagttgaaagtaatgtttaaaatcataggcttaaataaacaaattttatgcaattatttggttaaacattaatcattctatagttgtcccgaaaaaataaagtttttttatcataactatcataagttttactgcataataagggaaaacatggaagggggcaaggggctttacaattttgggtt

SEQ ID NO: 19823 - DNA, 369 bp, Zea mays
  Clone ID: MRT4577_118082C.1
gcccgcgtgcgcgtgctgggcctgaattatattggttgagggccttgttttctaaacaggggccgccctgagggaggtgggatgtgttacaacgagcgaccatggcaggaaccaagctctgtgcacaagcatggacgggaggccaacaccatctgttgtccagtagcaacaactacagtgcccaattggtcatgcactatgggtacacaatggccatgggaagattcacgtgtatgatggcatggcacgagacctcacaggggcgcgctgactaacctaaggtatatgcttgtaccaagcatccttggtgttgcacgctttggaaccagcaggattggttaccgggtggcctacaactccaagcatgga

SEQ ID NO: 19824 - DNA, 387 bp, Zea mays
  unsure (1)..(387): unsure at all n locations
  Clone ID: MRT4577_118083C.1
acgaagaagccaccagcaagaacgcgcaaccgacggcccaaggcgggccgcactagcagccgcagcaggaacaacgaaaaaaagaagaccacacaaccaaagaccgagaagaagaggggaggagcnngcaagaaagcagaaaacccaacaccggcagagacaaggggcgaaagggacgaacgagcgccaggacccgccancgagaaggccggagagcgaaaacaacagacacgagagaagaaagncgggcagaacaccgaagcaggcggaacaacacancnngagaacggagggacccagaagagcgcaagaccagcgncaccncggaaggaagcgaaacacgngaacagcacgcggaaacaaagacaagaccgacnggggaaaaga

SEQ ID NO: 19825 - DNA, 4798 bp, Zea mays
  Clone ID: MRT4577_118084C.1
attttgactgaccctccatccatcaatcctagcgctcctcgcgcccggccgggagtctccaagctccctccctgttacatggctacaccacaccgccggcgcacgtcggcccatcctcccaggctcccagccagcactacacgtctgacaccactggccggctgaccctaaagggagcgcggtgcaccctcctacagtcctgctagctgctatctcccatgccggcagggatgaaagtaggatgggaaaatcccgtaccgaccgttatcgataaccgattttgttagttttatcccgatcgatttcgaacccgaggtaaaaaacgaaaacggaacggaaacgggatatacaaaacggtaaacggaaacggaaacggtagagctagtttcccgaccgtttcaccgggatcccgtttttaatcgggatgatcccgtttcgttaccgtattttctaattcgggatgactgcaatatggccagctccaactcccatccataaccactgaggcccagcccatgtaagaaatacctagcgaacgctgctctgcctctctcccaggcggccagcgcaccacacgagtaacagcatcacacattcacacgccgccacgcgcccacgccggagtccggacgccgccagccgcacgtccgccgacgccggcgacgcgtctcgctagctcgcctgctctctccgactctccctgtctcccagccggccggccgctgggctgcaccacggcaccacacgcggtgacgagccgtgacgcggcacgccggacgcagacgccgccatccacggtccgccctccactccactgctcgcgactcgcccatccgcgccgcggtccgcccatccgcccagacctccactccactgctcgcccatccgcggtccgcccatccgccatccgccatctgcggtcagcggtcctccagacctccactgctcggcgctcgcccatccggccatccgcggtctccctgtctccacggctgctcacaggctcacagcacttagcagtacagcacgtcagcaccattgcaccaagctgttgtgtcatttgtgtgctgtccaggggctctgcaacacctgctgattgctgtccagccgtccaggtgctcacaagtcacagcagtacagcaccaagctgattgctgaacacctgctgtccagggctctgctctccacttcggctagccggctacgactccattcctcagatgacgcctccggttggaaataatcctccctcaggctcagccataagattggccaagttgatgtctaccacaagagcgccttctactcgcaaaacaaattccgtattctctgcatatgctcaaggtatatattagaaaaacagtagcaatagcattagcattactaattggttgtagattgggaagcatcatattgactgtagaataatacgaaaaatctgtttataacagggttgaaaagaaaagctgaagcctcttctagtcggattcagaatgtacgtgcacgtgcgcgtgggcatggatgtggccgcacatcaccatcatcatcaacagctgaggccgagaggcattttattcagagtgtaagcagtagtaatgcaaatggtacagctacagatccgagtcaagatgatatggctattgttcatgaaccacaaccacaaccacaaccacaaccagaaccacaaccacagccacaacctgaacccgaagaagaagcaccacagaagagggcaaagaagtgcacatcggatgtatggcagcatttcaccaagaaggaaattgaagtggaggtcgatggaaagaaatacgttcaggtatggggacattgcaactttcctaattgcaaggctaagtatagggctgagggtcatcatggaacaagcggatttcgaaatcacttgagaacatcacatagtttagttaaaggtcagttgtgtctaaaaagtgaaaaggatcatggcaaagacataaatctcattgagccttataagtacgatgaagtggttagcctaaagaagcttcatttggcaataatcatgcatgaatatcctttcaatattgtagaacatgagtactttgttgagtttgttaagtctctgcgccctcactttccaataaagtcccgtgtcactgctagaaaatatatcatggatttgtatttggaagaaaaagaaaagttgtatggaaaactaaaagatgttcagtctcgcttcagtacaactatggatatgtggacatcttgtcaaaataagtcatacatgtgtgtcaccatccattggattgatgatgattggtgtctccaaaaaagaattgttggcttttttcatgttgaagggcgccacactggccaaaggttatcacaaaccttcactgcaatcatggttaagtggaacattgagaaaaaattgtttgccttgtctttggataatgctagtgcaaatgaagtagctgtgcacgatataattgaggatttgcaggacactgattcaaatctagtttgtgatggtgctttctttcatgtgaggtgtgcttgtcacatactgaacttggttgcaaaggatggcttggctgtaattgcaggaacaattgagaaaatcaaagcgattgttcttgctgtaaaatcttctcctttgcagtgggaagaactaatgaagtgtgctagtgaatgtgacttggataaatctaaagggatctcatatgatgtctcaactagatggaattcaacctatttgatgttgagggatgccttatattataagcctgcactaataaggcttaaaacaagtgatcctcgcaggtatgtttgtctcaattgttgtacatgtcatcattataaattctcaattaatcaaatgtcaattattgtaggtacgatgcaatttgtcctaaagccgaggagtggaagatggcattaactctttttaagtgtttgaagaagttttttgatctcactgaactcctatctggtactcaatattccactgcaaatttattttacaaaggtttctgtgagataaaggatttgattgaccaatggtgtgttcatgaaaaatttgtcattaggagaatggccgttgcaatgagtgaaaagtttgagaaatattggaaagtgtctaatattgcactagctgtagcatgcttccttgaccctaggtacaagaaaatattgattgagttctatatgaaaaaatttcatggtgattcatacaaagttcatgtagatgactttgttagggtcattagaaaattgtatcaattctattctagttgtagtccttcagctccaaagacaaagacaactactaatgatagtatggatgataccttgatggaaaatgaagatgatgaatttcaaaactatttgcatgagttgaaggattatgatcaagtagagtcaaatgaattggataaatatatgtctgaaccccttttgaagcatagtggtcagtttgatattttatcatggtggaggggaagggttgcagaatatcctattctcacccaaattgcaagggatgtgctagcaatacaagtgtcaactgttgcttctgagtctgcgttcagtgctggtggtcgtgttgttgatccttaccgcaatcgtcttggttcggagattgttgaagctttgatatgcacaaaagattgggtagcagcatctagaaaaggtgaatgcatatatgttataatgaagttccaatttatagttattcaacaattattttacttatattgatgcatatttgtgtcattcaaggtgctacatattttccaacaatgattggtgatctcgaggtgctagactctgttattgctgctgcaacaaatcatgagaatcatatggatgaggtatttaaagattattatttacttcgtgcatgggctattaatttgctattattcactactgttttgatgcatgggctgtttgctgtcgccttgttttgatgcatgcgccttgctgcccagccgtgttatactccctgcatggctggcattaacagatttttgatctcactgcatgcgccttgtcgccttgttttgattggctgctagctgctagctgttaggctcccagctgttaggcgctagctgctagctgcctagctcccagccgtgttagttcacagattcatgttctcctatatgtatttatttatactccctgcatatcaattcatgttcttctatatgtatttatttatccaaaactgacttatttttgtgcattaacaggatgaagacgcaatagaattttctaagaataatgaagatgtagcaagtgactcctcttcataagcaatgtgtcttatgtttgttgacagatgagccttggttgtaatagtttatgcatgctaagtgatccagatgtgagcaagtgattatgaatatgtgttttaaactttatattgtgtcatgtgtgctagtagacttatatggcttcttatgttagccaagagcccaagacttatcacttatgtgctacattaaactatgtgtgctccagatttatatggattttatctatgtttaattaagacttgtgtttacaattttttatatttgtttttaagttttgaatatatgttttcatgtgtgattttaccgaacaaaaataccggttcccgtccgatttcgactttaacccgaccggatcgtatcggttttcgattaccgtatttatcccgttcgttttcgttaccggtatatcccgttttcgtttccgtcccgcaagttaaatatgaaaatgaaaacggtagaggtattttaccgaccgttaccgaccgttttcatcccta

SEQ ID NO: 19826 - DNA, 825 bp, Zea mays
  unsure (1)..(825): unsure at all n locations
  Clone ID: MRT4577_118085C.1
tctgcagaagctccgtacggccgtgtcgccctccattgaccatggaggtgtgaaatcttgcgtgagcccttacgcatcttcgagccttccacagttccacctcccgcctgctggaccctaggctttcttgccccacgccgtatccaccagcacgagtggagaaactgaagcacgatcccgaccacttcagaacccgatttggtggccacctccgatttcgctagtacttaatcccagttacatcaacaagaattgctcctctaagttctatgggagcgtaatctgatcggtttgggtcggttcgagaacttgagattgcgatttggaagttgcgggagagaaaggaagagatgggccagagcaaggcggagtttttggagcagttcggtggggactacggttacccggacgcgcccaggggcatcgacgatctgcgggccgccgagttcaagcggctggaagggatggtttacctggaccatgctggtgcgacactgtactcagaggcacagatgacggatgttgctagagaccttatgtctaatgtctatgggaatcctcatagccagaacgattcaagcatggctacaatcgatactgttacttctgtgcggcatcaggtcctaaaatacttcaatgcatcaccaagggactacaaatgtatatttacatcaggggcaacagcagcgctgaaacttgttggtgaatgttttccatggagtagagacagctgctatatgtacacaatggaaaatcataatagtgttcttgggataagggaatatgctctgaccaaggagctactgcatcagcagntgatgttca

SEQ ID NO: 19827 - DNA, 416 bp, Zea mays
  Clone ID: MRT4577_118086C.1
actatgtgttctgattcgcgcgccgtactttcttatcgccactggagggggcgtcggtggagcggctatacgcaacgtgtctacagctgtactagcaagaacgttgaggtacagtccatcgtacactccgccaaggagaggatcatggcggtacgctagggacccgcattacaagatactatatgaacatgggcacaccaaccatggctctgaagggctggttgtactctaaacacgcttgcgatgcaagcctgagcaactagatgttcctttctaacagcaagaacctggtggagaaagagacgttccaaaaatttatcacactggctagccaatagaagactgcgagaggggagcccgctggagcttatgaacatcatgcggtagatcactaaataatgtgctagatgcatgct

SEQ ID NO: 19828 - DNA, 1843 bp, Zea mays
  Clone ID: MRT4577_118087C.1
gcttatgggaccctccggccggccgggacacgctgcacggctggagtctgaagagaggtcgtcgtctcgtcggacagccgaacaacagccagcagtccacatcaaggttccaatcctgagtctgcagccatgggaaccatcgtccgcggcggccggagcggcatgatgaagcagctcaacgtggggggcaagctcttctcgctggaggcaagctccctttccctcatgtctatcggttccccttcccctaccccaacattcgtggaccgcgacccagccctcctattcgccgtcctcgctgccatccgctccccgtccaccgcagcgcccgacttccccgcgcgcgtcctcctcgacgaggccaacttctacggccttcaagcccagctcctcgctgcgctatctccgccgccgctccgcggcttctcagcctccctcgcctccaccctctgcccgtcctccgagcccttccccaccgcccttgcgccgcaccacgacgggtcactatgcctcgcccatggcgccgggctggtcacctattactccccagcgctggatcaccgcgccaccattcggacccacctccaccgcatcacctccctcctgcagctgccctccagtctcgccgtccttgggtctgactccgctcctgggcttcacgtgtacgactttctcgatggcaaacatgtcgcctccgttcagtggtcggatcccactgacactcgcaccagcaaggcgaaggtcgtcgccattgcggcccgtcctccagctgatgccgccgataagaattcaccgatcttggcaacgtttgagtgccctcatcgggaaaactgcatcatggctgttgaccctgtaactctgaagcctacacaggagattggccggcaaagtggtagtgcggctaagtcatcggcaccaggtcgagtggtgcacctgcaggcacttggtctggtgtttgcgtcattcgttagttccggggcatttggctactctggctatatgaggctatgggacattcggtctgggaatgtggtgtgggagacaagcgagccagggggagctggaagaagcagtaggtttggggatccatttgcagatgcagatgtggatgtgaagcagcaggcaatatacaaggtttgctcaaagtcaggagatttagcagtggcagacctgagatgccttggcgatgacccctgggtgtatatgtcatcaggaccacgagggagcgcaggaggctatggcagtgttctgtgctgtcaccgctctcaagtttttgtcagccgaaaggatggattggaggtttggtcccgactggaagagcaccgccacaacacaggcgaattgacagagcaatcaggagtaaaggaaagacccaaaaatgaaggaattgatggacagattttatgggagttgctatgtggacacagaaaaggatgctaggcgtgggatgatacagatgattgaagggggtggagaccgcttgtttgtgacaagagaagagatgcaaggtgtggaagtgtgggagacctcccaccttgctggttctacttctctctcgtagctttatcctcttgtgcacatggagtgaccattcagtaggtctaccaagagaattgaaagtgcatgatgccaatattgttcttggttcatggcttcatgcataatttgacattgaacaaatatgtgttttatgtagtcttggctctcaagatatatcatgtatcacatgtcttgcttctgcatatgcatgtcatggtaaatgctgagaatagaaagacacaatcttctttgatgtaaaactattttcttaatatcttagcacgaagattttagcttttacagt

SEQ ID NO: 19829 - DNA, 313 bp, Zea mays
  Clone ID: MRT4577_118088C.1
attccggggggggcccacgcgtccgtctgttctatagctttcaacctatcaccattatcacattcagtagtagcaaaccataggggggggttctattgatgggcggtgagctatcacttcatccatatcgagcggagcttaacttatctatacgagcttgctttgatgcttgagagaccctttcatggcttcccaccaagacaagggtatctaccatgcctgcgaaaccaatgccctcacctaagataataccgctcaggctttgggggcgaccaaagacacttttcatcacgccatggaccggtcggttgac

SEQ ID NO: 19830 - DNA, 335 bp, Zea mays
  Clone ID: MRT4577_118089C.1
cattgggtacctcgaggccggccgggagtcgtatcctccctagctattactcacctcgcggcgactcttggcaggggattcctccgcgtaagccgcatccagctccaacgcgacgtgatcaagaagcggtggcggatatgggtcacgatccaatattctcagaagtacttcgacgaaccctaccactacaggcacgtcagtcctcccggccgatgttgccaagctcctccccaaaaaccgcctcctgtctcacaactagtgaagctgcgaccggatcgctcctcactctcgcctcgatggtactacccgatccaccggccggaggcgcagcatca

SEQ ID NO: 19831 - DNA, 234 bp, Zea mays
  Clone ID: MRT4577_11808C.1
ctggtcgcccgcccggaccgacccggaactgacattgccggcccacgcgtccgtttcgtttcaccctgttcatcaactggcactgcagcgttaagaaggaggacccggccgtcaagtggcaccccggtaagcgcagccgtggccagttcggcaggcgcttctgaatgccagagaacgccacggttgctcacgcgaagggaggcctgcagatgggcttggtcaccagtgacatgg

SEQ ID NO: 19832 - DNA, 341 bp, Zea mays
  Clone ID: MRT4577_118090C.1
cccgcggttgatacatagtttcttgtatgtcatttatatttgtacttgaagattaccaaaaccaaaggccgcacggtgcagcggcggctgcaacgggcgcgaggacagcaccaagaaggcgtctggcgcccatggcatgaagagcagagcgacagccctgaggcggtggcgatctacatgtccatacgcgctggaactggttgcactacgcacacctgcgccagcctcgcgccgctgcggcgggcgctccgcccgtacggcgccttcatcgtgctctggggcctggtacacctagtctccatctggacgctacgccgcgaccggactcgggccgcctgctg

SEQ ID NO: 19833 - DNA, 1672 bp, Zea mays
  Clone ID: MRT4577_118091C.1
cccgggctcacgccagccaccgttatctggccacgtgatatttttgccgctcgatgccgcgtctccagctccaagcgcgtccggccacccacacctctgcccctccatgcatcttcctagtcctagccgcagctcctcatcttcctgcgcgcgctccttctctgtctcccatggccgagcgtcctccctgctcctctctcctttatctccctctccatgccggcgcttccctagctcgttttcccatctccctgctccttcccatggtgcgcagggcgtcctcccctcgactccctccctagctccccaccgctcgccttcctctccttcctagtcgcccgtctccagctcggtctgcactcgccgtccctgccccctcgctgtttttgtgccagccgagctcgcccagcccctcgcctctccacctcatcaacgccctcagccatggatgtcgaatcccctctctttagcgcctttctttgcagcccctgcgtcgccgtgcatgtaaggtgtttgtctaaatgctcaagaggagtgtcgtgtcgtggacagcccttttggcgtcgtcgggtgtttgatgttttgcgcatcccgtctacgacaccgtcgaccctcagtgatatttcgttcttgctttgtcgttttatcgatcgacgtctatttgctaatgtgaagtgtgtgtatgtgcctatgtgtgttgaggagcgacatctgtggaatctgggtgaagaagaaacagagcacgtccgacgcttactagctgctggtgaaaggattgaatcggctatcatggtcgtttagtgtcgatcgagtcaaccttagtcgtggtaagctaccattatttctgctatttagccgatgtatgagttagatggataaaatagttacgatgattttcttatctctagcttagatatgttgtatgttcctctattttattgtggtaattgtgcttatacgaggtggtgtctaagcgatacgatgcgatgcgaaatggtaattgtgcttggatgaatatatgtgtatgcataatgtgtttaaattgattttttttgtttgcatgtatgtgatggtaggtttaaaatactaggttatgagaaataaatggattcatatatgtgattaactaggtggttttagctctaatttagaaggatgtgttagaatagttgaagtatcaaacatatgaaaattttagaagtaactaggagctaagttaaaattattgttgtctagacctgcatgtccaattttaattatgcagtgaagtaaatcatgttttctgtaaaagtgttatatataaaagttatagctaacttctttaacttgcttgtgctaaaattttatggccataggtttagtagtttaggagttatgatttttccaagcccagtttcagaatctgtccaaattctgtacatgtttcgaaaattggattctttggctaagctaaactgagaatcagccctcagtaattctataagaattgtagtactttttttaagatttccaacaaattttggatcaccctttttggtgatttgtaagttaaattacagtcgtttgaagtacgatatctaaatctgtccaaatttagatagcagagcatttcttatatcttttcaccttgatacgtattgaattaagctgagagtatttataaatgaattgt

SEQ ID NO: 19834 - DNA, 397 bp, Zea mays
  Clone ID: MRT4577_118092C.1
cccacgcgtccgatttattgcatggtgtactgttcttttgtattaaatttgtggaatgtgtgtttgaactcgggagatagcggtcagttagtggattccgaaggagttacaggtgaagaccctgagcagcagtcggttggtgaaggcaagtgtcctttgacccatctatgtcctactcatttttataattcactccccgcatttacacaatttctatttaaggattgactagcttttgtttatcttgtccttgtttacctattttggttgagttattttggtttagctatatgttagtgcttcgcattaatcaatgaacatgatgagattatctatgatacattgttttccctttaaattatgatgatatacttatggtatttaaaggggcttgagc

SEQ ID NO: 19835 - DNA, 279 bp, Zea mays
  unsure (1)..(279): unsure at all n locations
  Clone ID: MRT4577_118093C.1
gtcganccctnngganatgctcgcgtacggcagctaagagttcgcctccaggctagatcaagctctgccgtctgtggtagcagtgtcgtctgtctttgccgccatgcgctcgtagctagctagtgtcgcttgcaaacgcataactgtcctgctcttcctgctcgtcgaccgacacgacgcaacactggcatgtaccgattgacaatcctgctagacaattatagtgatagtgaaatcagctgaggtatgcgacattaggcatcataaatcttgatgtat

SEQ ID NO: 19836 - DNA, 500 bp, Zea mays
  unsure (1)..(500): unsure at all n locations
  Clone ID: MRT4577_118094C.1
gatccctcgatttcccccctcacttctcttcttccacccgtgacggcgacgagcgagcgagagagcggcgacagcgagcgcctgcgcagtggaggaagacaacggcgccggcgagtgtctttcgccggagtcgcgtgcggatttttctagcgcgcagctccggcgagcggtgctcgtcgctgacctctgcgacgcggccgagcgcctgcaggcgtccccgcaacgacgaccgaggcgcgtcaccagatccgttacggtagtgggtccccaacgcctacaagcaagcgaaggggcacagcaacatcccgtgcggcgggcggcgttgctccggcgctgccgtggccagcgacgacgccgagatctgactcagagtagatgagatgtcgaagcgggacagacacaggnggaggtggaggagctccacttaccccggaggagcaggaggatcaggacatagaggacgcggcgcagaagcgcctgaagactgaattcagcaagct

SEQ ID NO: 19837 - DNA, 271 bp, Zea mays
  Clone ID: MRT4577_118095C.1
tgttgctgtcgggggcctggacgccgcgctccggtctcgccagctctcggacgccgccagcgtcctcgacgcgttcccggcgccggccagaagcgccgttgggaaatggtactccccgttcttcctcgtcaaagaagacggcgtagcgccgccgcgggagcagatggaacgcagcgcgttctacgaggtgaccctggagcagcgctggtgggagccggggcacgcgacggccggcggcccgaagttggacagcaggagggcgacagcaacg

SEQ ID NO: 19838 - DNA, 885 bp, Zea mays
  Clone ID: MRT4577_118096C.1
ttgggtccctcgccgcccctccggcgctgtatcgtttctaactttccatagttcctgtccgcgagccgcgtcaccggcccgccgtccgccaccgccgccgcgggcccatccacatcggtcgccacacccccttccgcccaccaccaggccgccatctgcggcagaaggcgcgcgcccgtccgcccgccaccacgccgtcgcctcgcccctctccgctgccgccccgtcgtcagctcggccccgtccgcagccgcgacttcatccacatccgtcgtcacacccccgcccggcgcccgctcaccaccacgccgcaatccgtccccttccgaagtagtgaagtaagcctgcgcatcctctaactctctttgataaaccgggcttgggcccgctccacctcgaaggaacaagggaagggaaaggaaacagcaagcgctccgctgccctacccggtcgccgcaccgcttccctcccacgtcgcaacaccagacgccgcgcccgtcgcccgactcggaagaacggtcctggcccggccttggcccgcccgccgtttgcatgtactcctcctgctcggatccaagaaggattccggtatccacggcggcggaggtgttcctgttgtcgccagcgtgatttgattcgtgcgtctcggtctgtaactggaaaagtagccgcatcatatatattttgtttacttttagttatttctgattttcctcatcatatttggggcctgctcttcctcatcttgttttgagcctgctcccgctgttcttgagttgttaatgtcaagtgagaaagcgactatacccaaaaaaaaaaaaaaaaccccacctttccgtcctttttttttcacatgctggtgattcaatagttgagctacactct

SEQ ID NO: 19839 - DNA, 340 bp, Zea mays
  Clone ID: MRT4577_118097C.1
tcggaccgcacgatggctgctctgcgccttgccttcttaacccttcgccccgccgctgtcgagtaatgcgactaatccggcgcgaccccagccgggttcggctataaacaaattaatcaatgaagtaatcaatattcccttcataataatgcgtatacttcctaaactattagctcttatctattacacttgggtggagcactattactttgggtggtcatacaaagtaggaagcatgtactttctttcattatcaccgcgcgcattatatgttgcaccagtggaagtatccacttttaaattctcagttttgtctagggtaatcctcttttctcataaa

SEQ ID NO: 19840 - DNA, 412 bp, Zea mays
  Clone ID: MRT4577_118098C.1
ggccgggagaaagccgataagttgacgagttggatgactagtctgttagagagttgttttgatgttgagtagttaaaatatggtttaacgaaaaattgggtgtttggtctagtggtatgattctcaaaaaaaaaaaaaaaaaaaaaaaaaacctaatcctaactagaaggttccgttctttttctttctcaccatggaacatacaaagttattttgatccgaaaaggaatctatagcggaggatcggagtatgtttcatgttggtgtagtgaaacgcggtctgcaacgacctcggtccccgatacagcaaacccaatgttggttggtgtagtgaaacggtctgcgacttccctgccaatatttcagttcaaatttgtaaaatttcccgaaaaaaaaaaaaaaaaaagcggcc

SEQ ID NO: 19841 - DNA, 235 bp, Zea mays
  Clone ID: MRT4577_118099C.1
aattccgcgggtcgactcaagggttcgaggacgttggtatcatatagagcagacacggaatcttacatcttccgccggccgcttggggctgtgtcacatgaagctctgcgcgagagcttcatcgtccgcttggagagctctctttcctgcgaggggcttcgccgtcgggatcagtgggaggcgtgacggtgcttcggtgctgctcgctactggcgatgcgtgcggctagattcga

SEQ ID NO: 19842 - DNA, 743 bp, Zea mays
  Clone ID: MRT4577_11809C.1
tccctaaccgccaccctagatccttttccatctggccttctctttctctctccgctcctcctgcgccggccgtctccctcatgcagcttctcttcccatggtgcctggccgggggctcccctgcgaatagcttccccggggagcacgacatccctcccagccatggcgttcggcttcctgctggccgagctctagccgagccccctccatggcgcccaggttgctcccttcggcgctctgcatctccgaccacggtggctccgcctcgaccaccatcttcaccaccaacggcactgctcttccctagctccaaggatacctgcagttcgtccctggccgatgcccgagcatttcccctgcgcaccatcgcgtaggccgcggagctgcaacggccacgttgtctcttcctctgcaactcacccttgacatgttcgacaaaatgcggcagcaagccccaacaacctgtgtagtgtcgcagcgagcaacagccccgaaaccccctcgcgtgtgccgatccgatctgtgccgcctggttcgcaatgccataaaacccgcccctcatcgtcgtcgcgcctcgcgcaccactcgttcgatggaacacctcacccgtgggtgatatgcgcaacctaaatctgatcagccagatcctatcagaagcagcgccgaagctaccacctataaagcttcgtcacagtaacagatctcaagacaaagagggaaccgacttaagatgaaatgacttg

SEQ ID NO: 19843 - DNA, 239 bp, Zea mays
  Clone ID: MRT4577_1180C.1
ctcacgcgtccgggcacgcgtgcttgttttgataacgcttatccatgatcatgcgtcacatgtgctctactatgagccatgactggttagcagctacatagagtatatacatactagtgacgtcatttagtgagcgacgtgatgattacagtcgtattatgctataaatccactatatcaccatggcaggatgagtgtgctaatgtataactacccatcatgggccagtcggtatatat

SEQ ID NO: 19844 - DNA, 438 bp, Zea mays
  Clone ID: MRT4577_118100C.1
ccacccccccgggggcccccccaaggggcaaaaccaacaaaaaggggggccccaacgaaggggacccaaacgccacccccccttgaaccaaccaagaaaaaaaaatgcgccaggaaaaaaatgatatcccgctaaaattaaaaacaaaaaaaacaccggaaaaaaaaagggaaaacccggggggcccacaaggggggaaacccaccaaacaaacgggatgggcgaaaggcccatccaacagggggaaaaccctgcggcccaaggctattaaaaaacccccccaaccccgcagaaaagggcgtcggtataaagggcccccttccccatcccagttaaacaaaagggggcgttcggggctcccggggcgggaaggggctaaaatctaaaaaaagggggggacacggtttcccccaaggcctggggactcccaaggaaaaa

SEQ ID NO: 19845 - DNA, 249 bp, Zea mays
  Clone ID: MRT4577_118101C.1
ccctaaaaaacgccaagcatactagggggatagccccgacccaaaagcagggccccatagcacaagaaaaatccatccttaaaccgggacggaagggcccacgggggggggcccccttgcagcaaaaagagggcaccaccccaaaggggaacaccgaactcatgggggtccgctggcctaagggcccaaagggtttaaaacgaaaacagccctcccctaaaatgaaatgggccggaacctcctcccgga

SEQ ID NO: 19846 - DNA, 303 bp, Zea mays
  Clone ID: MRT4577_118102C.1
atcagcccaatcaatatgctgtgagattttgacttctcacagtcacgggccagccacaccgacgcgaagacgagcacgaaaagatctgtacgccgctatccgctcgtggagaatcgatggaacgcgaccttgggaggatcggtgggtctgtctgggagctgtatttataagcctcggtcccctccggagtccgtcctagttgtggctgactcggactcgtgcatgcgggtaaatttgatttttattattggatatctaataatgagtggataatagttagggactaaaattagttgacacatt

SEQ ID NO: 19847 - DNA, 256 bp, Zea mays
  Clone ID: MRT4577_118103C.1
tactaaatatataatattaaacaaacaatctaaacgaatccatctagtaagatccacattcaagagccctcatatgcgacgtatagaatcacctaaactcaactctctacccatcaacttactccatactttacagcgaattcactggcctaaccctgctttatcaactttcaaactatgaaacttttggcagctcccatattaacgaattagcccgaaatgctcctttttccaaatagtttattagcctaaatgc

SEQ ID NO: 19848 - DNA, 275 bp, Zea mays
  Clone ID: MRT4577_118104C.1
tcgacacagaatcaaagtcgaagctgccaatcacagagcttcgtagcgtattaccaaatggaccgacttaaagatgaaatgaccaatacgtccatgatagcttgtattatgattgtaatcatttctaaagggcatgaatgtaatttctcacacaaaaaaaaataaaaaaaaaacacaccaaacaaaaaaaggatcaaacagatggtggtccaaagtgactgaagctggggccacgatctctgaatctgatgttacattcgcggctgttgatggca

SEQ ID NO: 19849 - DNA, 428 bp, Zea mays
  Clone ID: MRT4577_118105C.1
cattaacctcgggattaatgaaactgtgaaattatcagaatcaaatggatgcaagactgaacactttgtaggacccagtaaaattaatgctaataatactatttcttgtggagagggaggcgaacaatcagaaagaatactgcaggatgcaaatggaaatggccagccaatccatcagtcccagtatcttggtgagaccagtataggcaatgccacgcccgctcaacaagagaccagtaatggcaaggcctcacatgctgaacaatgttttgaggggtcatctcaccaaaaagagcatgcaaactctttaagaaacaaacgccaacttgaagaagataagtttcagaaaatgcttgctaagtcagcttcttctgagcttcggctgtctgtatggatggaatgatgctataattttatgcgctcgcaaa

SEQ ID NO: 19850 - DNA, 1288 bp, Zea mays
  unsure (1)..(1288): unsure at all n locations
  Clone ID: MRT4577_118106C.1
agggctattcaggtttttctcatgatcaaacatcaatttaccatcagaatgataaaagattgtattctcaagtcaatttgcttccggagattacaccagaaaaactaggaaaatgttgctatcgaatcggcccgtaacagaacattgaccaaaactgagactgatcggggcaaaaatacatttgtaaagggtcaaaaacaccataaactcttgctttaatctgccagctatagtatcttacaaaaggagaaaaggaggtatcttctacattctagacagagaagcggtggggatggtggtgcgttgcctataacatcagggaaacaacaaaagatacagcttagaactcctcgtctcaacctcagcaaagaaaacaaaaatgtcctcaaaataagccgcgcgaagcgttagggagtagaccaccaagatccaattgacaccttaagtagcttctgaagaactgcatgaaaaactactcatgtggtgaatgtttgccctccaagtatgatctcaggcgtttaatgagattttccatcagtgactccggaacttttgacctaaatattgttgcagaatctgacactagctgctttctcattgcatcaaaatcttgagtaacgtctgaacttagaagtcgacgcctcttttgcgagcgcataaaattatagacatcatccatccatacagacagccgaagctcagaagaagctgacttagcaagcattttctgaaacttatcttcttcaagttggcgtttgtttcctgaagagtttgcatgctctttttggtgagatgacccctcaaaacattgttcagcatgtgaggccttgccattactggtctcttgttgagcgggcgtggcattgccattactggtcacttgttgagcaggcgtagcattgcctatactggtctcaccaagatactgggactgatggattggctggccatttccatttgcatcctgcagtattctttctgattgttcgcctccctctccacaagaaatagtattattagcattaattttactgggtcctacaaagtgttcagtcttgcatccatttgattctgataatttcacagtttcattaacctcgggattaatttttgaagtgaggtttatttgccatttggtgtagccttttctgctgcactattcttgaagtgaattggcttgataagtggacctgatgcagtcttgccattcctcaagggcatcagtacattacctttggcaagacgtaggtcattctgttttaccaaanggtatcttcgaggtgacact

SEQ ID NO: 19851 - DNA, 498 bp, Zea mays
  Clone ID: MRT4577_118107C.1
atggccgccacgcccgacgagcggaagcaggagaggccgatgaggcccgcgacgtcgccggcgagcgtggtggcggacttcgccatgggaggcgcggccgccgtggtggcaaagacgggggccgcgccggtcgagcgcgtcaagctgctgctccagaaccaggccgagatgctgcgccgcggcaccctcacgcgcccctacaggggcatcgccgacgccttcacccgcatcctccgcgaggagggccccgccgcgctttggcgtggcaaccaggccaacgtcatccgctacttccccacccaggcgcgtctgcgtttttttccttttccttggcttttaactttgcattcaggggctatttcaaaagcttttttggctatgacagggagaaagacggaaagtggaagtggggaatttcttcgccagttttgtgttgggctggacaataactacgttctctggggcttgtgcctatccattcgacacggtccgtcgtag

SEQ ID NO: 19852 - DNA, 257 bp, Zea mays
  unsure (1)..(257): unsure at all n locations
  Clone ID: MRT4577_118108C.1
cggaatcccccgggtgnagtgnacaggggnaaggaggttatggnaggcaagcaggaataagggcaaaggtaagggtaaggggtaagaggctgtggtcaagaaggaagaaggggtgaccgtaaggttgcaggggttatattcatgtgcaatgcaaagactaacacagagtgctaccatagtcgctagctctgggatgcctagtgtataagattgaaatggtcaataagattatgccattgttcaagctgaacctgtat

SEQ ID NO: 19853 - DNA, 330 bp, Zea mays
  Clone ID: MRT4577_118109C.1
ggccgcttttttttttttttttttcttttttttttttttttttttttttttttttttttttttttttttttttttttttttttgggccaaaaaaaacagtatagatacccaaacaacagacacagggcacacaaccaatagattttaacagatcgaagttttcgggcacaaggacaaaataaacgggggcccatgggaggacccatcattttttttttattggagccttgggcaccttggaaccagtggggtcctttttttacacgcttttgatgaaaggaacaagaaccggggccgccagggggggggcagaaaaacggcccggggggg

SEQ ID NO: 19854 - DNA, 261 bp, Zea mays
  Clone ID: MRT4577_11810C.1
aaaaattgtcataatacgaaaattacagcaagtataaatataaaaaataatatgtcatagatctttacacacggtcactcaactggtaagcaatgaaatttgaaaagcaattaaataatgtcttatcatcctcacaaataaacaatctgctgttatttgaatggtaatggtcgggcgacggtggtgccggctcacgttcagaactgttgctgcaggaactcgtcctcatcgtccaccttctcctgcccgacaacctggtgc

SEQ ID NO: 19855 - DNA, 405 bp, Zea mays
  Clone ID: MRT4577_118110C.1
cgacccacccgttttttagaaaatttttcctctgattgatagggaactgtacagggactctgatgtgataaccgagtacaaaaattccaaattctttgtaataaagtcctacactgaggaccatgtacataggggcattaagtataaagtttgggccagcacatccagtgggaacatgaaactggattctgcttaccatgcagccaaagagaaagaagagcattgccctattttcttgtttttctcgtttcgccctattcaccccccctctaggcgactatcaacgctgttttctgaatccgtcaagtgcaaaaaaagacatatttgttcctgtctccttaaggtcatcattgagatggctatttaaatttaagtaggaattgaagtatggttgcatttaactta

SEQ ID NO: 19856 - DNA, 1009 bp, Zea mays
  unsure (1)..(1009): unsure at all n locations
  Clone ID: MRT4577_118111C.1
gtggatgttgtgggnatattttgcttcttaaatcttggnaacaaagtatcaaccgccaccacaactgtcacagtggcttcaacaggggcccaagccaatatacattggttttggtagcatgcctcttgatgatgagaaaaagtcactgctatcattttagatgcacttagagaaacaggacaaaggggaatcattagccgtggttggggagctcttggaagtttttcagaagttccagttgatgtcttcatcttggaggattgccctcacgattggctcttccctcggtgtgctgcagtggtgcatcatggtggagcaggtactacagcagcagggctgatagctgggtgtcctactactgtagtgccgttttttggagaccagttcttctggggcgagagagttcatgcacgaggagtgggtcctgcacctatatctatcgcagaacttactgtagaagcactatcaaatgcaataatattcatgcttgatccagaggtaaaatcacgaacaatggaactggcgatagcaataggcaatgaggatggtgtggcagcagctgtagatgcatttcatcgtcacctgccttcagaattgccgctgtcgccgcccgcacatgtggaggaagaacgcacagacttcttccaatggttttctcgaggcctggagaagtgttgtttcccattcagtttttaggtacggcagtccgtacgctaggtatatgtatgatttattcatttatgagttgaaaaggtatatcacagtaattttctaaaattggaataaatgctggtataagccaatggtgaggatgcaataaaaaagatcgacgcaattgtaaatgtttgggcagctacaattgtattcagaatttgctggtaggcctgaaatttgtgccccgatgtgccttccagtaaaaaaaaaaaaaaaaaaaaaaaaaaaaaaaacgactgcaaaaatgtgtttaatttgctcgttttttccaaagaactatagaatatacaaagtg

SEQ ID NO: 19857 - DNA, 314 bp, Zea mays
  Clone ID: MRT4577_118112C.1
ccaagatctttttgggagcttttgtggacaacagctgggcagagtatgacggggcagggccagacgctaagctggtggaatccacacagggctcgcacatactagccggaaactgggtaaacttcttgaccctggagcagaggaagaaaggtacagggggtccacgcttgaagtgagggtcctaacggatgaaactggcgagtgggctgttgttggtggcaccagagcatgttgttatggagaacggcatctatatcaagatgccccacgagcatggaaaccgacgggaacgtaatagagcttactgtccatgc

SEQ ID NO: 19858 - DNA, 623 bp, Zea mays
  Clone ID: MRT4577_118113C.1
agacgcccctacctcagtgaaggcaaagaccgcagctccgaaaattacacttcacgaccctaaatggactgacggcagcattcctttggacgcacttcctgataaactctcaaaaataggaaaggaagcttttgagcggagagattcagcagcaactgctgcagctagcgccctgcaagaggcattgatctctgaatctgtgatcaggaacataagcaagttctctgaaatctgcgcgtccgcaagggtctccaatccgttcccaacagtagatctcttccttgtcgtctgtgaggatgctctcaagtggaagaccatcgctgccgagtctgtggtgaccaacggggctgaagaggaggaactgctggagaagaaatcgacttggcactgggtcggcgctgcgttagccactgatctcgaggtcctcaagcttctgaacggtgccactgggcccttctcccggacgcggagcagcggcactaccaacaagccaaatgcatcttcggtggaaccgccgaggacagcaagcatgtcgtcgaagaagcaagcgcatggagcttcagccaaggcgcagtctaaggcggcggcggtgtcaccaagctccccgccgaggtgcaccacgt

SEQ ID NO: 19859 - DNA, 213 bp, Zea mays
  Clone ID: MRT4577_118114C.1
agggcgtgcatggagacccttcgtgcttacgatgagctgctgtatgggacttgcttgtcctcgctaccaccattaccatccgctacctgaaggacggtggggcgcggggtttttgagacgctgccggccgctcgcccttctctcccatgcggatgaggcctcccgctcctccgccttctccaccagctgggcacgcgcccgcatgacgccctc

SEQ ID NO: 19860 - DNA, 582 bp, Zea mays
  unsure (1)..(582): unsure at all n locations
  Clone ID: MRT4577_118115C.1
cacgaccccgacgcggctccggccatggcccgcctcctctgggccctcgctgtcctcctcgtcctcctcctcgcggccgcctccgtcgccgtcgccgacgacggagaaacactgctggagatcaagaaatccttccgcgacggcggcaacgcgctgtacgattggtccggcgacggcgcgtcgccgggctactgctcgtggcgcggcgtgctatgcgacaacgtcaccttcgctgtcgcggcgctcaacctctctgggctcaatctcgagggtgaaatctcagcggccatcgggagtctgcaacgtcttgtctcaatcgatttgaagtcgaatggactctctggacagatccccgatgagattggtgattgttctttgctcgaaactttggatttgtcatctaacaatctagaaggagacataccattccccatgtccaagctgaagcaccttgagaacttgattttgaagaacaacaaactnggtgggagtgatcccatcgacactctctcaacttccaaatttgaagatattggacttggctcaaaacaagttaagtggtgaaattccgaatctaatata

SEQ ID NO: 19861 - DNA, 902 bp, Zea mays
  Clone ID: MRT4577_118116C.1
atggcagcgccaccggcgagggcccgagccgactacgactacctcatcaaactgctcctcatcggtgacagcggttgggtgggtcagagctcattgggcgcatctctccatggtttagactgggcggctttaatagttcaggtgttggaaaaagttgtctcctgttacggttttcagatggatcattcaccactagcttcattaccactattggcttctatgacttattactcgtacccattggattctgaaaacagcattgacttcaagataaggactgtcgagttggatggcaaacggattaagttgcagatctgggacactgcaggccaagaacgtttccgcacgattactactgacataagaaattggatcagaaacattgagcaacatgcttcggataacgtgaacaaaattctggtggggaataaagctgatatggatgaaagcaaacgggctgtgcccacttcgaaggggcaagctctcgctgacgaatacgggataaagttttttgaaacgagtgcgaagacaaacctgaatgtcgagcaggttttcttttccatagcaagggacatcaaacagagactttcagagaccgattccaagcctgagttccttagcctcgcctgttcgcaggatcgaactatcaagatcaaggctgaaggggaagctgaggcagcggcggcggcgcagaattcagcttgctgtggctcctgaacggttgtggccgcaggatagtttcataatttttattctttgccagcaagtctctccttgtgcttgagctatcacaattgttgtggtttggacccgtgggtgttacgtcagaaccaataacatgctaaattgtgggaaaaaaacaaaaaaaaaaaaaaaaaaaaaaaaccccatgagcgagatcg

SEQ ID NO: 19862 - DNA, 561 bp, Zea mays
  unsure (1)..(561): unsure at all n locations
  Clone ID: MRT4577_118117C.1
cgtccgcccaaacccccgggcggggcgggcggccacgcgtccgtccacgcgtccgcccacgcgtccggcgccacggcggcgacgagaagtggcgagccccgagagcgggtttagttagaggctacgggcggtcggtctctttttctgcggcggccatgagcagcggggggtagagggtaccttttttttgtggcccgagctggccacgctgcgcgccgtggggcgcgacgccgcggggcgggtgcggctgccgcgggccggcncgtcggcgtcggcgtcggcgtcgtcgtcgccgtggcgcgggcgcgtgggccacctgcncgggcncgggggggcggcccggggggtgcncctgctgctgtggggacccgtgtggtgcgggggggggcgcccgggccggcggcgtgggtgggtgtggtgtggctgcggtgcggccggggcgggctgggctgggctgggcgtgtgcgcctgtgtgctggcggcgggcccgtggggcggtttgtgcggctggcctgtttggccggtgctgttgctgctttgctctcgcgtgtgtcttgggct

SEQ ID NO: 19863 - DNA, 1134 bp, Zea mays
  unsure (1)..(1134): unsure at all n locations
  Clone ID: MRT4577_118118C.1
ccggccgggctccgatcgagccagggccaggcaacctggtgctccgcccctcgccgttaccgcgacgcttcggcctctggctccaccgcctgcctccctggctctgtgaccgtgacgagacacgtcgccgagaggccaccccgcttgggattgtgaggtaaagcgtgatggcagcgccaccggcgagggcccgagccgactacgactacctcatcaaactgctcctcatcggtgacagcggagttggaaaaagttgtctcctgttacggttctcagatggatcattcaccactagctttattaccactattggcattgacttcaagataaggactgtcgagttggatggcaaacggattaagttgcagatctgggacactgcaggccaagaacgtttccgcacgattactactgcttactacaggggagcaatgggcatcttgcttgtgtacgatgtcacagacgagtcatctttcaataacataagaaattggatcagaaacattgagcaacatgcttcggataacgtgaacaaaattctggtggggaataaagctgatatggatgaaagcaaacgggctgtgcccacttcgaaggggcaagctctcgctgacgaatacgggataaagttttttgaaacgagtgcaaagacaaacctgaatgtcgagcaggttttcttttccatagcaagggacatcaaacagagactttcggagaccgattccaagcctgaggatcgaactatcaagatcaaggctgaaggggaagctgaggcagcggcggcggcgcagaattcagcttgctgtggctcctgagcacttgtcaccgcaagatagtggcgttctcgcgcatgtaattttcatcgtttcattctttgccagcgactctctccttgtgcttcttgagctatcgcagttgctgtggcctggacaaatgggtgttaactgttaagtcagagcagttacttgctgtattgtgggaactctacccatggtaaggcgtgcataatggctgtgcaaagtacctttttacactatcgactatattgtttatatggtagagtttaaaatgagaaaaaaaaaaaaaaaagggcggccgtataaaaggtnccaagaaaacgtacgcgtgcatgcg

SEQ ID NO: 19864 - DNA, 915 bp, Zea mays
  Clone ID: MRT4577_118119C.1
ctggctccaccgcctgcctccctggctctgtgaccgtgacgagacacgtcgccgagaggccaccccgcttgggattgtgaggtaaagcgtgatggcagcgccaccggcgagggcccgagccgactacgactacctcatcaaactgctcctcatcggtgacagcggagttggaaaaagttgtctcctgttacggttctcagatggatcattcaccactagctttattaccactattggcattgacttcaagataaggactgtcgagttggatggcaaacggattaagttgcagatctgggacactgcaggccaagaacgtttccgcacgattactactgcttactacaggggagcaatgggcatcttacttgtgtatgatgtcacagacgagtcatctttcaataacataagaaattggatcagaaacattgaacaacatgcttcggataatgtgaacaaaattctggtggggaataaagctgatatggatgaaagcaaacgggctgtgcccacttcaaagggacaagctctcgcagacgaatatgggataaagttctttgaaacgagcgcaaagacaaacctgaacgtcgagcaggttttcttttctatagcaagggatatcaaacagagactttcagagactgattctaagcctgaggatcgaactatcaagatcaaggctgaaggggaagctgatgcagcagaggcgcagaaatcagcttgctgcggctcttgaacggttgtggctgcaggatagtttcataatttttattctttgccagcaagtctctccttgtgcttgagctatcacaattgttgtggtttggacaagtgggtgttacgtcagaactaattacttgctatattgtggaaaccctgttcttgataacggccatcgcacatgcaactgggtgc

SEQ ID NO: 19865 - DNA, 221 bp, Zea mays
  Clone ID: MRT4577_11811C.1
tcgcgcacgctttgtgcgtccaccttcgatcgtcactctacacgactataactgtcatacgcggctggctcatataagatgtcccccctcgcgtcatattttgcactgccagagtctgtgcttcacaagcgcatacgcaatgatcattgttccaccggaaataaagcaaaagccttattctagactaagaagtccatcgctagccggatgattatctatac

SEQ ID NO: 19866 - DNA, 1415 bp, Zea mays
  Clone ID: MRT4577_118120C.1
tacctcgaaggcctggctcggagttcccccgaccctacgggagcgcgtccacccccctcctccgccgatcgagccagggccgagcaacctggtgctccgcccctcgccgttaccgcgacgcttcggcctccggctccaccgcctgcctctgcctgcctgcgtggctctgtgaccgtgaggagacacgacgccgagaggtcacccccaccccgcgccgaggccgccccgcttgggattgtgaggtaaagcgtgatggcagcgccaccggcgagggcccgagccgactacgactacctcatcaaactgctcctcatcggtgacagcggtgttggaaaaagttgtctcctgttacggttttcagatggatcattcaccactagcttcattaccactattggcattgacttcaagataaggactgtcgagttggatggcaaacggattaagttgcagatctgggacactgcaggccaagaacgtttccgcacgattactactgcttactacaggggagcaatgggcatcttgcttgtgtacgatgtcacagacgagtcatctttcaataacataagaaattggatcagaaacattgagcaacatgcttcggataacgtgaacaaaattctggtggggaataaagctgatatggatgaaagcaaacgggctgtgcccacttcgaaggggcaagctctcgctgacgaatacgggataaagttttttgaaacgagtgcaaagacaaacctgaatgtcgagcaggttttcttttccatagcaagggacatcaaacagagactttcggagaccgattccaagcctgaggatcgaactatcaagatcaaggctgaaggggaagctgaggcagcggcggcggcgcagaattcagcttgctgtggctcctgagcacttgtcaccgcaagatagtggcgttctcgcgcatgtaattttcatcgtttcattctttgccagcgactctctccttgtgcttcttgagctatcgcagttgctgtggcctggacaaatgggtgttaactgttaagtcagagcagttacttgctgtattgtgggaactctacccatggtaaggcgtgcataatggctgtgcaaagtacctttttacactatcgatcgactacactgtttatatggtagagtttaaaatgagaggtgggctgtttgatctcgaggaggctgctactgctatagagatgacgttgggattgcgggaattttcaatgcgtacaagcggtaacatttgcttgcagcactggataatctttgcttcacagatttgctgtatggattaggaaaataagctgtacctcataacatgtgtcgaaacagagagattttgtttctgttaaatggtaaagattttgtttccggtgggcttgttgatctaaacccaccctgtaaaa

SEQ ID NO: 19867 - DNA, 339 bp, Zea mays
  Clone ID: MRT4577_118121C.1
gcgatggtttctgtataccatattgagaattgctaggttcgcttatacacgtggggattcacgatctttgctagatactaaagggaggtgacagggatcgaccgtgtcatacgcttacagagctgctactatttgtgctacgatagtgtggactgcactttgagtgtgtgtatgagagaaaactagagcggaaactggatgtattggctcacgtaattcaaacgaagtccgactggcgctatagcagatgcaagctcacggacgcatagcagtgacgacatggattttctgggcgtcgaggagagcccaatctgttacagcattttttacaccagcaac

SEQ ID NO: 19868 - DNA, 630 bp, Zea mays
  Clone ID: MRT4577_118122C.1
ttcgcaatcaccgtccgggcgcccgatctcgtcatctgaagaagcacacctcatcagtcttcacagccctgtcacacttcaagttcgaccattttgcccttgcaactgcgccttgaccctatgtgtaaccagtaaatccctgattgcgatcctcgcccctctcgatcggactatgccgacgcccgatgatgccgtcctctcgccagcggagcacgagcgcgcaacatgtccacccgacgagccacacacatcgactgtccacagcgacagcagcgccagcaataatgttgaccctgcgcgacgcctgcccgcacatcgactgcccacgccgccgccacatggcacccgcgaacagtcgccgactgagacacacagcaagccatcgagtgccagcatagaggagccaaaccgagacatccccacgccgatgacggtgacggacgacaacgccgaagaccagcgcgcctcgcaagcctcgccgctttctgcaactgcaccagcgcccattcgatacgtccccagtcatctcactgcgccattttctgcccacagattcctccccgtcacatctttcctcgctccttccgacccgggagtcgattcaaggggtagccagacctcggaccgcca

SEQ ID NO: 19869 - DNA, 193 bp, Zea mays
  unsure (1)..(193): unsure at all n locations
  Clone ID: MRT4577_118123C.1
ctactgacgagacccctaaggtggtgcctcggagtctttagggggcaacacccnaaatactcctctaacgggggaataaacgaacacaatacgaccccggacacgcaccaatgattagaaccatgacacagcagaacaaatgatcaacaaggggcccatcaagacaaaccgggtgcacccactaaaaatcatt

SEQ ID NO: 19870 - DNA, 201 bp, Zea mays
  Clone ID: MRT4577_118124C.1
gtacaggtgccctctgtgcctattcagcaattccctactgaagactggagcgctcagcctgccacggaagactggtctgcagctcccactgctcaggccactgaatgggtaggagcaaccactgactggtcttaagctgttcttgcataggctcttaagcagcatggaaaaatggttgatggaaaataaacatcagtttct

SEQ ID NO: 19871 - DNA, 362 bp, Zea mays
  Clone ID: MRT4577_118125C.1
catgggaacaaaaatcaagaacagttgtggttgaacaggaggaagaaataccaggggaacgaggccctagaaaataaaaaagtcttaaggctgctgagggtgaatcgcacaaaacgaagaaaaccataactgaaaactactgagactgggaattggctaatgaacctaaccccatatgtatgaggaatccataggaaggtgagataactgcgcacgatcaatgctacaagaagacatttaatgcgtttctggatccgtttgcttacactcacttcaccactgcaggagaggtcgaatcacacacagtcacttatcgaccatagatggcgcctcctaataagatcgtatgttttgcatccata

SEQ ID NO: 19872 - DNA, 401 bp, Zea mays
  Clone ID: MRT4577_118126C.1
tacggctgcaacaatactacagacggggtgttgctcttgttaaccatacttacatggatgtatggtatagaacactcagcgttattgcttatatcatctattccggaacatatgctcactatacaactgattagagagagagagaaaaaaaagcatgtctgcttattattgatttattgctacgtgaaatcaggtgatgaagttaatgtgtcgcatcaagcatgtacttactgacagagcaattgaagaaccagattcctggacgtctgctgagatgataagaatgataaatgttctttgatgacttacaattgacctgttcttgagatgacattactgcgtatgttgctagaataggacatctacattcgcggatgttaggttctctaacttgaagcatt

SEQ ID NO: 19873 - DNA, 365 bp, Zea mays
  Clone ID: MRT4577_118127C.1
caaaacatcagttcaaaacaaattttctttgtgattatcgtttaagttttaaaacacaaattaattaaaataattacgtttactttgattactgtattcagagagctaaatcaataaaattacaaacaaaatgaccaggtatcttagcactcgtccaactgtgtatctagaagttactccggcagaaaaaattccctatgatatcattactcctgctcgtcagttgtgggttcaagttggatttgaagtgtacggaactttgtctggtgtttattttaccaaatacgcagtagaaactgctgaacgattaggaattaaaggatggattaaaattgataagcgaggaaaagtttcaggtcacattc

SEQ ID NO: 19874 - DNA, 1513 bp, Zea mays
  Clone ID: MRT4577_118128C.1
aaataaaaaagagcgaaagtaaattcgatagacctgcgtgcacgtgatgtgtctcacgatgccgcctgcgtgccggcccaacttttttgtggtggttacattacattatcaaaaaggggaaatgcaatgcaaccccgctactagttttagcttttaatttaaagcaagatcgtgcacattgctttaaaatcgccgggacctctctcttttttgcattcgtcctctgttccttgctatgctcgcgattttttatttttttttattgaggaccagcagtagtaacgttgctatatattctctgttgatgatttaaggttcttcgaccgggcagcaatagtgacggcgggcgacatctccccgtccgggcaaccagacccgtggcgcctgtcgacggtgcaccgcgtggaggagctcaagtccatcgtccgcatgctgcccatctggtcggccggcatcatgctggccaccgccagctcgcacaactacaccttcaccatcatgcaggcgcggaccatggaccggcacatggggccccacttccagctcccgccggcgacgctgtccatcttctcgaacgcggccatgctcgtcaccctggccttctacgaccgcgtcttcgtgcccctggcgcgccgcgtcacgggcctgccgtccgggatcacctacttccagcgcatgggcatcgggctggccatctccgtgctcagcgtcgccacggcggcgctcgtggagaccaagcgccgcgacgccgccgcccggcacgggctcctggacagcccggccgccgtcgtcccgctcagcgtgttctggctggtgccccagttcgccgtccacggcgtcggcgacgccttctcgtccgtggggcacatggagttcctgtacgaccaggcgcccgagagcatgcgcagcagcgccgccgcgctcttctggctcgccgcctccatcgggaactacatgggcacggtgctcgtcacggcggtgcagcgcgccacgcgtgggcgcggcgagtggctccaggacaacatcaaccgcggcaggatcgacaactactactggctcgtcacctgcatcacgctactcaacttgggctactacctcgtctgcttctatttctacaccatgaagccgctggaggtggcggatgactgtgacaaggactgtgagctctcctccctccagaaaaatggcagtggcggcggcgctactgtcatggtgtaattaactggaagactagaaagcaagaatggtcttgttgttaataactagctatatacaatcagcagcgctgcaatgcacacggattacaatttactatagggatattgtagtgtatatcgagagtttataactataagctgtggtcgagcatgcatacgtacggtcataggaagatacaaacgcaacgatcatgatcgtgatcatgcaagctaaaagcaccatcgcatacagtttagtgtattttattgtgtccatacctctatcacagattcagcttttttgagtgtcctttccc

SEQ ID NO: 19875 - DNA, 345 bp, Zea mays
  Clone ID: MRT4577_118129C.1
caataaaacatagtaccgcgaatttaaaatgtattatgagcggggacataatcggagtggcagaaatatttaccgtcgaaattaatgcaatggtaagtactaacggggaataccgactaaaatgggtaccactgttgacgttactattggggttgctttactgctaaagaaataacacactcggcacgatatcctggtgacgggaactgaggttcaagtcataccatcaaccaaagatcctaaggaggccctttaattgttagcacttacatagtgcttgctgtgggaggcacctggttggcgagcatacacaggctaactccataaatttttaggtcacacaac

SEQ ID NO: 19876 - DNA, 372 bp, Zea mays
  Clone ID: MRT4577_11812C.1
ctactgtgggccggtactagggactcctaggtagggagcgctatgggagcacagactacgctatgctgcttgctgggtgttacatgattcacgttcacaactcactcacatgataccggttggaatttttttggatgaagactgttgtgcctatctagctagctgatactaacgaagtgtggtgtgatctactgtctcctttagcatactgagatgcctgaggtgcctgatgtagtaatgaatagagcgcggagagtagagaggcggcttgcgtattggttgctgttcggctatcttgtatcatgagtcgctgtgtttggcatgtcgcttgcggctagagagataccttcactcataggtggcagtacatgc

SEQ ID NO: 19877 - DNA, 987 bp, Zea mays
  unsure (1)..(987): unsure at all n locations
  Clone ID: MRT4577_118130C.1
cccacgcgtgcgcccacacgtcctctttctgtttaggaaaatggagtacttgagggagcgcgctaactgtgcctcgctggtattctggagtctggacgaagctacagacgcaagagtcatctgttgatgttgactaatgtgagtgaactagacgagactgactttggtatatagtggcctcgcagtattgaatcagcaccttctacgtaggacgtacatacagcctgtagttacctctcttctgggaaatccaatggcaggttattagtttgacccatagcgccacactgatcaggaatcgattcgtatatagtgacccagcgtgatcaagaactaacacggatgccgttctgaatacaatagtacgtacaacccattgtgctaccgctacctgcaaattgtatagtcttgccagtctgctgcactactgtaacatgctaaaaccanccatatatgtgncagatagatatggcggcgtttttactattttccatctctcgttttttgcagggaggtcgtcagatggagttcgtgctcatcatctcgctgccgctgctcatactcatcatcatcgtcgccgtcgtcctctgcgtcatctgccgctaggctcgctgaacgtccacagagaagaagaagaaggttcagccccgtccgtctctgcagtctgcactctgctagatccggccgcgggcgccgtccccttagtgcttcttgctccgcgcgggctgcctggacccgtccgtggcgagcctgtagatccagtaaccgagggcgaggacgtgggcggcgatgaggaggacgacgaggagcgggaggaggtcaacgagccaggggcggagcgctggcacggatgtggcggtggcgtcgcgcgccatggcgacgcgacgggagaaggagaacgcgccggggtggcggaggaaggaagaaagggggtcggccgccgggtcgcccgagcccatccgcgtggtggtccggaaccccggccgg

SEQ ID NO: 19878 - DNA, 478 bp, Zea mays
  Clone ID: MRT4577_118131C.1
ccgaactgtggtccccgtgcgggcccgcccggggtccaagccgaaaatcctgcggctgttgacggggaagctacccagtaaacgtcggagaatggggctgtcaggggcagtaccaactgcatccacttcctcatctagtcaccgaagtcaccacaagcacctccataagctcctccttctggatccgatgcggcgaccgactgtggtaccgtctgcactgcgcgcggcgttcggagcagcaaaaccttcatcgaaatcttcatcgtcttcctgaccacacacgcaccaagtccaagtgaaggcggacagggtgccagtccatataataagcggtagtgcgagaattccagcttgcttcactgaaatgaaaacgggagaagacctgcagatacagcgacccgtactgccttccgtctttgcttcctgcattgttgcacgcccggtggcacgatctgtgctctgacgtattttaccaata

SEQ ID NO: 19879 - DNA, 435 bp, Zea mays
  unsure (1)..(435): unsure at all n locations
  Clone ID: MRT4577_118132C.1
ggtgggggcgccgtcgggcgcgcgcaaatccggggacacataaaatgccgatccaccgctttggtacgagcatgccgtgctgactatttttgtggtgtgtatagcgatggtatacttgcacgcatccgggagaaagggtactagactacaggcggacacgtgaatgtctaaaatatacaattctatgaggacattggatgattctaatgcacggttacacgtacactacgcaatgctgtactcgaagtacataattccatgaaggacacgtcaggggtctgaatcgagtgacagaagcaagatatcagagctaatggaaatgatgtgacattgtgcattataaatgtgaaataatcggtatctgtgaccttgataggggataggagnatattccatcatagtcaagatnataataagcagagtatgagatgtata

SEQ ID NO: 19880 - DNA, 173 bp, Zea mays
  Clone ID: MRT4577_118133C.1
tatacgacagccattgataataagccatcgatctgcctggaagagaactttgcacaggaacatactagtgacttactgagtactgactgacataatagtagacgttcacagtaagaactggcaagcatgtttgaaggcatgaactgtcagatgttcacaattgcaaactacgt

SEQ ID NO: 19881 - DNA, 317 bp, Zea mays
  unsure (1)..(317): unsure at all n locations
  Clone ID: MRT4577_118134C.1
aaaaaaaaaatttacacgtacaaaattttcttttctcgtatctcttccaatgcatgtattccagccaacgttgatttttaggatcctgggtagtacttacgttcgtctcacttatcttctcattgttcccctctccacgtcatgtctaggcatcaaatttctacacgccacttctctctagaaggcgccaattcctggggaaaatgggtttgccagggccttnatattttccaaaancaatcttatccctgnnnaanaaatcacntacatctccatttntcanccatctcatttcttcttcnttccttatnacacta

SEQ ID NO: 19882 - DNA, 1314 bp, Zea mays
  Clone ID: MRT4577_118135C.1
cccacgcgttcgcccacgcgtccggcgacgcgctcaagacctacgcgcgccggtggctgccggccgttgccaagagcgggtacctggtgctggagcaaaccgacatcagcacagccgagtggaacagccggcttcttgtcgaaaagatggtgagcttgctccccgccgagaggaacgccgtctcctgcagcttctttctcaagcttctcaaggcagccagcgtcctgggcgcctctcccgcgtccaaggcagagctcacgaggagggtggcgctgcagctggaagacgccagcgtgagcgacctcctgataccgtcgtcgtgcgcgggcgagacgctgtacgacgtggacgccgtgacggccatccttgaagagctggcgctgcggcaagcggcggcggcgggggtcccggaggcaagcccgccgcacgcgcgcggacacaggcggtcgcggtccgccgagagctcggagtacgagggagcgcgtcggtccgcgtccgccccggcgtcgcacggcgcgatggtcaggatcgggaggctggtcgatggattcctgatggaggtcgccaaggatcccaacctgcccctggacaagctgatcgccattgccgaggccgtgccggactgcgcccgcccggagcacgaccatctgtaccgagccgtcgacacttacctcagagtgcacccggagatagacaagggttcgaggaagaagctgtgcagggttctcaactgcaggaagctctccgagacggcgtctatgcacgccgcccggaacgagctgctgccgctccgggtggtcgtgcaggtgctcttcttcgagaacgcacgcgcggcggcgctgtccgtccgcggggctaacggccgcgccgccgccggtggcgtcaaggcgctgcttgccaagacaaggagggaggagacagacggcgaggagaaaaggctccggggcctcgccgtcgccggcgcgcctggcgacgacggcaacgactggagcgtggaggggctgaagcgcgcggcgtcgagggtgtcgaccctgaggatgaggctggaggaggacgcggacgacgaggcgttcgtgcacagggcgcgcgcgggggcggggctggtccggagcgcgtccgcccgcgtcagggcgctctgcgcgatcccggccgggaagcccaggcggatgctgagcaggctgtggccgtcgagctccagcagcgccgtcactgagaggcgttgaattgaaagacctgcacgagagcaatgcggaatgcggtggcagattgatcgatccaggcacaccattctggtcgcgaaggctgtgcatgtgt

SEQ ID NO: 19883 - DNA, 914 bp, Zea mays
  unsure (1)..(914): unsure at all n locations
  Clone ID: MRT4577_118136C.1
ccttctccttttcttcccttcgctgctctgtcccgcggggctctcggcctcggcccccctctttccagtgtcaactagtccacgctctaaagtctagtcctcgtcttcctcccgtaaaccacctcgtccctatccgcagcaaccgttcgccgcgccgcgaggcccgctgatcccaccgacctccaccgctatggctcctctgtcccgcgcggctcgcctccttcgatccgccgtcgggcggctgaggttgccgccgccggcccgggccttctccagcgccgcggcgaccgagacgggggcggggaacggacgcgaggccgtgatcgccgctgctgccgtggcgatggccgggtccgggcttgggctgtggctgaaaccgccgtcgcttgccgactccggcgaggcgcccggcggtcagatctcggtcacctgcgctgcttccacggaggcgcaggaggagaaggggaggttcctgttcgcagactcattccgcagaagagtattctttaactatgagaagaggatacggcttctcagccctcctgagaagatatttgagtacttcgcttctgtgaggaacccagaaggggaagtttacatgttgcctggggacttgatgagagcagtagtccctgtttttcctccatcagagtccaccatagttcgtgaaggaagattaagaggggagcggagccctggagagttgcattgtgctccatcggagttctttatgctgttagacactaatagtgacggtctcatctcctttgccgagtacatcttttttgtgacattgctcagcattcctgagtcacatttcactgcggncctcaaaatgtttgacgntgaccacagtggggtgatagacagagaagagtttaagaaaagtatgtcactgatgcggtcctttaaca

SEQ ID NO: 19884 - DNA, 270 bp, Zea mays
  Clone ID: MRT4577_118137C.1
tgctcagacgctgctgtcgaaaagactgtccagtgcggcagtgatgagccacattgtcgcccacggctgaacgagcatgagactcatcgaatgccagattctacctgatgcccgtagcctcagtgacgcctaggaccagctgatgttcagatactcagagctcagccagcttttgcgtagcatcgttgtatcggacgcttggtgtagcacttgcaaggctaagtgttaactcctccgcacatggacttttggtgataggcttgccaccgt

SEQ ID NO: 19885 - DNA, 373 bp, Zea mays
  Clone ID: MRT4577_118138C.1
ggggggggcccccccaagtttttttttaaaaaaaaaaaaacaaaggccccattttttttttccaaatttttttttaatttttaaaaaaaagggtaccattttttatttaaaaggggcccccccaaaaaaaccctcccctacaggggaacaggggacaaaaacccaaaagttgcttccaaacccccctgaaggaaaaaaaggaagcttttcccaaattcccccccccatgaaaccatttttaggggcccaccccctaaaaatgcctttggaattgaaaccaaaaaccccttccccagggttggcccccgcaatggaaccccccctccctttattgaaacgggggttgaaaaaaaaaaccacgggtttttgaaac

SEQ ID NO: 19886 - DNA, 345 bp, Zea mays
  Clone ID: MRT4577_118139C.1
cacaaaccgatgtaagactttgtttcgccgccacaccacacacccgttactttaacaaagcattttgttacgacaccaccaccgttgatgccaacattccccgaaaacacagtgcatggccacacatacccgaaaagaaccctatgacatggaacagcacactctcacgcaaaatgacaagtcaaaaagtctgaccctagacacaaccctctcctaaacatctaacttgtataccacactcgacgctcacctaaagatcgatctcttcaaccatatgcttgtgcaaataatacaccttgaaagcctaatcgatgaccttatcgcttgcatcaacacccaaacttc

SEQ ID NO: 19887 - DNA, 246 bp, Zea mays
  Clone ID: MRT4577_11813C.1
taaaaactgccctttcctttatcagttccggcgaccctcctcccaccggcgacgactaggacgaggcaccgccggcaatcatgtgcggcggcgcgatcctcaaggacctcaaggtccccgcgccgacgcggaaggtgacggcggcggtgctgtggcccgagaagaacaagcccaagcgggccgacggcgtggcccggcgcctcacgggggtcggccggcgcggagggctccgctctggcccgcgga

SEQ ID NO: 19888 - DNA, 170 bp, Zea mays
  unsure (1)..(170): unsure at all n locations
  Clone ID: MRT4577_118140C.1
agatatgccanacttcacacccctgaactatcttttgctatgacgtggatctacccttctcggtgccattgccttctaattattttgaactttccgatagggagcaaactacacttcttccacttaatcgggctgcaacataagcaccttttacctagttctgacactga

SEQ ID NO: 19889 - DNA, 364 bp, Zea mays
  Clone ID: MRT4577_118141C.1
ctaatgagctccttttgcattggcgatgaataggatcataagcgacatataaggaggattttcacggacgatatagtgctagttaataaaaatagaaaactagagttgtaacgagagactctagagtctaaagattagagtcgaaagatttatagactcggtagaataaaaatcgaatatgttacatgtattttggcactactacacattcatgagcatgagatattagtttatattagttcagaatgtcaagtagtgtgctaaaaaggaatacctttgtatttagcatcgatgccacaaggacatgaggatattgatgaagatgatagctatagaattaaagcaggtagaataaagtggcatc

SEQ ID NO: 19890 - DNA, 385 bp, Zea mays
  Clone ID: MRT4577_118143C.1
ggggagccaccccgaaaacccccattatttttcaaaaacccccgggggcagggggggggaaaaaaaccccctcacaacaagggggggggaaaaccacaaaatttttgaaaacacccccccaaaacgggggggggggggcccctttgggaaaaacaggggaaagggggaacacacgggcctgatgctgggaaaaaaaaaaatttttttaaatcttgaccccctggggcccatcccccccctaaaaaaacaaaacaccccccccctggaagccctttgagggccccccggggccctcaggggccaaaaaaaaaaaaattttctaaatcccctccccggtttcccagggcaaaagggccccctggggaaaaaagaggcaaaacttggg

SEQ ID NO: 19891 - DNA, 521 bp, Zea mays
  Clone ID: MRT4577_118144C.1
caagaaatactatgcaacgataaagctatcagtgaatggtgcgtcagaaagataaaaaaagcccttagaaattcagtgtccagaggaactgtacatttacagcgtaatttacataaaaaggtaaagcttcgacgcagtacacagagaagacgctccttgcaggtgagtatcgcttcagcttggcatgttccaattgaaactgatctcgcagcccttagtaccactctcgatgacaaataagagaacaccataacatgcccttctcacggcgagttcaccgagaagcttgtagcggagcgactcggcctgggcaatgtcgcagagcccgcggttgttcagcttctctgcgtagagctcaacgccaccctctgataagttaaagcgcttctgaatcacagaagccagctctctgatcctccggcccttctcgcgagtatgttctgggcgcgggtggcacggatgatgatctcgatgcacatgggggtgacgcggacctcgacgccggagtagccgtcctccgc

SEQ ID NO: 19892 - DNA, 206 bp, Zea mays
  Clone ID: MRT4577_118145C.1
attaagaagtactgagatattattagtaagggcacgtgtcggggaaagatactgctaataacgagatgcatgcaaaagcacatcaagcgacaacaagcaataaacggcaataagacctaatcaaaggagtggtgtaaaatgtagttcagttgcaaggcggctccgtactgtcacggtgttaagtcagagcatgagatcacgctgtg

SEQ ID NO: 19893 - DNA, 308 bp, Zea mays
  Clone ID: MRT4577_118146C.1
gacgcctgctctcccctacagacgagccacgtcgactccgtttcacctaaccatgctcactcatccatggcttcggcagaggcagagatccgccttcaggtcagctgcagtcgcagcgagccctatcgagagtgccgtatgtcctcctctgatcacaacgatgcatatcagacggccaatcgagagaagaataactacgcgcgaaatcgagagctgcacacctcgtgcagtggtacactctgtgcaaagagcaacgacactgtagatgagccggcatgggcacgcatatctaggcatgcacgaaccgg

SEQ ID NO: 19894 - DNA, 1760 bp, Zea mays
  Clone ID: MRT4577_118147C.1
gccggccgggctttggactcagccactaggcaccgcacaaaccctaaccttctatcgcggtacactatatatttgcactcgcacttcatcttgatcgatcctcctaccgtgccgccgccggcctctccaccgttcattctcctatggcatctactcacgcaagcagtcctattcctgattccttgctcggcttgcgtggcccatggattcgatgtcatatcatgtgttgtttgctcacccgcctggtcgcagttcgtgtcggatggcgtgttcttcgcggagctgaatgagatgctcgcggaggacggctactccggcgtcgaggtccgcgtcacccccatgtgcatcgagatcatcatccgtgccacccgcgcccagaacatactcgcgagaagggccggaggatcagagagctggcttctgtgattcagaagcgctttaacttatcagagggtggcgttgagctctacgcagagaagctgaacaaccgcgggctctgcgacattgcccaggccgagtcgctccgctacaagcttctcggtgaactcgccgtgagatgtgcatgttatggtgttctcttatttgtcatcgagagtggtactaagggctgcgaggtgtgagttccacaaataaaaaccattccagtttttgtttctatctcgctgcaccatgttatcctgacaatttttgctagtgtgctatttaaactgatggaacaattacagaacactttcctttgtcgaaattcatgagtgaattgttaacctagtatggtcctgcaggatagtgtgcatcagctttgccctgttttgatgcgtcttttgctgaaagtgtttcctgctatatcaatccgagttaaatgggcagttgggttaagcatatctgctttctccgacaatcattttcctcacatgtactcaggaagttatttttttgcgttctatatgctgctgttatctgttttgttggttagctttgtcagatatatttgtttcaacgacaagttagtgtaggctagagttgaaacccaacaaaaaccatatgtcaaggttaaagcgataggctaaatctttggtatatttcatcctttcaaatctcttactgctttatgtcaacttcgaccttcctctatctctctttttattgctattgtgacttgaaagatgttagaacaggtattctacatttatgttcttctcatccggattgccatatgttttcttcagttctgcacaactagttgctctgcaggatagtgtgtatcggctttgtgctaacttatatgcattttgtgccgtaagtgtttcctgctatatagactgaaggaaagtgggcagttgggttagacttgtatcctgtcttttccaacaatcattttcctctcatgtgacataatacatttattcttggaaactagtttttgaattgctgtcttagcatttacatgtttagctgctttattatactgtatgcatccaggggtatggaatatggtctgttgcatgtgctttttcctggtatgcaaagcatgtagtttgaattccatgggttgtgttatatgtttcgctatctaagtcagcttcatctgaaaatgataagcagatcagtttcaattggaacatgccaagctgaagcgatactcacctgcaaggagcgtcttctctgtgtactgcgtcgaagctttacctttttatgtaaattacgctgtaaatgtacagttcctctggacactgaatttctaagggctttttttatctctc

SEQ ID NO: 19895 - DNA, 743 bp, Zea mays
  unsure (1)..(743): unsure at all n locations
  Clone ID: MRT4577_118148C.1
gtacccctcgagcctgcccggcactcttgatgacacataagcccaaacttgacacaaaagtgatacccctgattactggtactgttgggagggggaggggtgtatgcctaactaaaaaaatcccaaaaatgattcctgaaatcggaaacttacaataattctgggtgtaatctctgaaattcggaattgcaactatattttatacattgtttaccattgtcccaaatacatatagagtgatgcttgtgcctttatttggtccttgcttcctgtgatgggaatcatgggatatactccttaagaatcatctgatctcttgaacggttgcagtcaggttaatagttctggttccattttacttcaccgttcttcacattttttgtacaattgtgctctgtattttatccggcttatctgtgctgcagtaagagtgtgcaggatcaagccggtggtgaaccaacggtggngggtggtggccgaggtgaaaccggaaacggatcgaggggatcgcgaggacggcaagagtgtcgtgtccgagagcgggagcgatgaggactccgatgggtcagggagcgaagattcggaggattccgaggaggagaggcggagggaggaggagaggacgcggcggttagctgagcggcttgcggccatggccgcatgcgctattgctgagcgcanagatgctgntgcgaggctcgagggggagaaggcggggcttgagaagctgcccgctgagcgtg

SEQ ID NO: 19896 - DNA, 252 bp, Zea mays
  Clone ID: MRT4577_118149C.1
ttgttccttcgttggcggcatgcgtacgtaatcgaggtggtaacttggagcgatttaaaagtcttctctattacccatttctaaatcctgtatgtcatagatagctttatgagtataaaaattttcatgtatgggagtagtctgagtatcccaatgagaaaattcagaatcttaaatgctgcaaaatctgagatttttcgagcacagacatgatgctctaaggaaatactcatagagcattacacatttgtg

SEQ ID NO: 19897 - DNA, 853 bp, Zea mays
  Clone ID: MRT4577_11814C.1
ggacccccgggctcgccggccgggtgctatccacccactccagctactagcctttgtacgctatgtctcctttgcgtagggacgatgattccaattcgagtgatagtgacgacaacacacttatgcttgccactcttcttaccctcaccattgaggctacacgtcgtaggtgtagatgtttcggtatccctcgccgcgttattcacagggatcattatgctggagaaaacctcatccaccatcaatacttcggcccgaaccccgtgtatccaccccacgtgtttcgcagaaggtaataactacatacttgtattattatgttttgcattaacaatgtattcgtactttagctattacattttataggttccgcatgagtaggccattgttcctctgcattatggaaggactacaacagcaagatagttactttactcaacgggtcgacgcaactggcctggccggacttagaccacttcaaaaagtatgtgcggcaatgcggatccttgcttacggcttacctactgatgtcgtagacgagtacattcaaataggggagtctaccgctagggaatgccttattcatttctgtcgtgcattaattgcatatatttaataggtggtatctacgaactcctaatgaagcagacgcattgcacgcatcatgtaaaatagcgagtcgagggggtttaaaggaatgttgggttccatagattgcatgcattgggagtggaggaactgtccaacctcgtggcgaggacaattttgtgggcgaaatgcaagacctaccctgatactcgaggctgtcgcaacatacgatctctagatttggcatgcttttttggcatgcctg

SEQ ID NO: 19898 - DNA, 273 bp, Zea mays
  Clone ID: MRT4577_118150C.1
gctccttacttccgcgccgccacccctacaggtaaggaagaggaggagggcaggatgtcgcaccggaagttcgagcacccggggcacgggtccctcagattcacttcccaaggagagctcctcccgttaccgatgtaggtagagatcgagagggggaaagaaggacacaagcgagcgctagtcagaagagcagctgcaggtactattatcatcgtcgtcgtggtcgccaggatgaccgtcgttgacgccgtcggctccttgaccgatgccggc

SEQ ID NO: 19899 - DNA, 421 bp, Zea mays
  Clone ID: MRT4577_118151C.1
aatcacatatacatgcaaaaaaaaattaaaaccggcacgagacggacatgaccgagagcacgttacagatgaacatgaaccccaggagcgaccatggatcgataatggcgggggcagaggacaggatctaatttagacgccgttattatattaatacaactcgtcggggaccactagactttcgtgcgccatcaccagaccggttaagttgcagctgcagcaggagcaggcgcggctggggccgcaggtgcaggggtggcagaggcagccgccctccctggggggccgccttgaagccgccggtactggccttggtggcaggggcggcaagggaccggagccttgatgctgttggcggaggtggactccacgttaggggacatgcaatttgatgagctgccgcaggagcagctggagccac

SEQ ID NO: 19900 - DNA, 750 bp, Zea mays
  unsure (1)..(750): unsure at all n locations
  Clone ID: MRT4577_118152C.1
cctcggtttccccccattcctgaattatttccttcatccatccaactgcatcctaaaaacttttcttaacctcataacagagacatggccagaactaagcaaaccgcccgtaagtccacgggaggcaaagcgccccgaaagcaactggcagccaaggccgctcgcaagtctgctcccgctacaggtggcgtcaagaaaccccaccgatacaaacccggtaccgtcgctcttcgtgagattcgacgataccagaaatcgactgagcttcttattcgtaaacttccgttccaacgtctcgttcgagaaatcgcacaagacttcaagactgatcttcgatttcagtcctctgctatcggcgcattgcaagagtcagccgaggcctacctcgtgtcattgttcgaagataccaatcttgccgccattcatgctaagcgtgtgacgattcaacccaaggacattcaacttgctcgtcgtcttcgtggtgaacggtcatgatctatcgtgaggtcgacctgcgccattatgtcaacggaggatctcaattttcaattttgtttatttcgttatccaaccgtcgagatattcgcaaagttgttgttgcgcccatcgccttccctacccccttgttgtttcttgtgttccccactaggcgtaccaccactgtatcatcaatctgtctgcctctgcgtttatgcagcagactattctccaaaattatctccggttcacnattggattcgnttgagatat

SEQ ID NO: 19901 - DNA, 1440 bp, Zea mays
  Clone ID: MRT4577_118153C.1
cattggctcgcacgaggccggccggggctgcgcctgcgtgcgtgtgctcgcctcccaccctccccgcactagctctgcactttccctggcagtcgtcccttgttcctgacttcctgcctgagcgcatccggccaccttctatccgcccgccagtccccgccggcctccgcggatcatctgcctgggatcaagatccgtcgaggccgaggcacccgcgcgccaaagatcgtttcttgatctaaatttgggtggtcgtagggatcaaagctcggttctctgcggtgcagttgagagggcaccaatattcttggcatggtggctgacacggaaagctcagattcactgcctggcagttcaaatgctgcttctgagatgcctgctaatgggtctattcaccgaaagtctcaggaaaagccccccaaaaaaacacataaagctgaacgagagaagcttaaacgtgatcagttgaatgacctttttgttgagctcggcagtatgctagatcttgatcgacaaaacactggaaaggctacagtgctaggtgatgctgcgcgagtactgcgagatctaatcactcaagtggaatctctcaggcaggaacaatctgctcttgtatcggagcgccaatatgtcagttccgagaagaatgagctgcaagaggagaacagttcgctcaagtcccaaatatcggaactacaaaccgagctctgcgcaaggatgaggagcagcagcctgagccaaaccagcatcgggatgtcggatccggcaactcaccagcagatgtggagcagcattccccacttaagctccgtggccatggcggcgcgcccagcaagtgcagcgtccccgttgcacggccaggagggctactctgctgacgccggtcaagcgggctacgcgccgcagccgcaacctcgggagctgcagctctttccggggtcatcggcatcgtcttcaccggagcgtgaacgttcttcccggctcggaagcggccaggccacgccgccgagcctgacagattccttgccgggtcagctctgcctaagcctcctacagccatctcaggaagcaagcggcggcggcggcgtcgtgtcgcccagcagagaggaacggcgggatgggtagccaactgacagacaacgcacttgaatcggggtgtgtggcggcggcgcattgtcctgtaaataccaagaattccgtccctttactggctcgttcatccagaactaatgctggtagctgccctgtgttgagcggcagctctgcttgttctagaagcttctgagaacatgtgtgggctatgttttccatgagattgtaagatgtgaggtggagccgctagaacacttagcgtgcgttttactgacagtgtggagtgctgctccttagttggaatagaaaaatgcaatttgatggctgtgctgctgtcttgatctgtta

SEQ ID NO: 19902 - DNA, 364 bp, Zea mays
  Clone ID: MRT4577_118154C.1
ttgtacgcgtgggcgttatgtggtggcaggggaaggtagttgaggctgccgttccaacatatagctgcaaggagacgcgcagcagcatacaggttgactgatagcatgatcacgcattgacgacctgatacgggcgctcccacgatcatttacttgaacttcagctaactagcctaatactcgcatcgctcggtcggttcctgtacactgcattagcggattggggtttcactggacaacgaccctgatccatgcattctgtaccggcggacgggctgtgtacaacggcgcaaggatgcccttatccgcgctctggccttgggatctcgattgacgcgttggtttaacacaaagcacgcctcca

SEQ ID NO: 19903 - DNA, 1237 bp, Zea mays
  Clone ID: MRT4577_118155C.1
tcgaggccggccgggagtcgtcccttgttcctgacttcctgcctgagcgcatccggccaccttctatccgcccgccagtccccgccggcctccgcggatcatctgcctgggatcaagatccgtcgaggccgaggcacccgcgcgccaaagatcgtttcttgatctaaatttgggtggtcgtagggatcaaagctcggttctctgcggtgcagttgagagggcaccaatattcttggcatggtggctgacacggaaagctcagattcactgcctggcagttcaaatgctgcttctgagatgcctgctaatggatcttgatcgacaaaacactggaaaggctacagtgctaggtgatgctgcgcgagtactgcgagatctaatcactcaagtggaatctctcaggcaggaacaatctgctcttgtatcggagcgccaatatgtcagttccgagaagaatgagctgcaagaggagaacagttcgctcaagtcccaaatatcggaactacaaaccgagctctgcgcaaggatgaggagcagcagcctgagccaaaccagcatcgggatgtcggatccggcaactcaccagcagatgcagatgtggagcagcattccccacttaagctccgtggccatggcggcgcgcccagcaagtgcagcgtccccgttgcacggccaggagggctactctgctgacgccggtcaagcgggctacgcgccgcagccgcaacctcgggagctgcagctctttccggggtcatcggcatcgtcttcaccggagcgtgaacgttcttcccggctcggaagcggccaggccacgcggccgagcctgacagattccttgccgggtcagctctgcctgagcctcctacagccatctcaggaagcaagcggcggcggcggcggcggcgtcatgtcgcgcagcagagaggaacggcgggacgggtagccaactgacagacaacgcacttgaatcggggtgtgtggcggcggcgattgtcctgtaaataccaagaattccgtccctttactggctcgttcatccagaactaatgctggtagctgccctgtgttgagcggcagctctgcttgttctagaagcttctgagaacatgtgtgggctatgttttccatgagattgtaagatgtgaggtggagccgctagaacacttagcgtgcgttttactgacagtgtggagtgctgctccttagttggaatagaaaaatgcaatttgatggc

SEQ ID NO: 19904 - DNA, 809 bp, Zea mays
  Clone ID: MRT4577_118156C.1
aatcaaaatctctcataatttatttcaatcacaatcaatccatatgggatgagaataatcgaataaggccttatgtgggaggcctaagcactggctctatcctgacctaggggagttaagatttccctagtcttagttgacctatttttacatttgcaccttcagattgttctgaataatgacgctgtctattctttctaatacatatttgctcttgtagtgtgctccctcagcctactcgccttttttcccgctgcactattttcctgttttctgaacaattttccgctgcaggtctattcaccgaaagtctcaggaaaagccccccaaaaaaacacataaagctgaacgagagaagcttaaacgtgatcagttgaatgacctttttgttgagctcggcagtatgctaggatcgctgcctggcagatcgtgaaccatttcttctgattacgtctatggttgttgccatgaaaagaactgctaatctctctacaaaattcttcaaaattaatatcttgatcgacaaaacactggaaaggctacagtgctaggtgatgctgcgcgagtactgcgagatctaatcactcaagtggaatctctcaggcaggaacaatctgctcttgtatcggagcgccaatatttccgagaagaatgagctgcaagaggagaacagttcgctcaagtcccaaatatcggaactacaaaccgagctctgcgcaaggatgaggagcagcagcctgagccaaaccagcatcgggatgtcggatccgggcactcaccagcagatgcagatgtggagcagcattccc

SEQ ID NO: 19905 - DNA, 2434 bp, Zea mays
  Clone ID: MRT4577_118157C.1
cggggaaaaaaaaaaaaaaaaaaaaaaaaaaaaaaaaaaaaaaatttttacgcaagcgacgacgttctcctccccgtacacaacacgcacgccatctctctcgaagcttccgcttcctccagccgccaccgacccgaacccaccccggacgcggcgcctcccccgcaccctatattgttccccgagctccagccgccaaggattggcgaaaggagccgggcagatattgaaactcgtttcagatcggatccgaggactcgagaaattgcagggaaggaatttgaggatggatttcgagctgcggcaggcgcgggagaagctggagcgcgagcagcgggagcggatgcagcgcgccaaggccaaagcggagcgcgagagcctggccaaggcagaggcggcgcgccgccaggaagcgctcgaggcgtcccaccgcgagcgacgactcgatgccgcacgggcccaggaagaggctgaccggacaatggaagaggtgatgcagctggggaaggggatttcattctcgcacatgtttgaggcacttcgatatgatggccctggggataagatcaagttgccaccatcttcgtttaaggagttgtctgatgaaggagctctcgataaaggtcccatgtacttcaggttgtcgaaggttagggacacagtcccaggtgctgctatggaacaagatgctgggacaacctgttgtggtgttcttgaattcacggcaagggaaggctctgctgaactcccgctgcatgtttggaacaacctgtttgggagtgacaccccagaggtccctctaattgaagtcaaatataccagtttgctcaaaggaacatatgcaaagttgaagccagaaggaggtgggttttcagatctccctaaccatagagcagtcctcgaaacagcgctccgcaatcatgcaacactatctgaaaatgatactgttgtggtaaactatggacagctgcagtacaagttgaaggttcttgaactgaagcctgcctcaagtgtatctgtcctagagacagatgttgaagttgacatcgtgggatcagattcggttttggacaacgaagatgaccaacatgtgcttgtgcctcttgtaattggaaatatagaatccagtgttgtggaagaaggaaagttcaggtactacaaattttcagttgaaggaaatgtgagtgagaaagtagcttctgggcatgcaaatatcgagattaaaatagatacggacgcgagcggtggtgacactgatatctatgtttcaagacatcctttagtatttccaactcagcaccgacatgagtggtcttctcatgaaatgggatcgaaggttcttatactcaaaccacgggatgctacattggtcagtggtgtttacagtattggagtttatggtttcaaagggacttctaagtaccagctctctgtagctatcaaggatgttagtggccaaaggattggtgaatatgctagtgcctcgggaagtgttgattttgattctgtgctgtgtagaaactgtaagcgccatatagccagccagtctgctcatcttcatgaggcatactgcatgagacacaatgtagcctgctcacatgatgggtgtggagttgtccttcggaaggaagaagcagcagatcatgtgcactgcaacaagtgcggacgagcttaccagcagagagaaatggaaaagcatatgaaagtcttccatgaaccgttgcagtgcccctgtggggtggtcctggagaaggaagatatggttcagcaccagtccttgacttgccccttgcgattaattgtgtgccgcttctgtggtgacacagtccaggctggtggagagccttctgatgttcgtgacaggatgcgaaacatgtctgagcatgagagtatctgcggatccaggacagcaccatgtgactcctgtggacggtcgatcatgcttaaggagatggagattcatcttattgctgtgcatcagaagagctaatcacctactgacgctgggctggtctgaacttgagcctctattgtcatttggtcaacagaagctgtgaactttaatgtgccattccagggttgttggattgaaaactaccccttgggactgggagctatatgtgattcgtaattcgtggtgttccatgggattaaacatactggtgttatctgtattttatttctctgtatacattatttataaatctgattttacattcggtattacctaaaaaaaaaaaaaaaaaaaaggacaaaaggcctaaaaaaccagaccaacaaatcccaactaccatgccatccattccaactacaattcccccaacaatccctcccattcccggactacaggcgcctccatgcactgctcggtccccatgggccaccagggcctgcaagctggccgtatgaggacccttttctttacacgcatgtt

SEQ ID NO: 19906 - DNA, 248 bp, Zea mays
  Clone ID: MRT4577_118158C.1
ccggccggtgttcctgacttcctgcctgtgcgcatccggccaccttctatccgcccgccagtccccgctggcctccgcggatcatctgcctgggatcaagatccgtcgaggccgaggcacccgcgcaccaaagatcgtttcttgatctaaatttgggtggtcgtagggatcaaagctcggttctctgcggtgcagttgagaggggtaaaatttgactctgatttgttgaggtgtctgggtgtgagagt

SEQ ID NO: 19907 - DNA, 130 bp, Zea mays
  Clone ID: MRT4577_118159C.1
tttcggttgtagatgcagaggcgggccggcatgagaggaggggcggccggcggcgtgaggactgaggggcggccagtggcgtgaggattgaggggcgggcggctgcatatgagggttaggttatggttta

SEQ ID NO: 19908 - DNA, 236 bp, Zea mays
  Clone ID: MRT4577_11815C.1
gcactcacaatggcgttatttccaatttaaatttagacttttgatcagattttattcagaacgagcttgagtgtcacgttatgacgacgtgaccaccttgagctcgaactcctaggcagcgaccagcgacaacccctccacttgagcggcgcctagtgctccgcgcctttgataccctagcgtctcgccagtcgagttgtccatcttaacgcccgtggcatacacgtggatctttc

SEQ ID NO: 19909 - DNA, 197 bp, Zea mays
  Clone ID: MRT4577_118160C.1
acgcgtccatactggattacaagcagtacatctagtacattatatgggtgtgcaagtcgcatgacgacatgttcctcaacggctccttcattaatcagtccagatgcggggaagagggggtctaggacatgttcgacctcatctataccaggggttgtcattacgccgtagtcgatcaccatctattctggtgcgct

SEQ ID NO: 19910 - DNA, 353 bp, Zea mays
  Clone ID: MRT4577_118161C.1
agcagtggtaacaacgcagagtactttttttttttttttttttttttttttggagacaccattgtacgtcagcttttcaaagaaaaacaaccggcctcactacttttttagggcacttcagggaaagcgcgggaggtttctactttttgggctggttgggagccacaaaagcggaggggaataaaggtttttaatctattttcaataataaggggattctaacctttaaccctttcgattttggggctttcaaactagccctttaagactaggattacgggtggcaatgcggcatggggatcgggaggtttgcgactacatgcaggcccaaaagcaagcgcttgatggtcatg

SEQ ID NO: 19911 - DNA, 339 bp, Zea mays
  unsure (1)..(339): unsure at all n locations
  Clone ID: MRT4577_118162C.1
aaaacaaaaaaaaancgcgcacaacnccnnganccacgaaccacaccggggggggggcgccgcgccaccgcccccgacnccggggagagcagcnccggcggcacgcggagaggacgacangaaggcgncaagcngacaggaagagngcaaagnnccagaagaacagcacaaagaggggaacngngccngagaccacggcgaaaaggagcgggggggacccngnnggaccnaaagnnacagaaaacanaagacnngggggcagggaagcaagcccggnccagagaaccaggacagcgacaagcggnggncnggccagaanacacggagccaaaaccagaa

SEQ ID NO: 19912 - DNA, 266 bp, Zea mays
  Clone ID: MRT4577_118163C.1
catccatcgaccgatcgatcgccacagacaacaccacccggcgaggcgacacgacagccgagggggggaaggaataaactcactgccagccagggaagggggagaactgtactgctccgtagaccagtgcgcgcaccgcccggcagggctgctcatctcgtacacgaccagtggattaattggcatggctgctctggccacatctcagctcgacgcaacgcccgccgggctgggcgtacccgacgccttcacgttccggcgccgcg

SEQ ID NO: 19913 - DNA, 181 bp, Zea mays
  Clone ID: MRT4577_118164C.1
ccactccgcctgaactccatggtttcctttttaggctggtgaagctggcggcccgcgccttctacgatgacgtcttaatgaagggggacaaccaagccaagacctcccgcggggacaaccgcggcatgggccgtcgtcgtctggaagcgctcaccaaaccaccggggttcgaagaagattt

SEQ ID NO: 19914 - DNA, 172 bp, Zea mays
  Clone ID: MRT4577_118165C.1
ccgggaatcattctccagtacaagtccttgtcatcacagaatttacataacatttacttacatatagacctttcattctgaagcagattcacccaccatgtttaatctcctataatgaaaatagtgctataggtatagtagtcatgaggctgacctgccaccacaaaaggtc

SEQ ID NO: 19915 - DNA, 128 bp, Zea mays
  Clone ID: MRT4577_118166C.1
cttctatgatgattccgacatcgatggcggggtacatactgctaagtagcctcctatctcctaccatgtcgtaccggaattactcgttaccaattctgagggagatccctcatctacgagcaatcggg

SEQ ID NO: 19916 - DNA, 196 bp, Zea mays
  Clone ID: MRT4577_118167C.1
catgcccgaccacgcactacggggggcgagccgcggcccaacgaacatgggcttgctcggctccctgtctgctgcaagccgtcgcggcggctgaacccgcgccacgtctccaacttctactaatgcacaagcttcgcctgctcaatgacaaaaccaaaataaaagcggcggcccactctactaaggggcgaggggg

SEQ ID NO: 19917 - DNA, 433 bp, Zea mays
  Clone ID: MRT4577_118168C.1
tcccttactggtcgcggcgagtacaagctttttttttttttttttttttttttttttttttttttttttttttttttttttttttttttttttttttttttttttttttttttttttttttttttttttttttttttttatttttttgtggggggggtttttattgacattttttgttgtttaagtattgtttggttaatagtggtttacaacacacattgaaagttttaccacctcataactagcctggtgaaccctgcgctactaacagaacctgtttattatcctctgtgggttatgcacctctcctgcacacattctgacagttgtcctggcggacacctaggcaattcaccactgcgcgttctgtggatcggctggacagctgggtgtatgcatagtgttctgttatatgtatcgtacattccacact

SEQ ID NO: 19918 - DNA, 449 bp, Zea mays
  Clone ID: MRT4577_118169C.1
gatttccgggcctttagtttttagaattggaaaactgggcccccttctttttaaattccccgggccgtcctgttggccggtttttggttggcccttgattccgcccagggggggggacctaagggaatggattggtcaatccaagggaaggcaaccagactccaggagggggttaaaggccggggttttaaccggggaaatgttggccatggtggggctttcaaaacaagaagcccggaaaaagccaaaaagccttcccgttccgggatcccaattggtcctggggccggggcaagggccggaacggggggggccgaacaaggtggacctgggggacctcttaaggggggccgggccgttcaaaacgttcctggattacctgcagaagaccggggtaatgaaaaccttccaaagccaggcgaacgacacgaagcggggcggattaaccg

SEQ ID NO: 19919 - DNA, 365 bp, Zea mays
  Clone ID: MRT4577_11816C.1
aaaaaaaaaaaaaaaaaaacaaaaaaaaaatttaattaaaaaaaaaaaaaaaaaaaaaaagagaagagaataaaaaaaaaaaaaaaaaaaggacacccaattttacaggaaaccgggctttctttcccttgcattcaacttcatacctcttctattgggtcactttttttcttttttttttccctctttttacaacttcttttctggcaaatccctggcgttccctatcttaatccctttgcttcccatccttgtttccctatttggccatttatcttaaaggcccgaaccaatctccctttttacccttttctcatgcttattggtaaattttaccccccctttttccgcccattaagctccct

SEQ ID NO: 19920 - DNA, 505 bp, Zea mays
  Clone ID: MRT4577_118170C.1
cccacgcgatctggttaatcccccctcttgctcggctgtgggtagaggctcttgactggcgccctgtggacagtaaccgcgaccaacagctccaacgcatgaacaatactgtaccacccccaccaacagctccaaccatccaattccccctcgaatccctcaccatctagcaaccataacataccatcagcagtgaacttgtgggaaagactgacttgccaatggtagtattggcctattggcctatggggtggggggcgtgggggcacaaaacaagattccaggtgtgtttatcaaagagagcatcacgttctttcttcatggcagacctccaatctggatcagtgagagcaccatgggattttggcgacagagtgcttgcatggtagagagcaagaaggtgaaaaccatgcttcctatgtgtaggcaatggcatgctggttcactgcatgagccacagaaacagcaccacaactgaagtaagcaggaagcagctgtgcaatca

SEQ ID NO: 19921 - DNA, 396 bp, Zea mays
  Clone ID: MRT4577_118171C.1
ccggtgtgaaactgcttttgttagacatcactcgggacataaatttagatttttatcttcaagcatgttgaaattcaactgaggcttgggtccgtcgaatctgccctatgatgatctgtaattacacacttcttttcccacactactggaagcatttgtggtaaggcaaattgtgaggtcatttggtgttcgttcattcagtcaccttctcgataaattttagtttttcgaatttttatttcggaggtctcatttagtatgttgtttgatcgtttagggactaaaagcaactaaactttagttactaaaagtttgaatgtgggacctaagcatacccttatttcggttctaaattataggttttaaggtcactgacaccttttttttttgtcacac

SEQ ID NO: 19922 - DNA, 342 bp, Zea mays
  Clone ID: MRT4577_118172C.1
cgatctcgattcaaatccatccatcctcgcatccaccgacccgcagcatctcaaccccatggccaagatcaagatcgggatcaatgggctcggcatgatccgaaagctggcatccagagtggccctgcagagtgacgatgacgagctcgtcgccgtataacgagcccatcatcagcagcgactacatgacctacatgctcacgtacggcactgtgcacggacagtggtaccaccatgaagtcactgtgaaagactccaaaacccttcacattggtgagcaggaagctgctatgtttggctacaagaatcctgaggcgattccgtagggttccatcggcgctg

SEQ ID NO: 19923 - DNA, 557 bp, Zea mays
  Clone ID: MRT4577_118173C.1
ggttgtctttaaacccgtgcctatgtttatgtgtttggactacagcccgaactggtgagatgcactacgcacactaacatactggttatcgccacaccgcacagggtaccatacgacggcgtcactgggctcgtcataacaataaagttcgcttctttcaacaggagtaattctggctggatcacagcatgcaccaagggaacgacagagatctatggcatctatgtaattatgcagggaacggagatctgttagtttaactaagacccatgcgcgtactggcttagtgccacccatgagtatgactagctcaaacaccatgagacgcccgaggacgtcttaaggtacgatagttaccaggatatggagttggattccaactgctatgacttatggtgagccttgccaagacggtctactacgcgcgttggcaccctgagacgttatgccgcgacgtgatgcatgttggggggcatgtgggcactgccgggacatgggagaaagcgcacttggcgcagaggatctatgagctgcaacaacagtggtggaagcaagag

SEQ ID NO: 19924 - DNA, 419 bp, Zea mays
  Clone ID: MRT4577_118174C.1
ctttctattagttaagcatcttttactttttttttctgtaaagtttcgtgttggggacggagaaaacctcttcgccgatagacgggtccttacaaagcagatcaggaggatttaacacgtcccaatttggccgccaaagttagacaatgggggcttcaggaaatcccgggtctcaggaaactaaaacactaatttcgttcggggactcaaacgcttctttatcccaaaaacaaatgacatgttcgggcgcgatttgtttttgcccagcaatttcatctggttttgcctttgatgatcttcctccatttgtttccgctttatgggcccccttcttttcttctgaaacccttccagctactgataccgccttagccctttctggtgctgtaccattagcatcttttctcaacgccttttta

SEQ ID NO: 19925 - DNA, 256 bp, Zea mays
  unsure (1)..(256): unsure at all n locations
  Clone ID: MRT4577_118175C.1
taagctcggaatccgtctcgagacctgttccatacctttctatatacccccagactttnaccctggtcggactggggatatttgacccacaggtggcgttataacctgcaaattctgatgctgggtttccatcgtggcttcgctcaattagttgggaaaccaactnttttcttgctttttctgacacgtataatgaattcttggttcacaccaagaattgctcagtgagggccgttttccacagcatcatgttcac

SEQ ID NO: 19926 - DNA, 114 bp, Zea mays
  Clone ID: MRT4577_118176C.1
atgcgttcgttttatcgttcgtgtctgcttcgccctgggcggggagctcttatcatggagggcgacagtaccaacctcgacaccgctatagagttgcatgttaacgttgagaaa

SEQ ID NO: 19927 - DNA, 447 bp, Zea mays
  Clone ID: MRT4577_118177C.1
ccgacgaggtgagctagatgtttggagaggtaaaactggtgcttaccaatcaattattggcgaccactattgtgaataacattgcactgagctttaatcacgatttagtaatgaagtctatgtttcaagtatagagttgcaatcatatgatgtgctctctttttttccaaaccaacaagacattaatgagattcatgaactgattgtgttgttatcgtattcctttggcatagatgattggtgtatgggcaatgtgcctctaggagcaaatggtaaaggcaacaaagatgatttataaatatgtacaaggctgagttatttatttttttccttgcattgctgttattttccatttcccacacctggggttctcatgttacctccaattatagcaaaagtttgctaagatgggtgaagtgcttcttgcaggcacatactggaggtttt

SEQ ID NO: 19928 - DNA, 269 bp, Zea mays
  Clone ID: MRT4577_118178C.1
ttctagaaccggcccgactacgaggccgccatggcacgcgctgccgcgttcggcctattgccgttcattttgtccgagacgttcctctggacggcctactccatgaagctcaacgacaacattagcagtgagcactccatctagaccgccagcagagagaggctcaccagcatggacatagatattgactgggccgatgctgacttcctagagacttgcatcagtgtctagtgcaacatgcgaccgacggaccgctaagacttgtatga

SEQ ID NO: 19929 - DNA, 3330 bp, Zea mays
  Clone ID: MRT4577_118179C.1
ccacccctgaacccgtcagcgacaccgtcaaagatctgaaagcaagttgcagtttggcactccggcgacgccatgaaggggggtttaaagaaatgcgggcccctctgttctgaggtcaggcgacgggtgcggtcgccatcgccggggggcgatgccgcgtccgcgtgcgcgccggcggcagaatccgcccttgcgcctggacaggagctattgggcctacggctgctgcaaagattggcgagacacaggcagccagggatgtatctggacggactgacgacggagatctcggttgattgtcctggtcaaacactctttgtttctgtaaatggaagttggataggaaacacaaaggtcagtgtcagtgaaaaccatatgcaaattcgtgtgaatccatcaccatgccccttcttcaggccctttttggtggttgatccctgatcggaggggattggattcattggggaaaaaacaaggtttgtttggtgatcagagaattgaagtgggaaaattctcttgctattcaattatctggtaagaagatttcttcacatggatcccctccaattttctggtcattcagttggtttagagaaaaggtagagaaggtacagtttttgccgtgttaactagccagtaaattcgtgtttgactgctgcagctagaggagcatgacgaaacacaacctttttttccagatgttttgttttttgattggatgggaaaaaaattcgtttgtgagatttgcagtttcgcaagaaattcgaaaaggaaccgttgtcaggatcagcagaagcttccaaagcaacactttttttcctgtaaaaactatgtcaacaattaaacatgacgagaggagccagtttaccttaccagtaatacagagacatgatttggcgagaggtccatgttagggaagggaggctccaaaccggcgcttttcagccttgcgtcagtgttttatatatatgattcaaatatgtcgctgtaatgccgagtaaatctatgggcacttattagactggccatccacttcctccaattgctgcatcatgttagatgctgtcagtgtcaaaacacctaggaccaagctgctgcaaattaatccttggactaggaattctgagacgtgttgttgaattcaagcagtgtactgcttttctgttcatacatacacctaatataggccgcttgtgcgtgttcattggcgcgaaagtggccaaattcttcactggccgatttttccactgatgagcgaaaatgaggagaacggaatctttgcctccgatgaagggaaagatacctgccatcactttgtttagtcccagctagctagtgccacactcaactagtacatgtcttctgtgcttgaactcttctgccaggcactatttttgtaaggttatttggtgctttaggtgggattctattttatattatctcatatgtttcattgcttctgttgcttgaatttcaagcgattgtccttagtagccctgctactgcaacactactaaagacagcttcttgtgactcccgttatcaatctggtcaatcgttgcaccaggagaggggagggtgagctgagaggggtttcatggagatggagggcagaggcctgtctgatttgttcaggaacaccagcgaggagatcttcctcaaggcagtgatggagaactcgatgggagtagcagcagcgccaagcatggagatgctggggttcaagaacacgtcgcgaagtctcagagaagacagcgaggagctgttcaacaactggcttatgaatggagagatccctggatttgggtcagtgaacaatcaccctcgacaaccatctaggttgtcatcagaagccgcaggccttccgaatcaacagcatgacattgctcaacaaagttttctcactgacaacttggttccacagaatttaacaattccttctgtcgaatatccaaataaccacaaccagcaatcactcaaaaatgcagcagagaagggaatgcaagccagtgacctacttctagcaaaagcctggttccacagcactcaaccaatgactagaagtcgttcgtcagagttaaggaggaggtatgctgcgatgcaaactaatatggcaccaataacaataggaagcattgaaacacctaaccaattaaaacaagattttacaaacacaacaaacatcacaccaatgagcaacacacttgttcatacaccaaagtttgtatctccttcaagttcatcaacatcccctctggataatccacatgtggcagcacaagatactgttacctcagtggtgagcatgctcaaggacacacttgagcgcaagaagcttggtagccatgctaacaaagacacctcagcaggcaattcttttggattctatgacactcagcagtttcaacaaaacattcttggaggaacagatttctttcccatagtgacaactgcccaagttcaggattccctgatgcttcccaaggttgacaggcccatggaaccaaacaatggtaacttcgttgctcctgcaaaccaggtttggttcagtgcagcttctcgagagccttcacacagtggatcgtctactgctatgactactcattcagctggatttgaaatgtgtgatgagctacctcctgcagcgcaagcgatgagtgtttgtgagagcaccagaaaaaatgctgcaaatggaacaaccgactgcaaatcaaaaggcaaagagtatagagagagggtacaaaaggataatttgaaagatgggaggaagaaagcagccctaactcgaataggatccatttcatctgaacaagcagctgataatggagatcctacaaagaagcgcagggttgagcgctcacgcaaaatggcagaagcaaaggaaagaagttccacaccagtaataccatctgatatgcaagccgtacttaaacgctgtgaaaccctagagaaggaggtccgatcactaaaacttaacctgtctttcatgaacaggaaagattcagaacagaccaagcagatcgaggagcttcagaagcaaaacgaggatttggccgaagagaaggagcggctggtggaagagatcgaaaggattgtctctgaccccaacacatgaccgcccaatcatttctgacatttttttatatactaatagaattagacttgaaatggtcctagatacaaatacacatacacaatccagcagggggcagcaagaattaagtgctggcctaaatgtaccattctttccttgttttcacaagtgtaacgtatacgaatatcaacaagcaaagggatcagggattacagtttatttcctaaaaaaaaaaa

SEQ ID NO: 19930 - DNA, 687 bp, Zea mays
  Clone ID: MRT4577_11817C.1
ggataaactccggccactttttgtagccgcccggaatttgatactcccccggtcctcccctatataggcatgcctccttccacctctccccttcgccactttcctgccttcctccattgctcgccgcccttaagccagctcaggtagcaactagagccgacatgatggcggaggcgtgggtggacgtgctgccgccgccggcgccctacttcgccgggcagccgtgctgggccgtacagcaagagcgtcgtggaggcggcgcctggacactggaggagaacaaggtgttcgaggaggcgctcgcggcgatcgacctggacgcgccggaccggtgggagatggtcgcgctgatgctgcccaggaagacggtcgccgacgtggtgaaccactaccgggccctcgagaacgacgtcgggttcatcgaggccgggctggtcccgtttcctcactacgacagctcgtccccttcgtccgggttcactctggactggggacggcggcgccgccggcgccggcgggttcaggcgcggctactgcctcaagcgcgggcgcgccgaccaggagcggaagaagggcgtcccgtggacggaggaggagcaccggctgttcttgaaggggctgaagaagtacgggataggcgactggaggaacatctcgcggaactacttgacgagccgcacgccgacg

SEQ ID NO: 19931 - DNA, 341 bp, Zea mays
  Clone ID: MRT4577_118180C.1
gggcgggccaaaaccttttaaaaaacctaatttttaaattccaaaaggttttggagggggcccaagggccccccccggttcctattttttttggggcacctttcccgggcccctgggttaacaaggggaagggcaaccagggcccaattgggggggcccataacattttttttttttaaacaagggcaaaaaaagtttttttttttttttttaaaacagggaaaaaaaccacgggggccggaaaccttccctaaaacccccccttttttacaagggccccgggctttttttaaaccccggtttcccctttccttaagggggaggggggcccatcctttttt

SEQ ID NO: 19932 - DNA, 732 bp, Zea mays
  Clone ID: MRT4577_118181C.1
aatctggtcaatcgttgcaccaggagaggggagggtgagctgagaggggtttcatggagatggagggcagaggcctgtctgatttgttcaggaacaccagcgaggagatcttcctcaaggcagtgatggagaactcgatgggagtagcagcagcgccaagcatggagatgctggggttcaagaacacgtcgcgaagtctcagagaagacagcgaggagctgttcaacaactggcttatgaatggagaggcaagaattctgaaattttcctgtcgtttcttcttttctgcgagcatgaagatgaaatagctcatgcttcagaagatatggtcccttttgctggggatcactcacttctatcatttcggaaagtacatagtggatattctatccctggatttgggtcagtgaacaatcaccctcgacaaccatctaggttgtcatcagaagccgcaggccttccgaatcaacagcatgacattgctcaacaaagttttctcactgacaacttggttccacagaatttaacaattccttctgtcgaatatccaaataaccacaaccagcaatcactcaaaaatgcagcagagaagggaatgcaagccagtgacctacttctagcaaaagcctggttccacagcactcaaccaatgactagaagtcgttcgtcagagttaaggaggaggtatgctgcgatgcaaactaatatggcacccaataacataggaagcat

SEQ ID NO: 19933 - DNA, 236 bp, Zea mays
  Clone ID: MRT4577_118182C.1
cggctcgagtcgggttcccggcttctgctttctggctacgccagcgcgcctctcgtctacttaggagtccccgatccatgtagccggggcaggcctagagtggtcaacgacgacgtctgccggcagtgctcctgctcctcctcttcctccttcccggccgccgcgcgagcttggtgggttagtctctcttcttcgcgtagacctgtgagatgagccatcatcatcgccgccgttga

SEQ ID NO: 19934 - DNA, 784 bp, Zea mays
  Clone ID: MRT4577_118183C.1
ctcgagcagcaaaccaagtcgcacatccatccaggtcatccatcagctcttccctctgctcacaactcacaagcaacagttctgttggagcttatcaatctctcgattcccaggaggaacggaaccaaaggtctgctggtcgcgcgcgtgccactagtcaggagacgggatgggcaaccttgtctcgcagtgcgtcgggaacggtgccggcgcgcggcctctggtcatcggggcgacggacggcagccgaacgatggtcgaggagaacaccgcggtcgcggagctgatgatcgacgcgccggggcacgtggttgctcgcgccacggacgtggcgagggagcgacggttgcgggcgatggcggccgacgaggtcctgcgcgctggcgtggtgtacctcctcgtgccggcaggccgggccggtgcgcggctaggcggccgtgaggtcgaggccatcgggcggctggtctctgggaagaagggttcgaggaagagcaggcccggcggcggcaggagggtctttccggacgtcagcgccgaagaggacgcggctgaaagaaaggaggttgtgtgtgctgttaaacgggcccatgatcatggatttgggcccaggcaatggaggcccgccctggataccatctatgaggcctagattttttcttcttattagagagagtaggaaaccccattctttggtttatatgtttaggaacttaccatgtacaactgtatacattcgtctaaccgtgcaactaaaaaacgaagacagaaaaaatattcttttttc

SEQ ID NO: 19935 - DNA, 431 bp, Zea mays
  Clone ID: MRT4577_118184C.1
cccacgcgtacacacacgcgtgcgcggagacccgttcggatcatacagggacccagccagagctacgaagagtgcaagctcaaggagatcaagaacggtcggctcgccatgctggacatcgcacgcttacgattccaacatacggacatccctatctccgtgcctctcgataaccttggcggccagctctgcgaacgctgtcacaacaacatgctgagacatgcatcatccctagatcgatctgccatggacaggaacacaggacgattattactactaggcactacgcactgactgcctacatgcaggagcagctcaacgacgacgactgcgaatctaggacttccgtcccctccggaaagctctgcgcatgtaaaggaaaaggaaattggaaccatgtagcgcacttatagcatgcatgacagcaatcg

SEQ ID NO: 19936 - DNA, 328 bp, Zea mays
  Clone ID: MRT4577_118185C.1
cgggcggtcatccacgcgtaaggatttactcttatcaagtgagtatgtgcggcatacttgctgtgctcgggtgcgcctacgaggccaaaggcagcagcaacaggtcccgggtgctggatctgtcgcgttggatggagcaccgtggctgcgactgcatcggtatccggcatgtgagcaactgctacatctctcaccaccgcctccccatcatcgacgctacctctggcgacatcctcgtctacaacgaggactagtccgtcgacttcaatatctgcgactacatctacaaccacctgtgcttcaggagcagcttctcctgtgcatgcca

SEQ ID NO: 19937 - DNA, 119 bp, Zea mays
  Clone ID: MRT4577_118186C.1
aaaatccaagagtgtattatgaaggagcaggattacattaattgaagatgatcctttacgctactggagcttgatacattttgcgctgcccgatgcattccttatggagcaaaatatta

SEQ ID NO: 19938 - DNA, 852 bp, Zea mays
  Clone ID: MRT4577_118187C.1
acattcaagcccagccgcggcgtttcctcttcgcctccggccgttcctctgctcacgcctccaccgtgacatccatctattacctctccatctctctctcgtgtgcctgtgtgttgttgtgccggcatggcggagcagctcatctccacggccgtgcaccacacgctgcccgacagctacgtccggtcggaggcggaccggccgcgcctcgacgaggtcgtgcccgacgccgacatccccgtcgtcgacctcgccaaccccgaccgcgccgccgtcgtcgcccagatcggcgccgcctgcagctcccacggcttcttccaggtgctcaaccacgggctgccgctggaggtcatgctggcagcgatggcggtggcgcacgacttcttccgcctctcgccggaggagaaggccaagctctactccgacgacccggccaagaagatgcgcctctccaccagcttcaacgtgcgcaaggagaccgtgcacaactggcgcgactacctccgcctgcactgccacccgctcgagcagttcgtcccggagtggccagccaatccgccgcccttcagggatgtcatgagcacatactgcaaggaggtccggcagctcgggttccggctctacgccatgatatcggagagcctgggactggagcaggactacatcaagaaggtcctcggcgagcaggagcagcacatggcggtgaacttctacccaaagtgcccgtcgccggagctgacctacgggctcccggcgcacacggaccccaacgccctcaccatcctgatgatggacgagcaggtcgccgggctgcaggtgctcaaggaaggtcggtggatcgcccgtcacccg

SEQ ID NO: 19939 - DNA, 266 bp, Zea mays
  unsure (1)..(266): unsure at all n locations
  Clone ID: MRT4577_118188C.1
gcacgagaacagggcagggncangccnngnncacagcggaangcncccacaaggnccaggngcacggcanaacagcaaanaccaagcanggcaaccncancngcccgaaangccgngccaagnggaaagaacncccaggcgcccaaccngcagangcccagcanggacgagccagagnnaacccanaaaaccggccccaggangaagggcacanggcngnngnccgcaggcccccccanacanacagcggaaaccngcaggagcac

SEQ ID NO: 19940 - DNA, 4452 bp, Zea mays
  Clone ID: MRT4577_118189C.1
atggaagactctctggccattaggacatcctactgctcagaggtggaagggttcccgcatctcttgcgaagttgtgcgcttcgcatgggaatccgcaagaagccggaatacgtctggacggagcatatcgagggcggaatggagaaatgctctatggcagtctacctgggagaaagccgaaactatccaaaccatccttccttccaagtcacttttaccggataccgtttcccagatacttgccaagatgttgcccgaaaagccctccgacaactgtgtcagaactacaacaaagtgatctttgaaaccccccttcgctactttccacccagcaacaagaatacccccacctggaggaaaagacttcaggccctatcaggaggagatcctattgagaatgatcccaccattgtctacatggccggataccttcacacccttgataaccaatatgatgacctcgccctccactgcacctccctaacctcccgggtggaaagcctggagcaaaaagttagggaactttcagaagaaaaggcgtcccttcaagagagcctctcaatagctgaaggcgaagagaccaatacccgtgaagcttaccgcaccctaaaaatggactatgacaagaaactgaagaagctcgcccccgcaagaaaaatccgcaagaagactaaaagccaaggatgtcagattgagcagaaggaagaaaaccctccaaggaacccgtccgacaccgaggagatgtccctggccagccttgatgaccttctcaaggaatttggggacactttagagaaggagttcgggagtaccctagatagcactcgtatggcttcggataaaaccacgcctaccgcctccaggattggagcaagacttcctctaggagctaaaggagaggctggcggagaagggggtgagacccacctccccgcacctccgaaactaccactagacctagcccaagttctagccagtcaaacccgactcattgaagtcctcactcgaagtctggaaaaccagcacccaggtggtggaaggccacaggacaggatgggagaatttttgagactcaagcctcccacgttcgcggggtccagcaatcccctcgatgcagatgactggcttcgcacaatcaagaggaagttggaagccatcgcatgtcccgaaaatcagcgtgttcaactggcagctcatcagctttcaggaatggctttagcatggtgggacactttcagtgaagccgggatagttcaactcaaggaggatgaattccgggagctaactcaaggcgggaggacagtcagtgagtatgtgcacaagttcacagagctggcccgctacgcgcctgaggatgtcagcaccgaggccagaaaaatggcccattttctgagaggattaagacccgagcttaagcccatcctcgccagccaagacttccacagcttctctcacctctccaacaaagctatccaagtggaaagggcaaaagaggaagaaaaagggcacatcaagaggaaattccaagttctccgagctcaacagcaagaacacttaaccatcttgccatcccaagggattgatgtaatcctaggaatggactggctagctaagcacaagggtatcatcagctgcgcaagcaagactgttcttctcacagatcaccaaggaaaggcagtttcctgtcaagcccaaccgcccgcaaacgatccaatgatgtttaatctggcagcagaaaacatgtctgtaatcgaagagtttgaggatgtatttccagaagagttgcccgggatgccaccagaaagaggagtagagttctatatagatctcattcccggcactgcgcccatcgcaaagagaccataccgcatggcccccactgagttggcagagttgaaacttcagatttcagaactacagcaaaaagggtacatccgtcccagttcgtctccctggggagcacccgttcttttcgttactaaaaaggatggaagtatgaggatgtttattgattatcgatccttgaacgaagttacaatcaagaataagtaccctctcccttggatcgatgacctcttcgaccaactgcagggagccaaatacttctccaagatagacctcagatacgggcaatatgaattcacagtgatgccgtttgggctaacaaacgcacccgcctttttcatgaacctcatgaataaggtatttatggaagaattggacaaatttgtcgtagtcttcattgacgacatccttatttattccaagaatcgtaaggaccatgagcgtcacctccgaatcgttctcggaagactcagagcacatcaactctatgctaaactcagcaagtgtgagttctggttagagaagatagctttcctggggcatatcttgactgtagaagggatagaagtggacccatccaaggtagaagctgtttcaaattggaagcaaccatccaacgtcagtgaagtacgaagctttctgggaatggcagggtattactgccgctttatcaagggattctccagcatagcaaaacccatgaccgaacttctcaaaaaggacaataagtttgtgtggactcccaaatgtgaggaaagcttccaaatcatcaaggagaagcttacaaccgcaccagtattgactctgccagatatacaccaggattttgtcatcttctgtgatgcttccaagcagggcttagggtgtgtcttgatgcaaaatgagaaagtcattgcttatgcatcccgcttactcaagccacacgagcagaactaccctacccacgatctggaattggcagctatagtgcacgccctaaaaatatggaggcattatctgatcggcaacaaatgccacatcttcactgatcacaagagtctgaagtacatcttcacgcaaccggacctcaacctccgtcaaataagatggcttgaattgatcaaggattatgacctcgaaatccactaccaccccgaaaggccaacgtgcagtagcctggaagtcaagccaaatctagacgatctcatatgcaaggctcaacgcctggacgcagagacagccagacttatggaaagagctcgcaaggagcaacttccggaccttaggatagataagcaaggagtcctctggttcaagaaccgcctgtgtgtgccagtgggagaggcacgagaaaccctgctcaatgaagcccacaactcagcttactccatccacccaggaaccaccaagatgtacctagacctcaaagccagatactggtggaaagggatgaagaaggaaatagcacagtatgtggcccgatgtgacacctgtcagcgaacaaaggccgaacatcagaagcctgcaggcctacttcaacccctcccaatacccgaatggaagtgggaagaaataggcatgaatttcgtaaccggactgccccgatcacggaaaggaaatgattccatatgggtaataatcgatcgtctcaccaaggtggcccactttgttccagtaaagaccacttttggaggagccgcccttgcccgaatataccttaaagagatagtcaggctccatggcattccacgaaagatagtatcagatagaggaacgcagttcacttcaaaattttggaagggcctccagcaagcaatgggcaccaagctagatttcagcaccgcttatcatccccagtcagatggtcaaacagaaagagtcaacaaggtcctcgaagatttactcagagcctgcgtgttaactttcaaaagggattgggagtccagtttgccatacgccgaattctcgtacaacaacagccatcaggccaccatcaaaatgtcaccattcgaagcactgtatggaagaaaatgccagactcccctaatgtggtccaatgtgggggaaaggacactagaaggacccgactttgttaaagaagccgaagagaaagtcgctttaatccgcaggaggttacttgaagctcagagtcgacagataagttacacggacaatagacgaagggaactcagatttgaggaaggagatttcgtttatctcaaggtctccccgatgcgtggtgtcaaaaggttccaaatgaaaggaaaactggcaccacgtttcgtcggtccctaccccgtcatttcccgaatagggcccgcagcataccgtcttgagctaccagaatccatgtcagatattcacaatgtgttccatgtgtctcaactccgcaaatgcctaaaggtaccagaaacccgcatcgaggcagatgcaattcagattcaaaaggatctccagtaccgggaaaagccagtgaagattctcgactcagcagtcagaaggacccgcaactcagaagtgaaactctgcaaggttcagtggagcagagatgaagaagaggaagccacctgggaaagtgaggactctctgaggaaggaatacccttaccttttctcgagccccgtctaa

SEQ ID NO: 19941 - DNA, 102 bp, Zea mays
  Clone ID: MRT4577_11818C.1
ctaccccatactgctgattcaatcagatggaaattactaggagcttttgccgacgcatccatattcacgcagcgtaactgggaaaatcaatgcgggcctcgc

SEQ ID NO: 19942 - DNA, 1200 bp, Zea mays
  unsure (1)..(1200): unsure at all n locations
  Clone ID: MRT4577_118190C.1
tgggctactaaaaaagaaactgtaaatccgtactagcttntgattcaattgctgccgcagatggaggtttgttcagaaataagatagaaaatctggtgggtttttattgaactggcagtctactaggctagtatttttgtaaccaactgcataaggagttaaaagacatagaatatataaggtctacaacagtgaatttgtttttttactctgtcaacaagtgttgtcaatgatgtggtgggtccattgtgtttgaattcatgaaactatgatacatttggatgttttaggccaaggtctgcttagcctgcctaagtacccacaaattcacatgccttgttgtgtctctgttcgagtcccatgaaaattgtttttacaggtggacaaggcaaaacaccaatatgaaaatcttttactgtcatcagcatgtgaaactgttttagagattggtgatcttggaaacttgtacatcgatgagcaagcaccatggtcctgttttaagcaagggggtgagagtgctgaaaaggctgcaaaggatctcgtacttattttagagacaatgaggataattgcaatcacactatctcctatcactccaagcctttctctgaggatttacacacagcttggtttcacagaagaccagtttagggtgttgagatgggaggatacgaaatggggaggccttaaagcaggccaggtaatgtcggagccaaagccagtatttgcaaggatagaaaccgaggtggaagaggaagcccaagcaagttcaaaagcagcaaaaggtgggaagaaagcacgcaggaaaggacttgtggaggcatagtttctgttggaacagtgtatcagcatcgttaaaaggagaatatttcatcttctcttttttttggaaaaaaaatctttagcctatctgttcctgaaatttgttctttgctaacgtgtcacattgtatcatgtagatagccaaaaaaagaccactattgattctgatgctctgtcagagagagagctcggataattgcgagtagagctagcagcggatttggatcatccaaaatctaattggatatttgttgttttggataaggtggagagcaacttaaaaaaacccaatgtccattagatatctttggacttgacttgtttctaatgtttggagacatgctgatttttatgaactaataacacagtagctggttg

SEQ ID NO: 19943 - DNA, 4647 bp, Zea mays
  Clone ID: MRT4577_118191C.1
atggaagactctctggccattaggacatcctactgctcagaggtggaagggttcccgcatctcttgcgaagctgcgcgcttcgcatgggaatccgcaaaaagccggaatacgtctggacggagcatatcgaaggcggaatggagaaatgctctatggcagtctacctgggagaaagccgaaactatccaaaccatccttccttccaagtcactattaccggataccgtttccacgatacttgccaaaatgttgcccgaaaagccctccgacaactgtgtcagaactacaacaaagtgatctttgaaaccccccttcactactttccacccagcaacaagaacacccccacctggaggaaaagacttcaggccctatcaggaggagatcctattgagaatgatcccaccattgtctacatggccggataccttcacacccttgacaaccaatatgatgacctcgccctccactgcacctccctaacctcccgggtggaaagcctggagcaaaaaagcctcttaatggctgaaggcgaagaggccaatacccgtgaagcctaccgcaccctaaaattggactatgacaagaaactgaagaagctcgcccccgcaaggaaaatccgcaagaagaccaaaagtcaaggatgtcagactgagcagaaggaagaaaaccctccaaggaacccatccgacaccgaagagatgtccctggccagccttgatgaccttctcaaggaatttggggacaccttagagaaggagttcgggagtactctagatagcacccgtatggcttcggatagaaccacgcctaccgcctccgggattggagcaagacttcctctaggagctgaaggagaggctggcagagaagggggtgagacccacctccccgcacctccggagctaccattagacctagcccaagttctggccaatcaaacccgactcattgaagtcctcactcgaagtctggaaaaccagcgcccaggcggtggaaggccacaggacaagatgggggaatttttgagactcaagcctcccacattcgcggggtctagcaatcccctcgatgcaaatgactggcttcgcacgatcaagaggaagttagaagccatcgcttgccccgagaatcagcgtgttcaactggcagctcatcagctttcaggaatggctttagcatggtgggacactttcagtgaagccgtcagagatgctacctgggcagaattcgaagcagctttccgtgaacaccacttcacagaactggcccgctacgcgcccgaggatgtcagcaccgaggccagaaaaatggcccgttttctgagaggattaagacccgagcttaagaccatcctcgccagccaagacttccacagcttctctcacctctccaacaaagctatccaagtggaaagggcaaaagaggaagaaaaagggcacatcaagaggaaattccaagtcctccgagcacaacagcaagagcgtcaccagagagctcgaccccttggacttccacccaggggtccaagcttcaataaacaatctggacccactccatcacgctacagtcagcagagtcagagctcccttcaggcaccctccgttgcgagcaaccagccgccagcaaacgcctgttggcactgcggagaccccagtcacttcaagaacaattgccctcagttgaaggcatctggaccaacttactccaactcagtgaatggccccaagattccatcggcacctacccccaaggcacttccttcaagcagccagcagagcaggactcagtatcagggcagagcccgggtcaaccacgtcgacgctcaagaagctcagcaagccccgggagtagtgctcggagcatcccattcttttatagccgctaagtttgtggaaaagcatggcatcccctctacacccctagctatccctttggtcacccgaaccccgagatcagacctcctgtgcaagctcaggtgctcccaagtcagaattctcttaagtggggtagtgttcctagcagacttaaccatcttgccatcccaaggaattgatgtaatcctagggatggattggctagccaagcacaagggtatcatcagctgcgcaagcaagacggttctcctcacagatcaccaaggaaaagcagtttcctgtcaagcccaaccgcccgcaaacgatccaatgatgtttaatctaatagcagagagcatgtctgtaatcaaggagtttgaggatgtatttccggaagagttgcccggaatgccaccagaaagaggagtggagttctatatagatctcattcctggcactgcgcccatcgcgaagagaccataccgcatggcccccactgaattggcagaattaaaacttcagatttcagaactacaggaaaaagggtacatccgtcccagttcgtctccctggggagcacccgttcttttcgttaccaaaaaggatggaagtatgaggatgtgtattgattatcgatccttgaacgaagttacaatcaagaataagtaccctctccctcgaatcgatgacctcttcgaccagctacagggagccaaatacttctccaaaatagacctcaggtcagggtatcaccaactaaggattaaggaggcagacattcagaaaactgcattcaacaccagatacgggcaatatgaattcacagtgatgccatttgggctcacaaacgcacccgcctttttcatgaacctcatgaataaggtatttatggaagagttggataagtttgtcgtggtctttatcgacgacatcctcatatattccaagagtcgcaaggaccatgagcatcaccttcgaatcgtcctcggaagactcagagcacatcaactttatgctaaactcagcaagtgtgagttctggttagagaagatagctttcctggggcatatcttgactgcagaagggatagaagtggacccatctaaggtagaagctgtttcaaattggaagcaaccatccaacgtcagtgaagtacgaagctttctgggaatggcagggtattaccgccgttttatcaagggattctccagcatagcaaaacccatgaccgaacttctcaaaaaggacaataagttcatgtggactcccaaatgtgaagaaagtttccaaatcatcaaagagaagcttacaaccgcaccagttttgaccctaccagacatacaccaggattttgtcatcttctgtgatgcttccaagcaaggcttagggtgtgtcctaatgcaaaatgagaaagccattgcttatgcatcccgcttactcaagccgcacgaacagaactaccctacccacgatctggaattggcagccatagtgcacgccctaaaaatatggaggcattatctgatcgggaacaaatgccacatcttcactgatcacaagagtctcaagtacatcttcacgcaaccggacctcaacctccgtcaaagaaggtggctcgaattgatcaaggattatgacctcgaaatccactaccaccccggaaaggccaacgtagtagcagacgccctcagccgaaaacctttcggggttaaaggaacaaactttctggaagattggaagagagaatcagctcagctgaatgcatgtctgggagacaacggtggcctggaagtcaagccaaacctagaagatctcatatgcaaggctcaacgcctggacgcagagacagccaggcttatggggagagcacgcaaggagcaacttccgggccttaggacagacgagcaaggagtcctctggttcaaaaaccgcctgtgtgtgccagtgggagaggcacgaggaaccctactcaatgaagcccacaactcagcttactctatccacccaggaaccaccaagatgtacctagacctcaaggccagatattggtggaaagggatgaagaaggaaatagcacagtatgtggcccgatgtgacacctgtcagcgaacaaaggccgaacatcagaagcctgcaggcctacttcaacccctcccaatacccgaatggaagtgggaagaaataggcatggatttcgtaaccggactgccccgatcacagagaggaaatgattccatatgggtaataatcgatcgtctcaccaaggtggcccactttgttccagtaaagaccactttcggaggagcagcccttgcccgaatataccttaaagagatagtcaggctacatggcattccacggaagatagtatcagatagaggaacgcagttcacttcaaaattttggaagggccttcagcaagcaatgggcaccaagctagatttcagcaccgcttatcatccccagtcagatggtcaaaccgaaagagtcaacaaggtcctcgaagatttactcagagcctgcgtattaaccttcgacagagattgggagtccagtttgccgtacgccgaattctcgtacaacaacagccatcaggccagcatcaagatgtcaccatttgaagcactgtacggaagaaaatgccagactcctctaatgtggtccaatgtgggggaaaggacgcttgaaggacccgactttgttaaagaggccgaagagaaagtcgctttaatccgcaggaggttactggaagctcagagccgacagaagagttacgcagacaataggtga

SEQ ID NO: 19944 - DNA, 279 bp, Zea mays
  Clone ID: MRT4577_118192C.1
aaaatcgcttcttcacctcactaacaccgagctaggagctcgctctgtcctgcaccaatggacgctcgctcctcctcccagcagatggtcacggaggacggtcctggaagcgccgctgctgctgctggagaagcgggccggcacgacgtctgcgacggtgaactgcgacgaggcgacgacaacaatgaagccgtgcctcgtaaacacgatgggcatcacgacgaaccccctccaccacgagatgcaacaagatgaactcaatcccaatccacaagacca

SEQ ID NO: 19945 - DNA, 326 bp, Zea mays
  Clone ID: MRT4577_118193C.1
agagaaaaaatctttagcctatctgttcctgaaatttgttctttgctaacgtgtcacattgtatcatgtagatagccaaaaaaagaccactattgattctgatgctctgtcagagagagagctaggataattgcgagtagagctagcagcggatttggatcatccaaaatctaattggatatttgttgttttggataaggtggagagcaacttaaaaaaacccaatgtccattagatatctttggacttgacttgtttctaaaaaaaaaaaaaaaaaaaaaaaaaaaaaaaaaaaaaaaaaaaaaaaaaaaaaaaaaaaaaataaa

SEQ ID NO: 19946 - DNA, 2826 bp, Zea mays
  Clone ID: MRT4577_118194C.1
atgtcgcccgaaaagccctccgacagctatgtcagaactacaacaaacaacaagaatatccccacctggaggaaaagacttcaggccctatcaggaggagatcctattgagaatgatcccaccattgtctacatggctggataccttcatacccttgataaccaatatgatgacctcgccctccactgcacctccctaacctcccgggtggaaagcctggagcagaaagtcagggaactttcagaagaaaaagcgtccctccaagagagcctctcgttagctgaaggcgaagagaccaacacccgtgaagcttaccgcaccctcaaaatggactacgacaaggtactgaagaagctcgcccccgcaaggaaaatccgcaagaagaccagaagccaaggatgccagactgagcagcaggaagagaaccctcccagaaaccagtccgacaccgaggacatgtccctggccagccttgatgaccttctcaaggaatttggggacactttagagaaagagttcggggcgactctcttcccatggcagatggcttcggatagaaccacgcctaccgcctctgggattggagcaagacttcctctaggagctgagggagaggctggcggagaagggggtgagacccacctccccgcacctccagaactaccactagacctagcccaaattctggccaatcaaaccagactcattgaagtcctcactcgaagtctggagaaccagcgcccaggcggtgaaaggccccaggacaggatgggagaattcctgagactgaagccgcccacgttcgcggggtccagcaatcccctcgatgcagatgactggcttcgcacaatcaagaggaagttggaagccatcgcttgtcctgagaatcagcgtattcagctggcagctcatcatctttcaggaatggctttagcatggtgggacactttcagtgaagccatcagagacgccacatgggcagaatttgaagcagccttccgtgagcaccacgtaccccaggggatagttcaactcaaggaggatgagttccgagagctaactcaaggcgggaggacaatcagtgagtatgtgcacaagttcacagagctggcccgctacgctcccgaggatgtcagcaccgaggccagaaagatggctcgttttctgagagggttaagacccgagcttaagaccatcctcgccagccaggacttccacagcttctctcacctttccaacaaagctattcaagtggaaagagcaaaagaggaagaaaaagggcacatcaagagaaagttccaggtcctccgagcacaacagcaagaacgtcaccagagagctcgaccctttgggctcccacccagaggtccaagcttccataaacaatctggaccctctccatcgcgctacagtcagcagagtcagagctcccatcaggcaccctccgttgcaagcaaccagccgccagcaaacgcctgttggcactgcggggaccccagtcacttcaagaacaactgcccccagttgaaggcaccaggaccaacctactccaactcggtgaatggccccaagattccatcagcacctacccccaaggcgtttccttccagcagccagcagagcagggctcagtaccagggcagggcccgggtcaaccacgtcgacgctcaggaagcccagcaagccccgggagtagtgctcggtgagttcctcgttgaatttactcccgcttctgtgctttttgattcaggagcatcccattcatttatagccgctaagtttgtggaaaagcatggcataccctctacacctctagctatccctttggtcacccgaaccccgggatcagacctcctgtgcaaactcaggtgttcccaggtcagaattcttttaagtggggtagtgttcctggcagacttaaccatcttgccatcccaaggaattgatgtaatcctaggaatggattggctagctaagcacaagggtgttatcagctgcgcaagcaagactgttcttctcatagatcaccaaggaaaggcagtttcctgtcaagcccaaccgcccgcaaatgacccaatgatatttaatctggcagtagaaagcatgtctgtaatcaaggaatttgaagatgtatttccagaagagttgcccgggatgccaccagaaagagaaggcctccagcaagcaatgggcaccaagctagatttcagcactgcttatcacccccagtcagatggggaaagaacactagaaggacccgactttgttaaagaagccgaagaaaaagttgctttgatccgcagaaggttacttgaagctcagagtcgacagaagagttacgcagacaataggcaaagggaactcagatttgaggaaggagattttgtttatctcaaggtttccccaatgcgtggtgtcaaaaggttccagatgaaaggaaagctagcaccccgtttcgtcggtccttaccctgtcatttcccgaataggacccgtggcataccgtcttgagctaccagaatccatgtcagatattcacaatgtgttccatgtgtctcaactccgcaaatgcctagaagtaccagaaacccgtatcgaggcagaagcaattcagattcaaaaagatctccagtaccgggaaaagccagaaaagattctcgactcagcagtcagaaggacccgcaattcagaggtgaagctctgtaaggttcagtggagcagagatggagaagaggaagccacctgggaaagtgaggactctctgaggaaggaatacccttaccttttctcaagccccgtcagaatctcgagggcgagattcctttaa

SEQ ID NO: 19947 - DNA, 293 bp, Zea mays
  Clone ID: MRT4577_118195C.1
ttcgaaatgaatatgctgcactttacaaccactgcactacctgactcaggaatcggctctcgaaggtgaagcgagaggaaccagacctcatcagcccaacatcaaagacaccatcggaacagcagcgcccgcagcacccaccccgcaccggcgactccatcttcacggccaccccctgcggcggacggttgaccaccaggcaccacatatcatcccagagtttagctcctccagcgggatgacgccgtccccaccacctccctcttcttctttttcatccttctgtctctttg

SEQ ID NO: 19948 - DNA, 645 bp, Zea mays
  unsure (1)..(645): unsure at all n locations
  Clone ID: MRT4577_118196C.1
caggnaaacctccttaatcgtacacttgggctactaaaaaagactgtaaatccgtactagcttttgattcaattgctgccgcagatggaggtttgttcagaaataagatagaaaatctggtaagtagattttcatggtatcttcaactatggtaagaggagtggagggtaaaggatttaattataaaccatgggttttttattgaaccatgggttttttattgaactggcagtctactaggctagtatgtgtgtaaccaactgcataaggagttaaaagacatagaatatataaggtctacaacagtgaatttgtttttttactctgtcaacaagtgttgtcaatgatgtggtgggtccattgtgtttgaattcatgaaactatgatacatttggatgttttaggccaaggtctgcttagcctgcctaagtacccacaaattcacatgccttgttgtgtctctgttcgagtcaccatgaaaattgtttttacaggtggacaaggcaaaacaccaatatgaaaatcttttactgtcatcagcatgtgaaactgttttagagattggtgatcttggaaacttgtacatcgatgagcaagcaccatggtcctgttttaagcaagggggtgagagtgctgaaaagctgc

SEQ ID NO: 19949 - DNA, 4809 bp, Zea mays
  Clone ID: MRT4577_118197C.1
atggaagcctctctggccattaagtcatcctactgctcggaagtggaagggttcccacgcctcttgcgaagctgtgcgctccgcatgggaatccgtaagaagccggaatacgtctggacggaacatctcgagggcggaatgataagatgctctatggcagtctacctgggggagagccaaagctatcccaaccaacgttccttccaagtcacttttaccgaagcccatttcctagatgcttgccaaaatgtcgcccgaaaagccctccgacagctttgtcagaactacaacaaagtaatcattgaaaccccccttcgctactttccacccagcaacaagaatacccccacctggaggaaaagacttcaggccctatcaggaggagatcctattgagaatgatcccaccattgtctacatggcaggataccttcatacccttgataaccaatatgatgacctcgccctccactgcacctccctaacctcccaggtggaaagcctggagcagaaagtcagggaactttcagaagaaaaagcgtcccttcaagagaacctctcgctagctgaaggcgaagaggccaatacccgtgaagcttaccgcaccctcaaattggactacgacaagaaactgaagaagctcgcccccgcaagaaaaacccgcaagaagaccaaaagccaaggatgtcagactgagcagcaggaagagaaccctcccaggaaccagtccgaccccgaggacatgtccctggccagtcttgatgaccttctcttggaatttggtgacaccttagagaaagagttcgggggtaccctagcaactctcttcccatggcatatggcttcggatagaaccacgcctaccgcctccgggattggagcaagacttcctctaggagctgagggagaggctggcggagaagggggtgagacccacctccccgcacctccagaactaccactagacctagcccaaattctggccaatcaaaccagactcattgaagtcctcactcgaagcctggagaaccagcgcccaggcggtggaaggccccaggacaggatgggagaattcctgagactgaagccgcccacgttcgcggggtccagcaatcccctcgatgcagatgactggcttcgcacaatcaagaggaagttggaagccatcgcttgtcctgagaatcaacgtgttcagctggcagctcatcagctttcaggaatggctttagcatggtgggacactttcagtgaagccatcagagacgctacttgggcagaatttgaagcagccttccgtgagcaccacgtaccccaggggatagtgcaactcaaggaagatgagttccgggagctaacccaaggcggaagaacagtcagtgaatatgtgcacaagttcacagagttggcccgctacgcgcccgaggatgtcagcaccgaggccagaaagatggctcgttttctgagagggttaagacccgagcttaagaccatcctcgccagccaggacttccacagcttctctcacctttccaacaaagctattcaagtggagagagcaaaagaggaagaaaaagggcacatcaagagaaagttccaggtcctccgagcacaacagcaagaacgtcaccagagagctcgaccctttgggctcccacccaggggtccaagctttcataaacaatctgggccctctccatcacgcttcagtcagcagagtcagagctcccatcaggcaccttccgttgcaagcaaccagccgccagcaaacgcctgttggcactgcggggaccccagtcatttcaaaaacaactgcccccagttgaaggcaccagggccaacctactccaactcggtgaatggccccaaggttccatcagcacccacccccaaggcgctcccctccaacagccagcagagcaggactcagtaccagggcagggcccgggaatttgaagatgtatttccagaagagctgcccgggatgccaccagaaagagaagtagagttctatatagatctcattcccggcactgcacccattgcaaagagaccataccgcatggcccccactgagttggcagaattgaagcttcagatttcggaactacaacaaaaagggtacatccgtcccagttcgtctccctggggagcacccgttcttttcgttaccaaaaaggatgggagtatgaggatgtgtattgattatcgatccttgaacgaggttacaatcaagaataagtaccctcttcctcggatcgatgacctcttcgaccaactacaaggagccaaatacttctccaagatagacctcaggtcagggtatcaccaactgagaatcaaagaggcagacattcagaaaactgcattcgtcaccagatatgggcaatatgagttcacagtgatgccatttggactaaccaacgcacccgcctttttcatgaacctcatgaataaggtgtttatggaagaattggataagtttgtcgtggtcttcatcgacgacatcattatttattcaaagaatcgcaaggaccatgagcatcaccttcgaatcgtcctcggaagactcagagcgcatcaactttatgcgaagctcagcaagtgtgagttttggttggagaagatagctttcctagggcatatcttgactgcagaagggatagaagtggacccatccaaggtggaagctgtctcaaattggaagcaaccatccaatgtcagcgaagtacgaagctttctgggaatggcagggtattaccgccgttttatcaagggattctccagcatagcaaagcccttgaccgaacttctcaaaaaggacaataagtttgtgtggactcccaagcgtgaagaaagtttccaaatcatcaaggagaaacttacaactgcaccagtcctgactctgccagacatacaccaggatttcgtcatcttttgtgatgcttccaagcaaggcttagggtgtgtcttaatgcaaaatgagaaagtcattgcttatgcatctcgcttactcaagccgcacgaacagaactaccctacccacgatctggaattggcagccatagtgcacgccctaaaaatttggaggcattatctgattgggaacaaatgccacatcttcactgatcacaagagtctaaagtacattttcacgcagccggacctcaacctccgtcaaagaaggtggctcgaattgatcaaagattatgacctcgaaatccactaccaccccggaaaggccaacgtggtagctgacgccctcagcagaaaaccctttgggattaagggagcaaactttctggaagattggaagaaagaatctgctcagctaaatgcatgtctgggagacaacggtagcctggaagtcaagcccaatctagaagatctcatatgcaaggcccaacgcatggacgcagaaacaaccaagcttatggaaagagcacgaaaggagcaacttccggacctcagggcagataatcaaggaaccctctggttcagggatcgcctgtgcgtaccagtgggagaaacacgagaaaccctgctcaacgaagcccacaactcagcttactctatccacccagggaccaccaagatgtacttagaccttaaggccagatattggtggaaagggatgaagagggaaatagcacagtatgtggcccgatgtgacacctgccagcgaacaaaggccgaacatcagaagcctgcaggcctacttcaacccctcccaatacccgaatggaagtgggaagaaataggcatggatttcgtaaccggactacccagatcacaaagaggaaatgattccatatgggtaatcatcgatcgtctcaccaaggtggcccatttcattccagtaaagaccacttttggaggagcagcccttgcccgattataccttaaagagatagtcaggctacatggcattccacggaagatagtatcagatcgaggaacgcagttcacttcaaaattttggaagggccttcagcaagcaatgggcaccaagttagatttcagcactgcttatcacccccagtcagatggtcaaacagaaagagtcaacaaagtcctcgaagatttactcagggcctgcgtgttagccttcgacagagattgggagtctagtttaccgtacgccgaattctcatacaacaacagccatcaagccagcatcaaaatgtcaccattcgaagcactgtatggaagaaaatgccagactcccctaatgtggtccaatgtaggggagaggacactagaaggacccgactttgttaaagaagccgaagaaaaagttgctttgatccgcagaaggttacttgaagctcagagtcgacagaagagttacgcagacaataggcgaagggaactcagatttgaggaaggagattttgtttatctcaaggtttccccaatgcgtggtgtcaagaggtttcagatgaaaggaaagctagcaccccgtttcgtcggtccttaccctatcatttcccgaataggacccgtggcataccgtcttgagctaccagaatccatgtcagatattcacaatgtgttccatgtgtcccaactccgcaaatgcctaaaagtaccagaaacccgtatcaaggcagaagcaattcagattcaaaaagatctccagtaccgggaaaagccagtgaagattctcgactcagcagtcagaaggacccgcaatttagaagtgaagctctgtaaggttcagtggagcagagatggggaggaggaagccacctgggagagtgaggacttcttgaggagggaatacccttaccttttcccaaatacagtctaa

SEQ ID NO: 19950 - DNA, 114 bp, Zea mays
  Clone ID: MRT4577_118198C.1
accacgcgtatggatggacagacgaaacatcaccgacaacgaggcccataacagcagtggctgcgaaggcattagccgtggttacggtggttgccgttgaggcgagcgctacag

SEQ ID NO: 19951 - DNA, 5151 bp, Zea mays
  Clone ID: MRT4577_118199C.1
tcagacggggctcgagaaaaggtaagggtattccttcctcagagagtcctcactttcccaggtggcttcctcttccccatctctgctccactgaaccttacagagcttcacttctgaattgcgggttcttctgactgctgagtcgagaatcttcactggcttttcccggtactggagatctttttgaatctgaattgtttctgcctcgatacgggtttctggtacttttagacatttgcggagttgagacacatggaacacactgtgaatatctgacatggatcctggtagctcaagacggtatgccacaggtcctattcgggaaatgacagggtaaggaccgacgaaacggggtgctagctttcctttcatctggaaccttctgcggatcaaagcaactttttcttcggcttctttaacaaagtcgggtccttctagtgttctttcccctacattggaccacattaggggagtctggcattttattccatatagtgcttcgaatggtgacattttgatgctggcctgatggctgttgttgtatgagaattcggcgtacggtaaactagactcccaatctctgtcgaaagccaatacgcaggctctgagtaaatcttcaaggaccttgttgactctttctgtttgaccatctaactgggggtgataagcagtgctgaaatctagcttggtgcccattgcttgctgaaggcccttccaaaattttgaagtgaactgcgttcctctatctgatactatctttcgtgggatgccatgtagcctgactatctctttaaggtataatcgggcaagggctgctcctccaaaagtggtctttactggaatgaaatgggccaccttggtgagacgatcgatgattacccatatggagtcatttcctctttgtgatctgggcagtccggtgacgaaatccatgcctatttcttcccacttccattcgggtattgggaggggttgaagcaggcctgcaggcttctgatgttcggcctttgttcgctggcaggtgtcacatcgggccacatactgtgctatttccctcttcatccctttccaccaatatctggtcttaaggtctaagtacatcttggtggtccctgggtggatagagtaagctgagttgtgggcttcatcgagcagggtttctcgtgtttctcccattggcacgcacaggcgatccttgaaccagagggctccttgattatctgtcctgaggtccggaagttgctcctttcgtgctctttctatcagcttggttgtttctgcgtccaggcgttgggccttgcatatgagatcttctagatttggcttgacttccaggctaccgttgtctcccagacatgcatttagctgagctgattctttcttccaatcttccaaaaagtttgctcctttaaccccgaagggttttctgctgagggcgtctgctaccacgttggcctttccggggtggtagtggatttcgaggtcataatctttgatcaattcgagccaccttctttgacggaggttgaggtccggttgcgtgaagatgtactttagactcttgtgatcagtgaagatgtggcatttgtttccaatcagataatgcctccaaatttttagggcgtgcactatggctgccaattccagatcgtgggtgggatagttctgctcgtgcggcttgagcaaacgggatgcataagcaatgactttctcattttgcattaagacacaccctaagccttgcttggaagcatcacaaaagatgacgaaatcctggtgtatgtctggtagggtcaggactggtgcagttgtaagtttctccttgatgatttggaaactttcttcacatttgggagtccatacaaacttattgtcctttttgagaagttccgtcatgggctttgctatgctggagaatcccttgataaagcggcgataatactctgccattcccagaaagcttcgaacttcactgacgttggatggttgcttccaatttgaaacagcttctaccttagatgggtccacttctatcccttcagcagtcaagatatgccctaggaaggctatcttctctaaccagaactcacacttgctgatcttagcataaagttgatgtgccctgagtcttccgaggacggttcgaaggtgctgctcatggtccttgcgactcttggaatagatgaggatgtcgtcgataaaaactacgacaaacttatccaattcttccataaataccttattcatgaggttcatgaaaaaggcgggtgcgttggttagtccaaatggcatcactgtgaattcatattgcccgtatctggtgacgaatgcagttttctgaatgtctgcttccttaatcctgagttggtgataccctgaccggaggtctatcttggagaagtacttggctccttgcagttggtcgaataggtcatcgatccggggaagagggtacttattcttgattgtaacctcgttcaaggatcgataatcaatacacatcctcatactcccatcctttttggtaacgaaaagaacgggtgctccccagggagacgaactgggacggatgtaccctttttgttgtagttccgaaatctgaagcttcaattctgccaactcagtgggggccatgcggtatggtctctttgcgatgggtgcggtgccgggaatgagatctatatagaactctacttctctttccggtggcatcccgggcaactcttctgggaatacatcttcaaactccttgattacagacatgctttctactgccagattaaatatcattggatcatttgcgggcggttgggcttgacaggaaactgcctttccttggtgatctatgagaagaacagtcttgcttgcgcagctgataacacccttgtgcctagctagccaatccattcctagaattacatcaattccttgggatggcaagatggttaagtctgccaggaacactaccccacttaaaagaattctgacttgggaacacctgagtttgcacaggaggtctgatcccggggttcgggtgaccaaggggatagctagaggtgtagagggtatgccatgcttttccacaaacttagcggctataaatgaatgggatgctcctgaatcaaaaagcacagaagcgggagtaaattcaactaggaactcaccgagcactactcccggggcttgctgggcttcctgagcgtcgacgtggttgacccgggccctgccctggtactgagccctgctctgctggctgctggaaggaaacgccttgggggtgggtgctgatggaaccttggggacattcaccgagttggagtaggttggtcctggtgccttcaactgggggcagttgttcttgaagtgattggggtccccgcagtgccaacaggcgtttgctagcggctggttgcttgcaacggagggtgcctgatgggagctctgactctgttgactgtagcgcgatggagagggtctagattgtttatggaagcttggacccctgggtgggagcccaaagggtcgagctctctggtgacgttcttgctgttgtgctcggaggacctggaactttctcttgatgtgccccttttcttcctcttttgctctttccacttgaatagctttgttggaaaggtgagagaagctgtgaaagtcctggctggcgaggatggtcttaagctcgggtcttaaccctctcagaaaacgagccatctttctggcctcggtgctgacatcctcgggcgcgtagcgggccaactctgtgaacttgtgcacatattcactgactgttcttccgccttgggttagctcccggaactcatcctccttgagttgaactatcccctggggtacgtggtgctcacggaaggctgcttcaaattctgcccatgtagcgtctctgatggcttcactgaaagtgtcccaccatgctaaagccattcctgaaagctgatgagctgccagctgaatacgttgattctcaggacaagcgatggcgtccaacttcctcttgattgtgcgaagccagtcatctgcatcgaggggattactggatcccgcgaacgtgggtggcttcagtctcaggaattctcccatcctgtcctgggcccttccaccgcctgggcgctggttctccagacttcgagtgaggacttcaatgagtctggtttgattggccagaatttgggctaggtctagtggtagttctggaggtgcggggaggtgggtctcacccccttctccgccagcctctccctcagctcctagaggaagtcttgctccaatcccggaggcggtaggcgtggttctatccgaagccatctgccatgggaagagagtcgccccgaactctttctctaaagtgtccccaaattccttaagaaggtcatcaaggctggccagggacatgtcctcggtgtcggactggttcctgggagggttttcttcctgccgctcagtctgacatccttggctcttggtcttcttacggattttccttgcgggggcgagcttcttcagtaccttgtcgtagtccgttttgagggtgcggtaggcttcacgggtgttggcctcttcgccttcagctaacgagaggctctcttggagggacgccttttcttctgaaagttccctgactttctgctccaggctttccacctgggaggttagggaggtgcagtggagggcgaggtcatcatattggttatcaagggtatgaaggtatccagccatgtagacaatggtgggatcattctcaataggatctcctcctgatagggcctgaagtcttttcctccaggtgggggtattcttgttgctgggtggaaagtagcgaaggggggtttcgatgattactttgttgtagttctggcatagctgtcggagggcttttcgggcgacattttggcaagcatctaggaaatggactccggtaaaagtgacttggaaggaacgttggttgggatagctttggctttcccccaggtagactgccatagagcatcttatcattccaccctcgaaatgttccgtccagacgtattccggcttcttgcggattcccatgcggagcgcacagcttcgcaagaggcgggggaacccttccacttctgagcagtaggatgacttaatggccagagagtcttccat

SEQ ID NO: 19952 - DNA, 203 bp, Zea mays
  Clone ID: MRT4577_11819C.1
tgtaaatctgtatatgcctattgatgagtcatgttgtaagctgtaacgacactatgatccgtgaacaactgtagaagccaagtatgttctttctatgctgcccatttcccgggagtttccatgcattttgaagaaaaatttagaggctaactcattgatatttgtatttggtcatcattaataaatcgcctctccatctgtgc

SEQ ID NO: 19953 - DNA, 1565 bp, Zea mays
  Clone ID: MRT4577_1181C.1
ctaacttatgaagaagcttggtgccttatacgctggatgacctgcaagttacttgaataaatttgagccatcatattatacaaagaatggaaaagatcccctagtctatccctacattctgttcttaagcatccaattactcccagcaattctttatttgtctaaagaagttggagaggatggataccatgttgatgctgtgcatatttcaattgctttagctgaccatagtgttctccctgacggtattgggtcaggccagaaaattggcgtcatggatgcctgtgcagaggctgcaagcataatacgacagtatggctctatatacttgcgtaatggtaacattgatctagccttggagtattatgcacaagctgctgctgccatgggtggaggtgaggcatcgtggattggtgaagggcatgctgataagcagcgacaacgaagtttgatgttgaagcaactactgatggagatattgctaagggatggtggtattcaacttttgcttggtccaagtggaatgggagaagaaggagagctgaaaaagtatatgatggattggagaagtaggcagcaattcttacttgaagctgcccatcggtgtcaagaggctgggctctatgacaaagctgtggaaattcacaaaagagtaggagcctttgccatggctcttcagacaataaacaagtgcttgtctgatgcagtctgtgccatggcacggagtatgttagatggcgagagtcgtgctgctgccctaattcattctggcaatgaaattttggagacagctagatactcttctgaagccagcattcaagagaaggacctcatttctgagcaacaaactgtgctgagacagcttgaagctattctccatatttataggctagctcgagctgggcaaactgtagatgctttgagggaaaccatcaggctacccttccttcatttggaccccaaggctccaaatgtgactgttgacattttcaggaacttgtcaccccatgttcaagcttgcgtgccagatctcctgaaggttgctctaaattgcattgacaatgttagagatactgatgggaccttgcgcgctgtcaaatcaaagatcgcaaaccttgtagcaagcaacatgagccggaattggccacaggatttgtatcagaaggtggcacagtgcatatgaagtggcttgtgttttgagttgatcaggaatctggactaatctgtatcagaactctgaagctttcaaacaatatggtgttggctgcttgggcgcaccatagttgtcatcccatcttgtgtttaatgggcgacaaatgtaaaatatttatttgaaaaagaaaattccactgatatccgtttttgttgtgggaacatgatggagcacacggtacagatgccttcaggttttaaggtggctattgctattttcgcctttttttgaagattttttcttcataatccttattgaacatttaagatttctgtgaagtctgtttagaattaaacagtgaattctctaagcattgctcctgagtaaatttctttatgtggtgaactttccc

SEQ ID NO: 19954 - DNA, 523 bp, Zea mays
  Clone ID: MRT4577_118200C.1
gtcgccgaacctgaatcatgcacgcgcaagtctaagacagtggtggctgcagactattccaaggagaatattccggctttgaatcagaacatacaagctaatggcgatgcgaattcgttagttgagttacttacccagaagctatcctccatttcccttggggaggctgcccctaacgtggcccctaggtcctgctgggaataaggtttggacactatgctgttggttgtttctgattaccctctttgttatctgtaggcaaaggcaaccgccgctgaggaacctgatttctttctctgcttgtggtgtaaaatgcttgtacacagggctttatagaatttcacttttctattgtatgcataaacacatgatctttgtctattgccggtttgcaagtagcgtgttattggtataacattagtttagtctctcgattctacgatattacttcgatgtacttgtatagcacgatctgtttgtactactttgagtcccaaaaaaatatataattttgagtttggac

SEQ ID NO: 19955 - DNA, 257 bp, Zea mays
  Clone ID: MRT4577_118201C.1
ggacctggtgaattttatccattgttatgcttatcgatctccaaggttcggtgcaaagtactcctgcacatccattatttatagaatcatgataatacttttgtactcatgcacatatattttttgtgtccatgaatttgctcctgcaatacgattttgctggtcttctgttacaaaattgcattgctgattaaatttgaacattaaaatgcacaagcggttactgcaccaatggtcttcacatgcattagctcata

SEQ ID NO: 19956 - DNA, 1236 bp, Zea mays
  Clone ID: MRT4577_118202C.1
atgtcgcccgaaaagccctccgacagctgtgccagaactacaacaaacaacaagaatacccccacctggaggaaaagacttcaggccctatcaggaggagatcctattgagaatgatcccaccattgtctacatggctggatatcttcatacccttgataaccaatatgatgacctcgccctccactgcacctccctaacctcccaggtggaaagcctggagcagaaagtcagggaactttcagaagaaaaagcgtccctccaagagagcctctcgttagctgaaggcgaagagaccaacacccgtgaagcctaccgcaccctcaaaatggactacgacaagatggcttcggatagaaccacgcctaccgcctctgggattggagcaagacttcctctaggagctgagggagaggctggcggagaagggggaatggctttagcatggtgggatactttcagtgaggccatcagagacgctacatgggcagaatttgaagcagccttccgtgagcaccacgtaccccaggggatagttcaactcaaggaggatgagttccgggagctaaaccaaggcggaagaacggtcagtgaatatgtgcacaagttcacagagttggcccgctacgcgcccgaggatgtcagcaccgaggccagaaagatggctcgttttctgagagggttaagacccgagcttaagaccatcctcgccagccaggactttcacagcttctctcacctttccaacaaagctattcaagtggaaagagcgaaagaggaagaaaaggggcacatcaagagaaagttccaggtcctccgagcacaacagcaagaacgtcaccagagagctcgaccctttgggctcccacccaggggcccaagcttccataaacaatctggaccctctccatcgcgcttcagtcaacaaagtcagagctcccatcaggcaccctccgttgcaagcaaccagccgccagcaaacgcctgttggcactgcggggaccccaatcacttcaaaaacaactgcccccagttgaaggcaccaggaccaacctactccaactcggtgaatggccccaaggttccatcagcacccacccccaaggcgtttccttccagcagccagcagagcagggctcagtaccagggcagggcccgggtcaaccacgtcgacgctcaggaagcccagcaagccccgggagtagtgctcggtgttcccaagtcagaattcttttaa

SEQ ID NO: 19957 - DNA, 584 bp, Zea mays
  Clone ID: MRT4577_118203C.1
gcattaagacacaccctaagccttgcttggaagcatcacagaagatgacaaaatcctggtgtatgtctggcagagtcaggactggtgcggttgtaagcctttccttgatgatttggaaacttccttcacatttgggggtccacacgaacttattgtcctttttgagtagttcggtcatgggctttgctatgccggagaatcccttgataaagcggcggtaataccctgccattcccagaaagcttcgtacttcactgacgttggatggttgcttccaatttgaaacagcttctaccttagatgggtccacttctatcccttctgcagtcaagatatgccctaggaaagctatcttctctaaccagaactcacacttgctgagtttagcataaagttgatgtgctctgagtcttccgaggacgattcaaaggtgatgctcatggtccttgcgactcttggaatagatgaggatgtcgtcgataaagaccacaacaaacttatccgattctgccataaagaccttattcatgaggttcatgagaaaggcgggtgcgttggacagtacaatggagcgcgtgcgtggg

SEQ ID NO: 19958 - DNA, 3141 bp, Zea mays
  Clone ID: MRT4577_118204C.1
atggctcgttttctgagggggttaagacccgagcttaagaccatcctcgccagccaggactttcatagcttctctcacctttccaacaaagctattcaagtggaaagagcaaaagaggaagaaaaggggcacatcaagagaaagttccaggtcctccgagcacaacagcaagaacgtcaccagagagctcgaccctttgggctcccacccaggggcccaagcttccataaacaatctggaccctctccatcgcgctacagtcaacagagtcagagctcccatcaggcaccctccgttgcaagcaaccagccgccagcaaacgcctgttggcactgcggggaccccaatcacttcaaaaacaactgcccccagttgaaggcaccaggaccaacctactccaactcggtgaatggccccaaggttccatcagcacccacccccaaggcgtttccttccagcagccagcagagcagggctcagtaccagggcagggcccgggtcaaccacgtcgacgctcaggaagcccagcaagccccgggagtagtgctcggagcatcccattcatttatagccgctaagtttgtggaaaagcatggcataccctctacacctctagctatccccttggtcacccgaaccccgggatcagacctcctgtgcaaactcaggtgttcccaagtcagaattcttttaagtggggtagtgttcctggcagacttaaccatcttgccatcccaaggaattgatgtaattctaggaatggattggctagctaggcacaagggtgtcatcagctgcgcaagcaagactgttctcctcatagatcaccaaggaaaggcagtttcctgtcaagcccaaccgcccgcaaatgatccaatgatatttaatctggcagtagaaagcaggtctgtaatcaaggagtttgaagatgtattcccagaagagttgcccgggatgccaccggaaagagaagtagagttctatatagatctcattcccggcaccgcacccatcgcaaagagaccataccgcatggcccccactgagttggcagaattgaagcttcagatttcggaactacaacaaaaagggtacatccgtcccagttcgtctccctggggagcacccgttcttttcgttaccaaaaaggatgggagtatgaggatgtgtatcgattatcgatccttgaacgaggttacaatcaagaataagtaccctcttccccggatcgatgacctattcgaccaactgcaaggagccaagtacttctccaagatagatctcaggtcagggtatcaccaactcaggattaaggaagcagacattcagaaaactgcattcgtcaccagatacgggcaatatgaattcacagtgatgccttttggactaaccaacgcacccgcctttttcatgaacctcatgaataaggtatttatggaagaattggataagtttgtcgtggtttttatcgacgacatcctcatctattccaagagtcgcagggaccatgagcagcaccttcgaaccgtcctcggaagactcagagcccatcaactttatgctaaactcagcaagtgtgagttttggttagaaaagatagccttcctagggcatatcttgactgctgaagggatagaagtggacccatctaaggtagaagctgtttcaaattggaagcaaccatccaacgtcagtgaagttcgaagctttctggggatggcagggtattatcgccgctttatcaagggattctccagcatagcaaagcccatgacggaacttctcaaaaaagacaataagtttgtatggactcccaaatgtgaagaaagtttccaaatcatcaaggagaaacttacaactgcaccagtcctgaccctaccagacatacaccaggatttcgtcatcttttgtgatgcttccaagcaaggcttagggtgtgtcttaatgcaaaatgagaaagtcattgcttatgcatcccgtttgctcaagccgcacgagcagaactatcctacccacgatctggaattggcagccatagtacacgccctaaaaatttggaggcattatctgattgggaacaaatgccacatcttcactgatcacaagagtctaaagtacatcttcacgcaaccagacctcaacctccgtcaaaaaaggtggctcgaattgatcaaggattatgacctcgaaatccactaccaccccggaaaggccaacgtggtagcagacgccctcagcagaaaacccttcggggttaaaggagcaaactttttggaagattggaagaaagaatcagctcagctaaatgcatgtctgggagacaacggtagcctggaagtcaagccaaatctagaagatctcatatgcaaggcccaacgcctggacgcagaaacaaccaagctgatagaaagagcacgaaaggggcaacttccggacctcaggacagataatcaaggagccctctggttcaaggatcgcctgtgcgtgccaatgggagaaacacgagaaaccctgctcgatgaagcccacaactcagcttactctatccacccagggaccaccaagatgtacttagaccttaagaccagatattggtggaaagggatgaagagggaaatagcacagtatgtggcccaatgtgacacctgccagcgaacaaaggccgaacatcagaagcctgcaggcctgcttcaacccctcccaatacccgaatggaagtgggaagaaataggcatggatttcgtcaccggactgcccagatcacaaagaggaaatgactccatatgggtaatcatcgatcgtctcaccaaggtggcccatttcattccagtaaagaccacttttggaggagcagcccttgcccgattataccttaaagagatagtcaggctacatggcatcccacgaaagatagtatcagatagaggaacacagttcacttcaaaattttggaagggccttcagcaagcaatgggcaccaagctagatttcagcactgcttatcacccccagtcagatggtcaaacggaaagagtcaacaaggtccttgaagatttactcagagcctgcgttttggctttcgacagagattgggagtctagcttacctgttggagacttgttctcaaatgctatgaattaa

SEQ ID NO: 19959 - DNA, 4329 bp, Zea mays
  Clone ID: MRT4577_118205C.1
atggcttcggatagaaccacgcctaccgcctccgggattggagcaagacttcccctaggagctgagggagaggctggcggagaagggggtgagacccacctccccgcacctccagaactaccactagacctagcccaaattctggccaatcaaaccagactcattgaagtcctcactcgaagtctggagaaccagcgcccaggcggtggaaggccccaggacaggatgggagaattcctgagactgaagccgcccacgttcgcggggtccagcaatcccctcgatgcagatgactggcttcgcacgatcaagaggaagttggaagccatcgcttgccctgagaatcaacgtgtgcagctggcagctcatcagctttcaggaatggctttagcatggtgggacactttcagtgaagccatcagagacgctacatgggcagaatttgaagcagccttccgtgagcaccacgtaccccaggggatagttcaactcaaggaggatgagttccgggagctaacccaaggcggaagaacagtcagtgaatatgtgcacaagttcacagagttggcccgctacgcgcccgaggatgtcagcaccgaggccagaaagatggctcgtttcctgagggggttaagacccgagcttaagaccatcctcgccagccaagacttccacagcttctctcacctttccaacaaagctattcaagtggagagagcaaaagaggaagaaaaagggcacatcaagagaaagttccagtcagcagagtcagagctcccatcaggcaccctccgttgcaagcaaccagccgccagcaaatgcctgttggcactgcggggaccccaatcacttcaagaacaactgcccccagttgaaggcaccaggaccaacttacaccaactcggtgaatggccccaaggttccatccgcacccaccccaaggcgtttccttccagcagccagcagagcagggctcagtaccagggcagggcccgggtcaaccacgtcgacgctcaggaagcccagcaagccccgggagtagtgctcggtgagttcctcgttgaatttactcccgcttctgtgctttttgattcgggagcatcccattcatttatagccgctaagtttgtggaagagcatggcataccctctacacctctagctatccctttggtcacccgaaccccgggatcagacctcctatgcaagctcaggtgttcccaggtcagaattcttttaagtggggtagtgttcctggcagacttaaccatcttgccatcccaaggaattgatgtaattctaggaatggattggctagctaggcacaagggtgttatcagctgcgcaagcaagactgttcttctcatagatcaccaaggaaaggcagtttcctgtcaagcccaaccgcccgcaaatgatccaatgatatttaatctggcagtagaaagcatgtctgtaatcaaggagtttgaagatgtattcccagaagagttgcccgggatgccaccagaaagagaagtagagttctatatagatctcattcccggcaccgcacccatcgcaaagagaccataccgcatggcccccactgagttggcagaattgaagcttcagatttcagaactacaacaaaaagggtacatccgtcccagttcatctccctggggagcacccgttcttttcgttaccaaaaaggatgggagtatgaggatgtgtattgattatcggtccttgaacgaggttacaatcaagaataagtaccctcttccccggatcgatgacctattcgaccaactgcaaggagccaagtacttttccaagatagatctcaggtcaggatatcaccaactcaggataaaggaagcagacattcagaaaactgcattcgtcaccagatacgggcaatatgaattcacagtaatgccttttgggcttaccaacgcacccgcctttttcatgaacctcatgaataaggtatttatggaagaattggataagttcgtcgtggtttttatcgacgacatcctcatctattccaagagtcgcaaggaccatgagcagcaccttcgaaccgtcctcggaagactcagagcacatcaactttatgctaagctcagcaaatgtgagttctggttagaaaagatagccttcctagggcatatcttgactgctgaagggatagaagtggacccgtctaaggtagaagctgtttcaaactggaagcaaccatccaatgtcagtgaagttcgaagctttctgggaatggcagggtattatcgccgcttcatcaagggattctccagcatagcaaagcccatgacggaacttctcaaaaaggacaataagtttgtatggactcccaaatgtgaagaaagtttccaaatcatcaaggagaaacttacaactgcaccagtcctgaccctaccagacatacaccaggattttgtcatcttctgtgatgcttccaagcaaggcttaggatgtgtcttaatgcaaaatgagaaagtcattgcttatgcatcccgattactcaagccgcacgagcagaactatcctacccacgatctggaattggcagccatagtgcacgccctaaaaatttggaggcattatctgattgggaacaaatgccacatcttcactgatcacaagagcctaaagtacatcttcacgcaaccggacctcaacctccgtcagagaaggtggctcgaattgatcaaagattatgacctcgaaatccactaccaccccggaaaggccaacgtggtagcagacgccctcagcagaaaacccttcggggttaagggagcaaactttctggaagattggaagaaagaatcagctcagctaaatgcatgtctgggagacaacgatggcctggaagtcaagccaaatctagaagatctcatacgcaaggcccaacgcctggacgcagaaacaaccaagcttttggaaagagcacgaaaggagcaacttccggacctcaggacggataatcaaggagccctctggttcaaggatcgcctgtgcgtgccagtgggagaaacacgagaaaccctgctcgatgaagcccacaactcagcttactctatccacccagggaccaccaagatgtacttagaccttaagaccaggtattggtggaaagggatgaaaagggagatagcacagtatgtggcccgatgtgacacctgccagcgaacaaagaccgaacatcagaagcctgcaggcctgcttcaacccctcccaatacccgaatggaagtgggaagaaataggcatggatttcgtcaccggactgcccagatcgcaaagaggaaatgactccatatgggtaatcatcgaccgtctcaccaaggtggcccatttcattccagtaaagaccacttttggaggagcagccctcgcccgattataccttaaggagatagtcaggctacatggcattccacggaagatagtatcagatagaggaacgcagttcacttcaaaattttggaagggccttcagcaagcaatgggcaccaagctagatttcagcactgcttatcacccccagtcagatggtcaaacagaaagagtcaacaaggtccttgaagatttactcagagcctgcgtattggctttcgacagagattgggagtctagtttaccgtacgccgaattctcatacaacaacagccatcaggccagcatcaaaatgtcaccgttcgaagcactgtatggaagaaaatgccagactcccctaatgtggtccaatgtaggggaaagaacactagaaggacccgactttgttaaagaagccgaagaaaaagttgctttgatccgcagaaggttacttgaagctcagagtcgacagaagagttacgcagacaataggcgaagggaactcagatttgaggaaggagattttgtttatctcaaggtttccccaatgcgtggtgtcaagaggtttcagatgaaaggaaagctagcaccccgtttcgtcggtccttaccctatcatttcccgaataggacccgtggcataccgtcttgagctaccagaatccatgtcagatattcacaatgtgttccatgtgtcccaactccgcaaatgcctaaaagtaccagaaacccgtatcgaggcagaagcaattcagattcaaaaagatctccagtaccgggaaaagccagtgaagattctcgactcagcagtcagaagaacccgcaattcagaagtgaagctctgtaaggttcagcggagcagagatggagaagaggaagccacctgggaaagtgaggactctctgaggaaggaatacccttaccttttctcgaaccccgtctga

SEQ ID NO: 19960 - DNA, 384 bp, Zea mays
  Clone ID: MRT4577_118206C.1
aattgattgttggtttttatttttgtttcaagtttttttatttgtgtttttgtgtttttggtgctggccgtttttaggtacggaaaaaaccggacacgggcggaggcacatcccgccgccaggttaagtagactagaacgaagaagcaaacacccagaaaaaaaagcgcacggcccgcacgagggaaacctaaaaacttggccggctacaaaaaggcttgggcttggggcaggctttaaacaagggggaaatacaagcggcctcctgctgggatgcctccagcaggaaacccccgccctcataaaacacggtaacctggagcggctcccaaaaaagcccgacggccaccgccagcatgatgcggagcatctcgacatggaactc

SEQ ID NO: 19961 - DNA, 222 bp, Zea mays
  unsure (1)..(222): unsure at all n locations
  Clone ID: MRT4577_118207C.1
gtgccaagccacaatgggtgtcattactgggactgggtgcacaaacncctagccaccggtttgaaagcaaaaggcctggaggatgaagcgaaagtatgagcttgttcggcagccagtcaacaccaattgttgaaggaataagacagggaggagggttcattttcttggaggtaatgttaaatggagggctcttgtactagttactggtaactacttatgggg

SEQ ID NO: 19962 - DNA, 420 bp, Zea mays
  Clone ID: MRT4577_118208C.1
acccagaagcccctgcttttttatgacctgatccgaccagccccgggaagggttcaaagcccaagggacccccagctaatgctatttaccaaacccaccagggaataaccgatccactcgctctcacccaaaaccacacgccggaggaggcacggtctgcgctcttagatcagcttttctataagatcggtgatcttgtcgccagcgctcgcccgaggcgccgccatccttctagggtttcctcttcatctgcagcctcctctccggacacttgtgcctgatgggcatgaggaacctccatgcttgtcggaagtgcggcccagccgaggcgatgctcatgctcagacgccttccaagcatatgatgcccgggagctccaggagcctcctcatttgcagtcgtgctggtaagagggaaagg

SEQ ID NO: 19963 - DNA, 217 bp, Zea mays
  Clone ID: MRT4577_118209C.1
gtacgtaagctcggaattcggctcgagaccaaggacaccacgtttttttcctgcctactgacccagacccccgaggggcgtttgtaagaagcagagcggtccgccatgacggacgccacctcctaccgatacctccggcacatgctccggatgagcccaaacacgctcatatagacctgacttatgacggaggctgcgcgacactggggataagaag

SEQ ID NO: 19964 - DNA, 359 bp, Zea mays
  Clone ID: MRT4577_11820C.1
gcggggaaatggaaaggaataatactactagggaaaaaggatgtttggaaaaaaaaaaaaaaaaaaaaaaaaaaaaaaaaaaaaaaaaaaaaaaaaaaaaaaaaaaaaaaaaaaaaaaaaaaaaaacctacccaaacaagccacccaaaacaaaaaaaacaaaaaaattcacaaaatcctcccatcaattacatcaaaagaacataaaacaccctattgtgcaaaccaaaaagcctacaacaagcgcttgcccccccgcgccttacaacacccgtttgcccaattccaacatcaatcctttgcacatctaaccatacaaaccatggcaacacaactatatcaacagtttgttcccccat

SEQ ID NO: 19965 - DNA, 344 bp, Zea mays
  Clone ID: MRT4577_118210C.1
atttattttattttgtttatttttaggaaacatatttaaaaaggattcacgttttttttgtcttgttttgcgaaatgaattgaccagcatttgtggtgaaaggtgtttccccaattttatggtgaagtcgttgaaaggaacaattatccgtaatcagaatgagattggtaaaaaatattaaaaaattgacacgatggctatgaaggtgtctcggctaggcaaactgatcttgtaagcaaaatcttagcatatatagggtagtgcaactattgtataactccatctttatatgtcatatatgacctgtctaatattcatgatccatttggtcatcctttaatata

SEQ ID NO: 19966 - DNA, 225 bp, Zea mays
  Clone ID: MRT4577_118211C.1
gcacgagcgacgctcctgcaggcggtggcgtcgctcctgaccaggctgcagcgggcggcgcggaggatggccgccggaaccgctggaggtcgtggtaggaagaactcgcagcgggcccaggccgccgtggcgcagtggaagaagaccttatcgtcgcttgcgccggcgtctgggacgacgaccaacaaggaggccgccgagcccggggtgaggacaaaggagatc

SEQ ID NO: 19967 - DNA, 290 bp, Zea mays
  Clone ID: MRT4577_118212C.1
gaaaaaaaaaaacaggggccgttaattttaccttggggggcaattttaaaaggttggcacaaaagggttgggggaattaaaattttaatactaatacaaggccccaatcagattcttttaatgggggctcgacacccaaaattttttggattgacttacagtttacatgcaaaaggggggggaagtcaaagttgttgagcacataaaaaactcgttaaatacaccgggccggagcaattccgtcctttaaaactcaaccccgacacataaaagttttcatccggataaaa

SEQ ID NO: 19968 - DNA, 858 bp, Zea mays
  Clone ID: MRT4577_118213C.1
atgggcagtctcttgatccgagcttgcatggtccttgtcctaggtttatgttggctgaggagcaccgggaggacaaagaggagcaatgttttgtcctggtttgggcatggaggtggccttgttcctttcggtataaccgctaagagaaggagatcgctaatcggcttttgccagaatgaatatggtttccctaagttgttgagagcatgcacagttcgcctcggaatcaggagccagccagagtacgatggtcatgaattcatcgagcatggcatagagaagtgtgtcatgactgtatacattggatccagtccgcatcatgtggaatggagtgtcattgctgcgaggcacagattcagagacaccagccaagtcgtcgctcgtaaggcattgagggccctgtgtcagatttataaagaagtggctgacaccccactcagaatctttctgccctttcagagagatcgtctcgtttggatggctaggatgcattccttggaagggcagcaactgcttgaggacgaccccacagtcgtgtacctcactgcatacctgctcaccctggatgcacaatatgatctcttggctcggcaccaccgtcagatgattgcccaagcagaagatgcagagaggcgtaaccgtcaacttcatgtggatctcaccacaactcaagctcgtgcagctgccttggaaagtcatgaagtcattgttgttgaagccctaaagcaagccaaggacgagcacatccagaagttgattgaggcctacttgctaacccacaaccaacgtagagccttacggatccaagagcctgcttcatccaacccagttcaacccatgagagatgaagatccctag

SEQ ID NO: 19969 - DNA, 272 bp, Zea mays
  Clone ID: MRT4577_118214C.1
gcgggatacgtcggatgtcgacctttctccactccctacgctccgtcgcctgctatgacctgtcgcagggctcctcggcctgtggggtcgctggcgctgcaccgttcgcctggttccctcctcctttgcgcttcctctttcgctggccccctgtgctgcggctgtccgagccctttctgccccccgccgttctggcgtgcagccgctttcttctcctgccgtttgttgcctgacctctggcccttctgcctcctttccttgccgcacgcttc

SEQ ID NO: 19970 - DNA, 697 bp, Zea mays
  Clone ID: MRT4577_118215C.1
ggccgctcgaggcggcaggccgggaaaccacacacaacacacacacacacacacacacacacacacacacacaaccagtaccagatccacaagccagcagaaaggaagaagatgatgagcaccaaggccctcaccctcggcgcggtcgtcgtcctcgccatcgccatggcgggcgcgcacgccgagcagtgcggccacgcggccgacggcatggagtgcccaaacaacctctgctgcagcgcgtgggggtactgcggcatggacgccaactactgcggcgacggctgccagagcggcgcctgctacgagcccaaacgctgcggcgcccaggccgaggggaacgcggtgacgtgccccaacaaccactgctgcagcggcaacgggtactgcggctacggccaggagtactgcggcgacggctgccagaacgggccatgccgcgccaacatcaagtgcagcgccgacaagccgtgcctgagcaacttctgctgcagcaagtacggatactgcgggctcggcgtcgagttctgcggccagggctgccagagcggcgcctgccatgacgccgttggcgccgccgccctgccgctcagctccatagtgcaggggtgatcttgaactgcgcatggctacaagtattgcgacgggatcaggtgaggagatgagttgtggcaatgtcgatcgttgccacgtcttc

SEQ ID NO: 19971 - DNA, 611 bp, Zea mays
  unsure (1)..(611): unsure at all n locations
  Clone ID: MRT4577_118216C.1
ttgggtccctcgggccggccggcttgctctgacgctttctccatctcccagacctcctcatacccgagaagcgcagctgctgccatggacgccaccgggactggagctggagggaaggcgaagaagggaggcggccgggtcgcaaggcccggagggcacgaaggaacgaagtcgcccgacngagagtaccgtcgtaaggcctgggcatccatgtctccacacgtcgggccagcactgggtccgctacgctcaaaatagggcccgctacggcaacagcgctgtctgacagcgagtgccccgcgtctaccgtcgcggaacgatcctgggagatacctcagccagttgacagtctctgagagctgcgccaggcaacgcgtgccaaggacaacaagatgacgcgcatggtcccgcgccacgtgctgctgtcgatccgcacctactaggaactctggaagctgatgagcgcagtgaccatcgtccacggaaggagtgttgcccaacattaacccgagactgatgcctaagaacacctcggacaacgcgtccagctgcgcaagcaaggaggccaagtcggccaaaaaggccgccaagtccccaaataaggcataggg

SEQ ID NO: 19972 - DNA, 850 bp, Zea mays
  Clone ID: MRT4577_118217C.1
cattggtacctcgagccggccaaaaaaaaaaaaaaaaaaaaaatttctagctcgattccccaaccgccgtgcttccgctctcgcaccgcgtcttccttgttcgtgtgctccttcctcagacccaggctctccccgagtccgaatccgagtctgagatccagatccgcgctcagatccatcgctggggggcgccatgaacccgacgcgccccgcgcaggcgtcgttccgcgaccgtaccaacgagttccgcgccgcagttgagagcgcgcgccgccacgctgcaccttcctcgtcgtcggcccccaccgcggcgagcagcagctctaccgggtccctcgacgggatgatctcggccacgtcggctcgctcggagttcaacaaccgcgcgtccaagatcgggctcgggatccaccagacctcccagaagctagcccgccttgccaaattggcaaagagaacgtctgtttttgatgatcctacattagagattcaagagctgacctcagttatcaaaaaggatatcacggctttgaatactgctgttgtagacctacaagctctctgcaattcacaaaatgagagtggcagtctctccaaggacacaacaaaccattccactacagtcgtggacaaccttaaaaatcgtctgatgagtgcaacaaaagaatttaaagaagttcttaccatgcgaaccgagaatttgaaggttcatgaaaatagaaggcaaatattttcttcgtcagctgcaaaggatgagtcaaatccattcatccgtcaacgaccccttgttgctagggatccatcggagtcctctgtgcccccagcacataggtcagcgactctgcatcta

SEQ ID NO: 19973 - DNA, 385 bp, Zea mays
  unsure (1)..(385): unsure at all n locations
  Clone ID: MRT4577_118218C.1
gtagtagttttccgttggtcgtggtagagtcgtccaccctcactcggagcttgccganaggcgccatggttttatgaatggtgcatctcgctttggatctggggaattaccagtagtttgggcctagtattagcgcgggttttgtcgtgctggtgttagcctggttggtgtggtagcgttttgcttggttgcgggggaattggaagtggtggtaaggctggcttgcagattaacggaggtaggccgccttttatcacccgccaattaagcatttgtggggtctcatggtgatggcctctttcagatgagatgttttgcgtgttacccaagtgtgttggtcgtaacgaaccctattaattaagtttgtgctggaacttcagtatgc

SEQ ID NO: 19974 - DNA, 1820 bp, Zea mays
  Clone ID: MRT4577_118219C.1
ctagatgatgtgggtctgccgatccaaccatgatgcggactgaattttatttgaggtcaaatgtaatggattctgatggtgagaaaaaaaaaaaaaaaaaccgcgtctccctccttcgcgtgctcctccggtcctcccccgaaccccacccccctcccacccacgagtcgagggcgagcgcgagatccagatccgcgtctagatccatcgcccggggtccgccatgatcccgacgcggtccgcgcaggcgtcgttccgcgaccgcaccaacgagttccgcgccgccgtcgagagagcgcgccgccacgccgtaccttcctcgtcgtcagcccccgccgcgccgagtagcagctctaccgggcccctcgacgggttgatcgcagccacgtcggctcgctcggagttcaacaaccgcgcgtccaagatcgggctcgggatccaccagacctcacagaagctatcccgccttgcgaaattggcaaagagaacatctgtttttgatgaccctacagtggagattcaagagttgactgcagtcattaagaaggatatcacggctttgaattctgctgttgtagacctacaagctctctgcaattcacaaaatgagagtggcagtctctccaaggacacatcaaatcattccactacagtcgtggacaacctaaaaaatcgtctgatgagtgcaacaaaagaatttaaagaagttcttaccatgcgaacagagaatttgaaggttcatgaaaatagaaggcaaatgttctcttcgtcagctgcaaaggacgcgtcaaatccattcatccgtcaacgaccccttgttgctagggatccatcagagtcatctgtgcccccagcaccatgggccagcgactctgcatctaccccattattccagaggaagaaaactaatggagaccatggggcatcatcatctcagcctttcgcacagcagcaacaattggcagtgcagcaggacagttacatgcagagcagagctgaggcccttcaaaatgtggaatcaacaatccatgagctgagcaacatatttacacagttggcaaccatggtttctcaacagggagagctagcaatcagaattgacgagaacatggaggaaacagtggctaacgtggagggagcgcagggccagctcctgaagtatctcaacagcatttcgtccaacaggtggctgatgatgaagatattctttgtgctgatggtgttcctcatgatcttcatattcttcgtggcttgaccttctgtaacattctgcccgaggtgctctggccgctatgcgtagtattcttttatttttactcatactacaccgtgtacacaattttcaccctggacgataagccatcgttcacccttttgtggccatgtaaattgggaggagttcgagtcctgttacgttactcttgattggcaatatctccactgtatttgatgtatcaactcgccagacagtaataggcaggtggcaaaaccgcttctcgttcttgtcagatcactatacctatacgggagtatgccccgctagttcaggcacatgctattctgattgttcctgatatctgctgtctctcttttcatacgctaacttcaggtaggctatctgtcatgagtctactagctaattttgaggtaggaggatctcccagatatctgtcctgtctacgacaaacataaatggatcctggaatcatggacgatgcctccttttgcgctgagccctattattgtttcatttgtaattcttattgcgcttttagcacggtcaaaacgacatgatgcgaaaaaaaaaaaaaaaaaagagt

SEQ ID NO: 19975 - DNA, 560 bp, Zea mays
  Clone ID: MRT4577_11821C.1
aaacttctttctattcgataaacaaaaatttaacctcagacaatgggtaacaaatcatcaagcaaagttgatccaacaattcttacaccaaaacaaattcaaatgcttaaagctaatacaaatttcactgaagaacaaatccgtgaatggcacgctggatttttacgtgactgtccaaatggtaaattatcaaaagaccgattcgtctcagtctatgaacaattctatccaggtggcaaagctaaagatttctgcaaatatgctttctctacattcgatcgtgacaacaatggaacaattgattttactgaattcatgcttgctattgccttgacacaatcgggtgatcttgatgaacgtcttgccttagctttcgatatgtacgattataacaacactggaacaatcgatacaaatgaaatggctaaagtcattgctgccatgtacgatcttattggtgaaaccgatcgtaaaggtgatcgtgatccaaaacaccgtgccgaagaaatcattcgtatttgtgatgtaaccggaaacaaaaattaaccaaggaagaattc

SEQ ID NO: 19976 - DNA, 267 bp, Zea mays
  Clone ID: MRT4577_118220C.1
agcctagggagtctacggattcaagctgagaactatcgtaggagttcatagtctcagcatatatttaaccaaagacacccacagtactgagtctaacatgaactagtccgaatgcgtgtaatgacattgccggaagtcattctatcagcaggcaactgcatcacgcagactaactcacagtgtccgagtaaaaatctaaattatatggagtgaaaatcgttctctacatggatttctccgaatgtgtttgtgtggaggtggggagat

SEQ ID NO: 19977 - DNA, 575 bp, Zea mays
  Clone ID: MRT4577_118221C.1
cggggcacgctgccccagcggacgaaacacacgacgcagcagcggtcgtctcgttctcgtctctgcagatgacgggctgttgtcgtcgcggcagcaggagcagggtggtctgtcgtcccgcactggcgctgctactgctagtggcgctgcttctcctgctgggcccgtgttcggccgagctgaacgccggcgcgggccggcggctgctggtgtcgcgggcgtcgacgagccggcaaaacaaggccgagcagcagcagcagcagatgcgggtcggcgggaggaacacgcccttcaaccaggccgccgccagcttcggccggaggatacccagatccggctggaaccccatccagaacagatgagagggaccgcgtcctagatgaagcccgtccgtacgtcggcggcagggtcccggcatctgatgggctgcgtcttggaagcgtgctcgagctcggtccaggactagctcagaaaccacacgcgcccacacggcgcgacccatcgagttttttttttttgatccttgaggccggtcatgcttgtgtgaacaagctgcggctagcttttgaaaatgg

SEQ ID NO: 19978 - DNA, 294 bp, Zea mays
  Clone ID: MRT4577_118222C.1
ataatgtaacgtaggtgatgatgcccccgggcgcttgggggtgcacagcgtctccggaggtctcttcgcggtggtcgctgggggttgaactgcggggtttgggtggccttctacatcttgcctaccattgcatgaaacattggggtttcttctgaatgtgtgtgtcatacttcttttgggacgggggctgttttcttctgtttattttctgagactcctactggagccaaatgtgtaatctagatgcactcaatgttggtaatcctgtctggggcacttaagtaacatctgaag

SEQ ID NO: 19979 - DNA, 270 bp, Zea mays
  Clone ID: MRT4577_118223C.1
gtatgaccaactttctcgtaattaacatcaaagtggcgggtttacatcaaattttttgataaaaaacaggcacatacgaagcaaggggttggaaaaaccaaaaaaaactttaaccagcaaatcagattcccaaaaaaaaaaattaagcgtaaattccataccggctccaaaaaaggaaaaaattcttaatggccgggcaaacattgccataaaaatttattgggtcacccaacaactttgggggtgtcaaacaaaaccttaaagttggcc

SEQ ID NO: 19980 - DNA, 276 bp, Zea mays
  Clone ID: MRT4577_118224C.1
gagcaaggaatatatatatatatataacccgttttctttgggcgtatattttcacagaaaactatccagtcaaaattgcagtgtctcttttgagccctttcacatccattgcattaacgcactccccacagccctgatacctgaccatcagtctcaacaggtgagtggcatttccctttggttcctctctgcatcccgcctgcagaagcaacaacaccttctggagggcgcccagctgcaatgcctaaacgatggcgtgccgtctagctgcccctg

SEQ ID NO: 19981 - DNA, 235 bp, Zea mays
  Clone ID: MRT4577_118225C.1
attgcatcctatagaaatgtgtaacaaatgacccaagagagggatgttaattttttttaacaccactatacttctagaaaagaatcatgcttactgcttgattgatttcaaaattatacttgcttacacaaggattgttgcaagcaagctcgatgataagatatatagtctgtcttggtggatcgccattccatgaatattctcattaaccaagacacattttaagttgtacaca

SEQ ID NO: 19982 - DNA, 730 bp, Zea mays
  Clone ID: MRT4577_118226C.1
ccggccggggacccagtttccattcagtaactcggaccgaacatggcgatgagtttcttctcggccactaccaccccttcatccgtcggatccctcctccccattcgacgccagtgtgccactgagaccttccttgatgttccccctcaagccccgccgcttagaaatgcatctaaaacctccggctctcctcctgaatccacaccctctccacctcctgcattgaagatacgccctcgagatcattatactcttgcgtggtctccacctcgaggacgctatcattttttgcacgacgcaggactcctcgcactctccagtgttagatccctccctgcactcacctgagatcgggtaggtgacccaaaatccgcaaaaaatcgtcgatccagagtctacagagagcatgctgcagtgaagaggatggtggcacgaaagaggacgatactgctgcagctgaattgataggacgaagagagttctcagagggcgttgatgtattcaatgatacctactcccaagtctgggaacatgtactctctcaagtgagctctattggctaagatgacgcgacacagattgctggagagctctgagctacgcgcgacgtatgaacaacgacgagacctacgaattgcattgcggccagatgatggagaagctgcactggctcaaaggctacctccacgaagctgaacggactctgaggatgtcctgactgaggacccct

SEQ ID NO: 19983 - DNA, 580 bp, Zea mays
  Clone ID: MRT4577_118227C.1
aaaaaaaaaaaaaaaaaaaaaaaaaaaaaaaaaaaaaaaaaaaaaaaaaaaaaaaaaaaaaaaaattttaaaaaaaaaaaaaaaaaaaaaaaaaaaaaaaacctaaaaaaaaaaaaaaaaaaaaaaaaaggttttttcctttgggccgaaacccccttagggggaatttttgaaaatttccttaaaattgggggccgtttgactttttttttagggggcccatttccccttttagggggtctttttaaatttaattggccgggtttttaaaacgtgggggttggaaaaaccttgggtttccccaatttattccttttgaaaaaattccctttttcccaagttgggttaataccaaaaaggcccccccctttcccctttccaaaaatttgcccaccctaattgggaattgaccccccttttttcgggccctttaaccgggggggttgtggtgtttcccccaagggggcccttttattttgcaagcccctttaggccccttctttgggtttttttcctttcttttttcgccagttttggcgggttttccccttaaatttttaattagggggttccttttagg

SEQ ID NO: 19984 - DNA, 224 bp, Zea mays
  Clone ID: MRT4577_118228C.1
acacccttccgcccacccgtccggtcctttttttcaaactttttttgccaagagcacaaggccctgaccttgagccagttttgggccagggggggggaaaccgatttaaggtttacactggtaaaggtttaattaaccgacaactatacccctgaaagttattacccccagttggtactaacaaaggagggagattggcttagcgacacaggcaaagtgtaaag

SEQ ID NO: 19985 - DNA, 636 bp, Zea mays
  Clone ID: MRT4577_118229C.1
ccccgcgtccgtccagcgtccgccccgcgtgcgcgtaggagctctgggcagcgtgcgcacgtggggtacctagctcgctctgctagcctaccatggcgtgtatcaccaccggggcgcgacgggaggtggcggcggctacggcgacctccagcgcgagggcgcgggcatgctacgtgggcaggcgcagaaggcacgcagaaaggcagcggcgacccattgatggacgggtcgcttgaatggccgctgacgcgccgctgatcttcggcgggtcgatgctggtgctgaccgggctgatcctggccggcaccgtgatcgcgctcacggtggccacccccgtgctggtgatcttcatcccggtgctggtgccggccgccatcgcgctggcgctcatggcggccgtgttcgtcacctccggcggtctcagcgtcgctgcgctgtccgtgttctcctggatgtacaagttcctgccgggcaagcacccgccgggcgccgaccacctggaccacgccgaggcgaggctggcgtgcatggcccgcgacatcggggctgcagcacagcaccgcattgaccaggcgcatgcgccttgacagaagaacccactcgagcggacgcggctctcgaccttcttgaaccact

SEQ ID NO: 19986 - DNA, 522 bp, Zea mays
  Clone ID: MRT4577_11822C.1
ccggccggaatcccacattgcgaagacagccctgctcctcctgtgcctcttctgaatcctgcctggagcgaacgtatattaagggccatcatggctgactgggccgcgactgctgggaccttcgacgtcacacaacccgggtgcacgccgccatcgccacgaccgacggtgcgcctgatgacgcctgacgtctgcatatcggcgggcggcaaacctggaaaacatacaatacctcatacccggaggaggactgtaccttgctaacacagctcgacttcacaagaccctgcaagcgccgtcgagacctactccagatggatggcagatctgatgactaccacagagctaagccagcactgggaccatggaaatcgaaaggagattctactcgtggataaccatcgtcatcaccgacgaggaaaccccttgaggccatggaaccagatgtgtggacaccgaactcctgcaccccgaagcaccactgcaatatccttcccacctcgctgatgatgtacttctgga

SEQ ID NO: 19987 - DNA, 518 bp, Zea mays
  Clone ID: MRT4577_118230C.1
aaaagcggaaaaacaccacccccggttttcaccggcaggccccccataactaaagatggcccccggccccctctttttttgtcccgttaaacccggggcccaaaaatttaccgggggccaaaatttaaatttgacaccgggggacaacccacccctgggggacagaaacaggggggcccccttcatttcccaccgggggtggggaacgggccttgatcttcaagggggggggcaccaccgggggggccacgacgggatccccctccgtatccgcctttaaaaccaccaagatccccagggccctttccagggccaggggcgggggagaacctttttccttcagcgggtttcaggaacccggtgaggctccccgacttttgggcccgctcataccccccagaattttccttttttttatccttggcaaacccccgcttaaggaaaacctccccattttttttcttggtagaaaggggttggaaaaactgcaaatcctttggaactttaactttcctttc

SEQ ID NO: 19988 - DNA, 408 bp, Zea mays
  Clone ID: MRT4577_118231C.1
ggatggggcggcttgcccttcctccggacaaaagggcgaaaaaacgggtgaaaaaagtgcaagacctctggaactgccttttttttttttaaaacggaataaagggactgcaatccctgctgggaaaactgaaagaatttcctttgtaacccttaaatcctttattggcggtctcgggagtcattgtaacacaaaaaccataaatggctttgggggcctcccgacctgggagttttttttttaattttgggaacacgggtaacctccgggtccacaggtaaaacacaggggccggccctctgggcctgttgggggatctttaaaatggggaactccggggggcccttggggtcccccgtgaggcccgagggtgccacggtttagggggactccgggaacacctggcct

SEQ ID NO: 19989 - DNA, 280 bp, Zea mays
  Clone ID: MRT4577_118232C.1
cgcccaagacgaaggcgtcgcacattgtggggcgcttactggccgcgtccaagccggccgagtgccggcagatcggtgaccacagtgacctcggctactaatacaccaacgaggcgctcctgcgatccaggtcgatcgcggtcaaagacgaagtgttctgcctggctgaaggggtgctggacaacctgtgtcggatgaggcagcagcactgtctgtcatgctagggcgccaacaaggtgctcctggtaatcgaggcctacaagacgatgcgcgagcgctc

SEQ ID NO: 19990 - DNA, 552 bp, Zea mays
  Clone ID: MRT4577_118233C.1
ttttttttttttttttttttttgttttttttttttaaagacggtagcaccatgcatgcattagattggcacatcctcatgagtcatggagcatgcagcagaaagctctacttgtcctaaagatcccagggaagaagaagctcactccttaagctcctctgcctgcctctctgctctctcacccaactacgtatatataccacactagctgatctagctatatccctccagaagggagcagagcagcatatgtctcgatcattacattaggcatgcaatgcaactccagtaggcattagctaaaacaactaagcaggcggcgttcttgacttgacatgcgtccagaattggcggcaaaccggtaaagataactacaaggcagcttttgactaactaatgaagccgcgcgtcagttcgcgaccgccttcttcggcttgttgggcgtcgccgccgccgccgccttctcggggccggcggcacgcgggcccggagcggcggcattgaggtccgggatcggcgcgcggtggcctgctgccgccgccgcattcccgtt

SEQ ID NO: 19991 - DNA, 1494 bp, Zea mays
  unsure (1)..(1494): unsure at all n locations
  Clone ID: MRT4577_118234C.1
ttgggaccctcgaggccggccgggacgattgccaaacaccaggggaacgctcccccgagccgcgaccccgggcaggtttccccacggacggggcatccgaccgcgacgacctcccgccgccgccgcgacgaatctctggcctcccactaccgccgcgacgtccagctttgttctactccaaggtccagctctggcttgccgtcctccgcccgtactccacgctactggatctctagcttgctcgtacgggatctctgtactccacgctactggcttgagccatggcaaagaatgtttctagggcagcttggaacactgtgtatgagaaaggtctggttgatgtgctccttgaacataaggacaacccaaagttcaaaagtcaaaatggttggactgctgagggatggaacaatatcacaaacaagttcaatgagaggtatcctcttgcccattactccaaacagcaaatgcaagacaaagataaggagcttaaatctcattacaaggcagtaagagattcaaggaaagaaagtggggtgggttggaatgattccctatgtatgatagtggctgagccagaactttgggaaaagctcatccttgctcacccaaaggtagcgaagtaccaaaagaagccatttccattgtactactctttggaagccctccacgaaggtagtgtggccacaggagatttgaatttcacatacactcagcaaatgccacccctcctcttcattcctgttcgtcctcttaatgcccctctggtggncctcttgctgcccctccacgcgtccggacccacgcgtccgccacgcgtccgactgctcattcgaacaggagtacctctgaacaaagccactctcccttgcaccccaacacaaacccattctccatggatttccaagaaatatcaaatgaagctcaatcaggacatgtagaaggtggaaatgggagaaagcgcaagcaaagccaaattggagcagccattgaaagttttgtggattttaagaggagcgccacatccaaaacgctcgaaggtattgaagaagtgtctatggaaaagtgtctagacaagttggatagaattgatgggttcacagatgaggatagatcatatgcaatggaggtctttgaatctgcgataaaccgagaggtgtttatgaagtcaaaaaaccacaatgctagattactttggttgaagaggaaaattagtgtgttaagtggaagcaacacatgaagcagatatggagaaggaagctggcatgaaactaaaacgcattaagttgacacgtggtgtgcatgttttagatgtcttattctactgccaaacttcctaatactctatttttatattataatgtctatctgtacgtgtgaatggagataatgatattatgtgatgtgatgatggatggattagcttcgttgaatattacatgatattatgtgatggtgatattaagtggacaaaaaaaaaaaaaaaaagcggcc

SEQ ID NO: 19992 - DNA, 1822 bp, Zea mays
  Clone ID: MRT4577_118235C.1
ctggtgcagcaaatgtacattaataaacaaacaacattataacatgtgacacaagtcaaataaacatggcatgtttacggtaaataccacaaagacaacctaatagattgacgcttagccaattgccacttgatatcatcaaactggagagtttacagtatacacacgtgtccatagcataaggatagccaatcattattggccaaatcacagtaacttgcgcgagtaatggaaggtacaaaatgtagaaatacaactgacacttccataccaccaatggcattcaggcattgtcatcatcatcctcgatatcccagcttaaatcctcatcatcttcggcaatgctcagcctcttgcgcagctcctccttcagagcagggcttgaggtctggatgccgcctttcttttcttcatgctctcctagatcctcaatctcatcccactcaagatcctcttcctccgcagttcgctgtctagacactatggagtaatcgctgtccttgctcgaatcactcgtctcatgcttcgctccttccttcttggcacctgattcttcgacattcgacttggagggctctgcattctcaccctcacccaccacaccgaaagagctaccgagaactgctttttcccgttcctcctccttgtccactaccaccaaagagctaccgagaacaattggctgcggctctgcggcattcttctcttccttcaccaaaccaggcgcctcttccaccgtctcaactccactttcttctacaattctctccacattttctttctcagccatatcctgcctgacttcttctttgatcggctcttgcctctgttctgctagctcctccgtgctgtctttctgctgctcttcctcttcctcttcgtcgtcatcgacctcccagctcaagtcctcgtcctcctcctgcgcaatcacacgctgcacgagcttcgccctggcgtcctcctgctgcttcagcttatggacgcggtaaaagtacctcggccagaacacctcgcggggcacggcgtccgggacgagcctgtccgccatggcttccagcgcgtcgctgtcgtagcacagggcctcgatctcctcctccctctcgtccaggataaaccccttgctccacgcggcgaagtcctcggcgtcctcgggatcggacgtgaacgtggccggatccgcctggagcgcgcgcagctgcgcctcgaagcggctgtaccggacgtgggtcccggaggcggagctggggtcggagtcgccgccgtcagaggcctgggggccgccaccggcggcggcggcggcctgggagagcgcctccttgccctgcgcgacgatgtcggcgagtccgtctagcgcgtgcgcggaggacggcaggtcccgcgcggcccgggcggcggcctcgcgaagcacctcggtctcgcggcgcaggccggtgccaaactcggcgaggtcgcggcggtaggcctccaggacggtctcggactgcgaggtgagcgtcttgagcaggccaccgaacccccacccgccgccgctggaggatgaggcggatccggcgggctccggctccggctccggctcctgctccggcggcggagaggccgggtccggatcgggctcggcgaggatggacttgaagaaatccatggcggcttggatcggatcggagacgttggtcgtgggtttggccgcagggacgggactcgggaggggaacaggccgaacagccggccggggagggctgtttgctctcgcttcgcactctttcggctttcgcttggcgtgcacggacgggttcgtcccggccggcctcgaggggtaccccca

SEQ ID NO: 19993 - DNA, 1607 bp, Zea mays
  Clone ID: MRT4577_118236C.1
gacgaccggcgcgccctgcgactcatcgagccacttggagactctccacgctataactcctcggagctcgctgcctccccaccagccatcgcacatatgctgctgacaaactgacctatgctgcacttggaacacctactagcgagacaaccgtagcgatgacgggccgagccgcgaccccgggcaagtttacgggcgaggggagacgaccgcgggcgactgcgacgaatcgagggcctcggaccacgaccacgacgaaccgagtggagcccgttgtctccacaccaccatccaactagccatggcaaagaatgtttctagggcagcttggaacacagtgtatgagaaaggtctggttgatgtgctccttgaacataaggacaacccaaagttcagaagtcaaaatggttggactgctgagggatggaacagtatcacaaacaagttcaatgagaggtatcctcttgcccattactccaaacaacaaatgcaagacaaagataaggagcttaaatctcattacaaggcagtaagagattcaaggaaagaaagtggggtgggttggaatgattccctatgtatgatagtggccgagccagaactttgggaaaagctcatccttgctcacccaaaggtagcgaagtaccaaaagaagccatttacattgtactactctttggaagccctgcacgaaggtagtgtggctactggagatttgaatttcacatccactcagcaaatgccacctccttctttcattcctgttcgtcctcttactacccctcctggtggccctcttgctgcccctcctagtggccctcttgctacagctttcgcttctactactgctcattcgacctggcaaagccactctcccttgcacccccacacaaacccattctccatgaatttccaagaaatatcaaatgaagctcaatcagacatgtaggaaatgggagaaagcgcaagcaaagccaaattggagcagccattgaaagttttgtggattttaagaggagcgccacatccaaaacgctcgaaggtattgaagaagtgtctatggaaaagtgtctagacaagttggatagaattgatgggttcacagatgaggatagatcatatgcaatggaggtctttgaatctgcgataaaccgagaggtgtttatgaagtcaaaaaaccacaatgctagattactttggttgaagaggaaaattagtgcttgtagagcgctcactactatcatgtgatgtgaggtgaatgtggcgatgaagagataggcttacaggaattcactgaataaaacaatacgcttgttcttgcccaagtggaagcaacacattaagcagatatggagaaggaagctggcatgaaactaaaacgcattaagttgacacgtggtgtgcatgttttaaatgtcttattttactgccaaacttcctaaaactctatttttatattaaaatgtcaatctggacgtgtgaatggagataatgatattatgtgatgtgatgatggatggattagcttcgttgaatattacatgatattatgtgatggtgatattaagtggacattgcagtgttgaaacatgcttcatatttctggg

SEQ ID NO: 19994 - DNA, 184 bp, Zea mays
  unsure (1)..(184): unsure at all n locations
  Clone ID: MRT4577_118237C.1
ttggcccgttctgcctacataagtacccccttttttggctgagtaggattcgnacaattcgcttgcagtagggattncgacaatgggcctgagtcatgattcgaaaattttttactccctttcttcatctcaatctggattgcgcggcaaaaaagagggtactagcgaaatcggaatgcccccc

SEQ ID NO: 19995 - DNA, 685 bp, Zea mays
  Clone ID: MRT4577_118238C.1
aataataatataattaatataatatagatgagtaccaataaatatttcatacataagtgtactctaaatccaaaccaaaacactgagataatcctgtaattagccaaacaatctgtgcaagtgcagaatacaatgtacaacagattgatttgcatcatgtcaaaaccagattgtccaagggatacatcggttgctgctatcgcacccctcctgccgatgttccatgactccattcttgctggccactttgtgctcacacatcatcttgtgctccttcgacactactgttggctgttaatatacaataacccttgcacattggggcaagaagcacggcaccatcccagtagagaggatccttcctgtggagctgaagctcccatggagaagccgtagagaaacctcttcttcagcctgttctcctgtttctcttagaaaatgcacatggaacagatgcccatcgagcagtttctttgctgtagccatttcctcacggcaaataatacatgtagcatcactcacatcgagctcttctgatgtagcatctggaaagcgttcattcatgttggaagtgatctttctgtagcgcacataatcttccattagcatgtcactaacatagaatatatacttcacgaatgttgatactgtggatgttgctagtatcatatactcaaaggagaag

SEQ ID NO: 19996 - DNA, 506 bp, Zea mays
  Clone ID: MRT4577_118239C.1
gcgatagatagctcacttgttgatacagctgatgcccgctcaccaaatgcgacaccgacgcgccgtcggcatgatgaacgtggtggtcatcgtgctcattctctgcacgctggcagtcgtgggggtctggtccccagcgccgcagccgcccgcggggccacatcatggcgaccgcatggcccggcagggccgacgcctgggaatcgtcgagtactagcgcgagctcccgctctagaccgatggcggaggcagagtgaaggccaaggatacgcgcgtcctgcccccggacgcactggacggtgtttagggcgagggtggaacctttgatgatgccaggggcgttgactaacacgctgcctgtgaggtggccggtgctgtaagggaaggcaaggggagattgaacgacgacaaggtgagcgccccgggctgaatgcttactaccgtttatttgtgcaggattgactttgaggccccggggagaaagttgtcgcgggagccaaggtcgc

SEQ ID NO: 19997 - DNA, 139 bp, Zea mays
  Clone ID: MRT4577_11823C.1
gtggcggtagcgctaacggctatatatacggcgacattacgtcatgctgcaagtggtcgtggtattagcgtttagcacattatcccgtgcgttttcacgaaggtttctggggctgctgtcgtcgtgctgttataccacg

SEQ ID NO: 19998 - DNA, 1365 bp, Zea mays
  Clone ID: MRT4577_118240C.1
tgggaccctcgagccgccgggcaagagtttccaggcctactccaatctccaggcccaggcaaaacagcaccggaccgcgtgcgtttcgcttccgccccctgctgtttctgtttcttggcgttcaccccctctctctctcgtggcgacgacggcgaccgtcgccgcccccctacgcgctaggtgccagggtccgtcgggtccttcgctggcgacgagcacctaccaggcgacccagtggtgtgtttgggaaggtttccgcggtcgggcggcgccccccagtggcgaagatgatccgactaccgacgtacgcggcgttcagcctgctggcgacggcatcggcggcgtactacgcgttcagcagccgtgagcagttctacccggcgatggtgtacctctccacctccaagatctgcttcgtgctgctcctcaacacgggcctcgtcgccatgtgcgttgcctggcagctcgccaggcgcctcttcctcggctcgctccgggaggccgaggtcgagcgcctcaacgagcagtcctggcgggaggtcatcgaaatcctctttgctgtcaccatcttccggcaggatttctctgtgtcctttctcgccatggtcgccgcgcttctcctcgtcaaggcgctgcactggcttgcgcagaagagggtcgagtacattgagaccacaccctctgtgcccttgctctcgcacatcaggatcgtctccttcatggctttcctgcttactgtcgactgcctcttcctgtcaaactcgctcaggtcactcatacagaagcaggaggcgtccgttgccatcttcttctcctttgagtatatgatactagcaacatccacagtaccaacattcgtgaagtatatattctatgttagtgacatgctaatggaaggtcaatgggagaaaaaggcagtgtatacattttacttggagctcataagtgaccttgtgcacttgtcattatacatgctcttcttcatagctatcttcctgaactatggtgtcccgctgcacttgattcgtgagctatatgagactttccgcaacttcagaattcgcattgcagattatgtgcgctacagaaagatcacttccaacatgaatgaacgctttccagatgctacatcagaagagctcgatgtgagtgatgctacatgtattatttgccgtgaggagatgactacagcaaagaaactgctctgtgggcatctgttccatgtgcattgtctaaggtcgtggctagaacgccaacacacttgccccacgtgcagagctccaatcattcccgcagataatggacatgctgtatcagcacgacaacatggagccccagctggggttcagcctggtactgccactc

SEQ ID NO: 19999 - DNA, 599 bp, Zea mays
  Clone ID: MRT4577_118241C.1
gcacgagtgaagatcttccgccgtgggaacgcggtccggaggtccgaacgcgtcaacctccctcagcagcttctcctccacccgcgggtgctgggcgacgaggtagagcacggaggacagcgtgaaggccgtggtggccgacccggcgaggaggtgctcgtaggtgagagcgctgaggtagtccggcgtgagcagcttccgcgcggccgcgtcgctgtcgcgcgcggcgaggaccacggacaggaagtctttctgccgctgggcttggggcgcgcgctccctcgcggccaccctgtcggccacgatgccgtccatcatccggcagagcgcgccgttgacgcgctggatctccctgtcggcggcgcccgggacccgcaggagcagctgccgtagcggccactgcagcacgggcaggagcgtgccgacgatggtggacagcgaccccgacaggtccatcttcagcgacgtggtcgagtggatgtgcatctttatgaactccgacgacctggtgctgtgactaccgtctccgtcttcctcgccgtgctgtcgtggtggtccgtggtgagggggcggcgcggcaagctttgtggtcaggccga

SEQ ID NO: 20000 - DNA, 283 bp, Zea mays
  Clone ID: MRT4577_118242C.1
acggtcttgccaaaatcaaatattggaactcctttagggtctcaagatactcgagaatttggcgggatggatctaatataaccactgggctggagcatcaattgccatttttcttgtgcaaacacttaaccaagtttctgggtcgatggctttgataacgatgaatcagccaccgagcaggctctcttgcagaaactgttaaggagtattgccatcaaaattttgtcggaacatctgtccgtgctgcagcgtatcctgatcatgaaaaacacgacatacattc

SEQ ID NO: 20001 - DNA, 1041 bp, Zea mays
  Clone ID: MRT4577_118243C.1
tttccattttttggcccaaattttatatgactccttaaaagggaaaattgtttccctcaagggaccgggtcggaaattaattccggggagatgaaatccaaaagtggggggggccccttttgttttttttttttttttttgttttttttttttttttttttttttttttttttttttttttttttttttttttttttttttttttttttttttttttttaataataatataattaatataatatagatgagtaccaataaatatttcatacataagtgtactttaaatccaaaccaaaacattgagataatcctgtaattagccaaacaatctgtgcaagtgcagaatacaatgtacagcacattgatttgcatcatgtcaaaaccagattgtccaagggatacatcggttgccgctgtcgcacccctcctgccgatgttccatgactccattcttgctggccactttgtgctcacacatcatcttgtgctccttcgacactactgttggttgttaatatacaataacccttgcacattggggcaagcagcacggcaccgtcccagtagagagaatccttcctgtggagctgaagcaccacggttcctcccatggagaagccgtagaggaacctcttcttcagcctgttctcctgtttctcttagacactcttgaaatggtccgagcagtctctgacgacgtcgccgaagctcgacaggtagcctttcgagcctgaagatttgccgtggccctcgtggtcgattccgtgaacaacgtatccatggtgtactaatcgagcggccgtgtctcccatggatatgctgcactcggctccgtatccgtggcagataaagatcaaagctttgcactccgatttcctcggtgtccacctgcaagtgaagagcttgtttccgcgtgaattcacgaagaagtcctgcccaaaaaaaatcgcggagaaatatggggaaaaactggcatactacaccgctggaatcaaaaaaggaatccttgttggaaactgatgaaccacccaagagaatt

SEQ ID NO: 20002 - DNA, 1418 bp, Zea mays
  Clone ID: MRT4577_118244C.1
ctcgaggtttgccgggagacaaagcgcgaaggatctgtttcggaccatgggcctagagcccctagacaggcagtttccatgcctgctccaggcccaggcaaaacagcaccggactgcggctccaccattgccgttcctgtttcttcgaattcttctcccgttcaggcgtccatccctcttttctctcgtggcgacgaagacgaccgacgccgacgctgacgccctacgccaggtgccaggttccgtcgggtccttcgccggcgaagagcatccaccaggcgacccagtgctgttctggtgcggtttcattgcggaagttttgttgtgggattttccggtggcgaagatgatccgactacccatgtacgcggcgttcagcctgctggcgacggcttcggcggcgtactacgcgttcagcagccgggagcagttctacccggcgatggtgtacctctccacctccaagatctgcttcgtgctgctcctcaacacgggcctggttgccatgtgcgtcgcctggcagctcgccaggcgtctcttcctcggctccctccgggaggccgaggtcgagcgcctcaacgagcagtcctggcgggaggtcatcgagattctcttcgccgtcaccatcttccggcaggacttctcggtgtccttccttgccatggtcgctgcactgcttcttgttaaggcactgcactggctcgcgcagaagagggtcgagtacatcgagaccacaccctccgtgcccttgctctcgcacatcaggattgtatccttcatggttttcctgctcaccgtcgattgcctcttcctgtcaaactcactcaggtcactcatacagaagcgggaggcgtctgttgccatcttcttctcctttgaatatacgatactagcaacatccactttatcaacatttgtgaagtacatattctatgtcagtgacatgctaatggaaggtcaatgggagagaaaggcagtttatacattttacttggagctcatcagtgaccttgtgcacttgtcattatacatgctcttcttcatagctatcttcttgaactatggtgtcccgctgcacttgattcgtgagctatatgagaccttccgcagcttcagaattcgcattgcagattacatacgttacagaaagatcacttccaacatgaatgaacgctttccagaagctacatcagaagagctcgatgcgagtgatgctacatgtattatttgccgtgaggagatgactacagcaaagaaactgctctgtgggcatctgttccatgtgcattgtctgaggtcatggctagagcgccaacacacttgccccacgtgcagagctccaatcgttcctgcagataatggacgtgctgcatcatcacgacaacatggagcccaggctggggttcaacctggtactg

SEQ ID NO: 20003 - DNA, 1080 bp, Zea mays
  Clone ID: MRT4577_118245C.1
ccggaccgcgtgcgtttcgcttccgcccctgctgtttctgtttcttggcgttcaccccctctttctctcgtggcgacgacggcgaccgtcgccttcccctacgcgctaggtgccagggtccgtcgggtccttcgctggcgacgagcaactaccaggcaacctagtggtgtgttcgggaacgtttccgcgggcgggcggcggcccccagtggcgaagatgatccgactaccgacgtacgcagcaggaggcgtccgttgccatcttcttctcctttgagtatatgatactagcaacatccacagtatcaacattcgtgaagtatatattctatgttagtgacatgctaatggaaggtcaatgggagaaaaaggcagtgtatacattttacttggttcgtgagctatatgtgactttccgcaacttcagaattcgcattgcagattatgtgcgctacagaaagatcacttccaacatgaatgaacgctttccagatgctacatcagaagagctcgatgtgagtgatgctacatgtattatttgccgtgaggaaatggctacagcaaagaaactgctcgatgggcatctgttccatgtgcattgtctaagagaaacaggagaacaggctaaagaagaggttcctctacggcttctccatgggagcttcacctccacaggaacgattctctctactgggacgatgtcgtgctgcttgccccaatgtgcaagggttattgtatattaacagccaacagtagtgtcgaaggagcacaagatgatgtgtgagcacaaagtggccagcaagaatggagtcatggaacatcggcaggaggggtgcgacagcggcaaccgatgtatcccttggacaatctggttttgacatgatgcaaatcaatgtgctgtacattgtattctgcacttgcacagattgtttggctaattacaggattatctcaatgttttggtttggatttagagtacacttatgtatgacatatttattggtactcatctatattatattaattatattattattaaaaaaaaaaaaaaaaaaaaaaaaaactcgagggggggcgccgg

SEQ ID NO: 20004 - DNA, 407 bp, Zea mays
  Clone ID: MRT4577_118246C.1
tcactcgtccgcccacgcgtccggtctttattgtttgcctgcagagcttgtggggatataactaaggctcatgagatattctgtggattgaccaagagagatgtgttttcttggacggcaatgataatgggctttactgttaatggcttatgtaatgaagcacttgatttgtttgctcagatggaaggagagggtaaggttatgccaaatgaggtcacatttttgggtgtccttacttcttgtagccatggagggttagtggaacaagggttccatcacttccagcgtatgtccatggtctacaatcttgcaccgaggattgaacactatggatgcatggttgatctcttgggacgtgcaaagctattgacagaggcagaacaatttattaacgggatgcctattgc

SEQ ID NO: 20005 - DNA, 285 bp, Zea mays
  Clone ID: MRT4577_118247C.1
cgaccgtcttccacagcccagctcacgcacaactttccttgcccttttcttcgactctaccccatctcgcgggcatgggagaccccacccgcgcggggagcagccgggctcgagatcgcacccgctgcggtgcgggcccaagcgggagctgtccgcgtatattggcgcgcgacgacccacgcgggggcgctggaacctcgggcacgcttcacgtacggcgccgaccgagcgaccccgcgggcgcaggcgagctcgcgcgctcagtcgcgcgcgcgcatgccgctc

SEQ ID NO: 20006 - DNA, 407 bp, Zea mays
  Clone ID: MRT4577_118248C.1
cccacgcgtccggcgcgccgttcatggtgaacgcgtacccgttctacgcgctcgccaggagcggcagcctcgacttcgcgctgttccgggtgaacgacggcgtcatggaccagggcaccgggctggtgtacggcaacatgctggacgcgcagctcgacgccgtgcactcggccgtcaggcggatgggcttcggggacgtcgacatcgccgtgtcggagaccgggtggccatcggccggggaggactgggaggtcggcgtctgcgcggacctcgcccgggactacaacagcaacgccatccgtcacctcggctccggcgtcggcacgccgctcatgcccaaccgcaccttcgaggtctccatcttctccctcttcgacgagaacctcaagccaaggccggtgtcggag

SEQ ID NO: 20007 - DNA, 263 bp, Zea mays
  Clone ID: MRT4577_118249C.1
cgtgtccctacgcaggttttgggaattccctggcatcccccttttaacttccgttggataacattcccgttcttgccaggtggggtctttgctaaaaggccggaacctatatgccttctgaaaatcggcccaacctgaatgtctaatgggacccgctctggaggggaccttctaccgcggcggttgtgttggcttcccccaaggggaccgatacatttgccagttccctttgggtcctgtcctttgggttaggttcctccctt

SEQ ID NO: 20008 - DNA, 1339 bp, Zea mays
  Clone ID: MRT4577_11824C.1
ttagcgttgtagtattagtagcatcattattgcatgcgactgttttctctttatttaatcagtattgtgatactcttaagttgaccaagaaaacttagtgccttcaaaagtttatcaatggaggctggcaaaaccgctgtaattgctgacataactgtagtcaggtcaaatgaagtctggtgatggtctgcttcactcctgttatcttaggcagtgtttggttccggactcagctgggataaaattgccctatgcctgggaccgttcgtgcgggaactggtggggagcttacatgttcatcatttggacagaaagcggcggtgtgggagccgatctgtggtatctgtgaccgagcgaaacaagaacttgccttcgagcacagtgactactagcaggctatggggcatagttgtattcagtattaatattgtcagtccgtgtgagcatttcatggcatgggagattatgcggtatgggtccttgtcttgcaaagtaagaggttgtatctgtagtactcttagtatatatttcagcattcatgccgggggatcatgccatgtcaacccctacctggaaaagtaacttcttttatgcacactacctggcttgagttaatttcaacatgttttccgatcaacatgacgtggatacatctagacaacagctctcattgctccaaaatttgacaaaatatcccctgattcttgcaggtatgccctatgtgcagcgcagaagtatcaacctcgggtaacaaggagccatgactgctcctccgatggctatcttgggaacttggtgggaataactagcggcatcactgcagcatctgtattgtcgaaacaaaagcagaaaaaacggtctacatacatgcaaggagatcaggatataatcctcttgtcagtctaaagttctgcccttggttccctgctaactggattgattggccttgccgcttattatctcagttccctatgaacgccttatggctgttgtatgatccataaattatgctaattatattatattgttagtcattcttgggcatttgatgggattaactagcggcaccactgcagcatctttatgcttcaagcaaaagcataaaggaacgtcttacatacatgcaaggagatcaggaaataatcctcttgtcagtctaaagttttgtcctggttttctgctcactggatttattggccctgcagcttatatggtcttagttcccttcggacgccttatgatccataaaacatgccaattatattatattgttagttattctttttactgatcgcatgatcgtcgtatatatttgcttgttggctgctcgcgatctaga

SEQ ID NO: 20009 - DNA, 687 bp, Zea mays
  unsure (1)..(687): unsure at all n locations
  Clone ID: MRT4577_118250C.1
ctacgccagtgggcaagacaaccgggnnaggggnagtctgnatnncggtcatttaaatttcctggacaacccggnaaggnnggagggcatnngcattnnnctctgctggnannncctctcnnnaactcggttcgtggnatnnggatcgtcacaattacatcgtagcctnnataatttagggaccgtaccgtacgtggcgtgagcggtgagcgagnnacgagnacnnagcggcccgnnatcccgtcttttaggctacgnnnccatggnncaaagnaagnnaaattagcttngccgnagnngtagcncgtatcgtttgaggggtcgagcccccgcggctttctttgcttcaacggcactggcgccccggcgggtgcccgatttacgtgggnnnactcgcaccgtgggccccaccgcgggtcactttccgggagatgaagcacgntaccaaggaagcacctggggcactgccgcggntgaccattccctgccgccggtaggggcgaagtcgcaagtcgttcgcccctgctttccacgccgcctgccgctgccctcttttacggaaggtacgttggttcaccggttcgaccgacgaacggggtaaggcgctccgcgatcgnnntgtgctggctgcatgcttgctgcttgctggggggttggtttgtggtttcnggaatggtaggggcctgg

SEQ ID NO: 20010 - DNA, 573 bp, Zea mays
  Clone ID: MRT4577_118251C.1
ccctacgcagcgagaaccctagcccgcacgccaaagccaaatcctaccgagcccgaaaatttccaggcggtgtcgcttgccgccaatcgacttgattgcgagcgatctcgctccttgcgtatcttgctgggcggtggtacgagcgcgggcactcgctggacatgcaccagcgcttgctgtaccccccaccggggacgcaccagatccattcccccgtcaacacgccggaggcggccgctaaggtgaaccaaaaataggaccacatcctaaggatgaatgagacgaagccggccaggcatgcacccactcacggggcgacagtcaaacattctaagcacactcctaccacgacaaagctggaatatttcataacaactaggccgggtaccaaaacagcacaccacgaacacggttagcaggacatgaagaaggaactcttagaatagcacgacacctcctctttggtacataccaatgcgcgactcttctccagagctcacaggacagtgggcctagacataaggtagaactgtacaagcctatccaagctaggaatggaaacaatctacgctt

SEQ ID NO: 20011 - DNA, 334 bp, Zea mays
  Clone ID: MRT4577_118252C.1
attcggctcgagctaaagccctggtgacaggtttctttccgatacctccgttgacctggcagagggcggccactgggtgggcccgggcccgccagggcttgtcaacggcgagagccctttccgcagtgtttgggcgtctccaagactctgactggcggaaggcgtccaccaatatgccactgcttaaaagacctgctactttgatccggaacttgtcgattggcacacttatgcaaccaaggatgccatgcaggtctgatggatcattcatgagcatggatcaagagaacttgcgaggtgcgaacttaggaggactacccttatttcgtcaccg

SEQ ID NO: 20012 - DNA, 514 bp, Zea mays
  Clone ID: MRT4577_118253C.1
gaattcatctcgagacccgtctgatcaaccgcaacaccaccatccccaccaagaagtcgcaggtcttctccacggccgccgacttccagactgccgtcgagatcaaggtctaccagggcgagcgtgagctcgtcaaggacaacaagctgctgggcaacttccagctggtcggcatcccccctgcccaccgcggtgtcccccagatcgaggttactttcgacattgacgccgactcgattgtgcacgtgcacgccaaggacaagtcgaccaacaaggaccagtcgatcaccattgcctcgggctctggtctgtcggactctgagatccagcgcatggttgacgagtcggagcagtacgccgagcaggacaaggcccgcaaggacgccattgaggccttgaaccgcgccgacagcattctgaccgacaccgagaaggccctgaccgaccacgccgacaagctggacaagaccgagtctgaccagctgcgcgagaagatcaccgagctccgcgagta

SEQ ID NO: 20013 - DNA, 552 bp, Zea mays
  Clone ID: MRT4577_118254C.1
atccaccttcatcgtttctctataccgttgccttcgcggtctctttctgcctcgctttcttcagcatgtgattcattcttctctgctcactccctctgctcatggccgacaccagggatcgcgaccggcctcaagggtcctcccacaaggtctatgctcacgatcttctccgccggcactccaggtcgcagcgctaatgatcttcagcatcctccaggtggcgatcgacgccccacaggacctcctccgacgcccccgactacctcgctgccgagctcgaggatctagatgctgaggtactccagctagatggaaactggggacgttgacgaaataataccctcatgggcccacggcgaatccaactacgctgccgcgacagacgacaaactatgccgatggctacgcacggagactttcctacgaggtggaggcatgcccaatctcgctaatctgctagcagccagagacctggaggtcgccgaggctatgtatgacagagaagatgagcactacagcgaccacggctatgctatcatgagcagtggtgac

SEQ ID NO: 20014 - DNA, 352 bp, Zea mays
  Clone ID: MRT4577_118255C.1
ctcatcgatggcagtggatctcatcccaccggcatcagaagatctcggtcggtgcgtgatttcgatgggaatgtgcaacccaatcaacctgtttgatacccctgcactgactcgactgccaggggtctccccgggctctctccaggcgccgggattcctttcctgtggaatgtccgcggatgtcagggtcacagatttgacactgacatgcgttggcatgaagggcatgtccggaggtcctgtcgtcaacaagcgtggagtaattgggatgaacacatccatgtctcaagatgagaaaatactgtttgctgtgtcctccacgactataatacaactgctaaagaagtgggcc

SEQ ID NO: 20015 - DNA, 260 bp, Zea mays
  Clone ID: MRT4577_118256C.1
tttttagaaacacaaacgggggtacctgaaccaaagatggcgtgtgtttatccaaccctcgtttcactcccgtgggtccattccaaggatatattcacacacacaaaaataacaaacaaacataatcaacagaagcgatgcggtatttgtttggcaactggatatccacaaaaacaaattttcattgatgatgacctttttttcccctatcacagagaccccttcttgtttgcctttgatgaccttaaagcttcggtcgg

SEQ ID NO: 20016 - DNA, 771 bp, Zea mays
  Clone ID: MRT4577_118257C.1
caagcctcgctcgaggtttgcaggcgcagcgcaggcaccgtccaaggcaactgggggcgcaatgtcctgagagttagcagtagtccgttttgccctggcgcggggtgtgcgattcaggcgagatcgagcatgagggcgtgcgcgctccccctcgtcctcctcgccaccgccgcgtccttcccactctccacctccaccgacaccctcggcacgtccgcctccatcgccggcaataaccagacgctcgtctcggccggcgacgtcttccagctcggcttcttcagcccggatggcgccaggacgtacctcgggatttggtactacaacatcacggtgcgcaccatcgtgtgggtcgccaaccgccagagcccggtcctcagctctccggccgtcctccggctctccgccgccgacggccgcctcctcgtcctcgacggccagaacggcacggtgtgggcctcggcggcgccgaccaggaacgtgaccgccggcgccaccgcgcggctcctggacagcggcaacctcgtgctcagctcggacgggagcggctccgaccagagcgtggcgtggcagagcttcgactacccgacggacacgctgctcccgggcatgaagctcggggtggacgccagggccggcatcacccggaacatcacggcgtggcgcagcgcgtccgacccgtcgccgggcgacgtcaccttcaagctgatcaccggcgggctgccgcagttcttcctcctccggggcaaggcgaggctgtacacgagcggg

SEQ ID NO: 20017 - DNA, 1157 bp, Zea mays
  Clone ID: MRT4577_118258C.1
ggtacccctcgaggccggccgggaaagccactttctttctccatcactccagccatccccaaccccaactcccttcactgtatatatgatacatccatccaccattcgtgaggacagcagcatctgtgcgtctcttccacgagaggcaacctaccgtatagtactgccgacatggtgctctccggcggcctagtcgtgccgtggctcgcggcggtggccgcgctggccatcaccgccgccccgctcggcgccgatgcctacaagaactacaccgtcggcgacgacaagggctggtacgacggcctcagcctgcccggggtcgactaccaggcgtgggctgacggcaagaacttcagcctcggggatttcctcatcttcaacacggacaagaaccactcggtggtgcagacgcggaacgtgacgctgtacgagagctgcgactacaacgactcggggcccgacgacaccgtcgagtgggccgccgcgccgccggagttcagcaaggacgccgtcaccgtcgccgtgccgctcctcgacgagggccgcgcctacttcttctcgggcaactacgacggcgagcagtgcgagagcggccagcgcttcgccgtcgacgtggcccacggccagggcctgccgcctgacctcaggccgcccgtcgccgacgcgccggcgccctcctccgcggggcccgccgacggcgccgccgcgctcgacttcagccaccccaagaacgtcaccacgccgagcgcgacggacgatgacgacgagcaactgggcggtggctcggcctcctccagcctcaggtccgctctgcccgtgaccgcgacgctgctcatcaccttgctcttcgcgttcgcggtgtaggtggcatgcgttagtttcgcttttgtttgtgctgctgctgcttgggcctcataatttgtttgtttaatgcactagtacagttgaagggtttctctgtatagggagagagatgagatatgtttagtgctgtagtagcgcacttgttagtgaaatgctttcacttgtatattctggctgtttatttggtccgtaccgtgctccgtagtaatggatctcgataaaataataattatctcattctttggaaaaaaacacaaaaacccaccgatacaaatcccacaaaaggcccctta

SEQ ID NO: 20018 - DNA, 240 bp, Zea mays
  Clone ID: MRT4577_118259C.1
cccttggcgtcctgctcctccatgggatgggcccctccctgcacctcccctccaggcctatggcactcgtgctctctctccactgaatctcactccctcacggtagcagcaacaagcaattttttcctccctctgctgtccatggcgagaacctcctctacccttcttcttccatggatggcgctcagcagaagctccatggccagcgccccttccctgctcgacccctttcccactgct

SEQ ID NO: 20019 - DNA, 160 bp, Zea mays
  Clone ID: MRT4577_11825C.1
gtcatcttctagcctcccaccggcgcactcatggcttatgtgggcggcatcgccaccgccatcaaccgcagatccgaggtaaaccaagaaatcccaatggccggcgagcaggaaacctattatacagacgacctcaacgccttcattcccgaggccagcc

SEQ ID NO: 20020 - DNA, 171 bp, Zea mays
  Clone ID: MRT4577_118260C.1
cggctaacaggggcccgagctatggcttaagccgagacgtgcaggagaagatcgagcagacgtatgatgcggccctggagaagaagctggtggactggatcatcctgcagtgcgccgaggacatagagcacccgccccccgagcagccccagtttcagaacatggttaatg

SEQ ID NO: 20021 - DNA, 434 bp, Zea mays
  unsure (1)..(434): unsure at all n locations
  Clone ID: MRT4577_118261C.1
ataaggaaagctggcacgctccgcagagcatccggaccggaattatatcacaggccatacgagctcacacatctgcggccgacatcaactcacacacaggctcctctcccccgttgcgcaacagcgctgtaccccactccacgccccctgggcgcaatggctaaccttactctagcacatatcatcatgctggccgaggcagccttcccataagtcagcaccgagagccacctgtatctcaaactgcgcttgctctgctctgagcaactccaacaagcagtgccaaagaactgatgccgagtgaatgggccaggacccggatcagaacttccttgacctgtctggatgcaaccgncgcgcgctatacggnggagggtacataagctacagcacgctgcgggggaacaacttgccctgctcccgccgcggcacca

SEQ ID NO: 20022 - DNA, 292 bp, Zea mays
  Clone ID: MRT4577_118262C.1
cccactcgttctcggactcgtgttcgtactcttaggaaaaacaaataaacagaacatatcgggactaagggaactaattctgcaccaaaacaaattcaattacattcatacaccatatactaaaacttatacaacatccttccattctaaaacacccatttttacaccagtcatttcctacttattctatttataatcaactcatatatcttaacttaattaacaaaaactttccaccgctttaaatgatacaaccttacgtattcctacctaataccccctaactcttata

SEQ ID NO: 20023 - DNA, 374 bp, Zea mays
  Clone ID: MRT4577_118263C.1
atcttatttttctttttgtaatatttgttttattgtttcataaaacatcatgcccctaaagggccaaacaatctaacatcccaaacacatctttggagtagttataacgattattaaaaaagaggggtagtattcatcttgaaaaagcctttccagttcaatggcggatgacaaacaacctttaccttttagtttaccctgactttgaagacgctaacttaagacgaagaccccacgcttacttaagacgacgacactaacttaatttttaataaccatgaccttgacgacaatcgaaaacgatcttctcttccccgtttatgaaaactggtgcttcaattggagctgggaggcccaaaaaaaaactccaagtc

SEQ ID NO: 20024 - DNA, 397 bp, Zea mays
  Clone ID: MRT4577_118264C.1
cccacgcgtccgcccacgcgtccgatcgtcgatgatgagcatcacgagtaggaagtcgggcttggtcctcatactcatcgtcgtcctcgtcgcctcgaaggatgaggcgagcattggggcggacgctgaatgcaacaaccttccagtcagctgctatataaagtgcctgcggccgggcgcctgcaacagctgctgcaagcagaatcacttcgtccgtggagagtgcattgggtgggactgctggtgctgcagagcctagctagccctgctctcatctgaccaatgcaaggagatttacttgtaataataatcatcataataatcaatggtaccagcatgcatcgatcgatggatttaaaaaaaaataaatattgatgattcaatacaaaattataaa

SEQ ID NO: 20025 - DNA, 186 bp, Zea mays
  unsure (1)..(186): unsure at all n locations
  Clone ID: MRT4577_118265C.1
ngcacgcgtccgggctatcagtggctgtccgatatacgtgagcaacgagcctgggcaggcaaacttanagctgctcaggaagctcgtgctccccgacgggtccttgctacgcacgcagcttagcgggcggcacacacgcgactgactcttatgcgacccacaacgcgacggctagagtttgctaag

SEQ ID NO: 20026 - DNA, 799 bp, Zea mays
  Clone ID: MRT4577_118266C.1
ccggccgggatgcattcacggcatccgcaccgaatgcctcctaagagtcctcatgggcgacaagttcgctgcacctccaggttttactgcttggggaccatttgtccgcgacaactatactcccatacttgtgacccgcaccgatatagccttagcagctgcagcgtttggtctggccaacttcttcgccataaccgcagctttcatcggcgttagacagacaaaatcatgtcggcgcccaaggactagcgcatatatctggatgatctggctggagattgctgcttcggtggctatctctatcgagtgtctgttgtatttgttgaggattataaggcctagcttttacttcttcatgtctgtcttgctatgctgggtcattcagattcagctgcttcctcaaattatcattaatcgtattcgtatcatcctccaagatcgggtaagaggacgacgtctcataataggtaccgcaatctatgtgactttgatcaatatcagcgttttcataatctggatacccgcacggcttcagatcagcccaagatgggttcatatcaacgccatctgggaccgcaccgaaaaagtgctgtttcttctcctcgacgcgtatcttaattggtacttcatccgcgttgtaatgcggatctggtcaagaatggcctgaccaagtacaaccgcttggtccgttttaacaagcgtatcattcgttgtctctctcctgctagacgttatgatcattggtgcgatgagtatccccaacggatttgtctacgctatgtttcacccgctcgcatac

SEQ ID NO: 20027 - DNA, 891 bp, Zea mays
  Clone ID: MRT4577_118267C.1
aagttaagcccccttctctctcacctcgatgcggcttggcaaccgccgatctgggccgggaaggattgttgagctcgccgcgggctaggtttccttccgtccaccatgacggggccaggctcagctccgacccaaacaccccctccagaacccaagcataacgcccgccgccccgtcctcctcctggggccgccactcctagccgtcgccgttgccctcctcttgggcgtatccaacaacccgttgccccgccgcttcatccgccttctctttggaacaaggccctccattctccgctcctcgccacctcctgacgcagcttacgaagcaaccggcgcggtacgcacaccatgtgttctatggatggccccattcgcctccggcggcgggtactgctccgaggcatggtcctacgtctccgcgcttgacgcgcacgccgccgccgctggcgctgggaaaaataatttctcgctcgcaatagcgcaccacggcgatctcgactcgccggagttctggctcggcctccccgagcgatctaagcacctggcgtacagactcgcctctgcgcgttgcgagctctccagtgccgtggtcgtctgccacagcgagcctggtgcgtggtacccgccgatgtacgaggccctgccgtgccctcccaccgggtacgacgatcctgtgttcgtcattggccggacgatgttcgagaccgaccgcgtctcgcccgagcatgtcaagaggtgcaaccagatggatgctgtatgggtgcctaccgatttccatgtgtcaacctttgtgaagagcggtgtggatcgtaccaaagttgtcaaggtggtgcaggctgtggatgccaatttcttcgatcctgccaagcatgtggctcttcctttgccg

SEQ ID NO: 20028 - DNA, 755 bp, Zea mays
  Clone ID: MRT4577_118268C.1
gggccggccgggaagccggcctcggcctatatgtacgtcttgcccccattttttcgacaagaacaagatcacacagtcaaaaggtgctacttactatacacgcacaaaaaacatcgagcaccatggcatctccaacccgtcaggcaccggcaccggcaccggcaccagcaccgccaccgttcctcgttactcccatcatgctgatgctgtggctgctgctcgcttcctcgcacacgcgcggcgccatggccgcgccgcccaacacggaggcgctctcggtgctgtgcaatggcgcgtcctacggcgccggggaccccttcgcgacgagcctggcgttcgtgctgtcggagctggtgtccgccacgccggtccgggcaggccacgacttctacgacatctccccgtacccggccgcgttcgcgtacgggcacgccgcgtgccgggcggcgctgtccgcggcggactgcgctgcctgcctccgctccgccgtgagccagatggacgcctcctgcgggcacagcgtcggtgccagggccgtgctcgtggactgcagcgtgcgctacgagcagtacgcgttcgtggattgattcgtcagtagatttctagctcctttcgatttgtatgtagttctgtgtggtttggtttctcgcgttggtgttgctgcccaaatgtatgctcgcgcgcaggtgatttgccaaacccttattttctatccagccacgcacctcccgaaaaaaaaaaaaaaaaagcggccc

SEQ ID NO: 20029 - DNA, 394 bp, Zea mays
  Clone ID: MRT4577_118269C.1
attattaacaaacgatgttttttgcaccatagggtctgacagggacttacacttcatttttggatgaaatagggacttggttgtttgccatagcaaacaaccttggaatgcgtaataccagatttttggtttaaaaattgatcagcaccctacaacatgaagaagggaccaaacctcagagggttcagcccaatagtttacgaattttcgggtctacacatgttttcattagttcaaaaacctaaagggttcaagccagcaaattcaaccccattaaagaacaaaggacttgtttattttttcaaataaacaaaggaaggcaaaacaatgaattgcttgttaaagggagtttttttcccaagtaaagaataaaactttggacttgcaaaaattg

SEQ ID NO: 20030 - DNA, 689 bp, Zea mays
  Clone ID: MRT4577_11826C.1
ccgcagcaagcgcagcgcatcgacaggagccgaagaaccgaagaggagatggcgtcggcgctgtcctccctgcctcctcatctaccgcaccgccacctacaactccctccgcgcctccatcgagcgccactcccgcaagctagacgccatgaagtccggctccacctccgcctcctccggcaccgccgcctcctccgcgcagcccgcatcgtcgcgggctaagaagatggaccgcgtcgagaccagcctcaaggacgctgcgcgggagctctcgctcgccaagctcaagtcgggcgccgtcgtcgctgtcatgctcttcgtcgtcttcggcctgctcaactccctcttcgagggccgcaccgttgccaagctgcccttcgcgcccatcccgctcgtccagcggatgagccaccgcggactgcccgggaacgatcccaccgactgctccatggttttcctctacttcctctgctccatgagcatccgaaccaacctgcagaaactgcttggcttcgcgccgccacgcgcggctgctgcagccggcggtggtctcttccccatgcccgatccgaaagttaattgaggctgatttccaagacgagtgaattcgtaccaaagatagcaatagtcgcccgggaaagactctgtgcgactgcaccagtatccgtacccaattcattttccacagc

SEQ ID NO: 20031 - DNA, 863 bp, Zea mays
  Clone ID: MRT4577_118270C.1
ttcatttctgtataagaagaatctcctcggcccggccgggaccgccgcactcctccacccagaccctcctccctcacggccccacccacctcgcgtcctcgccggaaccctaacggtgaccgcctgccgtgcccatcggcggcgatcgcgttgctgcgcccccgatggcgacccgcgcctccaagagttacctctgcgcgggcagttcgtcgttcgatgaccccgacgtggttgaggtgtcttcggccaccgccgcggctgcggggtgggcctccggccaccacaagaggaagcggagccaggttgtccctcaagaagtaattgaaattgatgatgatgatcctgatggagtcataattattggtgataaagcaccattggacaagaataagcaaactgttgtatgccctatggattggccaaagcatgccaagagtggttgggttcaggacatccctggcccaagcacatatgcttcaaaatatatcgattcctgtgttgacctgaaagtgtttcaagatgaggcagtttacaactattctgatgactgtccctatgcgggatttgaagactatatgtatgatgaagatgagtttgaggttgatggttatgatgctctgcttattgaaagtgagtttaaatttggtttgtctgccaagtttgataacctccatgctccacctgttctggaggcttctttaccatggatgcagaagactgctattgatattgcaaataagaccaaacccactaaggttgtagatgataaaatcgaagaaaaatacaaggccttcaaacgatttgatactgttgatgatcatagtgatcattattattcaaagccagcgtcgagaaaagttcag

SEQ ID NO: 20032 - DNA, 278 bp, Zea mays
  Clone ID: MRT4577_118271C.1
cggacgcgagggacaacgactcagctcgcgcacattcgcccagctgccaaaacccacacgcacgcgccgatcaacagcccaagctagcgcccaaagccggccggcggcctaacaagctcggtcttccagtccactacttaattggataggtcaagctccaccggcggctgaacgcgcgcgcgcgcgccagtggctttgtcgtcgaggcagctcgcagcggccctcgtcgccgtgctggtggcgctcgccttccatactgcgtgcgcgagcgccgcaag

SEQ ID NO: 20033 - DNA, 1911 bp, Zea mays
  unsure (1)..(1911): unsure at all n locations
  Clone ID: MRT4577_118272C.1
ccacgcgtccgatgcatatcatggaagcaggcgcagcttaagctcgactatggatatcatgaatcagctggagtcagaacctcaggtcactatcatttggaaattcaagtcctacatcaccagcatcatatgcccaaaatggtcttggaaactatgctggacgtgaacacgtatccctcgatgttcctagaggaaggtacaagacgactagtttgcctgttcctggtcttggttcaagcagaggttatcagttgttgggtggctcatataatggaaaccatgatatgatctcaaccaataccccacaaaacatggctggaattcagacaggaccagcttggcttgaaagtgacgctgaggcaagcacatatttggaatcaaaggatgaagttcatgattttgcaagcctgcgacatgcagttcttgaacaggagctatacagtatacaaagcctgttggctcaggagaaggctagagaaacaacatatcgacaaagattacaaacaccacaattgcaaggcctcatccaggagcaaaatcccccaatcgatctctgtggtcttcacatcagcgaggcaatacacgtcctgaactacgagctcaacaaccgaagaaagatcgtgagatcaaccggtcgccgactccaggttatgataatatcaagcgcccgcaccccagcaaggctgactgccgccgtcgagcagtatctcatggaacacggccttctgtacacgcaggtgcaaccaggcctgctccgcatcctgctctagtaatggaactggtcgtcctagctgttgttcacaactggatcagatgaaaaagaagggaaaaagaaaagaaaagaaaagataagttgacctgtacttttgtatatggcagagattgctagcaggatagtagcgttaagaacttaagatagctcatgtaacattcatgtcaggctttttgtcagcaaatgtatacgtcttaaaatttgggagttagggaatattctcgttgtctttggtgccggtggatgcacacggcatagcgtcttcacagaatcacaatcatattctcgatcacaatcttcggtgctggtggatgcttaagttctgtccctgctggtgaatacaaattgtgagtaatgcctggtcgatgcattagttcttcacaaaaaaaaacaaaaaaaaaataaaaaaaaaaaaaaaccgactagtttgcctgttcctggtcttggttcaagcagaggttatcagttgttgggtggctcatataatggaaaccatgatatgatctcaaccaataccccacaaaacatggctggaattcagacaggaccagcttggcttgaaagtgacgctgaggcaagcacatatttggaatcaaaggatgaagttcatgattttgcaagcctgcgacatgcagttcttgaacaggagctatacagtatacaaagcctgttggctcaggagaaggctagagaaacaacatatcgacaaagattacaaacaccacaattgcaaggcctcatccaggagcaaaatcccccaatcgatctctgtggtcttcacatcagcgaggcaatacacgtcctgaactacgagctcaacaaccgaagaaagatcgtgagatcaaccggtcgccgactccaggtgcaaccaggcctgctccgcatcctgctctagtaatggaactggtcgtcctagctgttgttcacaactggatcagatgaaaaagaagggaaaaagaaaagaaaagaaaagataagttgacctgtacttttgtatatggcagagattgctagcaagatagtagncgnaaaaacttaagatagctcatgtaacattcatggcaggctttttggcagcaaatggatacgtcttaaaaattgggagttaggggaaattctngtngtctttggtgccgggg

SEQ ID NO: 20034 - DNA, 232 bp, Zea mays
  Clone ID: MRT4577_118273C.1
cttaaatgttggagtaaatatgaaaaaaaatgctagtgagaaatgaaaataagacacatgcttgcgatgttaggaacatgcagacttgaacaaattttggtggtgtgggagagagaggaaggtattcaaacaatgggggcggagtaatacagatacaaaaaatgtaaaggattatgggtggatacaatacacaggacaagcagtttcttaggtagacaaaaacgatgacatg

SEQ ID NO: 20035 - DNA, 2026 bp, Zea mays
  Clone ID: MRT4577_118274C.1
tgggacctcaggccgggggcggcattctccgcacacgccgccgctatacgcgacggcgccgagcgcatcgccgccggcccctccctccctgcgcctgtactcagcccgctgcttctcagtccacttcatccacagctcctcttctctcggtctagagatccgtccgggcacggtagtctcgccttcgttttggaggtacatctgtccgtcagcgatgtccatagaagagaggaagataagtatgataagcaagagcactgcactaaatccaaatgcagaggaatttgttccttcgtcccttagatctttcagtgattcctccaagaaatcagatgcaactatgattgtctcagggtcatctaaagaatctggcacagacaagccagaatccattttacgaagtaactctgatgaagaagcacatcagtactggcagcaacagctccctgacgacatcacccctgatttcaaagtcctgggacaagacgaaagtcctggacctgacagtctatcactcacaggcctgtcgattaatgatggcattgacacatcaatatttcctccaaaccagacactggggcgtgcagcaccatgcttcaccttttatcagggacaaaccgaatacacgcccaaaaattaacttgtctggccctacttatatggacgaacggtcccaagccgcaattttgagtccaactgcaggttccatgagtccaaatgctgctccatgggtgaagactctaaggaatgggggacattataacacaagcataagggatgccagtcagtacaatggagattctagcattggagcttcattgcacaaccttactgatgcatatcatggaagcaggcgcagcttaagctcgactatggatatcatgaatcagctggaggtctgtcctcagtgtcctcatttgtcaactatgctacatgtctaaagttgttttgtcccatgtggccatgtttctcgtttctccactatgctgtttgtatcaaattgttcttaccaaaagctgcaccaactgaaactgtcatgctgctgacgactcaactatctatgtgaaagatcagcttaaagagatgctactgtgcacctaatgtatctgtatcactaaccagttctatcttggatgattggttctgaaattcataacatttcttaaattatgtttgttttttgttttaaatttccaagaatactgtaaaatgtcttattttagtgcaggatcgatcgtacatacactcgtattgctggatctatgttcaggcatagtgtactagtagctcaaatataggaaaatgcttatcctctagaaggcgctgaactaccccccctcctccttgtgtccaggtcaatctattcgctgtgactccgtgtactccggcttttttttttttttttttgttaaatgcccagtggatatccacaggcaaaagctaaataaaaaaatcatatgcctctattgtcctagaaacctacagcgtcagtatcgtagtaaatcacagagacgacataatttgcaaaaggcgctagcaataccaaatcctgaattgctatcacggaactagtatccacaaaccatgcaagcgacgacgtccatggccatctaacactacagcaaccaggcaattcaccaaaccaactgcaggatctaagacaatcagctggagcaactaggaaaggaaggccagcgggcggtcaccttccgcgtgatgccgacgcggcagccagttctagttctcgcctggttaactcctccaaacaccttggatcgcgcggcgacggcggaggccgccggcgaggagacagagaaggcggcggcggtggccatctccgggtggcgagtaagcagcggatcggaggcgggagtgaggcgggtggcgtgccgctggcctgctgctgcactgaagaagggaggagagatccaggatgggatatcccgcccgtcgcttgcggctgtggggagatgaaggccgagcggaggggagcggtgcggccgggcgcggaggggagcgggtggat

SEQ ID NO: 20036 - DNA, 410 bp, Zea mays
  Clone ID: MRT4577_118275C.1
gggtacctcgaggccggccgggatatcccatcctgatctctcctcccttcttcagtgcagcagcaggccagcggcacgccacccgcctcactcccgcctccgatccgctgcttactcgccacccggagatggccaccgccgccgccttctctgtctcctcgccggcggcctccgccgtcgccgcgcgatccaagggggttggaggaggtaaccaggcgagaactaaaaatgggtggcgcggccgcatcccccggaaaaactttgggccgggcctggagggccctggcagggaaggttttccgtttggaaggagggccaagggttcctcaaaacccatttctgggggtttctgaggcctttaaagaaaataaaagggaagcttgaagctcaatcctgggggttgggggggg

SEQ ID NO: 20037 - DNA, 840 bp, Zea mays
  Clone ID: MRT4577_118276C.1
ggccggccgggaaaaaaaaaaaaaaaaaaaaaaaaaaagcgcagaaagaagtgggacagaaaatcaattgggcgtagggcgaagcaacaggtgaagtgtcaacgtgtggctgcaatctgcctccgcactcactccacgcacacgccgccgctatacgcgacggcgccgagcgcatcgccgccggcccctccctccctgcgcctgtactcagcccgctgcttctcagtccacttcatccacagctcctcttctctcggtctagagatccgtccgggcacggtagtctcgccttcgttttgggcacaacgaacaattactctagaagagttgtactctttggtgtgccgtactctctgtaacaatcttaccaattaccattcttgagaagaggtacatctgtccgtcagcgatgtccatagaagagaggaagataagtatgataagcaagagcactgcactaaatccaaatgcagaggaatttgttccttcgtcccttagatctttcagtgattcctccaagaaatcagatgcaactatgattgtctcagggtcatctaaagaatctagcacagacaagccagaatccattttacgaagtaactctgatgaagaagcacatcagtactggcagcaacagctccctgacgacatcacccctgatttcaaagtcctgggacaagacgaaagtcctggacctgacagtctatcactcacaggcctgtcgattaatgatggcattgacacatcaatattttctccaaaccagacactgggcgtgcagcaccatgcttcaccttttatcagggacaaactgaatacacccccaaaattaacttgtct

SEQ ID NO: 20038 - DNA, 1045 bp, Zea mays
  Clone ID: MRT4577_118277C.1
ctatgcccaaatggtcttggaaactatagtaatgaagcttttggtctgccaaacagtccatatagatctcattcagctatactcgcagatgatattgtttcaccttcagctggacgtgaacatatatccctcgatgttcctagaggaaggtataagacgactagtttgcctgttcctggtcttggttcaagcagaggttctcaggtgttgggtggcccatataatggaaaccatgatatgatctcaaccaataccctacaaaacatggctggaattcggacaggagcagcttggcttgaaagtgatgctgcggcaagcacatatttggaatcaaaggatgaagttcatgattttgcaagcttgtgacatgcagttcttgaacaggatagacaggcttttctgatgggaaacaaccctttagcaaaggatctaacattgaaggagctatacagtatacaaagcaggttggctcaggagaaagctagagaaacaacataccgacaaagattccaaataccagaacttcaaggcctcatccaggagcagaatcccccaatcgatctctgtggtcttcacatcagcgaggccatgcacgtcctgaactacgagctcaacaaccgaagaaagatcgtgagatccactggtcgccgactccaggctatgatcatatcaagcgcccgcaccccagcaaggctgactgctgccgtcgagcagtacctcatggaacacggccttcagtacacgcaggcgcaaccaggcctcttccgcgtcctgctctagtgatggagccggcctagctgttgtcacaaagacgagaaagaagaaaaaaaaaagttgtacttttgtatatggcagagatggctagcaggatagaagcgttaagatagctcatgcattcacatatcaggctttagcaaatgtatacatcttaaaatttgcggagttaggtctttggtgctggtggatgcataaggagatagcatcttcaaaatcatgttctcgttcacaatctttggtgtggtgaatgaaaagcgccgttgttcct

SEQ ID NO: 20039 - DNA, 125 bp, Zea mays
  Clone ID: MRT4577_118278C.1
aagccgtcttttctaaccccaagaccagccagccggccggcgttatttgtcattagattaggcggtttatttacccgacccgttcacaatccaggggctaaaaaatcaaaaaaagcccggcccgg

SEQ ID NO: 20040 - DNA, 1963 bp, Zea mays
  Clone ID: MRT4577_118279C.1
gcttattcttgctgtaatttcctttgacctgattgtttagtcgtgttgaagaagtagtatctgtggtagcatggccatgagaagccagtgattttgagttttctttgtcgttatttttctaagttagttccgcttaatatatcatgatcaaggccagttatttaattcttagaagcggtctgtgcttctgttaagtttctatttgcagaaatctagcttttactaccatgcccaattatgtctaataggcacggagaacaatcactttagaagacttgtactccttggcgtgtcatactctttgtaacaatcttaccattcttgagaagaggtacatctgtccgtcagcaatgtccatagaagagaggaagataagtgtgataagcaagagcattgcgctaaatccaaatgcagaggaatttgttccttcatcccttagatctgtcaatgattcctccaagagatcatatgcaactacggttgtctcagggatatctaaagaatccagcactgacaagccagagtcaattttacgaagtaactctgatgaagaagcacatcagtactggcagcaacagctccctgacgacattacccctgatttcaaagtcatgggacaagatgaaagtcctggacctgacagtctatcactcacagacctgtccataaatgatggcattggcacatcaatattttctccgaaccagacactgagcatgcagcaccgtgcttcgccttttatcagggacaaactaaatacacacccaaagattaacttgtctatcccaacttatatggatgaacggtcccaagccacaattttgagtccaactgcaggttccatgagtccaaatgctgctccatgggtgaagactctaaggaatgggggacattataacacaagcataagggatgccagtcagtacaatggagattctagcattggagcttcattgcacaaccttactgatgcatatcatggaagcaggcgcagcttaagctcgactatggatatcatgaatcagctggagagtaaagtcgatggacgacgcagtcagaacctcaggtcactatcatttggaaattcaagtcctacatcaccagcatcatatgcccaaaatggtcttggaaactatgctggacgtgaacacgtatccctcgatgttcctagaggaaggtacaagacgactagtttgcctgttcctggtcttggttcaagcagaggttatcagttgttgggtggctcatataatggaaaccatgatatgatctcaaccaataccccacaaaacatggctggaattcagacaggaccagcttggcttgaaagtgacgctgaggcaagcacatatttggaatcaaaggatgaagttcatgattttgcaagcctgcgacatgcagttcttgaacaggagctatacagtatacaaagcctgttggctcaggagaaggctagagaaacaacatatcgacaaagattacaaacaccacaattgcaaggcctcatccaggagcaaaatcccccaatcgatctctgtggtcttcacatcagcgaggcaatacacgtcctgaactacgagctcaacaaccgaagaaagatcgtgagatcaaccggtcgccgactccaggtgcaaccaggcctgctccgcatcctgctctagtaatggaactggtcgtcctagctgttgttcacaactggatcagatgaaaaagaagggaaaaagaaaagaaaagaaaagataagttgacctgtacttttgtatatggcagagattgctagcaggatagtagcgttaagaacttaagatagctcatgtaacattcatgtcaggctttttgtcagcaaatgtatacgtcttaaaatttgggagttagggaatattctcgttgtctttggtgccggtggatgcacacggcatagcgtcttcacagaatcacaatcatattctcgatcacaatcttc

SEQ ID NO: 20041 - DNA, 387 bp, Zea mays
  unsure (1)..(387): unsure at all n locations
  Clone ID: MRT4577_11827C.1
gttattaacccaaagaaacccgcggaccccggggggctttttaagacctgttcgggtttttcaaaccccancaaatctcaagaccaccgggacgcaaacatgtccacagattcttgagctgacgttataggggggggtgaaggggcggtacaccagattatgagaaaacacaatataacagggcctagggtccacccgaggtgagcaaaaaggggggggggaaatactttcacaaacagagaaggggggggataaatatattgagaaaggcatgggacaaagcaaccccccttcctccccaacccaaggaaagggatggaatggccaagggggagctggacaaattggggggggggggcccctctcgccgggggaaaaggggggggg

SEQ ID NO: 20042 - DNA, 318 bp, Zea mays
  Clone ID: MRT4577_118280C.1
aaacaaatccatttataaacaaacctttaaaccaaaatgtttttggcctcaagctcattgcatgggtcatgcctccatagggggggtatttttcactttgggacaacaatattttttgtagactaaaatacaaccctgtccagcatggcttctaggggctgaactatgtttgatgactttaaatttgaaacatgcttttccaaatgcttttttgtgttttgcccgcccccatttggttttacaaggtttttaaggggcaattcgtccttctcctgcactgccttgtgtgtctttatggcttggtttaacatttcctgg

SEQ ID NO: 20043 - DNA, 186 bp, Zea mays
  Clone ID: MRT4577_118281C.1
cccccgcaccctctctcagtttttctggccctgcaggctgggcgacttcctccgctccgctccccacgcgctcccgatcgggcgatctttgcatggcagcggccgctgactccatggtgctggccgatctctgtaagcttcctgagtcgcgtcctcgccggcatggccgcctcgcctaggcgggcc

SEQ ID NO: 20044 - DNA, 595 bp, Zea mays
  Clone ID: MRT4577_118282C.1
ggccgcgctacgcccgcgctgcccgcggtcggggggtgaccagaacctcttcttcctcgaccccgtcacgcccttcaagttcgacaaccagtactacaaaaacatcctcgcctaccgtggcctcctcagctccgacgaggtgctcctcaccggcagcggagccaccgctgaccttgtcaagctctacgccgccaaccaggatatcttcttccagcacttcgcgcgctccattgtcaagatgggcaacatctcgccgctcaccggggccaatggcgagatcaggaagaactgcaggagggtcaaccacgcctgatcgattattatgtgacccctctactgtttggttgcttggtttgttgattcagtggccccagcttcctgaggtttattatttgtttccttcaaactctatggatttcccttgtccatctgttgttttctttcaaaattgttgaccttgttagaggaatccatttcaattgcagcacggattggaggtgcattataattaatgtttgttatgtatcagtttccggtcaagaaaatttggtgaataaactagaatttttagccagtaaaaacccacgcgtacgcg

SEQ ID NO: 20045 - DNA, 357 bp, Zea mays
  Clone ID: MRT4577_118283C.1
gccatatgtgagcgtgacggcgccgcgcccccattaggtgggggggcgcgcacggacgtcacgaaacgcgttgccgatggcgctctctgctccgcagattttgacgacgccgtcgatgacagagcatagcccatgagcacgccgatccctaggaaccagagtctgccacaccacgggggagactgcactaagggtaagattgcactcggacgatgaagaagtgctgctcctggaggaactccatatggacatagttggtgcgaggggcttcgcatgacaagctggcgcgcccatcccgtagctggccatgcactatgccatggtctggcgtaaggagagaagatgaaggtgccagca

SEQ ID NO: 20046 - DNA, 553 bp, Zea mays
  Clone ID: MRT4577_118284C.1
ggggtggtaatgggttctagattttacactataaaatttaaggatcgaatcggattaggatcagactgtatttctattcatttttgaactaaaattatttaagagccctaatttattgtgaagaaacatttttatcatgatccattaccacccctaagtgtatctcctttgcttcagtaataaacagcgagaccctagctaacatgtcatgacacttggctaatgagccagtcgtaccataatgcttatgcacaccacagaggaatttatatttgtcgactcaagtagctcttatcctttaagagtccaatgcattctaaaactccaacttttaggtcaatgatggctcttgcttatccaatatgcaatgtgtattgactcctgaaacagaaggctatgaccagactctgtcactactggagcatctgtactagttgagggagttgttgcaagcagccaaggcggtaagcaaaaagtggagttgaaggtttcaaagatcaccgtgattggtaagagtgaccccacatcttttcctatacagaagaaacgggca

SEQ ID NO: 20047 - DNA, 241 bp, Zea mays
  unsure (1)..(241): unsure at all n locations
  Clone ID: MRT4577_118285C.1
gggggaaaaagtatcactgacaagagcaagttctattcttaacctgagcttttcatccaccttgtctccaaacaaggggacgaacacgttctccatcattgacaagatcatanagatgagtaagtcccatcttgtcaacaatttttataccattctcagttccggtactaatgaatttattggaaatcattggtgcccgagatcatatgtccatgatttgtgacttaggagtcaatttata

SEQ ID NO: 20048 - DNA, 3374 bp, Zea mays
  Clone ID: MRT4577_118286C.1
atacccggccccgtccaacctccgtttttctcgccgccgcgccgcgccgcacgcccccgcctccgcccgcccttcgctcgcccccgcctacctctgcccgcgatgctacttcgatgccgctccttcgatcccccgtccccgcgatggccgtcacccccacccctcgcgacgccgcgatgcccgcgcttgctctgccttcttcgctgcgtctcgcactcgtgacgctgcccccctccccaacctgctccgccccctccgcgtggacgtcgtcccccgtcgtccttgcctcgccgattccctgctccgtcccaccgggcatccccggggtgcgcacccaaaaggcctccccgatgtcctcacttcctccctccaacgcctgttgcctggtctcactccacggcatggatatggaatggtggatccctcactgaggccctgaatcccgaaaccaatttggcctttcttctccggcctcccctctgaacgacattgcatccaatcagttggcggcgtacggtgcagcgccgaacgatcaactgtatcatctactcggttcccatgtcgagattcgtttagctatctccatggatctgcaggcatgggaggggatggtgaaaatgctaaacaggaggatgagcctatagtacttaagtacaccgtaccagcgagaaactattaacagttcgagaacggcatgcgaacaatatagatgggagcgttcgcaaggaatctccagcggggcgagaatccataccaccacgccagcatgaaccattatgccaacaattcagcgcctggggagccaagcggttgtacaccaacggcaagatgaacacgccttcatgatcctggaagcgcttatattcagggtcatcggagatctatggctgactaagacgcatctgtcatacaccagatgcacagaccagatttaggcccttcgtcggcgaggagtatcacaaggtggccgaggcgtgaggctgacggtggtgctggtagtccgcaaggaaccggatttggacgcgctctccctcgtcactaggtaagagacccaggagtgctggcaggaaaagatcgattttgcaatataattccacgcgtccgcccaatttactatgttacaccccttggcttccgatgaggtggccgaggcgtgaggctgacggtggtgctggtagtccgcaaggaaccggatttggacgcgctctccctcgtcactaggtttggctacaaatggataagtcatcaaatctcctgagacagtacttcagcaacttgcacgatcaactgagtacacgtcctttttccacagtcaggttgcaaagaaatggcttgatttttagaatgagacggcatgggcaatatggtgaagcggatattaactccatggtcgttgcgagttgcatcactaccaggcacaacaaagggtacagaaacaccatgagaatagctacactggaagagatcctgcacaagcttctgcggagcatcagtacactccccctaaggcaagacaaagtcaatgggatcgaggtggaccaaatgtgccaagccaggttccatcatatgttggatcgaggttatggctccacctttgcaccaactgcagcagcgcctacttcgcccccccaccccccatgcctggcagtgccaagcaaagcaagacttctgtagagttatgcgtccttgcttgctttcacatttgggtgtgttctgctataatttacggtaagaattgaagacaatgatgtcggcatccctccagacactggcatgcttctcaattctgtctgcccttatgatccgatctgtggagggaagcataccaatgccttgaaggagatgagtgagccattgaagattttcaagcagcttgatggcatcaaatctgttttggaaaaaaggaaagctattctgtctgaaaagattagcagagaagaaaggatgccggcgggggagacgagacatgctggagaatgggtaccattattactggaatgtgcaccagctgaagctgattgattgagcctttaaataaataaataaaaaggctggtaaaattaaacctgtatcagtggttgcaaccgaatggtggtccacgtgattccctgcaggatgaggcacctagctagctgttggattcctgcacgaggccaagaagaagccgtgcggacgatgcaccgaacgaatgctcgcatgaaattgaatgaacacacacacagggagggaatgaaggaaggaagctccggtattgatccgccggccgacagatgctgtctgatcaacactacactatgatgagtctatgacatgagtggagtggagggacggtgcacatgcatcttgggcagtctgcagtgtgcagcaaggacgagagcatgcggtttgcttttggcggctctattctacctgcaactgcaactgcaactcatcagcagggagggaaggtagaagaggagcaacatgtaggaggtacagtaacaacaagctagcatgccaagtaacacactactgttcctgtcgcgtacagtacgtccattctacgtactgggatctgggaatgggatgctggtgcagcagtacgtagcagagagccagcagcaccgggggtccagtccaggggcctgcctaccctcctctctataccgtctgcatcaagacgtgcatctaaaggtcaacagaaagaaagatgcatgcagctagcatcgtcgggccaccgacggtttgacaatgtgctccatgttggagagagactgattaataatgtatgcctgccttctcaccctgactttattattcttagcatttaaatcatgtactgtaaaaaatcaccaatatatatatgcactgaaagaggaaacgggcacacagtaccctttttatgtcgcaatatggtgaagcggatattaactccatggtcgttgcgagttgcatcactaccaggcacaacaaagggtacagaaacaccatgagaatagctacactggaagagatcctgcacaagcttctgcggagcatcagtacactccccctaaggcaagacaaagtcaatgggatcgaggtggaccaaatgtgccaagccaggttccatcatatgttggatcgaggttatggctccacctttgcaccaactgcagcagcgcctacttcgcccccccaccccccatgcctggcagtgccaagcaaagcaagacttctgtagagttatgcgtccttgcttgctttcacatttgggtgtgttctgctataatttacggtgattaattttcccctgcaatttggcaggcatacaaacattttctctctatttttctatccaacataattcatgatttaaataaaggaactatttcttaaaaaaaaatttaatctat

SEQ ID NO: 20049 - DNA, 201 bp, Zea mays
  Clone ID: MRT4577_118287C.1
gcggacagacgaacaactgatgaatgcgccagctgcattcccagataccaccagctaccgaagaaatttgactgtgaactacagtaaccaaattggtgcggtgggcctacaattctgcggaattggcttgcttgtgattttctatataaggcgggtagtaaaaccatcagattttcctgatcttggaacaaaatgtaaagg

SEQ ID NO: 20050 - DNA, 742 bp, Zea mays
  Clone ID: MRT4577_118288C.1
aattcggcacgaggcgtttttatcgccgccgcgccgcgccgcacgcccccgcctccgcccgcccttcgctcgcccccgcctacctctgcccgcgatgctacttcgatgccgctccttcgatcccccgtccccgcgatggccgtcacccccacccctcgcgacgccgcgatgcccgcgcttgctctgccttcttcgctgcgtctcgcactcgtgacgctgcccccctccccaacctgctccgccccctccgcgtggacgtcgtcccccgtcgtccttgcctcgccgattccctgctccgtcccaccgggcatccccggggtccgcacccaagacgcctccccgttgtcctcacttcctccctccaacgcctgttgcctgtctcactccacggcatggatctggaatggtggatccctcactgaggccctgaatcccgcaaccaatgtcgccttcttctcccccctcccctctgcacgacattgcctccccagtcggcggctgaggtgcagcgccaagtggccaagtgtaccatctactcggtaacaacctcctttctcgcaccgctgacaccgcgcatcatccacatccacgcctccgtgccagtagcaacatcgtcggctcccgctgccagatccaggtatccagccacgcccacggcccaccagaggccaggatccttccgtggaggaggcgcacgagagaagcaggcagatcagccaccaatgctgaaagtgggctaggg

SEQ ID NO: 20051 - DNA, 1497 bp, Zea mays
  Clone ID: MRT4577_118289C.1
atttgggtgtgttctgctataatttacggtaagaattgaagacaatgatgtcggcatccctccagacactggcatgcttctcaattctgtctgcccttatgatccgatctgtggagggaagcataccaatgccttgaaggagatgagtgagccattgaaggtgcgtatcttgagcctgtcgtcaggtattgaggcctccaccatgcacacgagagagacccattggttcctgttgactgagtcgcccacaaacaccattctcttgtttctcagattttcaagcagcttgatggcatcaaatctgttttggaaaaaaggaaccatattaaaaaggggaatttgtcatgatgaatttggcctttctgttcatgtacttagattaaattgagcattccattgaaagctattctgtctgaaaagattagcagagaagaaaggatgccggcgggggagacgagacatgctggagaatgggtaccattattactggaatgtgcaccagctgaagctgattgattgagcctttaaataaataaataaaaaggctggtaaaattaaacctgtatcagtggttgcaaccgaatggtggtccacgtgattccctgcaggatgaggcacctagctagctgttggattcctgcacgaggccaagaagaagccgtgcggacgatgcaccgaacgaatgctcgcatgaaattgaatgaacacacacacagggagggaatgaaggaaggaagctccggtattgatccgccggccgacagatgctgtctgatcaacactacactatgatgagtctatgacatgagtggagtggagggacggtgcacatgcatcttgggcagtctgcagtgtgcagcaaggacgagagcatgcggtttgcttttggcggctctattctacctgcaactgcaactgcaactcatcagcagggagggaaggtagaagaggagcaacatgtaggaggtacagtaacaacaagctagcatgccaagtaacacactactgttcctgtcgcgtacagtacgtccattctacgtactgggatctgggaatgggatgctggtgcagcagtacgtagcagagagccagcagcaccgggggtccagtccaggggcctgcctaccctcctctctataccgtctgcatcaagacgtgcatctaaaggtcaacagaaagaaaggtacccatgctgtgctagcagacacaaccaccgcaccaccaaccatgtttttttgtttagtcgatcctaatggcaaatcaaaccgtgggactcaacgacatgcatgatgcagatgcatgcagctagcatcgtcgggccaccgacggtttgacaatgtgctccatgttggagagagactgattaataatgtatgcctgccttctcaccctgactttattattcttagcatttaaatcatgtactgtaaaaaatcaccaatatatatatgcactgaaagaggaaacgggcacacagtaccctttttatgtcaaggc

SEQ ID NO: 20052 - DNA, 1211 bp, Zea mays
  Clone ID: MRT4577_11828C.1
gccggccgggaaagccaaccacctttccttgcggcagtagccccgaaaccccgttcgttgcgtagccaaatcgagatctccgtctcccccgtgacgaatcccacgcccacctctccccgacccggctggccgcagcaacagcgcatcgcaccgggaggcgggagccgaagaaccaaacaggagatggcgtcggcgctgtcctccctgcgctacggcgacagcctctcggtggtgggcatctccgccgcgacggccgtgctctgcgaggccatctcctggcttctcatctaccgcaccgccacctacgactccctccgcgcctccatcgaacgccactcacgcaagctggacgccatgaagtccggctccaactcctccggcgctgcctcctcctccgcgcaggccgcgtcgtcgcgggctaagaagatggaccgcgtcgagaccagcctcaaggacgccgcgcgggagctctcgcttgccaagctcaagtcgggcgccgtcgtcgccgccgtgctcttcgtcgtcttcggcctgctcaactccctcttcgagggccgcaccgtcgccaagctgcccttcgcgcccatcccgctcgtccagcggatgagccaccgcggactgcccgggaacgatcccaccgactgctccatggtcttcctctacttcctctgctccatgagcatccgaaccaacctccagaaactgctcggcttcgccccgccgcgcgcggttgctgcggccggcgggggtctcttccccatgcccgatccgaaagttaactgaggagaaaaatggaagacttattactgttgatgacaaatccttagcactagctcggactctgatcttctggggacttgagaagtgtctctgatgcatggaaatatgcacactttgaatggttatatctagattaaatctcggtatttcagcagtttaaatgaagggcaggtctggcgtagtggtgagagctgtcctcactcatcaggtctctccgcatttacggggaaagacttgcctcgatttatctcttctctagacccaactcggagtctccgacactaagtctgctctttatttcatcagtttatatgacttctctgttcgatttgttagagcaggaatcacatctacagttctgcaaaattttcatcaagggatatggagctataatctgatttttactgtcatgatatgccttacaactgaat

SEQ ID NO: 20053 - DNA, 204 bp, Zea mays
  Clone ID: MRT4577_118290C.1
gctcgaattcggctcgaggagactccatctcgcaccttatgatgaacctccttacattcgacctcaccgggggcactttgcaaagaagtctgcgaacaaacggctaacggtctgggtaggggacggacacagatggcaaccgccttgcggggatggaggtctttgctagcaggaagcccaagcggttggaccaagagtccaaaa

SEQ ID NO: 20054 - DNA, 608 bp, Zea mays
  Clone ID: MRT4577_118291C.1
gtcaggcactggtttttggtggctggcctggaactactgctgactggaccagtcttgatatcagggctgcaactgaacagataggaggcaggttccaggaccctccaagccaggcaatttttcaccagggtctcaaccaaacaagcccttgctttttgaggacttctagtccctttcgttgttggttggtttggtatgtagcagataatctacaaataaattactacaagacaaatcacggatagttacgtctgtatcttaaaatgtaaaatacaggggccccctctgttctagttcttttttttagatcaatacctgtgagacaagaaagcatttgtgttcgagttttggcatagattaactctactgataccaataagtaatttatatgtgggcatttagtggcaaagtttgagtgaaaaccccaaaaggattccaaagtgaatctagtctgcatatttttcacactggaggaatgatatgtaagaaaatatcgaatacagtgatattaaagtcttaaccaaactatcaatgtgttcgacatgtcatagtcatagctatgatttggtttactttttaataagaccatggatgactctgttgagctg

SEQ ID NO: 20055 - DNA, 784 bp, Zea mays
  Clone ID: MRT4577_118292C.1
agactacttatgcaaagaaaaaaacagaaattagtgttgaataatcatgtataaattcaaacatgcacatctttctaatgctagttctcctgcattacattaaaattgtttcgtttccttttttttactagtaactactgattaataagtttttcaaaaaattcttatttttgtgagtatcttgttctttcatgtttcactattttccaccaccctcatcatcccatgattgaattaacattatgtatgattcatttcccagtgcagcaccccatccaaatataaatctacaaatgaattattggcctgcgcttccttgtaatcttagcgagtgccaagaaccactgtttgactttattggttccctctcaatcaatggagctaagactgcaaaagtgaattatgaggctagtggttgggtcagtcatcaagtcacagacttatgggcaaaaacatcaccagatgctggtgatcctgtatgggctctatggccaatgggtgggccttggcttgcaactcatctctgggagcattactgttttactttggacaaagtgagccgcactagaacaaaatatagtaatatacattacttatttactttcgtgtatcaaactaaaatgagaaaattgtttttccatagttagatattaaaagagacaaagagtagtttcatggtcatttttattttgcgacctcttgatgacacttccattcttctgggcaatatcttgtgctactattagttgagtctcatctgctgtcatcctgggatggcatgctc

SEQ ID NO: 20056 - DNA, 443 bp, Zea mays
  Clone ID: MRT4577_118293C.1
ctcgtgccgggaaaaaaaaaaaaaaaaaaaaaaaaaagaaaaaaaaaaaaaaaaaaaaaaaaaaaaaaaaaaaaaaaaaaaaaaaaaaaaaaaaaaaaaaaaaaaaaaaacttttttccgttaaccccctggggggggggttttttttgtgggggggaaattgggcaaccgccgacccccaaagggaggggccccaggtttttgggaaccccttccaagggcctgggttccatcttttcccggaggggaccccccgtcaaaaggacttggtttaatactcactacgggggaaaagggaaaaaaaaaaacttgcccatgagccgcataggcccaggttacaatttgtttggcaaaaatttttccccaaagggggggggtttccagggggggaatgcccccaagggccgtaaacaaagggggactgttggtggaaaaaagggcaa

SEQ ID NO: 20057 - DNA, 436 bp, Zea mays
  unsure (1)..(436): unsure at all n locations
  Clone ID: MRT4577_118294C.1
ttgttatatcttattaataaaaagaataagcatctttaatccttttatccaccaaaaatacggaaaagtactgaaaaaaacctttatgggtccttgggtgatatactatcccttattaaaacccctttcaggccacnaaccttcccttcaaaccacccccgaaggggggggggggggggggggggggcacctacggcccttaaaaaacctagactttcccgagggggtatccatcaacacattccccctccctatttttctaaaaaataaaaattccccaccacagccccccttccaaacattattgcaccctaaatgaaaatttaaccccccccttaatattctccttaatcacctaggaatggtttttaacccccttctatccctattcactttcccccgcctaaacacccccacctttacttttttcccctac

SEQ ID NO: 20058 - DNA, 179 bp, Zea mays
  Clone ID: MRT4577_118295C.1
tgacgccctcatttcttttttttttttttatccatcgatcttttgtgggcttgctgttcggctcaaaatttaggaccaccaaaaggtgatgctggtgagtctccgagctagatgacctttgacatgggtaattaaccttttggaggagaatctgcaaaaactcttgggcgggattgtga

SEQ ID NO: 20059 - DNA, 344 bp, Zea mays
  Clone ID: MRT4577_118296C.1
ggccccccccaagagctaattttcaaaaaacaagggggtttaccggccttgcaatttttttttttcccacaaaaaaattaacccggcccccaaaacccggaacaattaaaaacaatgctggcccaaaaatgttttcccccctaatttcccgaccctattaaaaaaaccgaaaccctgtttccccccaaaaacataaaaggggggggggggcccaaaggcccccaaaggttggccccccagggcggggagccccttaaacccggccccccctggggggttaaaacaagggggaacccccaaggccctaaaaagggccaaaggttgggggaaaaccctttttaaaa

SEQ ID NO: 20060 - DNA, 162 bp, Zea mays
  Clone ID: MRT4577_118297C.1
cactaaagcaaaaacaggggagtgctgtagcccggctgacagccacccacaactacagggagtccaacaaggagcgcttcgaagagagcgacaagggcaagggcattacgggacggcaagaaatcctggacgccgatggctacatgagcgcctacaagaatg

SEQ ID NO: 20061 - DNA, 391 bp, Zea mays
  Clone ID: MRT4577_118298C.1
ttaccagtggcggagatcgcactgggccatcatggaggatggcttgataggcgctgtaggcgatgctctggcacagacacgcctggtcgaggtagagccttctcatgcggagatgactggagcctatgaggaaagcctgaagaggactctcttgtagggcaccaagagtgttgtggaactcatgtccatccacggtcagagtcgcctcgaacctcatggacgcagacacggatgagatgacctgcgacacacttactgatgaggttggggtaaggtgaccgctctctgtcgagcgaacggcggcagatgtgatagatggtctccgttgtccatcaggatagccacatcagtgtgctcgtagaggcagtgtgcggacaggacactggtgtgt

SEQ ID NO: 20062 - DNA, 536 bp, Zea mays
  unsure (1)..(536): unsure at all n locations
  Clone ID: MRT4577_118299C.1
ttcttgaaccccatatggctgaacccaagtcaaataatggcggggcggacgcgacggcatcgatgatgctccacggccgcgtagccattgtcaccggtggtgccggcggcatcggctcggccgtgtcgaagcacctgtcgtcgctcggcgcgcgcgtcgtggtggggtacatcggcgacccggcacctgctctgacgctgctggactactcctacccgccgctggcggagaccagcgaggcgacgttcgacgccgccttcagcgtcaacacacggggcaccttcctgtgctgccgcgaggcggccaggcggctggtgcgtgacggccgcggccgaatcgtgacgttctcttcgtcgggagttgggtctctgcgccctggctactcggcatacgcagcaagcaaggccgcggtggaggtgatgactaagatcctggcgcgcgagctgcgcggacggggatcacggacaacgtggtggcgccagggttcacggngacacccatgatgtacaccggcaagacggaggatgacatggagc

SEQ ID NO: 20063 - DNA, 1243 bp, Zea mays
  unsure (1)..(1243): unsure at all n locations
  Clone ID: MRT4577_11829C.1
ctcgggaacaatcaacaaatcaatcaaatatacgcggttcaagaagccgttgccgggtcccacggttatccgcgtatcccagcacgagcaggccagaaaagcccagccaagcggagccaacccggcccgcggcagtcaaccccccaactccgttcattgcggcaggccggcagccaaatcgagatctcgcccgtgctgaatcccaccactctcgccgacccggccgcagcaagcgcagcgcatcgacaggagccgaagaaccgaagaggagatggcgtcggcgctgtcctccctgcgctacggcgacagcctctcggtggtgggcatctccgccgcgacggccgtgctctgcgaggccatgtcctggctcctcatctaccgcaccgccacctacaactccctccgcgcctccatcgagcgccactcccgcaagctagacgccatgaagtccggctccacctccgcctcctccggcaccgccgcctcctccgcgcagcccgcatcgtcgcgggctaagaagatggaccgcgtcgagaccagcctcaaggacgctgcgcgggagctctcgctcgccaagctcaagtcgggcgccgtcgtcgctgtcatgctcttcgtcgtcttcggcctgctcaactccctcttcgagggccgcaccgttgccaagctgcccttcgcgcccatcccgctcgtccagcggatgagccaccgcggactgcccgggaacgatcccaccgactgctccatggttttcctctacttcctctgctccatgagcatccgaaccaacctgcagaaactgcttggcttcgcgccgccacgcgcggctgctgcagcccggcggtggtctcttccccatgcccgatccgaaagttaattgaggctgatttccaagacgagtgaatccgaaccaaagatagcaatagtcgcccgggaaagactctgtgcgactgcaccgatatccgtacccaattcattttccacagctcaccggtttgttgttgcgcaccggtgattgcaaacctgaaggttggcttatttattgcattgactgaaacaacgaacatgaattacctgctgggaggcagagaaatgtgcagcctaattttttcggccaaaaaaaaaaaaaaaaaaaaaaaaaaaaaaaaattttttttttaaaaaaaaaaaaaaaaagaaaagaaaaaaaaaggaaaagaaaaaaaaaagaaaaaaaanaaagggcctgtggggggttcccactgtt

SEQ ID NO: 20064 - DNA, 255 bp, Zea mays
  Clone ID: MRT4577_1182C.1
tttacgtttacgcatacatccggtgagggtgcggatgaagtcacttgatagtgacgctgaaatcctgactaggcgatgccgggaatccctcttattaagttatggaggcggaatacgtaaggcttatacgctccagggcggacttaagctgcagatgagcacgacgacccttatgtcctgaatgagagctaattctagtgacagcatcttctggagggattcgcaaatacgcgctttagttcagatgtgcattgg

SEQ ID NO: 20065 - DNA, 1184 bp, Zea mays
  unsure (1)..(1184): unsure at all n locations
  Clone ID: MRT4577_118300C.1
tgggtacctcgacgccggccgggccgggaggcaaacggttcacacgttcgaaccccatatggctgaacccaagtcaaataatggcggggcggacgcgacggcatcgatgatgctccacggccgcgtagccattgtcaccggtggtgccggcggcatcggctcggccgtgtcgaagcacctgtcgtcgctcggcgcgcgcgtcgtggtggggtacatcggcgacccggcacctgctctgacgctggtagccgccatcaactcctccgagcaccccggcgagagccagcagccgcgagccatcgcggtcgaggcggacgtgtccgacgcggcagccgtgaaggcgctgttcgacgcggccgccgcagccttcggcggggagctccacatcctggtaacgttggcggcggtgctggactactcctacccgccgctggcggagaccagcgaggcgacgttcgacgccgccttcagcgtcaacacacggggcaccttcctgtgctgccgcgaggcggccaggcggctggtgcgtgacggccgcggccgaatcgtgacgttctcttcgtcgggagttgggtctctgcgccctggctactcggcatacgcagcaagcaaggccgcggtggaggtgatgactaagatcctggcgcgcgagctgcgcggcacggggatcacggccaacgtggtggcgccagggtccacggggacacccatgatgtacaccggcaagacggaggatgacatggagcgatacatcgccgaggcgccgctgggccggctcggcatgcccgaggacatcgcgccgctcgtcagcttcctcgctagtgatgctggccactgggtcaacgcgcaggtcctgcgctgcaacggtggcaccatctagctagtactgcgtgcctactttttatggttgattagatgtattttcctcggagcataaatttaagcttgtggcgcagttatcgcttggcagttcattaatttatttaaagattgtgtcgtttattctattgtgtgtatttataatcaggctctatattattgttggatgtgttttggattaaaaaaaaaaaaaaaaaaaaaaaaaaaaaaaaaaaaaaaaaaaaaaaaaaaaaaaaaaaaaaaaaaaaaaaaaaaaaaaaaaaaaaaaaaaaaaaaaaaaaaaaaaaaaaaaaaaaaaanaaaaa

SEQ ID NO: 20066 - DNA, 153 bp, Zea mays
  Clone ID: MRT4577_118301C.1
gacccacgagtccacccacgcgtccgcgttgacatctgtttccgtgccgttactgttcactgcgcacatgagaacctccaggcaggtcccatatcggctgtcgaggactctgttgggctggcacgcttcatcattgaggaaaatgtcagcatc

SEQ ID NO: 20067 - DNA, 132 bp, Zea mays
  Clone ID: MRT4577_118302C.1
aaagactgtgataacgatgctgttgcgaaactgaatacgatcgtagaaaattgccctatggccagctgtgtttacaaagaacatgcccgtaccgagcgccctgtccaacagatggtcaaccataatggcgaa

SEQ ID NO: 20068 - DNA, 143 bp, Zea mays
  Clone ID: MRT4577_118303C.1
ttaaccccccgacccacgcgctcactacactatgaacgcccttttttatttttcttatcaaacttaagtttgattttcggaattttctgaatcttacaatttcacacttcatacaaacccactcaacaagtaaacattcaaag

SEQ ID NO: 20069 - DNA, 256 bp, Zea mays
  unsure (1)..(256): unsure at all n locations
  Clone ID: MRT4577_118304C.1
ccggnagagcgcgaggacctccgccgaagaggtcgcagcgatgcaaacgcactggtcgactaggctctcttctccccaaacgccggcgggcgccgatggggaaggacggcgagcgcgacaggcgctgggtccgcggcggagcgcgccttcggggccaacgttcacgccttgtcgctgtgtcggtgtcgcgactgtcctggactggtcggggcgcgcggcgtcggcttccctggttcgtggngcctcccccgtcgct

SEQ ID NO: 20070 - DNA, 365 bp, Zea mays
  Clone ID: MRT4577_118305C.1
agctgacgcttgggcggacgcttggttcgaactccaaagtgaatttccattctaccggatccagttctcacctcaatctggcgagaagcgaagccggacgaggagggtgcgaggagatcgcgagcagccggagccggtgcctgatccggacgcctagtagatgaagaccttcgatccgtggccgttcttcttccgccaggagtggtagcgcaattggcccttcctcacggggatctgcatcacctgcttcatcatcactaagatgacggccaacttcaccgatgatgaccttatgaactccaaattcgtccaggagcacactaagctctgaccaaccaggtgtcgcccgaattgcctgtctggac

SEQ ID NO: 20071 - DNA, 164 bp, Zea mays
  Clone ID: MRT4577_118306C.1
gaagcctattactaaaagtttcacggactcgcttagtgagcttggcaatttaaatgtattacagtattgacaactataaggattttggtctgtattatataaatttaaggtaccacaacttaatgttacccatgattccctttttcaacctgaacacttgccac

SEQ ID NO: 20072 - DNA, 147 bp, Zea mays
  Clone ID: MRT4577_118307C.1
gggcatcgtaaatccatagtggtacttcactgttttcaggtggcgccattccagattctttggattcatgttcctgcagttggccacgccagtttttctttttatatgtggtggtgctttggtggacttggaaaagactatttttga

SEQ ID NO: 20073 - DNA, 359 bp, Zea mays
  Clone ID: MRT4577_118308C.1
accacacgtccgtttcgttagacagagtcatcgcaccggacgcaacacgtacgcgagggagcgcaagctatagccgacgccatggcgagcaagcacctggacctcgtcgcatgcctcctcctggtcctgcccaacgtctcggtcgccaacgacctcgactactgcagtaagaaggactacccggtgaaagtgaactgcgtgcacaccctgcacgagccgaccaaacccggcaagcccttcagtatcaagatcaacgctgctactgatgaacccatcgccaacggcaagctggatattgacatcaagcatctatagttctacgtgcactcggagaccatcgacatctgcggtgagactta

SEQ ID NO: 20074 - DNA, 406 bp, Zea mays
  Clone ID: MRT4577_118309C.1
gcgaccggaaagaacagcatccaatgtcttcagcgctccaagcctggaacaatattggggaggcctagaccagagatagaggtatagtagagcacacgcgccttgatatgttgtgtcttaatgatgatctgtcttgatatgttgtgtcttaatgatgatctgttaacgtggaacacttataaacaatataagaagatccaagatgatgattgcgtgcaactctagaagaattaataccctaatttccatagtttctttacccagtgaagtgttggcagcggcttagtgagaacggaggacatcattgtttttttcccttctttcgtcagctcggctcgagtgatggaactcatttttcctgtaccatgtgtaaaagcctgtgctatgtacacgttgttgtgcgata

SEQ ID NO: 20075 - DNA, 1090 bp, Zea mays
  Clone ID: MRT4577_11830C.1
cattgggtacctcgaggccggccgggccggaacacccctcgttctcatctcatatccgatcctgagccagagatcaaacaaaccagagggagcgaagcatggcggcaggcttgcaggtgtttggccagccggcgtctactgatgtctccagggttctgacatgcctgtttgagaagaaactggagttcgatcttgtccgcatcgatacgttcaagacgcatcacaagcttcccgagttcatcaggcttcgggatcctaatgggcaagtgaccttgaagcacggcgacaaaactctcgttgattcgagggacatctgccggtacgtctgcacccagtttccaaacgatggaaacaagagcctttacggatccggcgctctagaacgggcgtcgatagaacagtggcttcaggcggaggctcagaacttcgggccccccagctccgcgctcgtcttccagctggcgttcgtccctcacctcacccacctgggcgttcgtcaggaccctgccgtgatcgccgagaacgaggataagctgaagcaggtccttgatgtctacgacgagatactctcgaggaacgagtacctggctggcgacgagttcaccctggccgacctctcccacctcccgaactcgcactacatcgtgaacaccgagagaggaaggaagctcttcactaacaagaagaacgtggccaagtggtacgagaagctctcgaagcgcgagacgtggaagcaggtcgctaagatgcagaaggaacatcctggtgcgttcgagtgattgcttgtcttggggggagctgcgagtgcaccatcatgaatggcttcatcgtctgtgtcggtctggctctacagttcattttgttttgagtgatccattgtttaatttctcctatcagtgttgtcgtgtgaaccaaaaataatgtgaagcccagctgtgatgtatatgatccttttgctcaatctatcatgacgtataagctcgatctaagaaaaagaaagcacagtattttttttactgatgatttcgatcgagacatacagtagaaagtcttttctggtatgttctagaaaaaaaaaaaaaaaaaaaaa

SEQ ID NO: 20076 - DNA, 270 bp, Zea mays
  Clone ID: MRT4577_118310C.1
atattgagaatattgtggaacccacgacataaaaaacaagacataggggacattaaagagttcatatcacaggggcagcatgaaagagggttgatatgacgacccgagtaggatggttaactagaggaggagacagtgaccaacatgtgtcctagaaatgcatgttgcggacctgagagaatcgtaccggtgttctacgaacatagtgacttctggatgatagggagcaaaagagagggcttaaggcacatcgtgagtttttttcactga

SEQ ID NO: 20077 - DNA, 495 bp, Zea mays
  Clone ID: MRT4577_118311C.1
gctgatgaacaagcatctgttgtggttaaagcacctggtcgcgatctagtgctggtgttgcttgacgatgggggcacccctcttaccaggcctcggaggttgctcttgaggacctctcaacattttccaggcaaccagaagtgtgatcgagattgcagcaagtgtagtaagtgaacggagcttctggcgatcgaggtcgaagggcaagcgatcagcgtagcgagcgagggcgtccacgaggcgcctcaccagatcggcgagctcgtcatcattcccggccactgcccctgccaccggggccgacgccgacgccatcgccgctgacgagaggtgaacagggtgggcggcgggggcagcggaaaccctagaaaagcgcgcacaccggtgagcgggaggacagggatgggtggggtgcgagatgccccgcaccaacaccacgacgaagaagaagaggagagaggagggagggagctctgcttcgcgcccacgcgtccg

SEQ ID NO: 20078 - DNA, 2452 bp, Zea mays
  Clone ID: MRT4577_118312C.1
tcggaattcggctcgggccagcggccagcaaaagcagcggcggcgcggccagggaccgacgtacccgccgcgagaagctccggttggcaccccaacggcatggatgctagcagcgtcagcccgtgcgatctagacagggagtttgcgctccaaatcgctcagctcctcgccacgcctcctctccaatcagcccaggaatactatggtgaactcatacggtccaagaagcttgatggcattagagtgagctacagtggcaagcatgggaaaggtgtttatgcaaatagggactttggtgaagacgaccttgttctgaaggaccaaatgttggtcggtgctcaggacagccttaacaagattgactgtgttgtgtgtagttactgcttccacttcattggttctatagagtaccaaattgggcgtagattgtatttgcaaagccttggtggtagtggtgatggcactaccgagagacactgccatgggagtgatgttgggtcaagtactggctgttccggtgcatcaaatggaaatagcaatgctgtgccacaagaggtcctgttgtcacttatggatggtaatacgctgttgcctttaaccgatcagttctgtttgccaccagttgttgcttgccctggtggatgtgagggagaactctactgcagccaatcatgtgcggattccgattgggattcttatcactctttgctgtgtgctggatccaagactgaaccattgcggaaatctgcccttcagaaatttgtggggcatgctaatgaaaccaatgatatttttttggttgctgccaaggctatcacttccaccttgttgagatataggaaactcaaaagacagcatgtgtctcatgaatcaagctcttcgctcctcttggaagcatggaaaccactttcaatgggcttcaaaaagagatggtgggagtgtgttgctttgcctgaagatgttgattccagtgaagaagaattgtttagacagcagataagggatctggcgtttacgtcactgcagcttctcaaggatgcaatctttgatcctgagtgtgcgcctttgttttcgcttgacatctatggccatataattggcatgtttgagctgaacaatcttgatttagttgtcgcatcaccagttgaagactatttcatatacattgacggtcttccagagagcgacaaggaggaagcagagaaggtgacagggccattcctagatgctttaggagaagactacttagttccgtgcgagggaacggcattctttcctctgcagagctgcatgaaccattcatgccgtccaaatgctaaagcatttaagagagacgaggacaaggatggccatgcagtgataattgcccttaggcccatcagcaaggacgaagagattaccatcgcctacatcgatgaagaccttccttacgaggagaggcaggcgcagcttgcagattacgggttcacgtgtacatgcttgaaatgccaagaagagcgaccggtctgaaaggacaaatatgtttgaattttgcggcattcagcctatgtcactgggtagttttgaaagctcgcgagaagtgagtgcacaaaatgatgtttgttttcggctgtaacttgcaaaagttttgttgttgtccaatgaatatgaatagtgacgaacagacgatcagtcgtcgtaaccagcagcctcatgggactaacacaaccacaagagcgaatggcaatagcagcaggttgacacttgcaactattttggttatacttgtacattaacacaactggctgattcgccaagtatgctagtattacatttgtcatctccctgcatagattatgggggcactgcatatcgcacaacgacgtgtacatcatagcacaggcttttacacatggtacaggaaaaatgagttccatcactcgagccgagctgacgaaagggaaaaaaaaaacaatgatgtcctccgttctcactaagccgctgccaacacttggatggatggcagtttgacctgcaggtaaagaaactctatctctggtctaggcctccaaatattgttccaaattcggcgcgcggaaacattggttgctattctttcaggtcgctgcggggagatgtgcagttgatatttgataaacctagcaaccaatgttttattcgctccaagcttggaacagtattttggaggcctagaccagagataaagaggtcaaactccatccaggaaattggcggcggcggcggattagtgagaagggaggacgtcattgttttttcttttctctgctcgaatgatggaactcgttttttttcctgtatcatgtgtaaaagcctgtgctatgtaccagtaatccattgttgtgcgatatgtagtgcctcagaatctattcaagggaaaacatatgtagtagcatacttgtcgaatcagttgtgttaatgtacaactccaccc

SEQ ID NO: 20079 - DNA, 203 bp, Zea mays
  Clone ID: MRT4577_118313C.1
gttgtcatgctcgaggatacgacccacatgaggcgtgtgttttctgcagatggccattttaccaacaccagcacctgttggtctctagtactacaagcgctgcggctttgacttgggtgcgaaagctaggatccaataagaatggtcgattaaaaacgagctatcattcacgcgttcctgggggcccggaattgatcaaaggt

SEQ ID NO: 20080 - DNA, 1768 bp, Zea mays
  Clone ID: MRT4577_118314C.1
agacctacactatttttttatttttaacggttttttatatagcggccagcaaaagccgcggcggcgcggccagggaccgacgtacccgctgcgagatgctccggtggcaatagcagcgaggttggcacttgcaactatgctattttggttgtagttgtacattaacacaactgattcgacaagtatgctactacatatgttttcccttgaatagattctgaggcactacatatcgcacaacaatggattactggtacatagcacaggcttttacacatgatacaggaaaaaaaacgagttccatcattcgagcagagaaaagaaaaaacaatgacgtcctcccttctcactaatccgccgccgccgccaatttcctggatggagtttgacctctttatctctggtctaggcctccaaaatactgttccaagcttggagcggtgaaaacattggttgctattctttcaggtcgctgcggggagatgtgcagttgatatttgataaacctagctaattggtgaacaacttcaggacttgtgtcgatatgccaatcaggctcgagttgccgaacaaaagatgtacggccattctccgtgctacagaagagaaccttatcttttatcaagccaccaccaccaaaaagcccagcttcactcagggccgataaaacctttccctcactctcatcatcaagaatgcgctccatcaaatacacatcacagaattttgcaatctcaaggagaacctccaccacggaaggcttcactgtgacatggttctgaagctcctctggagctgtttcttctaaaatcacaccaagcaagcggcatgtgaaccttcgcccttcgcttagcttatgcctgacaagctgctcaagagtcagatttactggctggaaaagctggttgactgcttcgtgtgctcttgaatctgctgatgaacaagcatctgctgcggttaaagcacctggtcgcgatctagtgctggtgttgctagatgatggggcagctctcctacgaggcctccgaggttgctcttgaggagctctcaacattttccaggcaaacagaagtgtgatcgagatcgcagcaagtgtagtaagtgaacgaagtttctggcgatcaaggtcgaagggcaggcgatcagcgtagcgagcgagggcgtccatgaggcgccgcaccagatcggcgagctcctcgtccttcccgcccccggcccctgcccctgccaccggggccgacaccgacgccgacgccatcgccggtgacgagaggtgagcggggttggcggctggggcagcggaaaccctagaaaagcgcgcgcaccggcgagcgggaggacagggatgggtggggtgcgagatgccccacaccacgacgccacgacggaggaagaagaggagagaggagggagggagctctgcttcgcgtcctcccttttggtcagccctaagggcggaggagacgcgcaattcccggccggcgccaacacttctctgggtaaagaaactatgaaaattagggtattaattcttctagagttgcacgcaatcatcatcttggatcttcttatattgttaataagtgttccacgttagcagatcatcacccccctcaacataaaagacagatcatcattaagacacaacatatcaaggcgcgtgtgctctactatacctctatctctggtctaggcctccaaaatattgtccaggcttggagcgctgaagacattggatgctgttctttcctggtcgccgaacgatcgc

SEQ ID NO: 20081 - DNA, 843 bp, Zea mays
  unsure (1)..(843): unsure at all n locations
  Clone ID: MRT4577_118315C.1
cattgggtacctcgaggccggccggggccggatttgcatggcgcctgggtaccagctgctcccaacaccgcccctgccctgcgatttttccttggccgtcgctcactgccggtggagatatttgtttcaggccgccgtcgtcatccaaacgccgctcaagccgccgctgttcctcgccgttatccgctccgccggccggatacaaatccagcagcccccagccccagtcgtgctttgcttcttctccgtggccggcgtcctctaccccatccatggccagagcttcctgtccgatgcccagccgaagtctctttcctggccgcacgcccagcccgctctccttcctctcagctccgtgctctgctcggccggatttccatggcgcgcgtccagcttctggcgccttgctctctctatttctcctgccgtgagcccggtgcccagccccaactccctgccgagttctctctgcgcgcgtcttgctccgactagatccggccatggagctcgcctgcacgcgtcctccctgctcatgccgcggtgctcccagccgagcgccctctgccatggtcgcgtccctagctcggacctggcttggccttcgccccagcgtcgcggcttcatcccaagtccggtgtccagctgtgctcgcgagcctctccctccgcgcgtctgctcttccgagctcgccgcgacctgccgaagctcccctggcgcgcccagccatggccatcgagcaccccagctccttttctcagttttccagcgcctgcttccctgctcggattcagggccgcgcgcacgaatccctgctcgccagcgtgctctggattcagncatgga

SEQ ID NO: 20082 - DNA, 407 bp, Zea mays
  unsure (1)..(407): unsure at all n locations
  Clone ID: MRT4577_118316C.1
gagaatgtgctatgatttgtactgctgtgttactgaatccnacacctacagaatgtgctatgatttggactgtataatttttaacgaagatacaaacttctacaaaaaaaaaaaaaaaaaaaaaaaaaaaaaaaaaaaaaaaaaaaaaaaaaaaaaaaaaaaataaaaaaaaaaaaaaaaaaaaaaaaaaaaaaaaaaaaaaaaaaaaaaaaaggggggggccgttaaaaagaaaaaaagtttataaacgggggatggaaaagaaaaaactttttaaaggggtcactaaaattaaataaaagggccgctttttaaaaactcataaaatggaaaaaccgggggggaccaaaatataaacctttaaaaaaaaaccccttttcgacagtggggaaaaaaataaaaaggcc

SEQ ID NO: 20083 - DNA, 1345 bp, Zea mays
  Clone ID: MRT4577_118317C.1
tggcaatagcagcaggttgacacttgcaactattttggttatacttgtacattaacacaactggctgattcgccaagtatgctagtattacatttgtcatctccctgcatagattatgggggcactgcatatcgcacaacaacgtgtacatagcacaggcttttacacatggtacaggaaaaatgagttccatcactcgagccgagctgacgaaagaaggaaaaaaaaaacaatgatgtcctccgttctcactaagccgctgccaacacttcgctggatggagtttgacctctatctctggtctaggcctccaaaatattgttccaggcttggagcgctgaagacattggatgctgttctttccggtcgctgcggtgaaatgtgcagttgatatttgataaacctagctaattggtgaacgatttcaggacttgtgtcgatgtgccaatcaggttcgagttgccgaacgaaagatgtgcggccgttatctgtactacagaagagaaccttatcttttatcaagccgccaccagcaaaaaggcccgcctcactcagggccgataaaacctttccctcgctttcgtcatcaaggacgcactccatcaaatacacatcacaattttttgcaatttctaggagaacctccaccacggaaggcttcactgtgacatggttctgaagctcctctggagctgtttcttccaaaatcacaccaagcaagcggcatgtgaaccttcgtcctccacttagcttatgcttgacaagctgctcaagagtcagatttactggttggaacagctggttgactgcttcgtgtgctcttgaatctgctgatgaacaagcatctgttgtggttaaagcacctggtcgcgatctagtgctggtgttgcttgacgatggggcaaccctcctacgaggcctcggaggttgctcttgaggacctctcaacattttccaggcaaacagaagtgtgatcgagattgcagcaagtgtagtaagtgaacggagcttctggcgatcgaggtcgaagggcaggcgatcagcgtagcgagcgagggcgtccacgaggcgcctcaccagatcggcgagctcgtcatcattcccggccactgcccctgccaccggggccgacgccgacgccatcgccgctgacgagaggagaacagggtgggcggcgggggcagcggaaaccctaggaaagcgcgcacaccggtgagcgggaggacagggggtggggtgcgagatgccccgcaccacgacgagggtcgaggaagaagaggagagagagtttttgctttgcgggaactttttcttgctcgatctagcaccggcctcgaaagcggcc

SEQ ID NO: 20084 - DNA, 1435 bp, Zea mays
  unsure (1)..(1435): unsure at all n locations
  Clone ID: MRT4577_118318C.1
ggcccctgcgccccgcctgctcccgacacctggccggggttctcgtgtaaagaaaataaaaaaaaatcagccgtagcctcatccattacgcgtcatcgttcctatcttcttccttcccagatttttccgccgccgttccctgttgaattctctgtcgtcgtccttagcaacggcagatttttcctggctcgccggtgcttatccccgcagccgccctcgccggatttttctcagccgagctcgtcttctacggcgccgcccctgggagtcttcaaatatcagccgtgctttgcttcttctccgtggccggcgtcctctaccccatccatggccagagcttcctgtccgacgcccagccgaagccgcccagccgaagtctctttcctggacgcacgcccagcccgctctccttcctctcagttccgtgccctgctcggccggatttccatggcgcgcgtccagcttctggcgccttgctctctctctatttctcctgccgtgagctcggtgcccagccccaactccctgccgagcgtcctctgccatggccgcgtccctagctcggacctggcttggccttcgccccagcgtcgcggcttcatccccaagtccggtgtccagctgtgctcgcgagcctctccctccgcgcgtctgctcttccgagctcgccgcgacctgccgaagctcccctggcgcgcccagccatggccaccgagcaccccagctccttctcagttttccagcgcctgcttccctgctcggattcagggccccgcgcacggatccctgctcgcccatggccggtgtttggcttctggctcactgcacgccggttaccagttctgctctgccctgggcgtcgttctcagtcaccggtggaccgcgcgcccctctgcttgctggtcgtggctccctgatgctcgccgtcgattcgatatgccgccacgtcctcgcctcgtctcggtagcgcgcctgccagtgtcgttcctcgccatgtcgagctccctccccgtcctgtctagctcgccgtgagggtggaacctgcgtgtacgctgtcatcgacaccatggtcgtctacctgtgcgttgcgtccctcatctccagccgacgcactaaggaatgggtgtggagtatagaagaaagtgcagcccgaaatggcgctcgccaggcgctcaacaaaacacctgaaccaaagttcgtcgtcatcgttctcgctgatatcgagacaaattgtgatgtggtacattaattaatcgcgcgatgcggaagacgatccaagtcgaccccaagcgcgggctaatccacaggatgaagctgatgaactaatctnaagatggatagacgaaaccagaatcagaacagagatggtcgccaagtggtcgctacctaacacactaancctagtgtattcaggcgagccccggtgcatgcaacc

SEQ ID NO: 20085 - DNA, 649 bp, Zea mays
  unsure (1)..(649): unsure at all n locations
  Clone ID: MRT4577_118319C.1
ggcccgcttcgaggcncggccggggccggggagccatcacccaaaccctagagtaacactgcaaaagccatggccgccgccgaccccatctggatgatgctcgaccgcttcgtcttccgcagggatcccgccgagtcctccatcgaagaccgcagctattccttctcggccagccacatcgccgggtccgcccccttcaccgttgctttccgcgtcctcagccccccggagatctcccgcctctacctgaagtggccgcctctgctagatccaatgaatggctcttcgtgcgatctcgtggcggcgcacgacaacctcctcctgatcagcctcacctccagccccgggactgtgaacacgtacaagtccccagtttatccgcaggaacacttcatctgcggagcctccacctcgccgtctcagccgtcactgatgctccacaagatcccgatgtgtacggaaccgttggtcgtgcgtgggaacaaggacaaggtgataactacacagcgctcatttcatcctcacactgtcggtatcttgtgccgtggtgatgaagagttcgccgtgccacagctgagcttaagtagacccaatctagtagccggtatgcaagctgacctgtgcgtgcttcgctccagcgcacacaact

SEQ ID NO: 20086 - DNA, 194 bp, Zea mays
  Clone ID: MRT4577_11831C.1
cctcttcctccccttttttttttttttttagcttgacaagccaaaatctcaatttctaatctaatttcaacaagtgtgtacaaagagcaacaaagcaaaccgaaacccacgcacccaaaccgcctactacacgggggcctgcctacccacctgcgcacgcgctacaacggcccagacgtcgcgacgcgtccgcg

SEQ ID NO: 20087 - DNA, 503 bp, Zea mays
  Clone ID: MRT4577_118320C.1
ggccgcttttttttttttttttttgtttttttttttttttttttttttttttttttttttttttttttttttttttttttttttttttttttttttttttgttttattttttctcgtaccaagacccaagcaaaaaaaaaaaagccttcaaacaccccgcacccacccgttcaaaattaaaacccaaaggggggcgatcaaaaggaaagcgccccaaacggcagcaaaaaaaaaaaaaagggcaaaccaggctcagacaaccccaaagcagatgcgggaaggacccgacccccccggcgaaaaacacaccccgggggcggggggccccccccaaggccaccagtgctagagggggactccagaaaccacctatagagccaaacaacgggagggatgcacccctccgagcgggaccgctgcctcccgggcacgatggagaggacggggtctttcagacctcggcggggacctgggccacaaaaaaccctggaggcggcccggcc

SEQ ID NO: 20088 - DNA, 467 bp, Zea mays
  unsure (1)..(467): unsure at all n locations
  Clone ID: MRT4577_118321C.1
ttcttttatctcaagagcagagtgtgccatgggcccattctcttcccttcccgagttgccactcactgttgctttgctgcagcctgaaggggaaggaaagcagaaatctgctgttggctgatgagatccatccatgcggatgcaatccaccacaccagcagcagcaacaaagctagcatttttcatctgattcatttttcatctctgcttcatttccttccatcattgtaaaataacaacaatatctactgctgcgatggcaacggagatgccgccgcttctcgccctcttcttcctctgcctctcgcttgcgctgcgccccgccaccgccgtctcttacccgtccttcgccctcgacttcttccccgccgncggtgccatcgcgcagctctccctctccggcggcgccaccgacaatgccaccgtgggttccgtcttcatgcccattccccgcgcacgggtgcagt

SEQ ID NO: 20089 - DNA, 432 bp, Zea mays
  unsure (1)..(432): unsure at all n locations
  Clone ID: MRT4577_118322C.1
cgaaagaaaagtatctgaattcaaaacggaatctgtagtgtatctatcgttggttccgtgacccatgttgaataatctccccgctgccgccgggccatatgtgcatatccaggcccagccatgcatgtatccctgagtaacgccatgcttgaacgctttgatgttgaatgcaattctatgccatgttaaaccttcatttttcccattgtatcgtcgatcccagtatcccgctttacgtgggcataggggcgtccttgccggtcaagccgccgatggtgtcttctggtggtgcgcagctgcagaagaggttcatgtcgccataggcgtcatccaatctggtgacggtgggccagaacttcttctccttcatccacggcagagggtatgcggcggcttcncgagtgtagctacggtcccactcgccaacaatga

SEQ ID NO: 20090 - DNA, 354 bp, Zea mays
  Clone ID: MRT4577_118323C.1
gttttgggtcaccagaaggcgtgtgataggcgcggctctgtgtaatgctatttgcgagtctcaacggagatgcacaaggaccagctcgtctctctagccatggccatgggcacaatccgggtcaaggccaagcactgccagcgtcaccacgagatctacgtgctgtccgatgcttctttcggagagctgatgaagatgagactcctacaagacggagctgcaccacgaccaccagatagtgctgcccaaggacaaggatccgcgactccaaggagaacctggatcgtcgcctgcatcaaggacctgtccatggaggagtgcttggtggacggatgtgaccggtcgctcctgctg

SEQ ID NO: 20091 - DNA, 459 bp, Zea mays
  Clone ID: MRT4577_118324C.1
cctcgagccggccgggccgtattcgatcgccatataccacttctacattctctgaatcgtgtggcgccaagatggggcatgtcgctccaacccagatactgcgaccccaattacattccgccattgccgatcgctaccacacctccccaaccaacggggaagaccactctagtgtccccccttgattatatatttctgcccagaagcacaaatcctgtcacatagcctacacaccactacaatctgacaacaaaataacaaaatgaaatgaggcacacaaatccagcaaccggtcttatagagtgccgcgccaatgctgagaagccacgatctccaactcgtcagaggaaacagtcgactatctgtaccacccaactaaggaaggcatgaagatgaaggatccccccaatgacaagcctgacgatgtgatgaatgcctgatcggccttattcttcggca

SEQ ID NO: 20092 - DNA, 482 bp, Zea mays
  Clone ID: MRT4577_118325C.1
cccaaaaaaaaaccttttttaaaaaatgggggaaaaacccaaaaagggcaaaaaggaaaagaaatccccccttggaaaaggaacccccaatttgggcctaccccaacttctttggaaaaaaaaaaaaaccccccccaagggggacccccggcaaagggaaaagggaaccaaaatttttggaggttaaacaaaccaccttaattaaggccaaacaccatttaacccccccggcggggggaacggggaaaaaaccacccccaaatgggcccaaaaatttaaccacaggggggccccaaaccttggttttaaaaaacggaaaaggccctttcccccaagggggaaaaaacaaaccccgaaacccattcccgaacctaaggcccaagaaccgccacagggggaacctttggggaaaaaacccccggggggggggggccccgacccggccttgggcccatttcccgggccccaaaaacctggggggg

SEQ ID NO: 20093 - DNA, 677 bp, Zea mays
  Clone ID: MRT4577_118326C.1
gaatatacataggcaacaggggttcgcattgaacttgagattcgctacaaacatctcagcgtcttcttagaccacatatgccaaattttaacctgttcatgtccaactccttcggatccggttcagttgctgcacttcatcggagacggagagcatctgagaactaagcaaagtaaacgaggatatcctatcagctctagagctaacaaacttgaatcgcctcaggcactatagaagcatcatcggcgacgacgaactcacacacgtagcagtttgaaccagattcggccctacatagaaaagctagcggtttatacagcgttccttcgaggcagaacgggaagtcccagcagtctctgaaaaggaagggaccataaacactgccgggagtcctgaaaaaagagcaatagaacatgtgttagtgttacttgtgcgtttagaacttggaaagttcctagcagcgggaacatgtatcaggtttatttgctgtaaattatgcagacaggggggtatcgagtgtttaggtacatatatgaacttatccagatggctacaccttaggactatttgaagaataagacatcatatcctgttttttttttcttgaataagttccattgcaagatctgagcagtacgaacattcattgacaaaatctaccaacgactcacagcagt

SEQ ID NO: 20094 - DNA, 290 bp, Zea mays
  Clone ID: MRT4577_118327C.1
gcgcggagccgttttcgcatcaattcctggcccgattatctcggctatatactgtcttctctgcgcttgggttgctgcgtagcgtgaagcagaatttaaagattgcatcttttttatatatatagaatcgctaaattatgaaaacgctatgtgtgttctcctgtgcaaacaggtaccgcgggtgttggtttcctgcagttctgcaacctgaacagcttccgaacaaaattcatcctgtggttctctttgtctatgggtttgtcggtgccacagtatttcaacgagtacac

SEQ ID NO: 20095 - DNA, 233 bp, Zea mays
  Clone ID: MRT4577_118328C.1
cggacacgtgtgcggacgcgtgggctttctctttttctgacacgtgaacatacgcgtgggtggggacctgtttatggtatataatatctgaggaggagcatatctatctggctgtgtactacaagcaggcctagtacgccgtctgcgcgttccttctattacacataacacatatatccccctccctgcgtgtattctttataccaaagagtcgaaattcgtactactatggc

SEQ ID NO: 20096 - DNA, 366 bp, Zea mays
  Clone ID: MRT4577_118329C.1
gccaatagccgcatgtcatcagagatgctgagagcaaggagcagccgtacatcgtcgatcacaccagccgtcgggcgcgggaatagaagcttcacagtgctgtggggatcatgcgggtcgatcggggaggatgaattcctcgccgaaacgctgctgtccgccccacgagatgaccgaccggtgagaatcccctttacctgtcatccttataccctccttggtgtgttagggacctcggatttggacaggttgcgacatgggctgctctccgacgaacacaccgacgcgttggggcccctgcgctgttgctctgatcggcgtgtgggaagacgaactcggaaccgttcgattgctttggacggtgtg

SEQ ID NO: 20097 - DNA, 308 bp, Zea mays
  Clone ID: MRT4577_11832C.1
attcggctcgaggaagatttgcgctcgcacaattgtttttggagcttgggctacttgtgtgggcaggggacaggtcaatgaactcttagccctaggtctcatccatgtgcttggatgctccctcaagtctctggcctgtgctcagctgctcatacataaaccgccagggtcatgaagctcacttggggagctttgcgtcctggcgtctgtacattataagctcgcggcttaactatattaagcaggctagaactaactcttttgctcatataaaaacacaggtcaagaaatatttacatatcgcttct

SEQ ID NO: 20098 - DNA, 1045 bp, Zea mays
  Clone ID: MRT4577_118330C.1
ggccgcttttttttttttttttgggagattaagagtgccatttcttctatggagaagaacgccgatacatgccagctcaaatcatttagaaaggaaaaaagagagagagatcatgctctagcactaaccaaagctgcttacatgcaagcagcaccgtcaatgccaatgacctttccgttgacccagtcaccgtcctgggaagccaagaagcagacgacacgggcaatgtctattggctggccaacacggttgtggggggaccatgtgcaggcgtactcgtcgacctggtcgtcggagagctggtcaccgttgggaatgtattcgcggcacacggcgtggtacatgtcagtcttgatgccaccgggggcaacgcagttgacagtgaccttcttctcaccggcgtcgatagccatgcacctggtgaaagtctcgatggcaccctttgagccagagtagacggcgtgcttggggacaccctttgcctgaccggtgatggaacccatgaggatgatacggccacccatctccatgcgcttgtaggcagcctttgctacgaagaactggccacgagtgttgacggtgaagacacgatcgaactcctcgggggtgacatccttgaagtggccgaaagaaacgacaccagagtttgagcagcaaatgtcgagcttgccaaagtgcttgacgacgtcgtccatgagcttctccgactcctcgacgttgccgacgttggccttgaaggcgtgggcgtcggagccgttgccgagggccttgatctccttgacgacttgctcggcgccctcgacggcgttggcgtagttgacggcaactttggcaccgcgcttggcgagctcaatggccatggccttgccgataccgcggcctgagccggtgacgacggcgaccttgccggcgaggctccatgtttgctcgatgttggccattgtgaatgtgttgatttggtgatgaaagacaaaagtctattgtttgtttgtagtgaagctgtagagaagagaggagctgttgattgatgccgtatcccggccgg

SEQ ID NO: 20099 - DNA, 437 bp, Zea mays
  Clone ID: MRT4577_118331C.1
aaaaagggggccaatccggggggtaaaaattgggggcaaaaagggtcccgaaccccagccctaggggcccgggcgggttgggttattatggaaaaagggtccaaggggaaacccggggggggggatcaaaaaactttttggccccccaagaggggaaaccaggggtggggctagaccagggatcgaccccaaaaattcttgggggcaaaaacccaactgcttggaaattgggggggagaaaatgggcaaaacaaccattgttaaaggctggtgcaaaaaaggggtttttctccaagggaagaagccccccccgggggcactggtaaaaacaaagcccctgcacccgaaagggggggcacaagcaacgttatggcttcccgacagggggaccgggcccccaaaagttccaggcggttaaaggggtggccaaatggaaa

SEQ ID NO: 20100 - DNA, 517 bp, Zea mays
  Clone ID: MRT4577_118332C.1
gggtacctcgaggccggccgggccgggatttcacaaagcatactctccccccactgaatcaccacttcctgtactcactgtgttagctgatcaaaccgtaacagtaacagcctatcaccaccatatgtctcccaacgttgagctcttaattgtcctgagcctcctgttagatgtcaccgtctatggctgtcaacccaactgttctgcgacaggcgccccaccttcgacaggagcgactactccgtggatatacagtcgactggctgctgtacaatggacgaggtagagctcaaggtgccgaggcaacgcgctacggctccgcaaggtacgacaacgccagaactagatcatgctgccctgttgtggacggtctgggggacctccacgacggatagggtctctgcaccgacatcaaggccaactgtacacggaatacatatctgcttgccccatagcctctgacttaatactctaccactgcgagctagaattgcgcaaaggaatgcacttgtgccaa

SEQ ID NO: 20101 - DNA, 318 bp, Zea mays
  Clone ID: MRT4577_118333C.1
gggtagggtttttttttggaggctctcattttttttttttttaggcaataatagtcccctttaccttaaataataaaagatcgcatctggtttgagctaccccggggagcttaccagagctgggtgggttttacattgggcccgaaagcaaattttccaggggtccaaaaacaactgaacccttttttttttgcagggtttatgtacaggactggggccctactaaaatggattttgggggatagggggcgccgagccattctttcggattaatattaggggggccaggggaccatttcccacccagggggtttaatt

SEQ ID NO: 20102 - DNA, 124 bp, Zea mays
  Clone ID: MRT4577_118334C.1
cgcccgctgggcatatgcaacattattctccgaggcgacgcgacatgcgtcgggctgaatgaataaactcactgtcatccagtgaagggggagttgcgtactgatccttatatcaatgcgtgca

SEQ ID NO: 20103 - DNA, 582 bp, Zea mays
  Clone ID: MRT4577_118335C.1
taatatagcttgaaggaccattcttggaggaaacagacctcacgtggctgctgtcgatatttctggaccgtgacatggtcttccctgtggtgctcttccctcctgagggaaagttctactcgaggccgtatatcctgcacgatactatccgcgtcctcagtgccaccaggatgtccctgtacaccctgaactgccacaatgccttccatatcaacgaggacacttgcgaagacatgggccattttttttgtcctaggtcggccttcctcccatcagcgtcaactcgtattcaggccgttttgctcggtctaccacacttcctcgcaaaatccgctagagtcgatgcatcgcacctacttgaaccgtactagacacgtcacatactactcgcacagtgaatctcacaggagagaccacctcgatctggtgcctgtcgcattactgaagactctgatatcaggtagtgatcaattgcacttcgttggagaaaactactgctgcggtgaccttcaccagagccggattctgcctttgaggaccctctctgcataaagcgtcctcggcctatgactgaacctagga

SEQ ID NO: 20104 - DNA, 309 bp, Zea mays
  Clone ID: MRT4577_118336C.1
cattcacaatgcacgaattgaacgacaacttgattctcatattgttgatatcaaagctaggggtggctaattgaaataatcaccatggactgttcatgtagatactgcatccgctgctagtacaatattatatacttttacagttaaccgtgtaatttcttggaaattatcaaattcaatacttgtataaaggctctaagataaagcaagttcttctagtgatggattctatgagtccatataagaatggcccgccagaatacactttctgctagctttctaatgttcaactgaaagattgtacatagt

SEQ ID NO: 20105 - DNA, 386 bp, Zea mays
  Clone ID: MRT4577_118337C.1
tcgcgatctagaacctagacgtcaggcacgcgctgagactcacatttgagagtgtgggatttcagaacataaactgaacatcactcactactcactacataacatatgatgtagagttgtagacttactagtatatatataaatgccaaataggcaagtgcagaactacatacttactattgacctaaagtagtagagcctcatctaattgaaaagcagcatcactagcagcccctccacctgatttagattctgattcagattcttcttcctcatccgcttatgcttgagttagtactggatgttcaactggatgatcactaccatctttatcatcatgattactaccatcttcttctacgacatcttgagcatttcttggacgc

SEQ ID NO: 20106 - DNA, 598 bp, Zea mays
  Clone ID: MRT4577_118338C.1
gttccccatctttaaatattaatagagctcctgcagagatctggggggggggggggggggggggctgcgactgaccgacgggtaccctaggagagaacacgcgtgctctcgctacctgagagtcgactgtctgtccgtggcaccaccatgcacgagtggaacggcacaacgccgtggcagcaacaccctcgccgctgggacctttacggagccttagacgtaactcagcatctccgggactagtactaggagcactccctagattttgtttttattggactttgaactatcagcgctcagcgctccgatggtcgtgtaccgtacctggaaccttcccccccgtgaactcgtaatagtcggaccacctcatccgttccgtggaacggggagactgctactcccatcttcccttgcgttagggcggcgactcgaagctctcccacactccgttcgtcgacgggaaacgcctttgttgcgagtagttctaaaatcaacaactatagtaacaaaaacaaacgtaagaactacaacaatgctagtaacgcgaagaaaaacaacgcaaagaagttctacaacgcatacaacaagaacgcttaca

SEQ ID NO: 20107 - DNA, 487 bp, Zea mays
  Clone ID: MRT4577_118339C.1
gcccgggccacgcgcagcaggcggcgccggcgtgctccgtgcagggctgcgacgccgacctgtcccagtgccgcgactaccaccgccgccacaaggtctgcgtggcgcactccaaggcgcccttcgtcaccgtcgccggccagcagcagcgcttctgccagcagtgcagcaggtttcatctgctcgaggagttcgacgaggtgaagcgaagctgcaggaagcgcctcgacggacacaaccggcgccgccgcaagccgcagccggatcctctcaaccctgctgccggcttgtttggcaatcaccaccatggaggagtgacaaggttcacatcgtacccacaccgcttcaccaaatccatcgcaaagcccgaatgggcggtcgtcaagacggagaccgacgcgttccaagaccagtactaccctgccgtccacctcaacggcgccggcgccggcgccctctttcacgacaaggaccggaagcactttcc

SEQ ID NO: 20108 - DNA, 488 bp, Zea mays
  Clone ID: MRT4577_11833C.1
gggccaaccgcggccaacacttacacgctccatgcgctcagctctagcaatggctgcgctccaccatggcgatctctctccctgggatggccggtacccccatcaggtgggctccttcggcgagggcccgcatatacgcatgcgcaagaccgtgggcaagcccaagtggcggcgtccggcagcccctggtacggcccccaccgcgtcaagtacctcggtccctttttcggcgagcccccgagctacctgaccggggagttccccggcgactacggctggtacaccgccgggctgaccgcctaccctaagaccttaaccaagaacctatagctgggagcgatacactcacgatgggccatgcgtcagcgcgctcgggtgcatcttaccttatctgatctacctcaacggcgtacaagattggcgaggacggcttattcaaggacgtgtccgatatcttcagaaagggcggtctgaactaccttggcaac

SEQ ID NO: 20109 - DNA, 287 bp, Zea mays
  Clone ID: MRT4577_118340C.1
gcacgggccggggaaaaaccaagcggggggccggggaaaaccaagcacacctagggggggaacaaaccccggctggggcaactacaaggagcagacgaactgggaaaaaaaagcccagcgaaaaacaaacaaaaaaaacgagggacccacgagaaaaacagggaaggacgggggaggacaaaccaaaggaaaaccaaaagcagggcgatcaggcccccaacccgagtagaaaaacgaaaccccccacgtgcaaaaacaagcagaaacccgccacaagaggggggggg

SEQ ID NO: 20110 - DNA, 261 bp, Zea mays
  Clone ID: MRT4577_118341C.1
tggtgagtgacaggagcatcgggcggttgttgcgatatgcatagacaagtaggttcgaagaggtactaagggggtacaacaggtggtccatgatgacagaccccaagggcgcgccacgccttacaaaacaagaaactaggcccgccgtatgtgacagagatctagatgactggtgtgaagaaggggcgaccatgggggatgagactgcaaaaggctaacattcttgcgcggaagagggagacagaggtgcgtgttttgatt

SEQ ID NO: 20111 - DNA, 316 bp, Zea mays
  Clone ID: MRT4577_118342C.1
ttttcggtgggtttttggggtatttttttggttctaatgctttaactcaaaagatagacgtaagttctgttttcaaaaaaaaaaaaaacctttcttttttgtttcgcaaattttgatacgggaaaaaaaacctaaacactccggagaaacactttgcagggttcatattctgaccgagacgctggagaagccgtttgcaagaatgatgtccatccacaaaactaattgcgcatttcattgccgacgacccccacaaggaggagctccgaccccctccttgccggggtcttatcctaccattaggcgagcctttttt

SEQ ID NO: 20112 - DNA, 378 bp, Zea mays
  Clone ID: MRT4577_118343C.1
ggccccgccgcggtatcctgggcgacccccacgcgtggtgccacgctaccgaggaggagtaccaagaatcgaagctgatgcattggcaccctatatgctgctcactcctctcggagcgtgacgcgctattagcagggctcagctagcacacgcaatgctgctgaagaggctgcacatatttggaacctgagggtgcgcgctctgcgatgtgggacccaccacgagggtgccaaatgctacaccagagcttgaaatcgatgctgcgacagacagcaggggacctaggcaccgaaccacgacgcaggggaacagcatgagtggagcaggcgatggctctcatactcgttaatcgtttggtgccgcctgatggatagacac

SEQ ID NO: 20113 - DNA, 392 bp, Zea mays
  Clone ID: MRT4577_118344C.1
actctggattccattatgcaaataaataaaggtgttcatggatcctatgaaaaccagggaatatgaacctacacactgctacactaatatgctacctactattgacaacaaaattctgtagctcactttgaacatcacccataaatgctgtaatgaattcaatgccaaatggttgcatgattaaccccaagcaagctaggacgatacaactagttgaagcaccttcttcagctatctatctttattttgagggcaccactgaaaacatttccccttgtaatcatcccaaatgatttccccatgctatccactacagggagcctccgggatttattttaaagtagcaacccttgcagccacataaaaaatacgtttttatacgcaccgtttaa

SEQ ID NO: 20114 - DNA, 1718 bp, Zea mays
  Clone ID: MRT4577_118345C.1
cattgggtacctcgaggccggccgggattcccattttattctccgcgtgttgctgcctgctccagggcggcggcgggcatgctgctcggcggcgaggacatgcacaggttcccggtgcgctccccgcggatggaccgcggcgacctcatcggcagccccgccgcgcggcagatctacctgacgttcccggccgactccaccttcagcgaggaggacgtgtccaactacttcagcatgtttgggccggtgcaggacgtgcgcatcccgtaccagcagaagcgcatgttcgggttcgtcaccttcgtgtacgccgagacggtgaatgccatcctgagcaagggcaacccgcgcttcttgtgcgacttccgcgtgctcgtcaagccctacaaggagaagggcaaggtccccgacaggttcaggaagctgcagcacacgcaccatggcggagccgagttcgtcggttgtgcgtcgcccaccggattgctggattccagggacccgtacgatctccagcagcctcagatcggatcaaggatgatgtacgggaacatagctaaccagcacgaggcgttcctgaggaggaagctggaggaggagcaggcagccgagctgcagcaagccatagagctggaggggcgccgcttcatggggctgcagctcctcgatctcaagagcaggggccaccaccatctcggttcaggcgcgcccatgcctctgcggcaagccaccgatggcaaaggcagcggcatcaacgggaacggcaacgcgtcccatttggaggatgccatctgcatccaagataagaggatgatgagcagccttgcaatgagtgctcctgctgctgctgatgcggaaggcgagcacgaggagcagcaggaagagggcggtggtggctgtgatggcagcagcagcagcagccccaagcaggcagtcaaccctggggaagaggaggtggtggaatctggtcctgtgacagcgacgcccaacgctgcttgtggattccaagaaagctatggcgtggtggaggtggagctcgtcttgcctgacagccccttcgcgtcccccaccaaggaggaggcctcatacgctgacgctgtcactactgcagccgctcggaacggtagcatcagcagcagccctcgccatgtggcccttttcgcacccgcgtcttccaccaccctcgagctgcccccctacagctcctcctccttctttcaggtgcccaggttttctcgtgggcatgaagccattgggctgtgatgtgaggtgcacagagcaaaaaagggggagggggccccctccattcctctaatctgggaggactaatggctatgattggccccatcaaccaggcgtagagaagctttgacaaagaaaaaagaaatacctttggagaggtgtaatcttcttcagagagtgggaggagggaagggacagtgaagacagcaacagaagaagaaacaagtctaggttgtttttttagctcttaggcctatgataagtatatgatagtaagtgtgagtgagtgagtagtaggcataaataatagtagtagtagtagttaattagtcgtttattagcagctcctatgctcgtttgtggcatggatggatctcactgttgtgatgatacaggtgattaaactaaaccttagtagaatggtgtaagctctgccaaaaaaaaaaaaaaaaaaaaaaaaaaaaaacccccccaccaac

SEQ ID NO: 20115 - DNA, 1867 bp, Zea mays
  Clone ID: MRT4577_118346C.1
gccggccgggcctgcgaaatgccaatccttgttgcctctggagacctggcctcagccccttccccggccattcgagcgccgccctgctcttgctcggctgcccttgcccactacgccctcttgatttctccctccattccgatatatttaagcgaaaaaaatccgataagccaagccaaacccaaacccaacctgccaaccatggcgtgcatgccggctgtgtctgccccctccgtcctcgcgccggcaccggcgtcgacccgcacccacctctgctactcaacggaaatgcgacgcggcgcgctctccctccgtcccgcccgcgctatccccacgttgaggctcggcggccaccgcgacgcccgtggcgctgtcgtcgtccgcgccactgcggcagagggagccgtggagctgcaggccaaggtgacgagcaagtgcttcttcgacgtggaggtcggcggggagcctgcgggccgcatcgtcatcgggctcttcggagaggtcgtacctaagaccgtcgacaacttccgtgcgctctgcactggtgagaaagggtacggctacaagggctgctccttccaccggatcatcaaggactttatgattcaaggcggggacttccagcaaaacaatggtactggtgggagaagtatttatggtgaatgctttgatgatgaaaattttacactgaagcatgttggccctggtgtgctaagcatggcaaatgctggccccaacacaaatggaagtcaatttttcatttgcactgtgaagacaccgtggttggacaaccgtcacgtcgtgtttggacatgtattagaggggatggacgtggtgaagcagcttgaatcgcaagagaccagcaggtccgatactcccaagcagccttgccggatcgttaactgtggcgaggcccccctggacagctgagcgagcgaaaacagcaggttcccggtgcggtcgccccggatggaccgcggcgagctcatgtccagccccgccgcgcggcagatctacctcacctttccggccgactccaccttcagcgaggaggacgtctccaactacttcagcatgtacgggccggtgcaggacgtgcgcatcccgtaccagcagaagcgcatgttcggcttcgtcaccttcgtctacgccgagacggtgaagatcatcctcagcaagggcaacccgcacttcgtgtgcgacgcccgcgtgctcgtcaagccctacaaggagaagggcaaggtccccgacaggttcaggaagctgcagcacccgcaccacggcgacttcgccggctgcacgtcgcccaccggactgctggattccagggaccccttcgacctgcagcaaccgcagattggacctaggatgatgtacgggaacgttgctggccacgaagcattcctgaggaggaaactggaagagcagcagcaggcggccgagctgcagcaggccatcgagctggaggggcgccgcttcatggggctgcacctcctcgacctcaagagcaggggccaccaacaccacctcggctcctcccccgcggccatggccaccaccactctggggcaaggcgacgacggctgcaaaggccgcagcgccaacgggaatgacaatgccgtcgccttccatttggaggatgccaacatccaagatactcctaccaagatgaacagtaacagccttgcaatgagtggtgggcctgcagcagcagcagcagctgctgtgtctgcagccggtgcaggaggcgagcacgaggagcagcagcaggatggggacggggatggcagtcccaagcaggcagtcaaccctgggaaagaagagaagacggaatctggtcctgtcacagccacgcccattgttgcct

SEQ ID NO: 20116 - DNA, 1385 bp, Zea mays
  Clone ID: MRT4577_118347C.1
cattgggacctcgagccggcggggaaccaaacccacctgccaccatggcgtgcatgccggctgtgtcggccccctctgtcctcgcgccggcaccggcaccggcgtcgacccgcacccacctctgctactcaacggaaatgcgacgcggtgcgctctccctccgtcccgcccgcgctatccccacgttgaggctcggcggccaccgcgacgcccgtggcgctgtcgtcgtccgcgccactgcggcagagggagccgtggagctgcaggccaaggtgacgagcaagtgcttcttcgatgtggaggtcggcggggagcctgcgggccgcatcgtcatcgggctcttcggagaggtcgtacctaagaccgtcgacaacttccgtgcgctctgcactggtgagaaagggtacggctacaagggctgctccttccaccggatcatcaaggactttatgattcaaggcggggacttccagcaaaacaatgttgccatgtgcgtctgggttgtgctctgtcggcctggcacccatgcgagtagcggtgcaagcagcggtagtagccctgctgagcccaactcctgcctctctgatcgcggtacgctacctacgcttgatattgtttgtgggttgaaaattcagcgattattaggctctgctcgattcggtgcttcgttgtgtccatggggggttttgagcagggcctctggagacttttgcgccgcgaggaggtcggcgctgggacttagattcatggtgctcctaatacacgtgttgttcgttggcgctgtcttcatcttgtctccggtctcaccattcccactttattctctgtgtgttgctgcctgttccagggcgacggtgggcatgctgctcggcggcgaggacatgcacaggttcccggtgcgctccccgcggatggaccgcgacgacctcatccgtagtcccgccgcgcggcaaatcgtgtccaactacttcgggtacccagagcacacgccgccattattggcacccctgctccgcttgttccgtttcgtttccactagccgttcaataacgttgccccgccatcgatggaccgagcagcatgttcgggccgatgtaggacgtgcgcatcccgtaccagcagaagcgcatgttcggcttcgtcaccttcgtgtacgccgagacggtgaaggccatcctgagcaagggcaacccgcacttcgtgtgcgacgcgcgctcgtcaagccctacaaggagaagggtaaggtccccggcaggttcaggaagctgcagcacgcgcaccatggcggagccgagttcgctggttgcgcgtcgcccaccggattgctggattccagggacccctacgccctcctgcttctttcaagtgcccaggttttctcctga

SEQ ID NO: 20117 - DNA, 503 bp, Zea mays
  Clone ID: MRT4577_118348C.1
gtacaattcacaggggccacatcactagcaccgtgtggatgtattattacaaaagttccttgatcagcaaatgggagtagcgaagcctgaacccgcgcctgtggtgcaagacatcaacatgcgcctcaaagagcagctatatcagctccctaccacactcatacccaaagaggaggaggaccaaacggccgacccacccgccactgtgctatcgaatgtcattcctgaggttgaactccctattgaatataaaatccaaaatattgaagaaacagaaagagcacgcaggatgatggaggaggcccgcagattagaaatgcaaaatcgagcgaacaaggaagggacctttgccggcaaccatccagtgaactacagtagcatgtatgccacacgccgagtgcaaagcgatcaagagtataagcgaaaaagagacccgaatagggccactgatgacttggctgtcagtcgcttcaaacgaaatatgcgattttaaatcatatatt

SEQ ID NO: 20118 - DNA, 528 bp, Zea mays
  unsure (1)..(528): unsure at all n locations
  Clone ID: MRT4577_118349C.1
ggtttccaacaaagcaaaaacctagggtttgtgttagggcggcggcggcggcggcggcggctttattcccgatccgatcacatgcccgtcngagccgcgtcaagctcggatgaggaggaggaggaggagatggccgccctctccgattgggagatggcggcggaggaggggaccgatttcttcaccgattgggcgatggaggggaccgccgtcttccccgattgggcgatgctggatcgcatcggccgcacccgctgccacaaggacctagacgctgctcgtcgggttgtcaacaagaacaagaccgccgctcaactccgcattgaccacggccgctcctgctacgtgtccttcaccctcgcggctcctccaaaaggggtctcctacctcaacctccactgtacgatgttagaatgatccgacacctagccccccttctatcccttcttcctttatatcgacaaggacctctttccttcttcacatcgacatccttacccgcattttccccccgcctcttttttttct

SEQ ID NO: 20119 - DNA, 185 bp, Zea mays
  Clone ID: MRT4577_11834C.1
gttccaactaaacgtgtccaggaggtacagtgatttaacaggcctaaaaagaccttacggaggctagttcaaattacggtgttcacttctggatcggggtggaacgcacaaccacaatcggatggaggtggttgtcccgaaaagagattaggtgctagcgctttttcgttacttactgcggacgg

SEQ ID NO: 20120 - DNA, 776 bp, Zea mays
  unsure (1)..(776): unsure at all n locations
  Clone ID: MRT4577_118350C.1
ccgggacgttttaccccgtccggccgtccccctcgttctttctctcccccttctctctcgctgcgacgactgggtaggctgccgccgccgccctacgccaggtcccgaggaccaaggcattcgtattcgtcagtctcttcgccgggcgacgccaggtattcctacacttctcttcccttcctgttgtgtaaaacagagcacccaaaccctaacttgctaacttcgaactttttgcaaaaaaattatcgtgtgtaccatgtcccttaacgtttcgtttgacaagttaggggtacaatacaatccacagaagaatcaatacagagggggattgggtgatccctctcccaccacccaagcccctccttccttgtaggacctaacctattttatttgattgccaatttagggttggcttcgattgatatggatttgcatgtatctgagtatttggctcatggctgaggcaagtttagaccatttgactgtgtacatgataaaatcagtgtagcaaacaaaatataatatcatgatttatggagaaaaaccgtaacatttttcccttgcacaataagatactgattgagacatcgagtgtcatgtatacagagacaactttgactcagtaatacactagacattgtgtctagttaggcccaacactcagtaacttggtccatataccaaacttactctcttagaagataattatacaagtagaaatagacagcaacagcaacacanatattccgtcaaggcgtcaactaagactggcattg

SEQ ID NO: 20121 - DNA, 451 bp, Zea mays
  unsure (1)..(451): unsure at all n locations
  Clone ID: MRT4577_118351C.1
tcacgttacacactccgcgttactattgcagcgggtccataccgtacgctagcatgaacccgaaaccctgcccacactaaccctacacatcgtcccttactagccaaagattgcgtacacacgtagctctagaggttgcgggtagcctgtgaccctaactctgcacataatagtaaaagacttctaataggagaagaaggtcatgcnggaggaaaaagtagttaggttaaaattgaaagaggaataggagggggagtatctccttcctatgaaggagaaggaagtgagggagagccaccactagttggattattttatggagtactaaatcgtccaggagaaaaggattggcagtattgaagttgcatagatatggaagatgcttcagatttgtatgaagggagtaatgatattgagggaaactgttcaacttcaactggattggaagaat

SEQ ID NO: 20122 - DNA, 495 bp, Zea mays
  Clone ID: MRT4577_118352C.1
cacgcatgattcaataacaactcattcgtgtatgtatgaagtcccttgagagacgcaaacaaaagggccggggggccaggctgccacagacaaaggaaaagggaaacaaaactgatcgcgaaaacatgcagaacacaattgggatctaaaccactctaccacaggctctcacaagaaaaatataatgggcttcaaaaaggggaaaaagctggggacggtgcacactccttgcaaacacgggacagaacaccacatttttaacacaagggtgcccccgcatacacactaacaaggggacaactggggaaggaccaagctgacgaggatctcattgacaacgccttaaaattcttgattagcggcacagacactgagggcttgaacttcgatagagcacgtgcgaagtgcggcatcttaatcaagctagacgaaccccgtgaggaagcccccttggcacggaattccagggtctcttccagggctgccatggctgcc

SEQ ID NO: 20123 - DNA, 325 bp, Zea mays
  Clone ID: MRT4577_118353C.1
aagggggggccaaaactcagaacggggggtgccttacattccattttccataaaaaaaattaaatcttaatagcatcaccgtttcaaccaaagttattattctttattacccggcaaacattgccatcataaattacttgttcaccccacaacttctaggttttcaacaagaccagatattttaagcttccacgaggtaaccaacaagcaatcccatctccacccatattgatcatttttttttggtagtagtctttgttaccaaccaaatatatcattttttttttacagcaacctttttcaccttggctccaattgggtcctt

SEQ ID NO: 20124 - DNA, 243 bp, Zea mays
  Clone ID: MRT4577_118354C.1
ggacggttatgatatgttaatatgggaaatgatcccaacagattagtgaataggtgtggaagctataattggaagtcaaccaaacatcgaatgtatgggaagcattggtttatacaggcctgttacttctacactatacggatacttattctcgctatcttcttgcgacaacacacctaaggttccgactacgaaatgcgatggttaattgaagcaagaaatgcccgggacgggagacttttt

SEQ ID NO: 20125 - DNA, 617 bp, Zea mays
  Clone ID: MRT4577_118355C.1
gaactctgtttccgctcgttcattattcgctcaagagtatacatgccatgctcaaaatttgagagaacggaagcatgactactcctaggaggataactacacttagaatatatatgatgggtatctactttacatgtttgggtcacatgagcccgtgctatgcgaaccctgttgtaaatatctaagggccctattttttaacgggacggatcacacatagttaaagaacgaggggggtcatgtcttgtattgaaggagagaccaaagagccttctctgcacgatgacttagtacatatgtcgttgcactgaagctggagaacacttccaccaaacgagagatctgcattgctgagctgtgtcactggggctgaccactgtctgaccaactgatctttagcactcatgatatcatcatagccattgccacccttgtaggtcttatcccccaagaaatggatttcttgaaattcctgaagatatttcaggcaataagctttgtcccaaccttggggaaatacatgaaaactaatctgccctccgatagaaaatgtcaagttcatgtgtgcaaacttttcacgaagcactgacaccattttaggatccgatgatatgcac

SEQ ID NO: 20126 - DNA, 104 bp, Zea mays
  Clone ID: MRT4577_118356C.1
gtacctcgaaggcggccgggtcttcctttccgtacgaactcgcagatcagagagactgaggcgcccgcgggtctgctttacttccttgacccgttcacgagaga

SEQ ID NO: 20127 - DNA, 363 bp, Zea mays
  Clone ID: MRT4577_118358C.1
attgcatgcaataattggatgaaataaacagcaataagcttcatcagtattattattgttgttgttgaatatatgcatcctctcctctctaaaaaaaaaaaaaaaaaaaaaaaaaaaaaaaaaaaaaaaaaaaaaaaaaaaaaaaaaaaaaaaaaaaaaaaaaaaaaaaaaaaaaaaaaacccaaaaaaaaaaaaaggggccgccctttaaaaagaaccaaatttaactaccccttcattccaacttaaaacttttttttaatgtcccctaaaataaaataaacggcccgtgttttaaaaccgctgtatttgaaaaacccttgctttaccaaaattaatccctttaaaaaaaatacccttttt

SEQ ID NO: 20128 - DNA, 838 bp, Zea mays
  Clone ID: MRT4577_118359C.1
cggccgctcaggcggcgggccctatcatctccaactccagccgccgccacacactccccacagccaatcctccccagcccaagctcgcagccatgcctcccaagctcgacccgtcccagatcgtggaggtgtatgtccgcgtcaccggcggggaggtcggcgctgcgtcgtccctggcccccaagatcggtccgctcggtctctccccaaagaagatcggagaagacatcgccaaggagacggccaaggactggaagggcctccgcgtcaccgtcaagctcaccgtccagaatcgccaggccaaggtgtccgtcgtcccctccgccgcagccctcgtcatcaaggcgctcaaggagcccgagagggaccgcaagaaggtcaagaacatcaagcacagcggcaacatcagcctcgacgacgtcatcgagatcgccaagatcatgaaggtccgctccatggccaaggagatggccggcaccgtcaaggagatcctcggcacctgcgtcagcgtcggctgcaccgtcgacggcaaggaccccaaggatctgcagacggagatcgacgacggcgaggtggagatccccgcttaagaaggcttggcgtttgggcaggttgttatgtgaggctgctgaagtagtttctcctatctagatgcttcctgatgcagttgagagaatggatgtgatatcttcacttgttctactcttgctgaagaagaaacttttgtcatgctttactggttccattgtgagactattttttactgctttaatgagtaccttccggaatcaatcaatgttattatggcagctagatatccttatggttgagttttgtc

SEQ ID NO: 20129 - DNA, 215 bp, Zea mays
  Clone ID: MRT4577_11835C.1
ttaacacaaaatgtggcttacatatttgtgcatgaacatcaacatgtagagtgttataaccataacagcgctctctttaccacgggccatccaccaaaaaattctttttagcatcaaggctgcaacctatacattccctaccaaaatacacacatccgagcggttcgcccagaaggtcaaatacctgaccttctacactggaggtactatatgac

SEQ ID NO: 20130 - DNA, 706 bp, Zea mays
  Clone ID: MRT4577_118360C.1
ctagaacgccgccgccgccatgccgcccaagctcgacccgtcgcaggtggtggaggtcttcgtccctggcgcccaagatcggcccgctcggtctctccccgaagaagatcggcgaggacattgccaaggagacggccaaggactggaagggcctgcgcgtcaccgtcaagctcactgtccagaaccgccaggccaaggtctccgtcgtcccctccgccgccgcgctcgtcatcaaggcgctcaaggagcccgagagggacaggaagaaggtcaagaacatcaagcacagcggcaacatcggcctcgacgacgtcgtcgagatcgccaggaccatgaggaacaggtccatggccaaggagttggccggcaccgtcaaggagatcctcggcacctgcgtcagcgtcgggtgcaccgtcgacggcaaggaccccaaggacctgcagcaggagattgatgacggcgaggtcgagatcccgtccgcttgaagactagacatcgaaggggacttccattggtgctgctgaagtgttgttgttctgcatgctgtcgatgtacctttttcaagcaacgcgagccatctatttcttttgtctagctatgttagtgatatcttgtgagagacctcaatgttaccaccgtatctttgtctttgttggatggagagatttaagcaccttaccacaaaaaaaaaaaaaaaaaagcggcc

SEQ ID NO: 20131 - DNA, 285 bp, Zea mays
  Clone ID: MRT4577_118361C.1
cccggtcgccccgcgttcgcccaccacacagctagctagcgttcctaacacagacaataatctttttcacctcactaacaccggctgcactcgctctgcctgcacatggccgtcgtcctctccacactggccggcggggctgggcctttgctgtgctgcgtgcggtcggcgggggggctgcgtaacgggggaggcgcgtcttacgggcgggcggcttaccgaattatcgggatcctggccggggttggtgacgtgggacatgttaaaagtcggctgtaccgtgtg

SEQ ID NO: 20132 - DNA, 299 bp, Zea mays
  Clone ID: MRT4577_118362C.1
tttttttttttttttttttttttttttttttttttttttttttttgggttttttttttttttttttttgtgggaaaactgaaggggaaggactttttttcaagcagtttaaacaaaaccagggtttaaacgcggtgaacaagggggggtaccataagacaatgcactttggggcaatgaaaaaaaaatcgggggattgaataaaaacgagctagctcacagtgtggttttggaggatggggggcctccaaacatgcgcgggtgtagcaaaaaaaaaaaaaggggcccttccttttcctg

SEQ ID NO: 20133 - DNA, 848 bp, Zea mays
  Clone ID: MRT4577_118363C.1
ccgccccgaacgcgcacgcctcctccgccgaagccaagcaaaccaccgacctcgacggagtcttctagccgtcaccctcgttgtcgccctgctcctcctctcagccggtccggccggcggcgtggcgtgaagatcattccggacccggaacgagttccctcttttgctggttacataaactttggaataggaggatatcccatattgatctttgtgattgagattgattttttttctggaaaatggagatacaaacttcagggaagcccattgatgtgctgatggagaaggttcttagcatgaacattctgtcttctgattactttaaggagctctataggttgaaaacctatcatgaggtcatcgatgagatctacaacactgtcaaacatgtggagccttggatgactggcaattgcagaggcccctccactgcattctgtcttctatacaagttctttaccatgaagcttactgtcaaacagatgcacggtttgttgaagcatcctgactccccacacattagagctgacacggggatgacaaagtttgcaagaagttcatagtgtaccagtctgtgctttggagttattggtttcttgtatcttcggtatgttgcagacccaaaggttctttggatggggtatgagccctatttgagagatgatgaggagttctcccccggatctaatggtcgcaagacaaccatgggtgtttatgtgcgtgatcttatacttggacagtactactttgatagtcttctaccaagaatcccctctccagtactcgtcagattacagccaatcttgaaaagatgaaatgcccactaagctttctggggcaactgg

SEQ ID NO: 20134 - DNA, 880 bp, Zea mays
  Clone ID: MRT4577_118364C.1
ttgggtacctcgagccggccccgggaccggatcttgacggcgaccacgctaccaggcactgacgccgtgaactagttagtcatagcccccctgaaatcccagtctcccaagtcccaaccaaggagccttgtgcccatcccatccgtcgtcgtctggacatgcagggaggtgtgagctgcgtcggcgggcggctgggcctgaccatcgacccggctggcgacggggaggcccccgcggagcgcgtggggcggttggtccgcgagagccccgtggtgatcttcgcctggcgcgggtgctgcatgtgccacgtgatgcggcagctgctggcggccgtgggcgcgcacgcgacggtgatcgagctggaggaggccgccgaggaggccgcggcgtcggccgccgccgccgccgccgtgccggcgctgttcgtgggcggcgcgcccgtgggcgggctggacgggctcatggggctccacctcagcggcctcctagtcccgcggctccgggaggtcggcgcgctctgcggctaggccgggccggggcggcgtcgtcacttgctggtggtctggtctctctgtcgatacacgggtacggtacgttacgttacgtaatttaggggaagctgaggggggttggagcgaaatggccgtgtgacgtttgtatacagacgtcgttgctagttctgtctgtgctttgctgctgtgtggcgctggggccgggtgaggtggttggctaaagttgaagacctatgtgagaaatgcctgggtgtaactgtaattaatacgtttgtcctgcacgagtttgttaactgcgtccctcggcacgagttgcttatccgtgtctgttggtctaaccatgtgattattgcacaaaaaaaaaaaaa

SEQ ID NO: 20135 - DNA, 1727 bp, Zea mays
  Clone ID: MRT4577_118365C.1
gccggccgggtcgcgggcccttaacggaacatacttatcttttccccttcccctcgcggccgccgccccgaacgcgcacgcctcctccgccgaagccaagcaaaccaccgacctcgacggagtcttctagccgtcaccctcgttgtcgccctgctcctcctctcagccggtccggccggcggcgtggcgtgaagatcaatccggacccggaacgagttccctcttttgctggttacataaactttggaataggaggatatcccatattgatctttgtgattgagattgatttttttttctggaaaatggagatacaaacttcagggaagcccattgatgtgctgatggagaaggttcttagcatgaacattctgtcttctgattactttaaggagctctataggttgaaaacctatcatgaggtcatcgatgagatctacaacactgtcaaacatgtggagccttggatgactggcaattgcagaggcccctccactgcattctgtcttctatacaagttctttaccatgaagcttactgtcaaacagatgcacggtttgttgaagcatcctgactccccacacattagagctgtaagtttctgtttcctgcccttctgtttgctgatgctgaatgtcttgcttcatggccctgtatctattcattaggcatgaggttagtgtatgaatctatatgtttattgggatgattataaaacttatttcggaagtattttttgcaatgaaaaatcttacattccttgcgaatcacttgtacataattttgtgcttacattttggttatagccactaacggtccgacaacttgtttctttggatggacttgtggctgaatttcttggtcctaggacacggggatgacaaagtttgcaagaagttcatagtgtaccagtctgtgctttggagttattggtttcttgtatcttcggtatgttgcagacccaaaggttctttggatgtggtatgagccctatttgagggatgatgaggagttctcccccggatctaatggccgcaagacaaccatgggtgtttatgtgcgtgatcttatacttggacagtactactttgatagtcttctaccaagaattcctctcccagtaactcgtcagattacagccaatcttgaaaagatgaaattgcccactaagctttctggggcaactggagactccagtcgtcagggatcagaagatactgcacgccgtcctccttcagtgaaagcttctctgtcagtttcctttggacagcgtgctccacatcgggcttccaccagggattcatctccagttcgtcgaacagtcacccgtgatggtcatcgaagttcatactcaccatctcgtcgtagtggtagccgtgagggtcctgatcatgaccgttctgaccgggaactggatcattctagtcgtgaccgtgaaagagcccgggatcgttcaaaccgggatcggtatcattcaagccgagaccttgaccgtgacaaggatgccagagattatcatcggcatgagcgtgatagcagggatcgtgagtactacaggtccaggcattcagaagaaagacgggacgacagaagagatcatgaaagtagcaggcacaggcgctctagctctcgccacaggagcaggagtaggagccgaagcaggagcaggagtaggagcaggagaagccgcagccgaagcacgagcaggaggagcctgaatgagcagc

SEQ ID NO: 20136 - DNA, 394 bp, Zea mays
  Clone ID: MRT4577_118366C.1
gtcgaccgccacctccgtacacgacttcattgtcaaggatgcgagcgcgaaagacgttgacctcagcacctacaaggggaaggttcttctcattgataacgtcgcatgacagggtggcgttaacgaactgcacatacagtgagctagtccatgtgtatcagcatgacaactgggcctgcgtacggactcctcggtctggcatgcgctggacctcctggacgacctcctcagcacggtcgcgctgctcggggccgccggcgcccccacctccctcaagacggaggcccacgccagccgcgtcgagatcccgctggttacgctcgacgccgcctggggcgccaggatgcgcctatacatcgacggcgccgactgatgtcgaccctcacctcaacct

SEQ ID NO: 20137 - DNA, 719 bp, Zea mays
  unsure (1)..(719): unsure at all n locations
  Clone ID: MRT4577_118367C.1
cctcgaggccggccgggacccgtcggcagtggcctctcactcgccgtctcactcctctcgcactagcgctcgcttctcccaaaccctagctcctcctccgtagctctcagctccagctccagctccggcgatggcctccgtcccgcactcgccgccggtgatccgcaagtcgggcaacctaatggtgttcgtcacgccaccggcggagcccgagagcccgaggtccgagttttctacgcccccgacgagtccccgcgccgaggaatcccctgaatcgccgccggcgcagatggcccctccgcccacgcctatttattcggtttcggtctccacgccgccacttgtcaagacggtctctccgccacttcatgcggagaagctctcccgaccctcgctggtccaggtaccgccgccgcttgtcaaaacggtgtctccacctcttcccgcggagaagctctcccgacccccacttgtccaggtgccgccgttgcagttcgcgaaggtgtcggcagggtcggacggatcgctgctagcgttcttctgggacgcggttgcacacgtgcaaaaagcacactcgaggttggacaagcacatctcgagatggttcgggctggaccagtccaagtaccagtgggcgctcaacgactattttgagaggaccggacaggagatagattcgagcacgctggagcacagntgtaaaaattcagaaagcatga

SEQ ID NO: 20138 - DNA, 2050 bp, Zea mays
  Clone ID: MRT4577_118368C.1
aattcggcacgaggtttttccctgcccccgcggccgccgccccgaacgcgcacgcctcctccgccgaagccaagcaaaccaccgacctcgacggagtcttctagccgtcaccctcgttgtcgccctgctcctcctctcagccggtccggccggcggcgtggcgtgaagatcaatccggacccggaacgagttccctcttttgctggttacataaactttggaataggaggatatcccatattgatctttgtgattgagattgattttttttctggaaaatggagatacaaacttcagggaagcccattgatgtgctgatggagaaggttcttagcatgaacattctgtcttctgattactttaaggagctctataggttgaaaacctatcatgaggtcatcgatgagatctacaacactgtcaaacatgtggagccttggatgactggcaattgcagaggcccctccactgcattctgtcttctatacaagttctttaccatgaagcttactgtcaaacagatgcacggtttgttgaagcatcctgactccccacacattagagctattggtttcttgtatcttcggtatgttgcagacccaaaggttctttggatgtggtatgagccctatttgagggatgatgaggagttctcccccggatctaatggccgcaagacaaccatgggtgtttatgtgcgtgatcttatacttggacagtactactttgatagtcttctaccaagaattcctctcccagtaactcgtcagattacagccaatcttgaaaagatgaaattgcccactaagctttctggggcaactggagactccagtcgtcagggatcagaagatactgcacgccgtcctccttcagtgaaagcttctctgtcagtttcctttggacagcgtgctccacatcgggcttccaccagggattcatctccagttcgtcgaacagtcacccgtgatggtcatcgaagttcatactcaccatctcgtcgtagtggtagccgtgagggtcctgatcatgaccgttctgaccgggaactggatcattctagtcgtgaccgtgaaagagcccgggatcgttcaaaccgggatcggtatcattcaagccgagaccttgaccgtgacaaggatgccagagattatcatcggcatgagcgtgatagcagggatcgtgagtactacaggtccaggcattcagaagaaagacgggacgacagaagagatcatgaaagtagcaggcacaggcgctctagctctcgccacaggagcaggagtaggagccgaagcaggagcagggagagaagccgcagccgaagcacgagcaggaggagcctgaatgagcagcgatccagcccattcagggatgcaaataaagagaaggcagccaccgtgtcgagcaacctagcaaagctgaaggacttgtacggtgacataactgcaaagaaggaagacagtgatgctgaaaagcttcaccgtgattcatgcgctgaggaggtcatcaggctgggaggccctcgatggaggtaactttgagacctgtagaactctggtttccgctttgttctgccagcctctctgtaggccttcttgaaaatgctctttatgttcccaaacttgatagagtcgactggtacttcggtatcttgacttgttgtcgcctgacatttgccattaatgtatgttgtttggtatgttattcctaagaattcctatgacattggaacgtactgtataaaccgtggtatccgagcttcatgtttgcttgatgcttatgcaaattgaaggttgaataagtttcagtttcccaaaaaaaaaaaaaagattcatgcgctgaggaggtcatcaggctgggaggccctcgatggaggtaactttgggacctgtagaactctgggttccgctttggtctgccagcctctctgtaggccttcttgaaaatgctctttatgttcccaaacttgatagagtcgactggtacttcgggatcttgacttgttgtcgcctgacatttgccattaatgtatgttgtttggtttgtt

SEQ ID NO: 20139 - DNA, 130 bp, Zea mays
  Clone ID: MRT4577_118369C.1
attaggagggacacataaattattacatcgacaagcaccgtagatcgtaaacccgtctggacacgcatacaatggtactcgacaccaaggtgtaaagttaaaagacacttctaatcactggaaagcgcag

SEQ ID NO: 20140 - DNA, 387 bp, Zea mays
  Clone ID: MRT4577_11836C.1
cgtccgcctggctcttgttgactgttgacatcaattagataggaggaaaaatttaggagtggttaaaacaaaatcccacaactgggatcttaaatctctggcatgatgttatcgttgtatgttactggaagatgatttgcattgatggctgaaagtagttcgcattcctttgttttaagtatttctgttgcatagatcactaacaagttccctaatgcttttcaggtattcacagtagagtactctttaattcgtaagatacatgagtatgcaaaaccttatatatgcttgatggatggagtgacaatgggatttggaattgggctatcagggcatggccgctaccgtattattacagagagaacacttctagccatgccttgaaat

SEQ ID NO: 20141 - DNA, 674 bp, Zea mays
  unsure (1)..(674): unsure at all n locations
  Clone ID: MRT4577_118370C.1
ctcgaggccggccgggcgtcttacaacttaatcacaatggccacctccatcaagtctatccgagctcttgctcccctccttgaccgtgtcctcgtccagcgcatcaaggctgagactaagaccgccagcggcatcttcctgcccgagtccagcgtcgagaagctcaacgaggccaaggtccttgcagttggccccggtgccctcgacaagaagggcaaccgtctacccatgggcgtcaccgtcggtgaccgtgtcctgatcccccaattcggtggctctcccgtcaaggccggcgaggaggagttccagctcttccgcgacagcgagatcctggccaagatcaacgaataagatacccatatatcaaatcaaatcaaacaataaccagcctgtatcatactgtaccatatcgcaagcggcgaacgtgagagatgagactctactgaagttgcttgagaaggggaagagagcggagttgattgtaatgtaggcgcaaaaagacgacagaccaattatgcaagaagatgtgcatgcgatttgtatgagtgtgcgtaggaaaaagaaaaatggtgctgatgtgttgggttggtcgcgcaagacagaatcaaatctccactccttaccctttcaatatcatgatttacatcaaaaaanaanaaaaaaaacccgcggcc

SEQ ID NO: 20142 - DNA, 371 bp, Zea mays
  Clone ID: MRT4577_118371C.1
gtggggttaacgacaaaggcccaacctttcattgatgcaacaatgtaatactctgctccttacacaaaacacccctgaagacaaattttttaaaaaaatggattctcactgcacaccagcaaggcaggatccacccatctaatcaaaacccgaacaccactttaaaccaattcatggtcatggacacagaaacccaaaatcactcgacctatactcccacccgaactttccaagtcatggtaaaacccttccccaacggcattgccagccccccaatccccaccatgacccccctctaactatccagaacgccttttttcccctacaacttcacgttgccaactggtgataaaaaagggctcaaccatccg

SEQ ID NO: 20143 - DNA, 158 bp, Zea mays
  Clone ID: MRT4577_118372C.1
aacaggaatcggccgggcggccccaggctgcccagcgcgaacacggccagcccggccacgatgacgcgcttgcggccccagcggtccgaggccagacccagcggcagctggaacacggcctgcgtcagtccgtacaggcccatggccaggcccaccag

SEQ ID NO: 20144 - DNA, 1073 bp, Zea mays
  Clone ID: MRT4577_118373C.1
attacaaaggaaatattctcataccgtctcagatcgaggtttaacaaactgatcagtgcgctattcctagttcgcgtcctttgccatggcaaaccaagtgcagcaggtgttcatgcgtgagatgacgtctccacgagcatggtttctactactcatcccactcctgctcttcctcgtgcgctactcgttcggtgccaagagagagaggcagaggcaacctctgctggtagacgacgacgaccctctcccgccttcgcctccggcgctgcccgtccttgggcacctccacctggtcggctcgctccctcacctctccctctggaacctcgccaggaagcacggcacggacctcatgttcctccgcctcggcgccatgccggtcatcgtggtgtcgtcgccacgggccgccgaggcggtgctgcgcacgcacgaccacgtgttcgcgtcgcggccgcactccttagtcgctgagatcgtcctctacggcccgtccgatgtgggtttcgcgccgcacggggaatactggcggcaggcgaggaagctggtcaccacgcacatgctcagcgtcaagaaggtgcaggcgctgcgccttgcccgcgaggaggaggtgagagtggtgatggcccagattggcgaggcggccgcggcaggtgcggccgtggacatgagcgacctgctcggctcgttcgtcaacgacctgggctgccgcgccgtgatgggcaagtccttccggagcgagggccggaacaagctgctccggcagcttctcagtgacacctcgccgctgctggctggtttcaacgtggaggagttcttcccgttcttggctcggtttggcgtgctcagcaagatggttcgcgcgaaatccgagaggctgaggcggaggtgggaccatctgctggacaagctgatccaggaccacgagagggataacagcgatccgaagataaagatggccgattcatccatgttttgctgtccgttcgacatgagtacggcctcagcaggcagcagatgaaaggaatcctgctgtgagtatatacattctaccagctataagcttcaaatgccca

SEQ ID NO: 20145 - DNA, 225 bp, Zea mays
  Clone ID: MRT4577_118374C.1
atattaaattctgtttgtggttatagggcccacaaaacacgattttttgcttgttgttgaaaagacgcctctggagccaaggaacgaacactatgctccttccgggccagtgccaaccgggagaccggccactcacgggaaggggccgacacgatacatactgggagggaacactggtaccgggaaaccattacggtgcagaccacgataacttgggctgggggg

SEQ ID NO: 20146 - DNA, 354 bp, Zea mays
  Clone ID: MRT4577_118375C.1
attcggctcgaggttgaccacctggcttctgtttagagggtggtccaaattaacattctaatggatagctttgacgttcttcgtgctgaccggcaacaaccagataggtgtcatcctggcacagataatttgtatggggcggctcgtgacgggtgtcactccaggtgcggggtgacatgaggacagcggtacacctttccctgggtttactctgatctggcacggaaggcctcaaccatcagctactgattgggatggctctacatcgttcttcgaataggagcgagacgggaaccctctccatgttaccggtcggtgaggatcgccgcggcagaaacgtgtccgtgcgcctca

SEQ ID NO: 20147 - DNA, 254 bp, Zea mays
  Clone ID: MRT4577_118376C.1
tttatttttccgactttgtatatattgtatggggtattttcttggggcgagggaaaaaccccccctcgaaagcatacgagggcacaatgacaaaaatccttttatgggagtcacccttccacaggttcttggggatattaaataggccacgaaggacaaaatcaccaagggtggggtgggccctaaccgaggcaagactatgaaaaatactccaagggaaccatcccttctgaaacccccttgtgggggcccgg

SEQ ID NO: 20148 - DNA, 115 bp, Zea mays
  Clone ID: MRT4577_118377C.1
ttgcgcactcttgcggggatacctagccaacagtgcgtcgccagctgggggggatacataagaatcaaatggcacctttaactgcgtaatcaaacaaacacctgcaactgaaaca

SEQ ID NO: 20149 - DNA, 229 bp, Zea mays
  Clone ID: MRT4577_118378C.1
ctgtaccagacaagggttcgaccagtcaaagaaacatctaggtacctcacatgacaagtgcgtgaataccagattctagacagactggcctgccagcgaattactttttactcgcggcatccgataaaaaaaatagtcagggggaggaccccgcgcgccgaaacttttccctaagcagagcagcaaatgctcacagttgcgaaatgaggctattatggatggacttggg

SEQ ID NO: 20150 - DNA, 171 bp, Zea mays
  unsure (1)..(171): unsure at all n locations
  Clone ID: MRT4577_118379C.1
tttgggaaaaaaacaanccacggtacactctacacaagcgaggatacaagaccgtcgaaagcaccaggaaattcgacaggcaactaattggaaggatcaaatgaagtaacaccaatattagacagggatttacagttattaaggatcaacgacttcatgtaaggaacattt

SEQ ID NO: 20151 - DNA, 377 bp, Zea mays
  Clone ID: MRT4577_11837C.1
ccaaggagaggtgcgcggctggtggcatgcgagtggcagcggtgccgcgggactcttctcctcgctggccgtgcgcgccgtgccccgacggaatccaggtgacaccctgatattgatgtgaagttttgtggaacctcctgcatccttatatggtattaacaataatttaattgtctgggtgatccatttgagcaaatggaaggcaacgacctaccccctggaaacatgttgcaaggggctccctatgatagtttagacttacatggcgactctatggcaaaacatgccccaaactcaggaaaacagatcttcagcagctcccagatgccggggactttcacaatgtctatgaccagggctacagaacctgatgactt

SEQ ID NO: 20152 - DNA, 231 bp, Zea mays
  Clone ID: MRT4577_118380C.1
actcctatgggcgattgggttcttcgaggccggccacacatagagggtgcgagcgagtctaccttgcgcgtggtctcgaggacgtcgctgcggttgcggcggcgccaggagcgggaccaccggactagcttctcccacgcgacgcgcaccgcgcggcgccggtccctgcgcccgctcctgcgtggcgcgccgtcgtcgtctgcatcgtcctcgctggtactcctcctcctc

SEQ ID NO: 20153 - DNA, 385 bp, Zea mays
  Clone ID: MRT4577_118381C.1
ccccgatcttgcgaacaacagacagtaaacgcccccagctcgtctgttcttgtcaactttattgttgttcttcaattaccagcaaatatggcggcaggcgcgcaggttatcgccaactctggccacgatgacatgattcacgatgcggtcctcgactactacggccggaggttagcaacctgctcctcggaccgcaccatcaagatctttgaggtggagggcgagacgcagcggctctcggaaacactcaagggacacgaaggcgccgtctggtgcgtatcgtgggcgcaccccaagtacggcaacatcctcgcgagcgcaggctacgacggcaaggtgctcatctggcgcgagcagggcggcgtgtggcagatgatctttgagt

SEQ ID NO: 20154 - DNA, 432 bp, Zea mays
  unsure (1)..(432): unsure at all n locations
  Clone ID: MRT4577_118382C.1
ccagtttctgggtcgtagcaggaaacagggttatgtactccatgttgacgtgtttggagaaggccagcaaagcttttatttgcgttgggccttatttgagttgagcctagccatgagttccacgctctctcctcttcctctacagcactttgttagtccacaacgcgtgctactgctgcagcaacaaggcaacagacgaaatgatgaattcttctgcttgcgtctggccgaatggcgtccatgaaatgagatcgctgcaagaatttgcactgattttttttatctctctccaccaccacggactgaggattgaggagacgccaccctgatgcttatcttcttccagttcgtatacagtaacctgaacctgaaactngctgcagcttagaacatgaagctgaacactgccgacagtttatgccccctttgaac

SEQ ID NO: 20155 - DNA, 1894 bp, Zea mays
  Clone ID: MRT4577_118383C.1
ttttttttttcacaaaatatactttgaacccttcacgaaatatacatacgtgcaataagtcagggcgctgaaaacacaatacagcagatgcagagatcaacatttaccagattgatgatttctgtagctgtaaactgaactccagcaatacaacttgcaatcatctgattgcacatttacaagtttagtgtacattccgtacccccaaattaattttaaaaagggaaactggatgccaaaacaggatccttagagttagccttcacaggatccgtgtcaactctagaaacctacaaatttgcacagtttatcgagaaacctaacattacttgtgctaactgcagtaggctccaccacaggatccttaaagttagccttctcactcaactcttcaaatgcgttaacaacattctgtagtctggcaacaaactcaatcaggagtgatgcaaatgtagccaaggacaaggcactcgcgctttcatatgtttgggaatcctcatcttcaagtggtatgtttggatggaatgatttacgagcaggccaagaaagtgctggcttaaaaccgtcaattgttgacgctgaatcatatctgctcagaaatgaatttgcaagaaagctctttgactgatgcactaaagtttgatcaactatggtaggttccagccctccattgttgttttctttggatttgttttctttttcgacagcactggtgccatcatccttgttttctttgttcttgttttccgtttccacagcacgggtaccatttacaacttctttgattccttgagcttgcttgctagcatcccatcgttcagtgttcaccagaagatatgacttctcatcaatctttttttgcagctcttcagctgccatgtgcacttcgaacagaatacctgaagaactcagcttggtcattgtcttaactctgcttccgagctcgcgcaatactttagctccttcctgtcccactctttgaatctctgcagaaaatactcttctgctttctggtggtgcctgaatttctgaaagaatgcaaccatgtaatgccattactgcaaaggaacagtgcctcaatgctccactaactttggtgaagctcctccaaggatagttcattgttttgtaaggcccatggggtggctcccatatagcaaagccaagcagggtttcttcctgtgctgatgcctcaacagctgccctgtacccactatatacaggatcatcagatgcttgatacacaagtatttttgaaggaatcctttcatattccatgcatctcagatatccatcaacacaaccttccaaggattttgcaacaccagtgaaattctttgctatcaagttatgcaaatcctctcccgcccagattgggtagatgcctacattgattccaagactgacagcagcaccaatagcaatcaatataaatctgcttgtagctgtatcagtgaatttcccagtgttgtacccagagaccataacgtaacagaatgtcaacaagaacacacggaatccatactcatacggcttcatcttcggatgtagctttgtcaatgttgtgaaaaaggcaacaataaggatgcttgttataagaataacttcctccagttttcccaggtggccggacaattctgcaactactagagcaaaagctcctgcggttagtgtccccaatccccgattaaaccctttgcttaaggttgcaccgatgctgaactcgaagacgacgacgacggtgaggattgcccagacggagtggctgacgatgtcgcgcggctcccggaggaagacgagcagcgagatgagggcgagcgcgagcgcaaccttccccgcgaacacgggcttccgcggatcggcccgcgcgaaagcccacccggccggcctcgag

SEQ ID NO: 20156 - DNA, 244 bp, Zea mays
  Clone ID: MRT4577_118384C.1
gcacgagtggtattcgaacagtatgatgattgttctaagcagtgggaaattatcgacttgcctggttcctgtcgctggacttctgaaccactcggtctgtagttctgcccccctggaagttttcttttattagtcttcaggtttgtctctcatgttttctgtttcctatttttttctcaaggtatcccctcatatcttgaactatggtcgagtagatgaagctacaaaatcgttgaagtttccc

SEQ ID NO: 20157 - DNA, 597 bp, Zea mays
  unsure (1)..(597): unsure at all n locations
  Clone ID: MRT4577_118385C.1
ccggccgggagaaaagtctcctcccatctccgccctggccccctctcaaacatccccgcggcgatggatctccgtctcgcccactagcccgccagcgcgaccgtgggtgtgggtgggtacggggatgggactcctcgggcggaggccgtggctgctgctcctcgccctcgcttccgcggccgtcgccgtcgccggcgccgnggcagcctccgagggcgacgctggtccgctctacagagcctgggtggaaggatgccaaaaaacagagctccttgaaggaggctgatattattccctgtgtgtcagccgttgttgctttgactagtcgaaactccccgtaacatgaaattctccccttagtgtgggcgtttcgaccccggggggtccctggaccgacgagtaaattgtcgttgcgtgccctagcccaaatgggttggcgcgagacggaacacgaagggggaaaatcgcggctctgtgttatcctgccccagagggggtgcgcttgcagtaggggttacaagcgttcacgagggagagagagagtcccgcgcgaccaccctcacgtatgagggccctggccccttccttttatttatg

SEQ ID NO: 20158 - DNA, 1771 bp, Zea mays
  Clone ID: MRT4577_118386C.1
cttgctgcagaaccaatatcggtggatttcacattactgattttctgaggcagcttctctgtctaaaatatccctatcacacggcaagtatttcatgggaaaaggctgaagagctgaagaaggaacattgttatatagctcctgattatatggcagagttgcagatatttaaaggtgcatagagctttctataggatttgatgaatcgaagtgcttgtacttgtgatgaacaataaggaagaagctgatgagaaaatgctgtattggcaggtaccgtcggtcccccccccgggtcccgtaccaccatcttcgtaagaacttgcaaggaaagcagctttgaccggaaaggctggtcagcgtttgcgagacatggctgctgcaaagagatctcagaagatagtggaactagaaaaactctttcctatctggaggaactaatggaacaacttgatgaagctgaggaagaagaagcaacagctattctaggtagctctggatatctttcccagcaggaaatcagatctgccattttaaaagcatcacaatctttaaggaaagcaaaaggggagtccaatggcaatgatgagaaaacagatgcctcagcagttgataagtatccacttgtatctgttcctgatgagacactgacgccagaacagttaaaggaaaagaagaaacagatattacttaaaaccacaacagagggcaaattgcgcgcaaagcagaaacgtgctgaagaggaggctttgcgggagaaacaagaagaaaagaggcgtgcggagaacccagagttataccttgaagagcttcgggcccgatattcagaactttctgataaatttgagcagaggaagcgacagaaagttaatggtagtcagacaaatgggaaccatagttcatctgcaggtgtaggccgtggagaaagactaaatgcagctcagaaagaaaggatgcggctgcttgcctcagctgcttttgatcggggcaaaggtgaggacacttttggaatgagagacgaggattggttagtgtacaacaagatgagcaaagacaatgatgatgacagcaatgatgatgatgaatcggaacttgttcgaatttcatcgaagctccaggagattgatcctacatttgtgtccaaatccgaagctgttcaactgactccggagccacccaaagtccggccactaaccgctgaggattacagaattgccattgggatcgagcggttccgttgccctgaagtcctcttccagccaggcatgattggaatcgaccaggccggcatcgatgagatggtcagcatctcactcaggagattaatggaggacgagtctgtgaaggagcgcctctgccagtcgatccttgtcactggcgggagctccctgttccctggcatgatccctcggctggagtctgggatacggcaatatcggccctaccttgctcccctgaagcttgtcagagcagctgaccccattttagacgcgtggaggggtgctgccgcctttgcggcatcaagcaagttcggcaaacaaacgttcagcctagctgattacggagagcatggagagaacctgtttcatcggtacaacattgtttactcactataaccggaaaatgacatagtgatcgaaccatctcagtcaggctatttatttaacagctgatacaaattgatgtagcaacaaagtttttcaaaactgcaattgatatttttatgtgattggaattggagggttcaaatggtgaaggaatttcatacccctat

SEQ ID NO: 20159 - DNA, 184 bp, Zea mays
  Clone ID: MRT4577_118387C.1
gacccaggggggcgcgtcgactactcgagcaaagtcagtgaggaggataggcttttgcatctcttcaatacaaacgaatttgtaaaatgggacagaacttatcgtacctggtgcgtgacctctctgacggagaatcctgtataaataccttagatgggtggagggtaaagcctgcttcctaagg

SEQ ID NO: 20160 - DNA, 397 bp, Zea mays
  Clone ID: MRT4577_118388C.1
aggccaaaatgggcccttcgggattggggggcccaattgggggggcaggaaaaacaaagggactttggggagagggggtggaccccaaaaaagcccccttggaactttagggatttggccaaaaatgggtctgaaaaaaaaagggggggggacccccatataaaggggttccctctaaaaaaacgggggggaaaaattccccctaaagggcggttgggaaccaaattttttttttccctgggggggaaaaaacttttttgttttttccccccccaaaactttggggggcaaaaaaaggttcactggtttggggggccccaaagggggaaggaaaatgtttaaggtgcatccccgggaaatgtgtgccccaaccaaaggggtggacctcggggggggg

SEQ ID NO: 20161 - DNA, 170 bp, Zea mays
  Clone ID: MRT4577_118389C.1
acgacccgggtaatttaacgccgaactatcctatgctacatgctacataacggccacctaccgagcatcttacagcgattatccatatgccttcgacagtcctattgcctatggcggcacctatgcctacggcatttgattttccgaagaaaccatgcccatcaactact

SEQ ID NO: 20162 - DNA, 269 bp, Zea mays
  Clone ID: MRT4577_11838C.1
tattctataacaattcacgacacctaataaaaaaacactcacatccactgggaaaacatggtggcgttcaacgcccttcataataataacatcccacacactattccatactcaacctcaaatttcctaagccctttttagaaccatttcccattcaataaaccggtactcatcacgagcctcgttacatcacacttattatcttccatttacagagaatgccaaacaggcaaattaacatttttaaacctttttaaatgtttacaaat

SEQ ID NO: 20163 - DNA, 732 bp, Zea mays
  unsure (1)..(732): unsure at all n locations
  Clone ID: MRT4577_118390C.1
gcggccgggacactgagaatccgtagagacaggcgtcttcggactcgcctatctccgagactcgagntttcccaatggccccccttctctattgctcgccgccgacgacgctccaccgggtatacaagaccatgagggagggcctgtcgatccctatgagatagcctggtaggcaggcccggaacgtgggatgagagatgtaccgcctctgggatggagtcatggtgtcggccatatggcgggagtggaaagcatacgagcgagcataaccaagggtgccctccttgcttaacgagactggttcagagaaccttgtcaggcggacgggaccagccgaccgtaaggcaatctgctggcgaacagcgacccatggccagtacacaggcagatcggtacttgtgaccagattctacgcggtggataacgtggtcatcaccggctagggacaccttgacggacaaggcgccaacgagtggaggaagagctcctgtgaccaagaagtacgactgtgaagaatacttgccaagtcgctggggatggacttcgtgaacaaggtggaggtgtccggggtcacgctggtcatgtctaagtccttccacatgaacatgtaccggtgcaaggacatgataactcaggacgtgaccgtgacagcgcccggggacagcgccaacacggatggcatccacatgggcgactcatccgggatcccgatcaccaccaccgtcattggcg

SEQ ID NO: 20164 - DNA, 598 bp, Zea mays
  Clone ID: MRT4577_118391C.1
atcgtcgtccactccggctctaggcggacaggggcggaggcttgcctggcatcgaagcggtcgcatgtactagccagccagtgtagctgagccaccacactagtgtgatggtgaccaccggcggcagataggctgtactggggctggggcggttgctgcttgtgctgtgcgtgctgggggtggagctgcacagtggtacagctccatatggagcttgcgggactccatcttcgagaccggcaacatgtgcgtggggggcgtgtgccctttctggctcagacggggcagctgccctacggggagaccttatttggactgccgaccggacgctgctcctacggtcgcgtaatcgtcagacttgctggactagcactgggggctgcccttgctgccggtttctaaagcccgcggcgacttgatgaagggtgcgaacatgggcatcatcgaagtgcccagcatggactgtgacttattcaagtacatcggatctcagtgacatgatctgaaacagctggtcgttggacacccaaatacagtggttcatgcagctgctcgcctccgtgtgcggtaaggattgcaagaactacctgaccaagtg

SEQ ID NO: 20165 - DNA, 353 bp, Zea mays
  Clone ID: MRT4577_118392C.1
gtcaaggacacctttgagctacacgcggcgagccggggagatccaagctttagtatgtccggggcaaacatatatgaatatagcgccgaggagtactgatgatgagactggtgtttgcggtgctgagaactgtgcgttacctctgctcgagctcataactgccgctgccaccctagaggcgggtgccggacgttgcactactgtagaacgatcgatgactactgatgctacatataccggtgttacctgtgaccttacactggcaactgcaaattatcatagggcctcatgcaatatcactgacaactggcttgacgtaattgctaaaaacaaaaacaacgggcttacgatcc

SEQ ID NO: 20166 - DNA, 408 bp, Zea mays
  Clone ID: MRT4577_118393C.1
gaaatcgcatagaagcgaaagagaggacacacacattaggctaaagcgtcggttgagggcctcctacaccgctgcacggaaccagtctcgtcctcactgtcatcgccgatcacatgtcacaggctcgcagatccctggttttagatgttaccaaagaagtatcttttcatgagaagcaatggatatgatggagttctattctttattaagcatgcgctccctcgccacgccccgtctcgcactctcgccacacctcaccaccggtggaggagcagcagggggagaccgggttggaggcccgcaggaggcggagcccacgatgcctatgtccgtggggaaccagttgcagcggccggccgagtgcccgccagcgccgcggaagctggtgtgggcgcctccgcttccgtc

SEQ ID NO: 20167 - DNA, 424 bp, Zea mays
  Clone ID: MRT4577_118394C.1
ggaggggccaacccccagaaaaagaagggggaattttttgacggggggccaaaaaactcgggggcctccttcctacaaaataccccgaggggggcgacgccggggccctttaagactaaaaggaagggaaaacttaaaaagggggggacaaagcgccctaaacgggggggggactttaaacgaaaaaaaacgggaaattctgcccccccggggggaaaaaaaaaaaaaacgggaaaccgcacccccccggggggggttttgttcgtttagggcccaaaggaaggaacctcaaccctccgggggaaaatgaaggagccggaccaggttggggaggggttaaagaaaaaacaccttgttcccatttgggactggggcccggggggcaaaattggggaactcacccgcgcccccctggacagggggg

SEQ ID NO: 20168 - DNA, 237 bp, Zea mays
  Clone ID: MRT4577_118395C.1
ctgggaaacaaggggcgccaatcactaagcttcgcaccaatgaaatattcaagcttcaacccctaataagggcagtagattcatgtttacatctttgacttgcacaaaaagtggtacatacaactcaaattccgttgccacatttgtactgaacgaaccaatctaacgcctacagactgatttgcttttcccatgcaaaccacaagccctatccttaggataccggcatatacacat

SEQ ID NO: 20169 - DNA, 250 bp, Zea mays
  Clone ID: MRT4577_118396C.1
agactaagctgctaaccaagtggccccgatattatacgacgcttaaggggtgtggaatagtattctgtattacaagtggaagaaaactcgtagactaatatggctgactggatacaaaaatgcatataggcagcccgcaagaagttaatatggccgcaaggtgctggtataagcagaccaacacttcatagtcaaccagtaaaaactaatcgtctgagcaatctggcctgcttataacttacggagtttg

SEQ ID NO: 20170 - DNA, 565 bp, Zea mays
  Clone ID: MRT4577_118398C.1
ccgcgccacaccaacacaagctagaacacttcacgaacggttttggtgctgcctgaaggagcagcttttcagaacttttgcttcttttattctgagcaggaatgctcggtgcttagccgcacatcacgctacgaacgtgttcatccctacgttcatgatgcagctaattcactggtcattgtgtgcgagctaatctcgccacaccctcctacagcatggccatcgcagaactgaaaacaggtaaacatgcaactactaacacatgcgcaaggattactagcagcgtgtcatggtataacaggttctggtagttatttggattgtagttccatgagaacaagtatgcagtaaaaaatgtcatctcattctgtaaaaatatgttcaatgtgagcattcagtttttgcagcctccgttgaacttttaaacccaaaccatggcttgtatataactcgtcaactccatgagtatttagcagcaaaacatcgaacttttcatcaacggcgtattttaagttcacttacatattcaacagggggcttttggcaaggatgctttcgttggatt

SEQ ID NO: 20171 - DNA, 1239 bp, Zea mays
  unsure (1)..(1239): unsure at all n locations
  Clone ID: MRT4577_118399C.1
atcaacttgtctttcttctctcctctcccccatgccccgtccgtcgcagcaggggttatatagtgcccgcgaacggacgcgcaggcgccacgaagccgagatcgagcagctacctctccgatccgaggcctgagcgagcgagctgagctgagctgaggactcagcctatataatatctagactagagtacaccacaacgacgaggcacatatatatacacgcggcggcggccagatccatcttggtatacacgtaatatatatacacgcacgatgggcagcgccggcggcggtggcgagagcaagctggagagcccgctgctgggcgcgtcgtcgacgggccacggcgaggcggtggtgagcgggcagctggagagcatcctgggcgacgcgtccgtgccgtgggggacgcggatggcgtcggcgtccgcggtggagatgcggctgctggtgcgcctggccgcgcccgccgtgctcgtgtacatgatcaactacctcatgtccatgtccacgcagatcttctcgggccacctcggcacgctcgagctcgccgccgcctcgctcggcaacaccggcatccaggtcttcgcctacggcctcatgctgggcatggggagcgcggtggagacgctgtgcgggcaggcgtacggggcgcacaagtacgacatgctgggcatctacctgcagcgctccaccgtcctgctgatggccacgggggtgccgctggcggcgctgtacgccttctcccgccccgtcctggtcctgctggggggagtcccccgagatcgcgtcggccgccgccgtcttcgtgtacggcctggtcccgcagatcttcgcgtacgccgccaacttccccatccagaagttcatgcaggcgcagagcatcatggggcccagcgcctacatctccgccgccgcgctcgccgcccacctcgccctcagctacctcgtcgtctaccgcctcggcctcggcctcctcggcgcctcgctcacgctcagcgccagctggtgggccatcgtcgccgcccagttcgcatacatcgtcaccagcagccgctgccgcctcacctggaggggcttctcgtggcaggccttctccggcctgcccagcttcttcaggctctccctcgcatccgccgtcatgctctgcctcgagacctggtacttccagattctcgtgctcatcgcaggcctnctcaaggaccccgagcttgccttggcctcactctctgtctgcatg

SEQ ID NO: 20172 - DNA, 143 bp, Zea mays
  Clone ID: MRT4577_11839C.1
taccagaccataacgtcgcatgcgacgcatacgtacgctcggaattcgactcgagtcaatatacacatgtcgatccttaaccgaacatcggcaacatctatctgtgttcctggacgccaaaaatagcaagtggcaccataaac

SEQ ID NO: 20173 - DNA, 262 bp, Zea mays
  Clone ID: MRT4577_1183C.1
gcgctcacaatggagccctccgagtatgtacagagaggcatccagacgctggcggatcccggttcctttgactccagcgccttcgcgcttctcctccgggcggctttccagagcctgctggacgcccaggcggacgaggccgcgctagatcacccagacttgaaacatatcgacccagtggttttaaagcattgtcatggggcagctgcaacttacatactggaggcaggaaagcaccgagttgacaagtctactctaagca

SEQ ID NO: 20174 - DNA, 234 bp, Zea mays
  unsure (1)..(234): unsure at all n locations
  Clone ID: MRT4577_118400C.1
cagagcggaggagaacccgagcgacaccangaggggngnngcggcggggcccacgcnacaccgggcacacgcagcgagcgccaccaccacgcaaacaagcgggggaagcggaggccagccaccgacgacgagaaaaaaaccgccgccggagcaacngccaccggggggggggcggccaccaacggagcaaaaacgaccgccgggacaacaggcgacgccgggccaccagacacc

SEQ ID NO: 20175 - DNA, 2047 bp, Zea mays
  Clone ID: MRT4577_118401C.1
cattgggtacctcgaggccggccgggaaaccgatcgagcctcgacgagcgagcagaggactcatcctagctagctaagctgtccgacacagcacagcagaccgatacgagtacgacgatgatgagtagcaccggcggcgagagcaagctggagagcccgctgctgggcctgcccgcgccgggctcgtcggccggcagcgggcacagccacggcgaggcggtgagcgggcagctggagagcatcctcagcgacgcctccctgccgtggaggcagcggatgctgtcagcgtccatggttgagatgcggctgctcgtgcgcctggccgcgcccgccgtgctcgtctacatgatcaactacctcatgtccatgtccacgcagatcttctcgggacacctcggcacgctcgagctcgccgccgcgtcgctcggcaacaccggcatccaggtcttcgcctatggcctcatgctgggcatggggagcgcggtggagacgctgtgcgggcaggcgtacggcgcgcacaagtacgacatgctgggcatctacttgcagcgctccaccatcctgctgatggccacgggggtgcctctgaccgtgctctacgccttctcccgccccatcctggtcctcctcggggagtcccccgagatcgcctccgccgccgccgtcttcgtgtacggcctcatcccgcagatcttcgcgtacgccgccaacttccccatccagaagttcatgcaggcgcagagcatcatggcccccagtgcgtacatctccgccgccacgctggccgtgcacctcgccctcagctacctcgtcgggtaccagttcgggctgggcctcctcggcgcgtcgctcatgctcagcgtcagctggtgggtcatcgtcgccgcgcagttcgcctacatcgccaccagccagcggtgccgcctcacctggacgggcttctcgtgggaggccttctcggggctccccggcttcctcaagctgtccctcgcctccgccgtcatgctctgcctcgagacctggtacttccagatactcgtgctcatcgcgggactcctcaaggaccccgagcttgccttggcctcactctctgtctgcatgtcaattacagggtgggtgttcatgatatcagttgggttcaatgcagcagccagcgtaagagtgagcaacgagcttggcgccggcaacccaaagtccgcggcgttctctgtggtggtagtgacgctgctctccttcgtcctgtcggtcataatctccgtcgtcatcctgctgtgccgggactacatcagctacatcttcaccgagggcgacgacgtgtcgcgggcggtcgcccagctcagcccgctgctggcggtcaccctcatcctcaacggcatccagcccgtcctctctggggtagctgtggggtgtggatggcaagcgttggtcgcatacgtcaatgtcggctgctactacatcgtcggcatcccccttgggtgcctcctgggattctacttcgacctaggagcagcgggtatctggagcggtatgatcgggggcaccctgatgcagaccatgatcctggtgtgggttacattcaggacgaactggaacaaggaggttgaagaagcgcagaaaagactgaacaaatgggaagacagtaaagcgcctgtccagtgagcccaagaactaaataaggcttctctgttgccaaaccaagaacgagagacgtgggaaattgatgcaattcaccctgatgcagattcggaaattgatgcaaggttgcaattcagtgtcctgaaatgtctacgaggagaggagaggagaggagatgagatggctggaattttaaatactactcttgcatcacgcaattcaattctgtgttccgttattatatatcgttcactgatgcgacagcatagcagactagtagtcaataataatttttgttggaattgccacgaacccgccaccataaggcattgttcgtttctactgaattggtggatcggaacgatttctaaccagattgtttctctaatttatataaactttgattaggtgg

SEQ ID NO: 20176 - DNA, 281 bp, Zea mays
  Clone ID: MRT4577_118402C.1
atacgcccagaatgacatagtagtgctactgacaagaaagtggattgctctcaaatggggtgacagtaataggaaactgatgctctcgaaccccctgtctgcttacgggaaaggtaaacgcgaccgaatattattcttcaattcatgcacaatgaactacttcatagccttgttttatttcattcttcgcataatcggagaggaaccaaaccaacagagaacactccctttttcttttcttaacaaatcatttattatgatactatggagcgagaacatct

SEQ ID NO: 20177 - DNA, 342 bp, Zea mays
  unsure (1)..(342): unsure at all n locations
  Clone ID: MRT4577_118403C.1
agagtgtttggcanantctgtgncgtggcatacccttacatggttcgcancacttatatcactgcctgcctccctcaacaccttcnttttgatctcttctttcacttacactgttctcaccctccctgnacctcttgccatgttctgtcaactcttattcttcttccctgcccttctgttcttctactccccctctctccttccccattttttccccacacctcctcccaatgttcacctctctccttcctcttcccactccctctcccccccctttctctctctctttctccttgtctttttcattcctctccccccctcttccccccccccctcccatct

SEQ ID NO: 20178 - DNA, 461 bp, Zea mays
  Clone ID: MRT4577_118404C.1
tttcgcctccctctatgcttccccttccattcctcctctctgcttcctttctgatggcgagaaggtctgcagaatgcttgcgagatgctaacaacaagccatgcacaagctatagcccctgtccaggtgctgctgacctgtacattgagatctactatggatctatgaagagaaagggaggagaaagggtgctgttctgttcccccactgtgtgtacctagactgtcaatgtcagcagagaggctccagaggctctcttgatggtctccatcttgtacatgaccaatacttcaccaaaggatgccttaaagcttccttccacctttcactccttgcatatccttggcatgaacttgatgctaacaagatcctatcctgttctgcttctgattggctagagacttgccttagggaagccttaggccacctgtactacacctgtcctaggttagacactgctt

SEQ ID NO: 20179 - DNA, 208 bp, Zea mays
  Clone ID: MRT4577_118405C.1
acgttctcgtgcttgcgatttcttaacttgggcaaagagtcaactataaccaggaaggtgggcgtttttttctacgagctgaaacttaaaaccacggggatccctggcccaataggcacaaggcccatgataggactgacgggagaccttaattggcccaggcgggaatccaccgtgcatccatggccttgggcatttggcttaacaa

SEQ ID NO: 20180 - DNA, 306 bp, Zea mays
  Clone ID: MRT4577_118406C.1
ggagacccaccaaatatatactattttaggggggggggaaaaaacccaaagggggaaaatgtccatgcagagacacacacaccaaacattgatcaccaaaaacgcgtacgaaggaccatgcacacacattatcaggaaccacacatggtatacaaagacgggcaaaaaaacccccggggctatggtcgcccccaaagcatgctgctttggggccggggggggagcctacgaacgaaaggagaaggagcgagcacaaaccctaacagccgaaaaaggggggctagtataaaacccccgccggggggg

SEQ ID NO: 20181 - DNA, 387 bp, Zea mays
  Clone ID: MRT4577_118407C.1
cataactatgtcaaataacataaatggagaggaccaacttgatggcgctgatgaggttaaagaggttaaaaggcgtgggaagacaaaacttattaatgtttggaacattccaagaggccatagggttgtagttaattgtaatgagctgaatcagcctatcggagaagaggcaggagtccttgcaaaattccttggcatggttgctaagaatggctccttgtgtagcttaagcttcaaggattggagactacttataggaaagaaagataggaaccataaacaaatcaataaggaggccattcttaatcaagtaaagaagagatttctttacccttgccggacggaaacatgggtgctgcgaacaatttgagagagatggaggcaaca

SEQ ID NO: 20182 - DNA, 175 bp, Zea mays
  unsure (1)..(175): unsure at all n locations
  Clone ID: MRT4577_118408C.1
gcaacaacacatcataggtggtaggaggctgctgggatcgccaaagcaagacgggcagatggcaacaattgatggggttttaacancacacgcacaaaacatgaaatccaataatcaaagcacctggatgaagtatgcggccaaccagaaacaaacagctacactcccagatacc

SEQ ID NO: 20183 - DNA, 282 bp, Zea mays
  Clone ID: MRT4577_118409C.1
ataaccaaacatagttggacgcgttcccatcctgtactcaacctaatctcgtcctacataggcgggatggccatccttcttgagaccttacctacccaaacgctctcggtgagctacttctattcgattaatcaggcaatccgcttgcttcattttagtccgtctcatatctgattgctggaaagtccaaacccgcgatggatcctgtctccggttgtccttgcctgtaaagctcctgtcgctctgtcttagtcgtctaaaatcacatgttctgcttattga

SEQ ID NO: 20184 - DNA, 452 bp, Zea mays
  unsure (1)..(452): unsure at all n locations
  Clone ID: MRT4577_11840C.1
cggacgcgtgggtttgttcgcggcgaatctcctctgcttgtccgcttccccctcgtatataagaaaaacacgccgcgcgtgccgggtgccgcgctttaaccgccgcacaccctcctccctccataaatggccactcccgctcccaccctgccggagccggccgcgcaagagctgaccgctgccgtcgccggcgccggccagcggcagcagccccatcaccagcacccgctcctcgcggcggcggctgcggcgtcgctcctcgccgtgctctacctcccccggccggtgctgctgctcgtgctctccccggcctcgctctcctccctgctcctgctcctctccctcctccacctcggctccacgccgccgccgccgcctcccgctctcngccgccctcctccttcctccccgccgccgacggaggagaagaagcagcaagagcaggagcaggc

SEQ ID NO: 20185 - DNA, 913 bp, Zea mays
  unsure (1)..(913): unsure at all n locations
  Clone ID: MRT4577_118410C.1
agagtcgtgcctcttcctcctcctctccggtagcgcggtcgcgccgccccattgcgccccttcctcctcgcagtcacggacgcgcggcacgtgctccacctcggcgtcgccgccgccaagtgaaagagagacagggaggcgcagtcgacgggggcgtggtgaacgaggccagtcaagcggaggaaggaaaggggactgcagccgcgcggtcggactaccatgtcatctactgtgaacttccaagggagcatccgtnggagatcgccgagttcatggtctacttctccgtgcccgacacgctcacctacctcgtcgcgcaccgactccaagagcctctcagaagctcatgggcctccgcccgtacgaggattaccctcctggaggaccgcgccctactgcggccgccggcagactaccatggcgtctcaagagaacttccaaggggatcctggagatcgccaagttcggcgtctacgtctccgtgcccgtcgcgctcacctacctcgtcgccaccgactccaagaccctcaagaagctcatgggcctccgcccgtacgtggtttacccgcctgaaggcccacgccctccaccgccagaagaactgcgcgaaagggcacgggagattgcccggaagaggcagcagagctgaatgtatgctgtgggttctctaggggcgcctgtgtgtgtggctgtgtctagggaacaacacggacgatgaatcctcccatctcacgagaacttgtacaacgccgacgatgaacacactctggttgttgttgttgttgttgttgataacttgacgtggaagtggaacggccctggtctttaattagcatccttttactgctgttgttacaataatatactgagaaacgagaatcagctagatataatccagtgtatattttcccct

SEQ ID NO: 20186 - DNA, 338 bp, Zea mays
  Clone ID: MRT4577_118411C.1
caaccataacatttttttttttttttttttttttatttttttattgttctttttattttttttgtttgaaaaaagaccgccctacaaatttcaatgaaggggggttttctcaaaccgaaaagtttgaccttttttttcccaagaaaatttccaaatcgggggggcgcccatcaaaccactttttttttggttggaattgggttaaaatttggctctttcccttcattttccccggggccgtttttcatccttacccccatcagggcctgtccaatattttggggtggcatctcttaattgtggagaggaatggcctttccccgtgtttttttttatgt

SEQ ID NO: 20187 - DNA, 2218 bp, Zea mays
  Clone ID: MRT4577_118412C.1
gaacgcgtccgcctcttgcctccccacacgaagaggaggtccgcacgccaccagctccacctccacggaatcagacggtctcctcctccttttctttctcccgtggactgcagcgccgccgggtagagatcccacatctgcgcctcgaccaattcctccttcctccgagaatggtgatcctctatccagggtgtgttgctccaacagttcaccgtgattttctgcccagatgggtgctgctgaacaacagctcgagaatgtactgccatgtctttccagatagaacgaaaccgaaaaggcaatacaggcatcagtgggtgccttgcttctccaagggatcttcgttccaagatccactgccctctgtaaagccttcacgccttcttccagcagaggaactaaagacatatcccaacactgttcctgaggagatatttaacacgatcatactagatgactccgatgcattctatgtgctagaactgagcacgagtagagaatttagttcctctttggataaaaattctgcaatcttaatctgcctattcgatgtcgacggtgactccctattacaaagagtaccggcaatctatttgggtcaacctacacatggatttaagacagagcagcagatacccttccaaagtggttcagttgatatcgttactttcaaggggtcaaaactgaaaacgattaaagaagtctggatcggtcttgaatcaggttcatggagattagatggtttgagcttgaaagtaatacatggaccagttggtcagcctaaagaaataaatggaactccagaacagaagttcagcggtttgcagtacacttttgagaacgtaaatgtgttccttggagatgatggagcttcagtagctgaagcaaggccgacggctatcactgacctctcaggagtcggcctttctgatcttcaacaagggctgttatcctcaagaagcaaagctttaagcattaaggaagtaagagaggatgggttgagagagtacgccgaccttaaacaatctctgctgctctatgacgcatctatagtgataaccggcttctctaccttcatcttggcttcaaatgacagcgctgcctattcgttcctgataggtggcattggagggttcctgtacctgttgctgctccaaagatcggttgatggtttgcctgtgatcggttcaccttcagaagctggcggtgcacagccctcggtaaaaagtttcagcggtgtaaggaggccatggttgatactatcactagtactggttgcaggtgcagttgcactgaagtatggtgctggaggcgacagctttgcgctcacacccaccgacctctttgttggcactgcagggttcctagcaaacaaggttgctgttcttcttgcagcgttcatgcctatgctaagtgactcaaagagtgaagatggatctggtgacaacagttaattggacttctttaaaaatatgttagtaatagtttcctatagaagatctgtattcaaggctggaacggaattagctgcaaagggcaagccctagtttctgaactggaaaaaagatccctctcatcttggtgactgggtcatccttgcaagggttcaattcacagcaagagttcaagtgttagacatggaggacagctgtgtatcattatatcaagaagaagaagaagaacaaaagtctaggatactttgaagcacccttagaaaggcatgaccagtacagcagaagaaaaacagagacacaaaaactaaggacatggccataaactatggagctttctggctttcgccatacagcacaacttgatttcatcttagaaacttgagttgtagtatagtatactcacatatcggacactgaactgttaagatgatataccgactacagctttgttgtatgtaaaaatatgacatttgtgaggttaaatacacagtaactatcgaaacaaaatgcttggcgttgctccaaatcagcatcgtcatctgagtattttcttgaactggaggctctagagcgattgtagattcactcaacacaacattagcagtatacgactgaaaagttcctgtcaagttccgctgaacagtaattattattttttaacttattatcttatacagatctgagatgaacaccatttcctaggcagaattatcattatattcaattgtaagtattttaccagagtccatagatctagtcaccgc

SEQ ID NO: 20188 - DNA, 668 bp, Zea mays
  Clone ID: MRT4577_118413C.1
ggccgcttttttttttttttttttcttttttttttttttttttttttttttttttttttttttttttttttttttttgtttcgatagttactgtgtatttaacctcacaaatgtcatatttttacatacaacaaagctgtagtcggtatatcatcttaacagttcagtgtccgataggtgagtatactatactacaactcaagtttctaagatgaaatcaagttgtgctgtatggcaaaagccaaaacgctccgtagtttatggccatgtccttagtttttgtgtctctgtttttcttctgctgtactggtcatgcctttctaagggtgcttcaaagtatcctagacttttgttcttcttcttcttgatataatgatacacagctgtcctgcatgtctgaaaaatacaacttaagtttctgacttcaaactgccacaacacttgaactcttgctgtgaattgaacccttgcaaggatgacacagtcaccaagatgagagggttctttttttccagttcagaaactaggacttgtcctttgcacttcagctaattccgttccagtcttgaatacagatcttctataggaaactattactaacatatttttaaagaagtccaattaactgctgtcaccagatccatcttcactctttgagtcacttagca

SEQ ID NO: 20189 - DNA, 727 bp, Zea mays
  unsure (1)..(727): unsure at all n locations
  Clone ID: MRT4577_118414C.1
taatgcagcagatgctgacataaatgttccagagtatggatcatacaggacatgggagagaatctccgatccgccagcatatggtaatgaggaaagtgaggatgaaggtgtagatccacccgttaatttttcactagcccaaacttatgttgaagattacctgcgatctgcaagttattatcaaagggaagacatttactcgtctgttagcctttgccctacaaggaaaactgttccaattgggccaaattatcaggctgagttgccagagtgtgcatctggtaattgtaggagctcagttgatggtaatgctgatgtgtcatcatcttctcacatacgtgatataaaggaagccgagagtgacaagtggattaggaactctgtcattccaatgcctggttctgttgagttatcttcagtgctgaaacctgtttgctgtaagacggattgcagttgtgttgatgaaggttcgattgcgtgcgtgaggaagcatgtgaaggaagcaagagaaagactaatgagtgcccttggtctgaacaccttcaaagagttaggattctttgactgggnagaggaggtggccttgaaatggactgaagatgaagagcatttgttccaggatgtggtatcattaaaccctgcctctcttggaaggaacttctgggacgaacttccgcttgctttcccattgaagactaacaaagagttagtgagctactatttcaat

SEQ ID NO: 20190 - DNA, 423 bp, Zea mays
  unsure (1)..(423): unsure at all n locations
  Clone ID: MRT4577_118415C.1
ccacgcgtccgccacgcgntccgcggccgcgtgggtttttacggtctaaaaaagagcaaccctacatgaccagtacaaaaaatggaaaaaaagaaaaaaaaaaaaaaaaaataaaaaaaaataaaaataaaaaaaaaagggggtngggatatggagagataaagtttagtaacagttgtatgtgagggttgagtttttttatggggtagcttaaattaaataaagtggtcagaatttaaaaaagagtgtaaatggaaaaaaacttggggtttctaaatttaatagttttaaagaaaattgttttttggggagttggtgtatataaaaaaaggattgaatggatgggttttgtaaaatgttgtgaatattaaatgggaaatggaaagggttttttaagggggtattaaaaggggtggttgtggg

SEQ ID NO: 20191 - DNA, 305 bp, Zea mays
  Clone ID: MRT4577_118416C.1
ctctaccgttcgtgaaccaagcggcggcggatggtcatctcacatccttcctgaataggcgtgcaccgttctggatcgctacaatatcgcgtgtgccgctgccgactcacaagatgacggactaaactgcttaagcggctcaccgaggccggcaaatacctatgctgcatggtgactcaagttactcatgatgcacattcaaggcttatccactggtgccgtcaggcgcctggctgctgggatgcataatgatgcctaatattgcgagaccgtctgtcaagatgacgactcactattttctggac

SEQ ID NO: 20192 - DNA, 114 bp, Zea mays
  Clone ID: MRT4577_118417C.1
gcgctgctcatctcaatcctcgagaaacgcatgcccacgcgatcgagagatagcgtcatcgccgactgcaacgacgatcgctacatcctcgatgctcactcccggacaactatc

SEQ ID NO: 20193 - DNA, 307 bp, Zea mays
  Clone ID: MRT4577_118418C.1
aaaaaaaaaaaaaaaaaaaaaaaaaaaaaaaaaaaaataaaaaacaatatcatataaaacagacctaagttcccacgggattcggcgccacaaccttttgtctcctataatcacatcccacttcactcgcgcgcaccgttttattacatcgtctccgaaatcaattccattgcccaccctttctcaatctgcatctcttgccaaaccccctctcttccccctatctattctcattcccccacactccccctcttttcctactttgcgagctagcctcaacggatcctgcgattctgcccttccataa

SEQ ID NO: 20194 - DNA, 172 bp, Zea mays
  Clone ID: MRT4577_118419C.1
gggagggcggggatagatttaattgatgggaaatatttgttttgaactggctttaaaaaccgcttaagccctgccaaacaggctggaaccacattttttaaaacttcaggtttttttaacacaaattgcgcggacaggaaagcacttttagtttagatttagattttaaaac

SEQ ID NO: 20195 - DNA, 495 bp, Zea mays
  Clone ID: MRT4577_11841C.1
atggttagcaaaattctacacgagccagttacttacaccgaaaacctgcgacatgcaaacaatgatgttcttggtaccgtaccctctctaaaggtacaaatatatgtttggcttgacccaaaaaagtgcaccgaggagctatacacactaaacttagacaccggactccggtaaattatgcacgacatttatacgtaaatcacacggtacataattaacataatttggggcccacaactttgctatttaagtgaggcctgaaatgtctagctccttggctcgtatcagcaaccggtggtgcctaaaacagggtagtatcgcgtgccaaacatacaaccatcacatgtggaaagtatcaacaagcacacacccgattgtaacaagacccggtgcttgaggccaccggatcttgaaacataagaaccttgctgcaggggcactggaaattgatcaaaatgtggtgtcatgccgaacccagatatttaactggaaaac

SEQ ID NO: 20196 - DNA, 159 bp, Zea mays
  unsure (1)..(159): unsure at all n locations
  Clone ID: MRT4577_118420C.1
ctttcttntaacgccaaaaggaccccaacctacctacccggaacccgccattgccaccggggccagtggacattctcaaacccaaccccgcaacctcccgtgaccaagccaccgccgccgccaaagggaagaaccgccgccggggccaagggcttccgc

SEQ ID NO: 20197 - DNA, 108 bp, Zea mays
  Clone ID: MRT4577_118421C.1
tcttcattatcgttgactacatgaacctcctggttggggaggtttccgtcaggggcgcgattttcgacgatggcattccgctcgagaccgatttcttcggtgggggca

SEQ ID NO: 20198 - DNA, 1263 bp, Zea mays
  Clone ID: MRT4577_118422C.1
cattgtggacctcgaggccggccgggaattcccagtcgcccaccgtgacgcccatcgagtcaaccgaacccaagccgtgtggcgactggcgaggcgagtgccccagttcctaactccggtgggcgcgctcccaccgccgcgcggctcaaaacccgccctcagcctcccgcgctccagtccacacgggagcgggtggtgtcgtctgaagcggcgcgatcaaggagtcttcgggcgctccggacgtaacgtgctggcggttgcttatctccggatgtatatataagcggaaatgttctccttgttctatggcctgtggaagtatgtgttcgccaaggacgagttccgtgttctgattcttggtgttgacagagctggcaagacgactttgctggagaagttgaaatcgatatatctcaagggggaaggacttccgcctgaccgtgtcgttccaacagttgggctcaacattggccgcatcgaagacgcaaaggcaaaacttgttttctgggatctaggtggtcaggttagcctacgaacaatctgggagaaatactatgaagaggcccatgccataatgtacgttattgacgctgccacagcatcgtcatttgaagattccaaatctgctctggagaaggttattcgccatgaacatctgagaggagcaccactcttgatagttgcaaacaaacaggatttacctggagccattgatgaggaagaattggctaaatttctgcataaagaactggatgagaggccatatacatttcaggctgtatctgcatatgatggcagggggatcaaatctggcatagactggctggtggaacaaatggaaaaaagcaaacgtaccgagacactgcaggctcgtgctggcgtagctggacaaatttagaatggggtgaatttgttaaagaacaaagcattggataggacggcttccttcgtatcgcgtaagcagccatttgctgcattccgggattatcgttccaggtcgcccagagtgctgcaagaaatgtttggctggttgctcctgtggtggtggtgattggtgaggcgattcgtttggtattattgaggttgcattcatatgtacctaaaggtcgcaagcatacatgtctatatgatgcttttcaattttcgtagcaaactagtagcttcaatacagaggatcaaagagagccgtgttctttaacttgtttgtgataaaaaaaaaggaagaaaggaaagcgaagaaggaattaatggtgccccccccac

SEQ ID NO: 20199 - DNA, 226 bp, Zea mays
  Clone ID: MRT4577_118423C.1
aatcgaggacacgcgagatgatgaacggatgttttggatggcggatgcagtatattacgtgacttaactgtaggacataataagacaagataagacttgcttattttcaaaccaaagatgactgttagcgcaatgatgtacagactattgcttctaaagaggacttgttgaacaacgagtagatactaccacatgtttgatacggggtgccgaccaatatgaataa

SEQ ID NO: 20200 - DNA, 314 bp, Zea mays
  Clone ID: MRT4577_118424C.1
gcgtgctcgttcgctttccaaagcccgggcacgcacgttggtcgtcgcgagcacgacctcgatcggaggagatggtgacgccggacgggcttgcgcggatcgagacgatcgggaagaagaagcatgacaacggtgtgtggtacgactacagctcggcgccggtgcgcgcgcagatcatcgacgagctgcactcgctgcagcggaagctgtcggcgcccatgacgcccaaacggtcggggcccaccactcccattaagggcggtgcccacttgtccttctccggcgcgatctccgaggaagatcgccacacgcag

SEQ ID NO: 20201 - DNA, 907 bp, Zea mays
  unsure (1)..(907): unsure at all n locations
  Clone ID: MRT4577_118425C.1
ccccggggctgcagtaaaggtgcaagcttggttccgctgttggggattgatgtctgggaacatgcatactacctgcagtacaagaatgttaggccggattacctgaacaacatctggaaggtgatgaactggaaatatgctggagaggtgtacgaaaatgttcttgcttgaattgtcttaacggacaatacacatctgcgcgcgcgggtttcggctgtttgatcatgtgaaataaagatggacctgtctagcggctggaccttgtgtacatttcactgagatagactaatgcacggcctgccgattttgttcgtcctgcttgcgtgctactctgtctctgctcctagtttttggcatcatgtttatgttgagcaaggtgatgcccaagggaagccattcccactcttgtctccattaataaaatcagctgagcttccgatgtttgcttgaattaaaaaaagagagagagagagagagagagagagagagagagagagagagagagagagagagagagagagagagagagagagagagagagagacttcggggtctcaccaaagacggcccgcacggcggcgcgctggaggagccctgngctcangcccaggcgtcccccggcggcgggctccacatgatcatcgccagcgggcggcggcggccgcagcggcaaggaccacatcgccgggagcacgccggcgcgggagcagcgcatggtgggggagagcctgatcagcatcatcccgctgcaacgcgacagtgtttcgtgcggctttcttctccgcctgctccgcctggncgtcatgcttaaggccgcccccgctctggtgaacgaactggaaaaactcgtggtcattcaactcgagcaggcgggtttggccaacctttatttcccttctacggcgcg

SEQ ID NO: 20202 - DNA, 369 bp, Zea mays
  Clone ID: MRT4577_118426C.1
ctctcgctgttaccaaaataatgagagggtggcaccgagtgcgagacaccgggaactgaagcatgtagcacgaggaagcgatcccccatgaccgggcgaccaggcgtaggaaaacattgcgctgtatccacttcacaaaaacacgataatgatcatactctgaaaactcccaaccctcggacgttctcataagcaattacgcatgaacacctcagacatatgcgtgatgaattttcactcactaatgcagactctcgtggaccacttgagatttaagacgcacttagagaccgtgcacaatttcacctaccgcttgcacaaaccatactgccatcgtgatcgcatctatccatcgcatactgacatgac

SEQ ID NO: 20203 - DNA, 280 bp, Zea mays
  Clone ID: MRT4577_118427C.1
agaacatgctaggtgatgacgaagccggcgatccagaggtgggataagattagggcgggaaagaggctgatggggcataataacaaggccgcgcgcagggccggaacgagctagagcaagcaacgccattaagaaggcacgtaccagacgcgagacctacaagatctagagctgcaacgtgctgaggtaggtgtaccccgacatggcaaggtcgtcaagggccatgtccataatgaaatatttcataagcgacatctcggagaagctaggctggcacgcc

SEQ ID NO: 20204 - DNA, 437 bp, Zea mays
  Clone ID: MRT4577_118428C.1
ggtgctcttccctcctactggtccacacccgccccgccccgccccttgctcttcttcttcttcttcttcttcctcctcgttctccccttcctccctctttgctgctcgcattcgccatttcccagccgcccacaatgcactaaaccctcgtaaaacctcccaccccatcccaccaaacaacgggcttcgggggatacccctggggggcggcgagccaatttcttcttgatcttctgtcgatttggcttctactgtcgctgaacaagtcccttggggaagaagatccacacccacccctggttcctcttagtttttccaccacctataaatcccccagttggggattatttctttgatcctttccgttcgcccccaagttggggaaatttttcgatccatttgatcgtttgaagtgaaacaggaggaggggaggggag

SEQ ID NO: 20205 - DNA, 172 bp, Zea mays
  Clone ID: MRT4577_118429C.1
gggacaccacggccgggacctgggtcgacatcatggccactctcttcgccctcttcggttggttgtctggtgcccccgagatcgacaaccccgtcgaccttgccaagcagcgtcacgatggttggaccgacattgtcaccgtcgtcattgtctggctgtactctttcggtgt

SEQ ID NO: 20206 - DNA, 262 bp, Zea mays
  Clone ID: MRT4577_11842C.1
cggacgcgtgggcggacgcgtgggcggacgcgtgggatagagtactacagtacagtatatatatatatatgctgtactgcaggccacacatacatatataatagagtactacagtacatgatatagatgtatacatcgagttctaaatgctccacgaagcgggccgatattattgaccattcaagcgaaacatttacatagcagacgaccgattctactgcgagaaccatgaaacagaattttggagcgaatcctgtctcca

SEQ ID NO: 20207 - DNA, 221 bp, Zea mays
  Clone ID: MRT4577_118430C.1
atggttatccatgatatagcaatggtgcaattggggagcccgaccaagaaggttccataggtcagatatacatccatcatttgcattagccaagggaaccttgcgaagctgcttcttaatcatgttgagcgagaccacatcacgactgcggcacaaaaatgcttacgctcgttccatcatctagtagagccgggaggcacatgcacccaaacccaagttat

SEQ ID NO: 20208 - DNA, 408 bp, Zea mays
  Clone ID: MRT4577_118431C.1
tttattcggcacgagggtcatcggttggtctttagttcctgatacccgtccccgctgccggccacttttcacggatggcggatgctgttaaaacagaggcaggaggacgcggagttgacatgcgccctgcacaagccaccggatgaacacgatgatgacttgctgcttgacgatggagggggagtagacactcttgctccatttttgaggtctgaggtgaattacctgaggagcgtgtactggtacatgaccaggaacagcctcacaaccaacgggatgaaggaccgcttgatgcgctcgtttgtccaccaatttcgcctgagaggtacagtgagacagctgacacctacacgatgactcgcatccgcgcctttcgttacttaagttcttctactggcaaatactcat

SEQ ID NO: 20209 - DNA, 2225 bp, Zea mays
  Clone ID: MRT4577_118432C.1
ccggccgggcttccccttcgtttcgttattcccccttcacatcgcggcagcgcgaaagccgcccgcgccggacggcgctgtccttccctgggaggcgctccactaggctcggctcagctcacgcgcggcggcggtgtccgtggctgctgggcttgcgcgcgcacctgattccgtgctgggcttcgcgaggtgctcctcgtgcgagacacacgcccgatgcggcggaatcgcgcggccggcgcccgagacccggcgtgattcggtggggaggctgggtcgcggtgcttccgcgtgcgggaaccagtgacttttttattcttctcttccccagcggctcgggcggctagagggcgggccgcttggtgctcgtcagcgcgtgaggcggagattacccggcgccgatctggtgctcttgccgcccggagaggtggtgccgggggccattgccgggttctgattaggaggaggcggaggaggtaagtccctagtcttatggggctcgcgccgccggagctggggcagttcgacgggtgggagagctccggggaggagagggagcgctggggctggtgccgccgcagccgccgcggcagcagtaggcgccgcgcggaccccaagggcgccgacgacgacaccgccgtctccaccggttgctgcatccgcctctggcccgtcggaacatgcccgccggcgccgccgccgccgccgccgaggtccaaggtcgacacctccaccagcagcgccagcacgcacggcgcagaaaagtcaacagaaaatggtagcaggaatcaaccggtcgcattggtagtctcaggttctacaactactagtaacgctgagagcagttcatctgcatctaaagatggagaattgataaaagttgcctctaagctgcgcaagtttgcattcagtgatctaaaatgtgccacacggaacttccgacccgaaagtctccttggagaagggggttttggatgtgtttttaaagggtggatcgaagagaacggaactgcacctgtgaaacctggtacaggtcttacagttgctgtcaagacgctcaatcatgacggtcttcaagggcacaaggaatgggtggcagaagttgacttccttggaaatcttcaccatcccaatttggtcaaattgattggatactgtgttgaagatgaccaaagattgctggtgtatgaatttatgcctcgcggaagtttggataatcatctttttagaaggtctcttcctctcccatggtccatcagaatgaaagttgctcttggggcagcacagggtctttccttccttcatgaagaagcagaaagtccagtcatttatcgtgattttaaaacatctaatatactgctagattcggaatataatgcaaagctgtcagattttgggcttgcaaaagacggacctgtaggtgataaaactcatgtgtctactcgagtaatgggaacctatggatatgcagcaccagagtatgtcatgactggtcatttgacatcaaagagcgatgtctacagcttcggggtcgtgcttcttgagatgatgtcgggacgcaggtcaatggacaagaatcggcccaacggggagcacaaccttggtgaatgggcacggccccctcctagggagaggcagcggttttacaagctggttgaccctcggctggagggcaacttctttctgtaagggcgcgcagaaggcggcgcagctagcgcgcgcctgcctcagccgggaccccaaggcgcggcccctgatgagccaggtggtggaggtcctcaggccgctgcagaacctgagggacatggcgagcgcctcctacttctaccagacgatgcacgccgagcgcatggcgcactcgagcagcatgaacggcaggagcagccacggccacggctcctccaaggcacagagcccgttcgggcggaacgggcagcagcagcccgtgcggagcctctcggacgggccccgcgcctccccgttccgctactcgccgaagccgaacgtgaaatgatgaggcacctggtccgggccgtgggcgtcgaagtcgaaccccattcgttgatgtgtgttgtgtacttgtgtagattgacatatgcacaaaggaaaagatgtaggcgaaagaggaggtgtaggttgaatgaatgctgatggatcgttgctatatatttttgcccccaaacaaggcaggtttaggtgtttttcggggggggccggttcccccc

SEQ ID NO: 20210 - DNA, 603 bp, Zea mays
  unsure (1)..(603): unsure at all n locations
  Clone ID: MRT4577_118433C.1
tcacctccgccgccgnaatccgacctctgntctcgggttcaccgcagcgcacagagcacccccgnctcccgtcccgatccgcgctctcctctacgacgcttcaggtggtcgtctcctccggatctcttgctgcctcgcttgttattccgttgcttttcggtgcccgatctgccgcggcgatgggtctcggtccatctggcggcgctgcccgtgtggatctgtgccgattcggttggagtggtagtcattttgacggttctggattgagggaccggtctgcgcgcggaaatactaactttccccctttgtctgatgtggggctttcggctctacacacggtttcttacgtaggacttgattgattttgtatgaagatataatgtgttttttgtgctcatattgcaaaactactagtttcgttcctagaactgtgctaggcagctctttgtagcttgtttgctttatattttgtcatgtagtgttgcgtgttgtgcttgagtgttggattcaggctgtttgagctatgggatgctgcatgcttgggttatattctattattatgtcgtgatgaggcaactntgtgtgaaagcgatgatggaatgg

SEQ ID NO: 20211 - DNA, 565 bp, Zea mays
  Clone ID: MRT4577_118434C.1
gtaaagggcgcccaaaaggcggcgcagctagcgcgcgcctgcctcagccgggaccccaaggcgcggcccctgatgagccaggtggtggaggtcctcaggccgctgcagaacctgagggacatggcgagcgcctcctacttttaccagacgatgccccccgagcgcatggcgcactcgagcagcatgaacggcaggagcagccccggccacggctcctccaaggcacagagcccgttcgggcggaacgggcagcagcagcccctgcggagcctctcggacgggccccgcgcctccccgttccgctactcgccgaagccaaacgtgaaatgatgaggcacctggtccgggccgtgggcgtcgaagtcgaaccattcgttgatgtgtgttgtagattgacatgtgcacaaaggaaaggatataagcgaaagaggaggtgtaggtactggagttccctttgcttggctgaatgaacgctgatggatcgttgctatataaaaaaaaaaaaaaaaaaaaaaaaaaaaaaaaaaaaaaaaaaaaaaagaaaaaaaaaaaaaaaaaagcggcc

SEQ ID NO: 20212 - DNA, 461 bp, Zea mays
  unsure (1)..(461): unsure at all n locations
  Clone ID: MRT4577_118435C.1
ggaaacttcattttatagaggatagctgaagcatacatacgagtatcacatatcaattaattggttgagctccttataattaatataaataatgtttggtcaatggaatgaccacttaattatttcttgcttgcagggtaggagtacatgtaattgttgggctgcctccatttgttgattatttctcatgttcctcatgcatgcatgcatggcggcatgcaacttaagaggcatatgtggtgacgacggcagcgccggcggcatcgcggcggtggtggaaccgggagacagcgcagtcagtggagaagagaccctcggacaggtacttgggcgcgccgcccatgatgggcatcttggcgctgatgtccagcttggtgacgtagccggggcggtntgtctgtcccagcccgccgtctacgtcggcggtgnggttttggnncttggngccggggtgggggtgc

SEQ ID NO: 20213 - DNA, 495 bp, Zea mays
  Clone ID: MRT4577_118436C.1
gttggttatgttttttatttttttttatttttttaaatttcattacacacattttttctgttttacataaggttttctgaaactcaaaataaaataagaaacagacatcagattgggtgccctgggatccttaattccacccatcataatttggggtgtttgacctggaacgccgggagctcgcctttgaatttgttgcaaatgccgcattgacagaggatccactggcattttcatacatctgacattgaaaacgttcataaaaagcgcctgctaccattccaattgaaggaggaaacagaatcatttcctttggggccctcatccattgacaaaaaatccactgacttcttgcgaagagatgaaagcgactgagctaggaatctcaacaggcgtatcaaaaagaatcatgtttgggtatgatcttggctccacagaatatgcatgccagccagagcgggcctccacgttcccttattagactctggtacaaac

SEQ ID NO: 20214 - DNA, 627 bp, Zea mays
  Clone ID: MRT4577_118437C.1
ttttttttttttttttttttcactgcctacagctcatattaatattagtattgcccaatgctacataaaacaagaccgagatgtaggccgtgcctttgcgagacgaatcaaggctatcatcttcggtctctgtggaataaggccagccctgttatcaccaccataatagcccatctctctccaagaagtcctgtcaagcccgttcccataaaacgaaaatgcgcaacctttgtcaaacttcttccatcgcccatcgtccaagctgcaacaacttcgtttccttggctatctttaaagccgcctggcgcaaatgccatatttcctcctccaggagcaccacggctcatacgcacaagcttccagccataataatgaccacccaagcttgctatgacatctccacgtgagcgccgccactcaaatctctcccgtggtccattgccagctggtccgacttcgatagcaaagctatagcctgtaccgagaccactatgtgagcctactggttcaactacttcgcgtgccaatggagctcccgagcctggcactggaggcaattcgacttcgaaactggcgctcatgaacatgaagctagcagaagctagaggtgaatatgacgggtctgga

SEQ ID NO: 20215 - DNA, 340 bp, Zea mays
  Clone ID: MRT4577_118438C.1
tggtcttcatgaataaacgctatagggattaattgccccacacacacaggcgcaatataggctttggacgactatagaatcagtataagtatagcggcatacgagatagaatctgataaggatacagaatatcattaagaaagttactgctattaactaaggtatactggtcaacaactacaggaggtgtctggcagcacagacttgacacgatacacaaaaagtggctaatgcttcaaccatattctactgcttcattgatataccatggggcagtaatgataaatattaacttgacaagaaaacaggactgatcaaggtggaccagagtgaagaatta

SEQ ID NO: 20216 - DNA, 233 bp, Zea mays
  Clone ID: MRT4577_118439C.1
accatcacactcaaaatgcgcttggtggccaacttggtcttaactatcttatactgatatacacacaccatattgcattgcattttcagcgaacatctatttaatacctaactttttcatcaattaagtctccacaactcttcaatcaccaaaaattaactatttaccttcccctttccttaccttaatagtctttacacttgtcctgcttctaacttccatatcctttacat

SEQ ID NO: 20217 - DNA, 285 bp, Zea mays
  Clone ID: MRT4577_11843C.1
caatctgagagagagagagagctccttgccaagcattagaggtggcatgaaagaagagggctatgctccggttgacagacctctacaccctcacatactaataactacaacgacggacacagccggcccttcaccacaagcaaccgctccagacggcttgattggcaacacccccaacgataccatgctgtgcgacactcgtctgtataccaatgagacaatacactacactgcatcgcttactaatgcttgctacatacactataacagacgtgatatgctgca

SEQ ID NO: 20218 - DNA, 371 bp, Zea mays
  Clone ID: MRT4577_118440C.1
gcgggaggttctagccgtttcctcctcctacagtccactcccactccgcagtgggacggcgccgccgccgccgggttctcgatcgggctactcccttcccttcacttcccttccttacccgccgccgcggcacacggtgcacgtggatgggctgcaaggggtccaagcacgcgctgcacgggggctgtggattggcggcgcgagcgccggagccgcagagtcgctcgggccgactggcgccgcggcactccgtggtcgcgctgcggtcgtccacgctcggaacgctcagcctcgaccgcgccgtggcggccgtcgcggcagcgggcctctctttcgacgctgcagcaacaggaggaggaggaggaggagga

SEQ ID NO: 20219 - DNA, 931 bp, Zea mays
  Clone ID: MRT4577_118441C.1
aacccgccgtgcttgacgcggtggcgaggcgggagaggcgtacgcgggagcggaaggagagggagagggagaggcgtgttgcggaggaggctatggaggtcaccgaagaggaagaaggggcagccgtggactctgatgtggagggtttcgacattgatttagcagccatagatccagttcgagaatttgggttcttgtcgatgggccatgaattcgacagttacccgaagggaaggattcgtgctccaaaggattggaattggttcctagaggaagcaaagaggacctctgacgatgaagctagcggcaagaggagatctagatcgaaagttctgggatggaacaagaagaagaaagatggagaaggcgaagatgaagactggactggtgagagtgaggatgaaaaagagtccacgggaagagttaccagtgtgaagagaccaaagtatgcgacaagatctaaaagctcagaaaaatatagtagggaaaactcgaagactggaagtggcagaagtatcgacgaagatgacggcactgaggatgagcaagatgagactctgggaggttttttagttaacgacgaggatgacgagcctgcagaagagctgagcgatgaagaggaggaatttgacgatgaggaagatgatgattgataaccacgtcaaaaaagaaccttctcagtgatgaactgatactgacaagtgacaagcagtatgtttatattcctttgaacttgtgtaaaaacaatgtgtggcaactgtgttagtgttgttaattctgaaaaatgacgtttttgtatatctgcattgcttagtctcagccaggtgcacacccgaattttcgctcagctgtgctgccatgctgcgacatgggccacgaacgagcctgcatgaaagcaatccgtttccgtttgaaaaaaaaaaaaaaaaaa

SEQ ID NO: 20220 - DNA, 291 bp, Zea mays
  Clone ID: MRT4577_118442C.1
tcacgatacttcacatgatatttgatcgttttaaatagctcacacaacactgattatctgtccaccttcaacccacacgcgaaaaatattcgacacgctctacttctgtacatacctatcatgctattactctatccacacatcaccctgctgtaccactttcaccaactcctaacgtacctaataccacatataacgataacatcaatgatatcatatacgaaaactcgtgtttacatgatgctcaccttacattctaagattataaagagctactttatacctctcaca

SEQ ID NO: 20221 - DNA, 290 bp, Zea mays
  unsure (1)..(290): unsure at all n locations
  Clone ID: MRT4577_118443C.1
ggtggttttccattcatcatcgttcttcctttgtctctgaactttttctgctgggtctgggggccgggagcagaggttgctacacgtatatattctgaagaagagatcgagatgaccagcgtgtggaagaccaaggttctgcctggcctcaacaagatctttgacaaggatggcaagaaggctgcagctgcaggcttcttgaagtccttcaacaaggaggagattgacaaggagattcnnnccccgaagacagatctggagcccaaggtcgtggaggcctacnaagcatc

SEQ ID NO: 20222 - DNA, 133 bp, Zea mays
  unsure (1)..(133): unsure at all n locations
  Clone ID: MRT4577_118444C.1
ggccgggccggtttctttaccgcatgccgtctcgtttcgctacttcgctggctcgtttcgttatttcgccgccgttcgccgtcgtacagtcgagacgtcgncgagtttaggcggcgaagggaagggaatgaga

SEQ ID NO: 20223 - DNA, 127 bp, Zea mays
  Clone ID: MRT4577_118445C.1
acgcctggggacccctgcacggaccggcccggaagacccaggggggggcacgacgttcgtccacacgtacgacccaacttcatatccggtgtcgcaacaacaagcattcaagccacgggggaacggg

SEQ ID NO: 20224 - DNA, 810 bp, Zea mays
  Clone ID: MRT4577_118446C.1
gcgcccacgcgtccgcccacgcgtccgcccacgcgcggaacccacgcccccgcccacgcgtccaagccccccaaaacccaaaaccctgcgaccccaaggtaccaaagccagcggcagaagccgatgcccatgcagccgcaggcgccatcgatgaccccggccgccggaatcaccacggagcagatccaaaagtatctggatgagaataagcagcttattttggccattttggaaaatcagaacctaggaaaattggcagaatgtgctcagtatcagtcacaacttcagaagaacctcttgtatctcgctgcaatcgcagatgcccaaccagagactgctgtaagccggcctcaggaaatcaaccgggaggcctgcacaacctttatggccctagtatgtactaccaggcttataggaaactatgttgattcaaatcttttgcaaggtctgatagtcaccatttcttcggtgtcctaatacaatggagcagagcttgtggaaacatgtttatgggaacgatgagaaagccatgtgccaagttagtgaaattgctttgaaaaatcgtgccatgttggcatgtgctcatgttaactagccctttggacaactatcatctttggatgctgcgctcattggagagggaagccattctcagaactgttcttaggggagtgtttagtttctagtgactaatttgtagtctctctattttattcaattttagttcctaaattaccaaatttattggagaaattaataaatcttaaatttgattaaatacatcaaaaaaggcgttgatgcttatgatgt

SEQ ID NO: 20225 - DNA, 823 bp, Zea mays
  Clone ID: MRT4577_118447C.1
cctccaacccaaaaacaaccctgcgaccccagataccaaagccagcagcagaggccgatgcccatgcagccgcaggcgccatcgatgaccccggccgccggaatcaccacggagcagatccaaaagtatctggatgagaataagcagcttattttggccattttggaaaatcagaacctaggaaaattggcagaatgtgctcagtatcagtcacaacttcagaagaacctcttgtatctcgctgcaatcgcagatgcccaaccagagactgctgtaagccgccctcagatggcgccgcttggtgcatcgcctggagtagggcagtacatgtcacaggtgcctatgttcccgccgaggacacctctaacgccacagcagatgctggagcagcaacttcagcaacagcaagctcagttgctaaacttcagtggccaaatggttgctaggcctggcatggttaacggcatgcttcaggccatgcaagtccaccaagctcagccatcgccggtaatgaacagaccggatgctggtgggatcgcctcggagccctctggcactgagagccacaggactagcactggtggcgataatggcggtggaagcgactagtccaaagagtcttgaggatttacgagctagccttgtaggttgcaaaatatgcacgtatactgccgatgaccaaagagaggatcgatcctgcgcccttagttgataagtggccatgatctttgcatggatgatcagtagctgtcacggttttatctttgttgccagtctgtagaacacacgtatagattgttgtgacatttatttgcttgctgtt

SEQ ID NO: 20226 - DNA, 1298 bp, Zea mays
  Clone ID: MRT4577_118448C.1
tcgagccggccgggagcgcatccacttgttcacttgtagccacccgtcgctacgtgcgtggctgccgcggcgcggatctagtagccagtccccagggcctcgaggccgacacttgagccaacatgtcacgcagtcgctttgaccttccctgcgctgcgccgacccccaaactctccaaccccccaaaacccaagcccctgcgaccccgagataccaaagccagcagaagaagggatgcagcagccgatgcacatgcagccgcaggcgccggcgataaccccagctgccggaatcaccacggagcagatccaaaagtatctggatgagaataagcagcttattttggctattttggaaaatcagaacctaggaaaattggcagaatgtgctcagtatcaatcacaacttcagaagaacctcttgtatctcgctgcaatcgcagatgcccaaccgcagactgctgtaagccgccctcagatggcgccgcctggtggatctcctggagtagggcagtacatgtcacaggtgcctatgttcccaccgaggacacctctaacaccccagcagatgcaggagcagcagcttcagcagcagcaggctcagttgctaaacttcagtggccaaatggttgctagaccaggcatggtcaacggcatggctcagtccatgcaagctcagctaccaccgggtgtgaacaaacaggatgctggcggggtcgcctctgagccctcgggcactgagagccacaggagcactggtggtgacgatggtggaagcgactaggccaagaagtcctgataattttacgagctagccttttaggtcgcgaaatatgcatgtatactaccgacgacgaagagaggatcattcctgtgccctttaatggtgagtggccgtgatcttcgcatggatgatgatcattccacctttgttgtcagtcctgtagaacagacgtgggttgttgtgacttttatttgtgtgtttttttcccacactgtactgttgtaggctcgaagccatatgttagcttatggtttcaggagctggattcagttacgagcgagttgtgacagcaaaacttttatgaattacgttagaagtttcatatatgccacaaattggaaactgtacgagttccaataaaaaaaaaaagaaatcaactgggaggcctgcacaacctttatggccctagtatgtactaccaggcttataggaaactatgttgattcaaatcttttgcaaggtctgatagtcaccatttcttcggtgtcctaatacaatggagcagagctggtgga

SEQ ID NO: 20227 - DNA, 285 bp, Zea mays
  Clone ID: MRT4577_118449C.1
ttaatactcatcaagtgtgcccattatataacatttacttttatttccacaaatatagccactacttcctagtcaccctcatgttattttctctcttacttctattgactgctaccactccaatgtattttcttctgccaaacatctccatcttttactgctttctatactttcatgtatcacatgtcaattatcactattattaccttcaccttagactttatttttattcttccctacacattatattaattttcatattataaaatcttatattaaattttc

SEQ ID NO: 20228 - DNA, 155 bp, Zea mays
  unsure (1)..(155): unsure at all n locations
  Clone ID: MRT4577_11844C.1
ccagcgtgcggtgctcggtgcacgtgccgntgtntcgtggggggacgaacgaacatgggccccggggacgctggctgaaaaagggggcnccactggggctacatgggcctctggaccggccaggccttcaccaagatgaacgagcgcttcgtcga

SEQ ID NO: 20229 - DNA, 271 bp, Zea mays
  Clone ID: MRT4577_118450C.1
gcatgccagatcctacagaggtcaacaccactgcaaatcaataattttcataagaaaagcaaacttgaagccacccatctactcttcaaatgtaatctctaacttaaaagtatgtaaccttttcctagacatggtaccataggaacacttggtgatctgggtagaggtgtgggcatttagacaatgtaaagataggtctggcacctcatgccttgccaacctgagaaaatgagctgtgcttgctacaacataggaaagatagatttcatag

SEQ ID NO: 20230 - DNA, 603 bp, Zea mays
  Clone ID: MRT4577_118451C.1
aacaggttcttcttgaccagaacttaattgaagcaatgccaacttcaccgatttttgttgggaacaaggcaaagcggctactggaaagagctgtttggaacgatacatctttcctagctgtaagtttgcatcaatttatcctcatcaaagcttataggaaatgtagtggcttccagagctatcttcaacttcacttcttttgttcaacaatcttcagcctgattttttggatcagaatctagcttcttattagcaccaaagtgggtggttgtgactcgtaatcatagctgagcattcttgtttttaatccctctgttcccatttaatcctcttttagcagacctatattcatttgttttccttaagttcttgtatagtcgtagtatacagcgagagtaagagagaaattgtcctttctttttttaaaggctaatctttaatataataaattagaagaccggcttttgttgtgtttccagttttaagagaacaatactaaacttgacagataatggaatatgaatctgcatggctgcatgtcatgtttccactttgctttgaattttgatttacctgctcctgagtagctttgggccttaatag

SEQ ID NO: 20231 - DNA, 291 bp, Zea mays
  Clone ID: MRT4577_118452C.1
ccatcctgaaacctgtgccatagacgaagagccacacaactgtgaggcagctcggggttggaagttgacactgctctgcttgggcctgttcatgtttgctgttggggagggctgcatgcgtgcctgcgtaccacccctcggtggagatcagttcagcgacagtggacccttagaaaccgcagctcaagagtacgttcttgaccaggcttaagctcgcaaactctctcggagcgatgattggattggccttcttagtgtggattgagaataactggggctgggacatcgggt

SEQ ID NO: 20232 - DNA, 269 bp, Zea mays
  Clone ID: MRT4577_118453C.1
ttctaagcttgctccgagaaatccgtcttgaggtcctttttaggggaatggatggcagtcatggtctagtatcagtcagcaccgcctgaggctgtcagctgcctgcctgctcttggcgcgcgcggctggcagcaccagcagctgtacctgtggagtgccgaggcgggcgatacctgacaacccgctgccaagctgcctctgatacaggaccagtcagacctgtgccataaggccgggcctcaagaggccatctctgacatgaagattct

SEQ ID NO: 20233 - DNA, 697 bp, Zea mays
  unsure (1)..(697): unsure at all n locations
  Clone ID: MRT4577_118454C.1
cccacgcgtccatcccgtctaacactctatctgaacaaccagttactatcttgcttagccacactgatcatatcatcagctagctcgtcgttcatgcgctcttagctagctagttaaagagattcagacagatcgaggatgatggtgccgggcaggaggaaggagctcaagctcatcgctgcagccttgctgctagctgtatctctgctgctgatgtcgaaggctgggagcgcagcagcagggaggagcttgtgtccttgctcttgtcatcagcatggaggagctgcagcgaggctgcttcatcaagggagaagaatgttagcggggcgggggcgccatggcgaggtgctcgcgaatggattaatggagcacgccaacaaggaaggtggagatgcgattattggcgacgaggagaagagggaggtcatcactgggcctaatccacttcacaacagaagatagggtggctggttctgcgagctgcgtgccacactacacgctacaccacaccagtttcttcagattcctttttgtttagttcttgtcgccttttttttttgccaattctttctacgataggtacctaatcatgcatagaaggttcgatggagttgttgcttttatttgttttgtacttctgatttggaatgagaggtaagatgcccaactgtcgaanaaaaaaaaaaaaaaagcggcc

SEQ ID NO: 20234 - DNA, 266 bp, Zea mays
  unsure (1)..(266): unsure at all n locations
  Clone ID: MRT4577_118455C.1
atccaagcctaattaatgggttattatatatatccatttttgttttcatgtgttngattttttttattatatgggatcgacaacgaagacttgcgcaagggacggggaacaagaaaaaaacaggggggggcggtcgatcagtcctccctaggaaaagaataagttgaacatcaaaggggggctcctaagactgtgacagctgaagagaaagaaacgaacgatgcacgggctgctctgtacatcaaggggaggggggggtttaacca

SEQ ID NO: 20235 - DNA, 1173 bp, Zea mays
  Clone ID: MRT4577_118456C.1
attgggtacctcgaggccggccgcggaggaaaagcaagaaagtcatacacatacacacacgcatccgcagcactccctcctcggtccctcctctgcttcacacagaccagtgcgcgctcaattcccccctctagcgcctccaccgcaccaaaccggtccaacgggacctatgctctagcctcagagcaaaccaccgcctgaattgtgcggcaattgggggaggattcgcggcaggcagggcgcggatccgttggcgggatgattgcggctgtcaacagagtgccggcgggctggggcgaggatgagatgtccgtgctgccacggcacaccaaggtggtggtcaccggcaacaaccgcaccaagtcggtgctcgtgggattgcacggggtcgtgaagaaggccgtcggcctcgggggatggcattggctggtccttactaatggaatagaggtaaagctgcagcggaatgctttaagtgtgatagaacctccgactggcaacgaggatgatgataaatttgattgtgaaaacatgcagtggaatagttcagatatggcctccgatgatgcactatcaccaaagccacagcggtcacggagcaggcagcataggggtttccacagaaaatccatcagccgttcaatgtcatgtgactcccactccaagacgtctgtttcatcttcctcaagagctcacacgaaagttgacctaagcaagctagaactgactgcactgctgagatattggcgtcacttcaatctcgatgcatgtcctaatccatccagagagcagttagttgatgctgttcaaaggcacttcacagcccagcaattggatgagttgcaggtcattgtcggctttgtgcaagctgcaaagaggctaaagacgactatgaaagtggcctgactgtgaagcctgaacttcaactaacagattcaagagaggatgtagcatgtttgatgaatgttgccgtgctatgtaatatatatgcatgaagttctttagattcaggtggctaggttaatggacaactagactatgttagcctcatctgatgtagatatgcagtatcctgtctaaagatgtttcaacctctagctcagttctttcctgctgactggatgtggattgaaatgacaagtttaaaacaagttatttttaaaaaaagcggcc

SEQ ID NO: 20236 - DNA, 2386 bp, Zea mays
  Clone ID: MRT4577_118457C.1
gggacaattgaggagcaactagtaaaaaaaagaatcagaaagtcatacacatccatccaagaaaaagttttattttttagagagacaacgttccttatagggattagcattgcatttgattaaataacatctgaaacatatctaaatgccataagggtcatggacctgtacagattgaatttagattgaggcttgcacagttttgttgtttcctaaccatgtcctgcaacttggtcacatgcgtctgaaatgctgccttctttaattttctttcttgcagcctccgatgatgcactatcaccaaagttacagcggtcacggagcaggcagcataggggtttccacagaaaatccatcagccgttcaatgtcatgtgactcccactccaagacgtctgtttcatcttcctcaagagctcacacggtgcgactttcgcttccttgggttgtggacttgacatcatttggttggaatccaacaatcactttacagtaatctgtgttgatgactttatatctagttttgctcagtcgtattattttcggaccacatgtccacattgcttctgctgcttgtatctttacattcttttgaccggtaacactgcagaaagttgacctaagcaagctagaactgactgcactgctgagatattggcgtcacttcaatctcgtaagtagagctcaagttcatagataagcctctattatcaactgcaagtatccaattatgcctcgttgttctaactgactgcatttgctgaacaggatgcatgtcctaatccatccagagagcagttagttgatgctgttcaaaggcacttcacagcccaggttgatgaaacaaatttaacttctgactccaataacttgtatcattacgatgttattaggtcctgacagtctgctttggtgtgttaattccaatttgcttttgcccatgctgaagcaattggatgagttgcaggtcattgtcggctttgtgcaagctgcaaagaggctgaagacggctatgaaagtggcctgactgtgaagcctgaacttcaactaacagattcaagagaggatgtagcatgtttgatgaatgttgtcgtgctatgtaatatatatgcatgaagttctttagattcaggtggctaggttaatggacaactagactatgttagcctcatctgatgtagatatatgcagtatcttgtctaaagatgtttcaacctctagctcagttctttcctgctgactggatgtggattgaaatgacaagtttaaaacaagttattttgtcatccttttcgatgtttcagcattatatttagcccatgctttgcccaaattgcatgcagaactaattaggaatgcagaatatggtggctagatgtgtcagaaaattaccgagtctcgtggtaaagcccttctgcaatagtagccgagaactgtttaagtgagccttcaaggttgaggatggatgaagctggaacgattgtgctaatgataagaacattcaatccatcttgaagaagcacccaagaaggccacaaaacagatagttacataaggtatcttcatcagcactgaccatgatactgaagatgccatttcatattcattctttctcttcggtagtaacctgattcctgtttcaggcctgtgtcggcgagattctcgatgagcaacgtgtaggtcttgcaggtggggcgcagcccttcagccaccatctctttaaacaccctccgcgcctcctctgccctcccggcgtcgaacagaatcttaacgcacgcggtgtagctgacgacggtaggcctgctcttcgccttcatctccgcccacacccgcatggcaccgtcgacgtcaccagcccgcgcgagccagtgcatgacggtggtgaaggtggcggcgttgggcgcgacacggcgcggagcatctcggcgaggaggccgagcatggccggcacgcggccggcctccccgagctggatcatggaggtgtaggtgaagcggtcgtggcggaaggtgcgcgacgcggtgaccgccaggaggaagaagatgaaggccttctggagcggcgggtgggtcttgagcatgcgcgccacggtgtgggagtccctggcgaggccggggatggaggggaggagcgggcgcgccgccgaacaggggtggtcgcggaggatggcagtagcgcggtggctgacgtcacgggtgtaggtcggcgcggctccggctgtgggagatggctcggctttccccggcggttttgggttggcggcggcgaggtgttctggcgaggaaaggaaccggcggctgcaacggagtatggcggtcggtgactaggggttcaacgcaccctagtgcagtcccaacgaattctgcgcccacgcggccgcggacgct

SEQ ID NO: 20237 - DNA, 592 bp, Zea mays
  Clone ID: MRT4577_118458C.1
ctcggtccctcctctgcttcacacagaccagtgcgcgctcaattcccccctctagcgcctccaccgcaccaaaccggtccacgggacctatgctctagcctcagagcaaaccaccgcctgaattgtgcggcaattgggggaggattcgcggcaggcagggcgcggatccgttggcgggatgattgcggctgtcaacagagtgccggcgggctggggcgaggatgagatgtccgtgctgccacggcacaccaaggtggtggtcaccggcaacaaccgcaccaagtcggtgctcgtgggattgcacggggtcgtgaagaaggccgtcggcctcgggggatggcattggctggtccttactaatggaatagaggtaaagctgcagcggaatgctttaagtgtgatagaacctccgactggcaacgaggatgatgataaatttgattgtgaaaacatgcagtggaatagttcagatatgggtaagctaccaggattgtatttttttttcttttgcaaatcacaatgttttgtttgtttcacagttcgtgtctagaactgtttcttatataattgattccccaacgtgtttcatttc

SEQ ID NO: 20238 - DNA, 1047 bp, Zea mays
  Clone ID: MRT4577_118459C.1
cctcgaggccggccgggccgggagtgcacattgggtacctcgaggccggccggggcaatcccaccccacccggcacccgttgaccgctgtgcgcctagcaatgagcgccatccactcacccgccgcgccgccggcgaggccgcctttccggcgcagcacgacgggagtagcgtctcccctccgggaaccctcacagccgcaaccgacgccaccggcgcctccgagcctcacctcccgccgcgccggtctcgtcgcactcctcgtggcagcggtggcgccggaacgccctgccgccgccgccttctcgctcggcattcctgggcccaaggagctgctgcgggagcagaagaagaagtcggcgtccttcctcctcgcgcccatcgccgcctcccgggacaccctcgtcaaagcccacgcgcttctggcttcgccgagtgcgtctactgaggacgccgaggaggtgaaggggcggatccttgcggcaggaagggactgcgtgccgcggcagaggaactcgattgtcgcgctccagtcgcggactggcgttgaggtgtgcacattcagcttgatactgaagaacgccgcgtcgctgctcgccaataaggattccctcaaggttgaagctgatactaggctcgaggagctcataaagtcattctctgaactgggaactctggtggagaacagtaattttgagctcgcagatgatagagagaagataaaagatggcttactgagcactgtctctgccctggacaaatttgagcagagtgttaaagactgtttaggtgtttagacttttttgtgccagatcggatcacattttttcaaagcattttaaattgacttacttattgtttttatttttcttctatcgttgaggtaaggtttcatttgcctttgctcattagggacttctgttgtacaaatgatctgttcatttgaccttatatatgatatttatggtacaagaatgcttgtctgtgtaaacaaaaaaaaaaaaaaaagagcggccagttcaaagtaaaaaaaaaaaaaaaagcggcc

SEQ ID NO: 20239 - DNA, 180 bp, Zea mays
  Clone ID: MRT4577_11845C.1
tttttcccccgggcacgttttttttttgacgtgccccgaaacatgggacggggatgctttccaaaccagggccgcaagctccaatcttactgagctcgaagccaacatttacgggcatatgaagaccaataatcgttcaaccaaatcgtgggcctaatgttgactacccacaagccaaaa

SEQ ID NO: 20240 - DNA, 1114 bp, Zea mays
  Clone ID: MRT4577_118460C.1
aaaaagaacttgttttaagcttgccatttcgattcacatccagtcagcaggaaagaactgagctagaggttgaaacatctttagacaggatactgcatatctacatcagatgaggctaacataggctagttgtccattaccacctgaatctaaagaacttcatgcatatatattacatagcacggcaacattcatcaaacatgctgcatcctatcttgaatctgttagttgaacttcatgcttcactgtcaggccactttcatagttgtcttcagcctctttgcagcttgcacaaagctgacaatgacctgcaactcatccaattgcttccgcatgggcaaaagcatatattggaattaacacaacaaagcagactgtcaggacctcacaccatagtgatgcaagttactggagtcagaagttaaatttgttttatcaacctgggccgtgaagtgcctttgaacagcatcaactaactgctccctggatggattagggcatgcatcctgttcacaaatgcagtcagtcagaacaatgaaacataattggctacttgcagttgatagtagggccttgtctagaaatttgagctctacttacgagattgaagtggcgccaatatctcaacagtgcagtcagttctaacttgctcaggtcaactttctgcagtgttaccagtcaaaagaatgtaaagatacaagctgcagaagcaatgtggtccaaaaaatagtcgagtattgacgagagcaaaactacatataaaatcatcacagattactgtaaagtgttttttttgcattccaaccaaatgatctcaagtccaaaacccaaaggaagcgaaagtcgcaccgtgtgagctctcgaggaagatgaaacagacgtcttagattgggagtcacatgacattgaacggctaaaggattttctgtggaaacccctatgctgcctgctccttgacctttgtggctttggtgattgtgcatcatcggaggctgcaagaaaaaaaaggattaaagaagccagcttttcagacgcatataaccacgttgcaggagatggttaggaaagaagacagctgtgcctcaaactaaattcaatctgttcagatccgtgg

SEQ ID NO: 20241 - DNA, 208 bp, Zea mays
  Clone ID: MRT4577_118461C.1
tcgggagaccggtactataaggtacaggtgcccctgtacgactgtgtgctatacgctctctacgtcaccctcagggcgctgagcgccggcagcgctggccatcttaataagaacattgcttattacatacttgaaacattatgtattgacgagaccgatatgcgagaaactgtgcaactgacctcacacaaccagactgcgggacaca

SEQ ID NO: 20242 - DNA, 1188 bp, Zea mays
  unsure (1)..(1188): unsure at all n locations
  Clone ID: MRT4577_118462C.1
agattactgtaaagtgtttttgcattccaaccaaataatctcaagtccaaaacncaaaggaagcgaaagtcgcgcatatctacatcagatgaggctaacatagtctagttgtccattaccacctgaatctaaagaacttcatgcatatatattacatagcacggcaacattcatcaaacatgctgcatcctatcttgaatctgttagttgaacttcatgcttcactgtcaggccactttcatagttgtcttcagcctctttgcagcttgcacaaagctgacaatgacctgcaactcatccaattgcttccgcatgggcaaaagcatatattggaattaacacaacaaagcagactgtcaggacctcacaccatagtgatgcaagttactggagtcagaagttaaatttgttttatcaacctgggccgtgaagtgcctttgaacagcatcaactaactgctccctggatggattagggcatgcatcgagattgaagtggcgccaatatctcaacagtgcagtcagttctaacttgctcaggtcaactttcgtgtgagctctcgaggaagatgaaacagacgtcttagattgggagtcacatgacattgaacggctaaaggattttctgtggaaacccctatgctgcctgctccttgacctttgtggctttggtgattgtgcatcatcggagaccaagtctgaactattccaccgcaggttttcacaatcaaatttatcatcatcctcgttgcctgtcggaggttcaatcacacttaaagcattccgctgcagctttacctctattccattagtaagtaccagccaatgccatcctccgagaccgacggccttcttcacgactccgtgcaagcccacgagcaccgacttggtgcggttgttgccggtgaccaccaccttggtgtgccgcggcagcacggacatctcatcctcgccccagcctgccggcactcggttgacagccgcaatcatctcgccaacggatcagcgccctacctgccgcgaatcctctcccaattgccgcccaattcaggcggtggtttgctatgaggatagagcagggtgttgggggcaggtccgggtgaaacggtttggtgtggtggacgcggtaggggtcggggggtaattgagcgcgcactggtctgtctgaagcagaggagtggcggagaac

SEQ ID NO: 20243 - DNA, 609 bp, Zea mays
  Clone ID: MRT4577_118463C.1
atgcatagtgaccatgtgtttggatataaagggaggattacagactgacgatgtatttgcgacatactgtcctcaagtatgataaatactgcttgaccgattaagcaacagaagttgcaaaaggataatcgcacattatagcatgatctattattcaattgccttctcaaggggagaagctgcaagtacagagtgcagcacaacaaacaaacacttcctcgaacggctccctatttcacagggtgcagcacaacttcgcgtcgatcgatgccaggcagatgcagaacgcttggtagccggtcagcgggtatctaaagtccattatgtacttggatttgccaaccctaccaagctgcaacaccgtctgcctcccattttcctccaaagtcatctgaaaattcttgaccgatgtttgcaccttgtaccccatccttcctgccctttctctgaagtccagttcgtagcgctttgtcatatggttgtagaacggggctcttgagcacaactggtcagctctgctcttcttctcctgccaatcctttgggagcccactgacatgctggatctgagcagaactgtttgccttgagctgcatggactggttcttgg

SEQ ID NO: 20244 - DNA, 436 bp, Zea mays
  Clone ID: MRT4577_118464C.1
tggcgtgcgtcgccttcctccgcggggagggcgacgccgaccgggtggcgcgcatcctcgcgcgcctcggccacctcgtccgcggtgacggcgaggccccgggcgccgtggcagccgtgcccgccgcggcggtcgcgcacgtcgaccgccgcctccaccagctcatggccgcggaccacaacaacagcgcgacgccgtacccggccgcggccgtgtccgtgcagagctgggccgagcgcggctactccgtggtgaccgtgcagtgccgcgaccgccccaagctgctgttcgacgtggtgtgcgcgctccactgcctggactacctcgtcttccacggtaccgtcgacaccgcctgcggcgaccgtgctcggtaggagttctacatgcgtagcgcctactggagccctatttggtcccagggcgaaagggagagtct

SEQ ID NO: 20245 - DNA, 250 bp, Zea mays
  Clone ID: MRT4577_118465C.1
cccacgcgttctgttggagccactttatgctgacctgatacggggcgggaagctcttctgcggaggccttgcaacagcagctgtctgtgtgcgagatcagctattccgctgatgaccctgctgacataatgggcaagcgcctaccacgtcacggtaagaaatctgagctggggttcactgtgtaccgatttacccacgagcaaacctgtgctgtagagccttacaacaccatacctatccactcaatcac

SEQ ID NO: 20246 - DNA, 702 bp, Zea mays
  Clone ID: MRT4577_118466C.1
accaccccttccttcccatcccgctctgctcagctctagtgttttctctccatccaccgatcgagtgaagctctccgtccgccggacgaaagatcgacgaccatggcgggcacggccaactgcatcgacatcatcctcgccatcatcctcccgcccctcggcgtcttcctcaagttcggctgcgggcacgagttctggatctgcctcctgctcaccttcctcgggtacatcccggggatcatctacgccatctacgccatcaccaagtaaactagctagcaagccgtcccaagtgttcggcgacacaatattttcaggatgatttgatctcttggtctagtccctccttgcttgtgtgggttcgtttaattcttttctgtgtgcgttgatgatgcgaattcctccgtggtttccgtggaccgtgtgaagagcatcattttctttatgtatatgatatatgggagtttatatatgctccccgagtgggaatacttcttcttaaagttaggctggtcacaatgggcaagaacataagctagtaacttacacactttcctagattatgttattatcttcatagtgtgtaagaacatctatatagtgtcatgcaacgatgtatttattaggttatagactcattttttttttaagtgtgtgatgtttcggtaacttagctagttaccacaagcacctctctcttca

SEQ ID NO: 20247 - DNA, 605 bp, Zea mays
  Clone ID: MRT4577_118467C.1
attccatgccccctttcaaaaaaaaccgagggggccctaaaatgatttgcttttgacagggttgggttccagtttaccccattttttgaaggaaaagcaaaaaaaaaaaatgggggcgaagcccaatgtaggggaaaaactacaaactgggcaacccccgaaaaaagttaaaaaaagggtaatgaattttttgaacacaaaataggcgttttttttaataaaaccctttcccacggaaattttttttttttttccccggccataaaacacggggagttaaaaatggggaaaggataaaaacaaacgtgctgttcccccattgaaatgctaaatttttgaacaaacttttacggacaaacgagcttgattgtttacccaaatccgaaacctttttttgtttgggggattgccaacaaaaacctttcctggagctgttttttggacgtgtactcaggcaagtttatttggttaaagcaagtttaacctgaaggcaaatggttcggcctccccaatcccttgggtatttaaaacctttggggcccaaaaatcccttgaagttcactaaaaccttccaacggtccctttgaagtgccagtgacaaactg

SEQ ID NO: 20248 - DNA, 393 bp, Zea mays
  Clone ID: MRT4577_118468C.1
aaaaaaagggtttccaaactagcccttataggatggttttttggaagattaaaacatgcctatcgccgcgtgaatttcctacggtttgttataaaagctgtaggaagttaaaaaaccgcaggaagtgtatgattttggtgtagtgaggtcgggtggccactagctggttaagcttggacattggcacgatgggaccttgcccatggttgtctgtcctggcacgcggtgacaccctgactacgatggattgaagcctcagacgacggatgacatacgacgcaacaacgaggccagatgcaacaatgacagttagtcagtcaagtgtgggctcctaacttcgtcgtggagccaccatgtctcaacagaggtgctggattctccatggcacgtggg

SEQ ID NO: 20249 - DNA, 406 bp, Zea mays
  Clone ID: MRT4577_118469C.1
gccggccgggtcgggctcttattttcctgtttcaacatggctaagcgtactaagaaagtcggaatcactggtaaatacggtactcgttatggtgcttctctcagaaagaccgtaaagaagatggaaattacccaacacgccacttacacctgtactttctgtggtaaggacgctgtcaagcgtactgctgtcggtatctggaagtgtaagggttgtaagaagaccttggccggtggtgcttacaccgtttctactactgctgctgccactgttcgttccactgttcgtcgtcttcgtgaattagctgaaatctaaacacattcaaatgatttacaacctttgtatttgtatgcaataaagaatatatcattggaacacagaaaaaaaaaaaaaaaaaaggccccta

SEQ ID NO: 20250 - DNA, 312 bp, Zea mays
  Clone ID: MRT4577_11846C.1
cccacgcgtacggcgaatccgtttggttttgcgaagccccgggaagttctgtgtgaggggctttatatggattggcgcaagattgatagcaagcttgatcatggccgcgtaaacagacccgagacaaatgaagaaaaacttcttaaagaagagattgatattctcatcaaggcattattgaaggaaggcgagaaaaatcaaaatgacaattcctctcaagcattggctgacctccgtgagcggataaatcagagagagaatgaactgtagaagcttaacatgttagatggatgataaggtccgtttttagca

SEQ ID NO: 20251 - DNA, 259 bp, Zea mays
  Clone ID: MRT4577_118470C.1
gtggacaaggcgcgcggcagcgcacccgccgtgcgcgcacatccccacccgctctatagcgccaccgaactgctactatggaggaacccacctgaccgtcccccctactacctagcctagtacccacgacgccgaacccagaccgaggtaccgtcagacgacgaataggagaagtcactccgtcccgacatgcctgcagtgcgcggttcggtccgatgatgacgaaaaagttggatcagacggagcagatgaacgaggg

SEQ ID NO: 20252 - DNA, 212 bp, Zea mays
  Clone ID: MRT4577_118471C.1
gccatctacagcaaggtccgtaatcttttcgacgatgctattgacgcctttggcaaattgagctccaccgttgcacgtgtctggggtaatatcctcgatggtgttgttgtttggggacttaccaagctcatgggcgaatctttcaaacttcacgcccaggccttggttggctacgaagattctttgcaggttgccaaagaccagccattgca

SEQ ID NO: 20253 - DNA, 2704 bp, Zea mays
  Clone ID: MRT4577_118472C.1
agcgcctccccccaccactccccgtctcctctcgccgacgtccaaggaccttctcacagccgcctccttcacctcgccgccctcccccacctccgacgatcccgcctccccgctcgacgccttcgcctccgatcccgtcctctccgccttcctgtcgccgtccttctccccttctgtctcctcctccgccgcgctttcctcaggactcgctgcctcccgcgccgagcagctgcaggatgccatccgcctcctccgccgccatctccgcgtcgaggtgctgcgccgccaccccctcctcctctcccacctcctttctctccgctccgcctccgcgtctctctcctcgctcccatcccacctcaaccttctctcctctcacctctctctcctctcctcccacctctcggccccgcgctcccatctcgctcactcctcggcttccctttccagcctcttggccacagccgacctcctcctccactcccaccgcttagtgcgcctctcctcccgactcctcgcctcctcccctgcgcccgatcttgcgcgccaggctgagctctaccgcgagatccgcctcctctatgaggagaagaacctctccgggattaatgccgttgacgaggagatgcgcaaggtggatgccgctgcgtcaaagctgcgctcagaggccagcgctgtgatcgatggcggtgtctacgagtccaaccagaacgacgtgtggtgcgggctgcaggtgtactacaatctcggggaactgaagacagcagtggaggggcttgtgggaaagcacaaggcagcgggtgcaaagagtgtgtctgtcgcactggacatgaaggcgatatcaatgactgctggcgttggaggtggtcctggaggggtgcagaggagtggtacgccgcagattggtgggagtaagaaggctgcagaggcactatgggataggatgaggcagtgcatggatgagctccaccgagcagtgactgctgcttggcagttgcagactgtgctcactaagaagcgtgtgccattcacacaaatgctttttcttgaggaggtttggcaggagggtgagcctcttataacagagagagtttgggatgcaattgtcaaggcctttgcaagtcagatgaagactacctttacggcttcaagctttgtgaaagaaatatttactcttgggtatccaagactgttttcgatggttgaaaacctccttgagaggatttcaagagatactgatgtaaagggcacccttccagctctcactcctgaaggaaaagatcatatgatttcagccattgagatgttccagacagcctttttggctctgtgtcatagtcggctatctgattatgtcaacagcatatttccaatgtcaaaccgtggaactataccttcaaaggatcagatctcaagattggtttctcgcatacaagaagaaatcgaagtagtgagaactcatgggcatttgcttgttcttgttctacgtgaaattggaaagaccttgcttcttttagcacagagagcagaatatcagatctctactggccccgaagctcgacaagttaccggcacagcgactgcagcccaactaaaaaattttgctctgtgtcttcaccttcaggaggttcacatgcgcatttctagcgtcttgtcaacactcccaaatgttgcttctgaagtcctttcaccctcccttggtgttgtttatggtgttgcttgtgattcagtgacttccctgttccaagcgatgcttgatcgtctcgagtcatgcatcctgaaaatgcatgagcaggactttgcaggtcagggaatggatgcatcaatggataacaatgcatcagcttacatggaagagcttcagaaatgtgctgtccacttccgcagcgagttcttatcgaagctgttgccttcatcatcctctcgatcagaaaccatatgtaccatcatggttagaaggatggcctcaagggtactcatattttttataaggcatgcttctcttgtcaggccactctcagaagcagggaagttgagaatggcacgggacatggctgagctggagcttgctgttggtcagaatctgtttccagtggagcagctgggggcaccataccgggcactacgggcattccgtcctgtcttgttcctggaaacatctcagcttgacaagtttccgctccttcaggacttgccgcctagtgtgatcctccaccatctgtattctcgagggcctgatgaactgcagtcgccattacagcgcaacaagctcacacctttgcagtactctctgtggcttgattcacaaggcaaggaccagatctggaagggggtcaaagcaaccctagatgactacgagatgagggtcagatctcgaggagacaaggaattcagtccggtgtatcctctcatgcttcagattggatcttcattgtctcagcccaacacctaacatgtctctggttcaatcttgcatctgtatcatcttgtaggcattgatttttgaggggtcgggtgaagcttcggcatagtctatacacatgaaataggggatttgtgtttgttcctgaaaataatggttagcgtacattgtcttgatgttctgctagtttctgtatctttttgtaactctgatccgtgaaatatttgaaaaaggtgtcgtttcacaaaaaaaaaaaaaagaaaaaaaaaactcgagagaggg

SEQ ID NO: 20254 - DNA, 368 bp, Zea mays
  Clone ID: MRT4577_118473C.1
tcgttcggatttccttgcaaccgcacaggtagggcgatgtgaacccaagaccgatggcccccaacgccgagacgaagcccgcggcgaagaagccggcggaggaggagcccaggtacaagaaggcgaccagggagcagaagcccaaggaggagatgcgggaggccggggccatgtccgccggcacgttgggactctaggacaagcactgaggcgatgaaggacccgtagagcgcgcacggccacaagatctccgttgtggagggtgccacggaggccgacagcgccagcggcttcttattccaggggcaccacaagaagaagaaggaccactaggacgcccaggaggccagcggcgagaagaagcacca

SEQ ID NO: 20255 - DNA, 303 bp, Zea mays
  Clone ID: MRT4577_118474C.1
cactgcgctgtgattggtgcaccgccgccaccaaatccctcctcatcgtgttcctgcgaggttacgagtcacctgaagttcatcctggtacctggaatctcaagtcccaggtcaagaacaggtaccataggatgaggcgcatggtggatgctgcgatgtgttcgtgagaggtctaggccgtcgtctcccagtcaactttgggttgttggatcgttgtctccttacgatgtatttatttatttattttgtacagaacccctattgtataataaagttgtgacattcgtttctgtaccactattc

SEQ ID NO: 20256 - DNA, 657 bp, Zea mays
  unsure (1)..(657): unsure at all n locations
  Clone ID: MRT4577_118475C.1
caaggctgacagagcgacgccacagcccaaggcgagcgccgccaggacggacgccaccggcaccggaagcgccgccgcgccgttcttggatccgtgcggcctcgtcacggcgccgccgccgcccacgttccgcccgcccgcggcgccggcgactccacccgcgctgccacccttgtgcccgggggtaatcctcctgtgatgatgctccagctccactgtgcccgccgcctcatgcccaggcccaagcctccggctaggactcccggtttccaggtggtctttcatgtcgccttcagttcacgaacaagccaatcagtttgtcgcagacgagttattctccgtaggataagttgtgcaatcatgcatggcgacacggcaatatttcaggcaccaattaaaggaaaagaaaaaaaaaagagagcaatgctgaccgtaccatccaattgttcttgcacctggagataaggcctgacccgccgccgctccgtggagactcctccggcgcttccctcagatgctgctgctgctgcacaccgtgagacctgngaggcaagggataggaggaccaanacggagatggaggtggcgaggacggtgttgcctctcttcatcttgggatggacaggccaccagaagcagttcacaggtctgagtctc

SEQ ID NO: 20257 - DNA, 242 bp, Zea mays
  Clone ID: MRT4577_118476C.1
gggggagggcggggggctctttttagggccaatccgggactgggctttttatgtaagtcccaagcccaccatgaattcattaagactaacgggtaacaaaatcccttgttctacagtttacaggccctcgcaccggggggccttcggggattcgaacctggggctgcgggccggaatataagctgcccaccgaatacccgggccttttgagcccccgggcttttttagccttgcggcttttt

SEQ ID NO: 20258 - DNA, 287 bp, Zea mays
  Clone ID: MRT4577_118477C.1
actcggcatttccgagcccagacccatctcgtttcgctcgccaagagatactatggttagggaaggcaatagcagaagcaaaaaaagaaaggtcttagtgcccatggggagctcacggttctcgtggacgctttcggaccaccccaagctgcccaaggggaaaccggtggctgtcgtcgtgctggacagatggagccaggccataccccaccagatcaactgcattcatgtcgctcagactcctgtcatggactcgctaaagaatggcgctcctgagaaatggagac

SEQ ID NO: 20259 - DNA, 224 bp, Zea mays
  unsure (1)..(224): unsure at all n locations
  Clone ID: MRT4577_118478C.1
gccattgcttgccctcgctcggctgggccccactctccgtgccagaccaccaacncccggcccgcgcctccgctactaaagccgaggcctcacccaccaggccaccgccatgctcctccccttcctcagatcccacccggtcctccaccacgccgctcgcctgtcctccccgcgcactcggcggatcctccgccgcgacttgcttccgctcgcgcgctcccggg

SEQ ID NO: 20260 - DNA, 672 bp, Zea mays
  Clone ID: MRT4577_118479C.1
ttgggtacctcgaggccggccgggcaatgatatctaatctagataatcactgactgggctgtgtcagcttgctgcactgcactaccctgccctgccatcatgtcgtacgtgagaccctccgagtgagaatgaagaacaggtatgtatggtccgactttccttaactaggagatgatcacagtgctctctagtagggaccgatgaaagacgcccccgggccgcggcagtacaagattgatagtctgatctccaccgtgtacaacacggtgatgtcgtgactgacactctatctataggggtgttcccatgacgccccagccgggctgatatatatatcactattgctgctgcaatatgccaacaacacccccgaccgccgcaccatctgcgcctgcctcaagaacccttccaacaaaaaccacaccgcatatctctaccatacatcagaccgcgccgaacagagctgcccaccaagtgcgacgatcgccctgccgcacaaaatcagcaccaacgttaactgcaacacgattaattaaccgacgaagggtgctgcgtgcaacatccagaggaatgcatgcatggcgatgcggaagatgaataaaataatgctactggaattttaatctatatcttatgtgcgactggatctaggcatttattatgatgttcatg

SEQ ID NO: 20261 - DNA, 629 bp, Zea mays
  unsure (1)..(629): unsure at all n locations
  Clone ID: MRT4577_11847C.1
ggtccggaattcccgggtcgacccacgcgtccgtgaaagtgttgcttcaggtgcctagcctggtgcgtggagctgtggatgcaggggaggaagcgtttctgtactcgctgtgattcacattttgcttttgctgactgtaggtgtggcttataccttaaagcttttggatcagtaccaagagtttgattcacttcattggttccagtctgttagagaaaaatacataaaggagatcagagcagttgctaagcaacagaacgtgcagtcaactagtcaagatgaaaaactactccaaaccatgaaccttactcagaagcgactggaggtctatttacaggaatttgagctgctgtatttctccttgagcagcgcaagaatattcttcaaagcagacaggaccgcagctgaagagaaccaagaacagaaagagaaggaagaagaaactaaaacaagcaatggagatggacccgagagcactgtgtctgcagatcccgtggtgaaatgatggtgtgcagtcgtcagacgcatcatgatgctgttccagagacatggatgctttggcgtgcttgctcagtcgtcatttcccacgtcacacctaangagactgtacggactgctctggctctgga

SEQ ID NO: 20262 - DNA, 270 bp, Zea mays
  Clone ID: MRT4577_118480C.1
catcaaacaagtttcacaaacataagtctccaacactcacaaacgtaagtctcaagtatctcacaaagtattaccaatattaaaaagttcagaccaagttatttcacaaagtattacctacaccaacaaacataagatcatgtgcacaaagtatttcagcaaggtggacatctggactagttcgacgataggctgggcgatccatgagggttgtttgatgatgctgattgtccctgcacagagaagagattgcatgtatcagactagatg

SEQ ID NO: 20263 - DNA, 739 bp, Zea mays
  Clone ID: MRT4577_118481C.1
gtaccctcgggtccttccgagaaaacgaggggcaccccgacaagctgtgcgaccaggtgtcggacgccgtgcttgacgcatgcctcgcgcaggaccccgacagcaaggtggcctgcgagacctgcaccaagaccagcatggtgatggtgttcggcgagatcacgaccaaggcgaccgtggactacgagaagatcgtgcgcgacacctgccgcgagatcgggttcacctccgacgacgtgggcctcgacgccgaccgctgcaaggtgctggtgaacatcgagcagcagtcccccgacatcggcgcgggcgacgagacccccgagctgatgccgctcagccacgtgctggccaccaagctgggcgcgcgcctcaccgaggtgcgcaagaacggcacctgcgcctggctgaggcccgacggcaagacccaggtgacggtggagtacgtgaacgagggcggcgccatggtgcccgtccgcgtgcacaccgtgctcatctccacccagcacgacgagaccgtcaccaacgacgagatcgccgccgacctcaaggagcacgtcatcaagcccgtgatcccttgagaagtacctcgacgagaagaccatcttccacctcaacccgtccgggcgcttcgtcatcggcgggccccacggcgacgccggcctcaccggccgcaagatcatcatcgacacgtacggcggctggggagccaacggcggtggcgccttctccggcaggaccc

SEQ ID NO: 20264 - DNA, 2310 bp, Zea mays
  Clone ID: MRT4577_118482C.1
cgagccacacatccgtatgcccgttcgcctcttctcctccctcctgccgggtccttaataaagagcagcagcgcaaggtgagccgccagcttgccccgtacgtaccctgctgcttcttctccctcgttggaccgttcgttcgtcgtccttctcccgaggttcgtgcgtggttcgccttcgcccttcgggagatgctgcgaaccttaggcctttccttgctgcggacggggtaactgatacccatgttttgctgctggtggccgcaacgggatggcggatccgagtgtggggttcggtgatcagccggtttctctagatctgggatctccaaaatgtgttttttaatttatcgtgtctcagtcggcagtggagattttttttaaataatggtctgtcggcgtgatgtcgtttgctcgagggaagggagggttctctgattttgagatctgacggcactatttgttggccatccaattcgaacggtttctggttgtctgaattggtttgaacaaaattgcagaggttggtagagcgagcgagaagaaggcaatggcggcggagagcttcctgttcacctcggagtccgtgaacgaggggcacccagacaagctgtgcgaccaggtgtcggacgcggtgctggacgcctgcctggcgcaggaccccgacagcaaggtggcctgcgagacctgcaccaagacgaacatggtgatggtgttcggcgagatcaccaccaaggcgagcgtggactacgagaagatcgtgcgcgacacctgccgcgagatcgggttcacctccgacgacgtggggctcgacgccgaccgctgcaaggtgctggtgaacatcgagcagcagtcccccgacatcgcgcatggcgtgcacgggcacttcacgaagcggcccgaggagatcggtgccggcgaccagggccacatgttcgggtacgccaccgacgagacccccgagctgatgccgctgagccacgtgctggcaaccaagctcggcggcgcgcctgacggaggtccgcaaggacggcacctgcggcctggctcaggcccgacggcaagacccaggtgacggtggagtacgtgaacgagggcggcgcccatggtgcccgtccgcggtgcacaccgtgctcatctccacccagcacgacgagaccgtcaccaacgacgagatcgccgccgacctcaaggagcacgtcatcaagcccgtcatcccggagaggtacctggacgagaagaccatcttccacctcaacccgtcggggcgcttcgtcatcggcgggccccacggggacgccggcctcaccggccgcaagatcatcatcgacacctacggcggctggggagcccacggcgggggcgccttctccggcaaggaccccaccaaggtggaccgcagcggggcctacgtcgccaggcaggccgccaagagcatcgtggccagcggcctcgcccgccgctgcctcgtgcaggtgtcctacgccatcggcgtgccggagcccctgtccgtgttcgtcgactcctacggcaccgggaccatccccgacaaggagatcctaaagatcgtcaaggagaacttcgacttcaggccagggatgatcaccatcaacctcgacctcaagaagggcggcaacaggttcatcaagaccgccgcatacggccactttggccgtgacgacgccgacttcacctgggaggtggtcaagcccctaaagaaggcatccgcttaagaatgtattgggaagttcactggacatgaggttcatcttcgtctggctctgctgatacctgcaaggattgctgctgctgctgccgcccctggatgtgtgtttgatcagtgactggctgctctgctccatagaagatgaatgaagagagagatggtgaagaaggctttggcaaatggcaattgccgcagcaagccatgtcggcgccactgaccggcttagtgattggtataatttggtgtggcagcagccaggattaatgcgctggtcttttatctttactactagtttggtctcgtccggtatcttatttttctttccccttttcgagtctgtactgaaactgctgagagatttgcagttttgatctatcatatcctttggtaatactgttcgtctcgagtgcgcactggtgcttgctctgtcgctcgtcgtcggtggcctttgaggaccatgaaaggtgaaaacaatgtttcatgtgacctttgggcaaccgtggaagggaacctacacagtagcaaatgagaatgtacaggctgtatctttgttaccagttgaaaaaaaaaaaaaaaaaagcggcc

SEQ ID NO: 20265 - DNA, 1725 bp, Zea mays
  Clone ID: MRT4577_118483C.1
cattgggtacctcgaggccggccggggtgccacacatccatccccgttcgcctcttctcctccctcctgccgggtccttaataaagagcagcagcgcaagaggttggtagagcgagcgagaagaaggcaattgcggcggagagcttcctgttcacctcggagtccgtgaacgaggggcacccagacaagctgtgcgaccaggtgtcggccgcggtgctggacgcctgcctggcgcaggaccccgacagcaaggtggcctgcgagacctgcaccaagacgaacatggtgatggtgttcggcgagatcaccaccgaggcgagcgtggactacgagaagatcgtgcgcgacacctgccgcgagatcgggttcacctccgacgacgtggggctcgacgccgaccgctgcaaggtgctggtgaacatcgagcagcagtcccccgacatcgcgcagggcgtgcacgggcacttcacgaagcggcccgaggagatcggcgccggcgaccagggccacatgttcgggtacgccaccgacgagacccccgagctgatgccgctgagccacgtgctggccaccaagctcggcgcgcgccctgacggaggtcccgcaaggacggcacctgcgcctggctcaggcccgacggcaagacccaggtgacggtggagtacgtgaacgagggcggcgccatggtgcccgtccgcgtgcacaccgtgctcatctccacccagcacgacgagaccgtcaccaacgacgagatcgccgccgacctcaaggagcacgtcatcaagcccgtcatcccggagaggtacctggacgagaagaccatcttccacctcaacccgtcggggcgcttcgtcatcggcgggccccacggggacgccggcctcaccggccgcaagatcatcatcgacacctacggcggctggggagcccacggcgggggcgccttctccggcaaggaccccaccaaggtggaccgcagcggggcctacgtcgccaggcaggccgccaagagcatcgtggccagcggcctcgcccgccgctgcctcgtgcaggtgtcctacgccatcggcgtgccggagcccctgtcagtgttcgtcgactcctacggcaccgggaccatccccgacaaggagatcctcaagatcgtcaaggagaacttcgacttcaggcccgggatgatcaccatcaacctcgacctcaagaagggcggcaacaggttcatcaagaccgccgcatacggccactttggccgtgacgacgccgacttcacctgggaggtggtcaagcccctaaagaaggcatccgcttaagaatgtattgggaagttcactggacatgaggttcatcttcgtctggctctgctgatacctgcaaggattgctgctgctgctgcccctggatgtgtgtttgatcagtgactggctgctctgctccatagaagacgaatgaagagagacagatggtgaagaaggctgcggcaattggcaattgccgcagcaagccatgtcggcgccaccgaccgccttagtgattggtataatttggtgtggcagcagccaggattaatgcgctggtcttttatctttactactagtttggtctcgtccggtatcttatttttctttccccttttcgagtctgtactgaaactgctgagagatttgcagttttgatctatcataccctttggtaatactgtacaaaaaaaaaaaaaaaaaagcggcc

SEQ ID NO: 20266 - DNA, 1741 bp, Zea mays
  Clone ID: MRT4577_118484C.1
cggggtgccaacatccatccccgttcgcctcttctcctccctcctgccgggtccctaataaagagcagcagcgcaagaggttggtagagcgagcgagaagaaggcaatggcggcggagagcttcctgttcacctcggagtccgtgaacgaggggcacccagacaagctgtgcgaccaggtgtcggacgcggtgctggacgcctgcctggcgcaggaccccgacagcaaggtggcctgcgagacctgcaccaagacgaacatggtgatggttttcggcgagatcaccacgaaggcgagcgtggactacgagaagatcgtgcgcgacacctgccgcgagatcgggttcacctccgacgatgtggggctcgacgccgaccgctgcaaggtgctggtgaacatcgagcagcagtcccccgacatcgcgcagggcgtgcacgggcacttcacgaagcggcccgaggagatcggcgccggcgaccagggccacatgttcgggtacgccaccgacgagacccccgagctgatgccgctgagccacgtgctggccaccaagctcggcgcgcgcctgacggaggtccgcaaggacggcacctgcgcctggctcaggcccgacggcaagacccaggtgacggtggagtacgtgaacgagggcggcgccatggtgccccgtccgcgtgcacaccgtgctcatctccacccagcacgacgagaccgtcaccaacgacgagatcgccgccgacctcaaggagcacgtcatcaagcccgtgatccctgagaagtacctcgacgagaagaccatcttccacctcaacccgtccgggcgcttcgtcatcggcgggccccacggcgacgccggcctcaccggccgcaagatcatcatcgacacgtacggcggctggggagcccacggcggtggcgccttctccggcaaggaccccaccaaggtggaccgcagcggcgcctacgtggccaggcaggccgccaagagcatcgtggccagcggcctcgcccgccgctgcctcgtgcaggtgtcgtacgccatcggcgtgccggagcccctgtccgtgttcgtcgactcgtacggcaccggcacgatccccgacaaggagatcctcaagatcgtgaaggagaacttcgacttcaggcccgggatgatcagcatcaacctcgacctgaagaagggcggcaacaggttcatcaagaccgccgcctacggccacttcggccgtgacgacgccgacttcacctgggaggtggtgaagcccctcaagttcgacaaggcatcggcttaaggttgggagtgttcactgtggacatgaggactaccttcctctggctctgctgttacctgcaagcattgctgctgctggatgtgtgtgtttgatcagtgactggctgctgctccatagaagatgaacggagagaaggatgatgaagaagggctttggcaatcgccgctgcaactgcaacccatgccatgccggcttagtgattgggtataatttggcttggcagcagccagcattattatgtgctgatcttttatctttactagtttggtcgtccgatatctttctttctttctcccccccccccccccctttcgactctgtactgaaactgctgagagattcgcagtattgttgtatcgtattcgtatgctactgttactctggtgcccctctctctctgtaactgctgagatttttctccgtcgaaaaaaaaaaaaaaaaaagcggcc

SEQ ID NO: 20267 - DNA, 297 bp, Zea mays
  Clone ID: MRT4577_118485C.1
ggagaccgaaacccccttattgagcatgcttaaatggggaacgagccagcaagaatcttgtgcctgataacagatagctttttgtacttacactatcgaactaggaccctaaggctatcataagtactgtgtgctggctgttataggaatgaagaagacgaagcccgtaagcctaagacgattcgtgtatgctctagagcctgctccccggggaggccaccgggttctctacaatgccgagggcaaccaggcctccggcggagatgacgcttatatgcgggggacttggcctgagcc

SEQ ID NO: 20268 - DNA, 448 bp, Zea mays
  Clone ID: MRT4577_118486C.1
gcttcatgtaacgacctttctgtcagcccaacgactggcacaaccaatgaaacaactgctgtggtgccagctacatcaacatctgctgcggctcgcctaggatctattctacctgatcttttgaatactgtggatgctacggagagagaccaacagggagcccaacagctggacgccttgattgctaacgatggcgctgatgaggacattcaggctgatattatggaagttcctgatatcttgcgtaggagcgtgagccgggatgaggctgcattagcagctgcacaaacggttgcccagagtgtgtacgagagcacatccgataccacttatgtctcctgtcttgtagcaagcctagttgcaacactagatgcctgcagcttgtcgcaaagaggtaacaagaggggtaacatgttgagatgtagagacggatgttgacattgagatc

SEQ ID NO: 20269 - DNA, 430 bp, Zea mays
  Clone ID: MRT4577_118487C.1
aaccgaaaaaaaatagggctgcgggggaaaaataccacccccaaagaaactttgggaccccgggaaaacaggggggggcctaacaccacccagggggccccccattccccatcagggtttattaggccgcgcccaaaagaaagggttaaaccccccggaaggtttcacgcccccccccgggaagatccaccccccggggccggccgaggaggttttttggggaaaaaaggggaaactgggcccctaacccttcggtttgaacccccaagcgaactgggggggaaaatttcaggccccccccccccaacaattccccccagataggggggggccctatggccccattgggtttccgggcccccccccttccaaatgggcccaaacatttccatatcccccccttatgtttggggccccccccccgggcccc

SEQ ID NO: 20270 - DNA, 399 bp, Zea mays
  Clone ID: MRT4577_118488C.1
gcccttcgcgctcattcgacccgctccgcaacacgctttttgcacttttcaggcgaggcgcgctcggcgcgcggaggcctgggtcaccatcctaaacgactgcctcaccatgtacagcgatcgtctccttcaacgagggcgacccgttcacggagcccacactcacgctacaccggtcagaagaaggaggcctacaagctgtataccgccgacagccgggccaagatcaccggagggttctacttcaagtggtatctccagcgtgcactgggcatacttcctcctacacatgctcgaccacccctaccacttcaagtagaatacaaactcataaagatgcatacatataattaagctgcggcggcgatcactctattagcgtgcaaaggaatgccatat

SEQ ID NO: 20271 - DNA, 398 bp, Zea mays
  Clone ID: MRT4577_118489C.1
tcccgggtcgacccacgcgttcgcggacgcgtgggtctacacaccaggagggtgcatatgctagtatgctgggcaacctcgcaggggcagacaagaagggcactgtcattcttgtgcacgcaaactttgtccccaatgttgacaccttgcttgaagcaaacatgggcatttcccagacaccttcaagaatggtggtgcctgaaggcctctgtggtgccattatgccggtcacaaatacctgggacaggtagctgcataactcaacaattcgacacggggtggcatcatgccttgggaacttgctttcataaggatcggtggacgccaaggctcaagcggcgacatgcttggcccaactgttacagtacacgattgcgctactcaagttaaaaacgcca

SEQ ID NO: 20272 - DNA, 406 bp, Zea mays
  Clone ID: MRT4577_11848C.1
gttatctttttttgggcaacagcttgtggacgtctttagtacagacaggaaaaggctttatgggaacaggatcccatataccagcggaaacattgtttgctaaaggagaacaacagctgatcttacggtgggggctcgaacatgaataatgccacgggtacccaagctggtgttctaactcatcaatcaggtccacactgggtgatccaatggggacctaccagggagctccaacactcgacagagctaacctgacaaaaagtatgggcaagcccccgccgtaagagcagcagtcgagaacacataacctacattgaccccagcggtatacaagatgctgatccctgaaatacatgttaccgttggaccatatacacccaccacctttttgcgaacactgcagaac

SEQ ID NO: 20273 - DNA, 1014 bp, Zea mays
  Clone ID: MRT4577_118490C.1
atggtgtatagtgctattatggatcggtggttgggtccgctccggtttgatgagacggatgcattatgtggccgtgagggtgagggccacgagaggcgctccgagggcaagggcccatgctgctgttacgactcctacgtccgtcgtgtgtcggccggccaatgtgcagcaacacaccaccaccgcctccgcccactgcagcggcagttgctcgtcgttcgccatctccaccagtgcctgtggtcgtcgggaccatcgctgcccatcgtgggcagcctgctcgcgctgttgatgccccgagaggccgcatcatcttcaccggccaccgcccaaatggggtggccctatcttcctcctccaataggagggcctaatggccctctgtccggccggtggcggttgccgccacgtcggccgtttggggggagcggagtggagagaggcgcggcatggccgatggttcggacgcagacacgcggaagcccctcgacgctctgtacggcaaagccggtgctctgcgaggcgcgccccggtgcgggcgcgctcagcacggcaaggtcggcgctcggcgcggcaaggcctgtccagggcgcgaccctccaaggcggctcggcgatgggagccatggcgcccctggcgcgcccccctggcctgcgcatggcggctaggcgcacggcgcggaggcgccgttcgtcacggctctcgacgcgtcgcacgggcgcaggagatggcttcggcgagggcgcgcgcccggcgctcagtgtggcgctcggtgcggcctcccagagggcgcggcccaccggcgggctcccggcagcgctcggcgtggccggcggctgtgcgcagaggccctggcgcgagcgcgcaccaggcgcgggcgcagggatgccctcggccagggcggcgcgggagcttctgtggcagcggcggcttcctggccaagcgcgcgcgcggccccatggcgaggcaaggcggcggctgggagctttgggctcctggcggcggctgggatag

SEQ ID NO: 20274 - DNA, 385 bp, Zea mays
  Clone ID: MRT4577_118491C.1
agaagacgtacatgttattcctgatattacacaccatacgctctgtttttaataatattacggatttacaaaacaaagtactcctatgtgaagtatagctggacatatataactctgtataaaaataatatgcccatacaatattttcaaaactttacactacgaatacatttagaaacagggtaaatgggtttgggggcaatgaaaatggaggagcttcaataaccaccttttatttaagtatggttattgattttattttttatacgtatcaagacatgtgcacaggaggatgaccccaattcgaacaatttcacatcatgggagtctagtagagatgtgactcccaaatgtcaggaaatattcaaatcacttcttttgatat

SEQ ID NO: 20275 - DNA, 769 bp, Zea mays
  unsure (1)..(769): unsure at all n locations
  Clone ID: MRT4577_118492C.1
tttgcgttttgtttgtcgctgtaagttgtctgttttgttccatttgagatcggatcgccatgaagttcaacagaggtcgccgccgcagccgtgattcgaaaaaagcagcttattatggggaggaaaggctaagcgagctgccaagtgatgttgtggtcaaagtccttgagacggtgaaaacacggttgaagaaagcagctggtaatggggaggacaggctaagcgagttgcccaatgacgtgctgctcaacatcctcgagagggtgggtacgcttgatgccgtaaaaacctgcatcctgtcaaagcaaatgcagaagctgcccgctatgctctcgcagatcgtaattgatctcaaccctcacgatttgattcaaatggatggtgttgtggctgatgtgacgaacaagatccttactacgaggtctccacagatcaccattcgcaagctgaagctcaaatttttcttggttccctctcgctgtctctccatcggcaaatctgttggcctcgccatggtgacccagaaattggatgcagctgagtttgagatcatgacacagaaggatttcagccattgcactgatgcccatcgcctgctctatgctgagaaattcaatgattctgttcgtggttgtccggatgcatttgctggtctcacgcggctgcatctacggaatatgaggtttggtaaatcagatatatccaacatccttagccattgcaaagtggttggagntcttgtctttcttcgagtgtgacgaggggggtc

SEQ ID NO: 20276 - DNA, 314 bp, Zea mays
  Clone ID: MRT4577_118493C.1
aattatattttttttttatttcttctttatcttttggggtttttaaaaaacccacgcggtgggccccgattttccttcctttggaaaattccccatcaaggaaaaacacaatatgacaggtactatccagtggaaactatttcattcaaagaaccaacattgaacccatcgtggggaatcaataaaaagttgcaggcaaattttatggttgcaatcaagcttctttaatgggttcaccagaccggggaaactggaagcccccttactaatatgcctaaccttcttaagggccttttggctaagaattggtgggc

SEQ ID NO: 20277 - DNA, 311 bp, Zea mays
  unsure (1)..(311): unsure at all n locations
  Clone ID: MRT4577_118494C.1
tcttaaacccccaacaaagaccnnnggatgttgtggaagaaggaggaaaaccccgcacacccccacaaggagaccaggctgatcgacgcacaacggagacaaagaaacccccaagacgcaacgggagcgcacgagcacacgccagaaaaggggatgccgcccaacaccgggacacgcacaagcccaggagacagccccagcaaagaaaggcgagccggggaagcacagcaaaacccggaaagaacgcaccagccaccgggaagggaaccaaacccaagcacgaacagagccatgacaaaagggaggagcac

SEQ ID NO: 20278 - DNA, 312 bp, Zea mays
  Clone ID: MRT4577_118495C.1
gggttctctccactccacacctcagatcccgagtcgtgctcagcacgacgtcaatcgagtactccattgacgagggtaagaccttatcgtatgcctgacctaacatacgtgcctagtgaaattcggctaaggctgacttgccatggcgagtagcgtgccgccatgatacaatctcgtgcctgcgagcgatcatgactccgctatctgatgttactaggatgaccgctcacttgccggtctgccatgcggcagaccctgcatggcaactacttgactgacttggaatacgagcatgcagaggcagttcgcatg

SEQ ID NO: 20279 - DNA, 614 bp, Zea mays
  unsure (1)..(614): unsure at all n locations
  Clone ID: MRT4577_118496C.1
atgttgcattaatatatactcttgacaggaaagaacatctattttgagcaagtgtcaagaaatgattccactagttctaactttacacatctgatgaatggaagtgttttccatagactagcatctggctctctctatgtcaaatcttacttcttctccagggccacataatctctgttgtcacacctgcaggcctgactcagggagactcacagagtggttggcgggagtgtcctagaagcttctcctgtgccaaggtgactagaaatatctatacacagaaagaaccacaaatcgcagaaagaaccacaatccacagcaatacctcccactaattatccccattcaactccctttatctggattccaaaatgcactcaacctccagcagcacctcacnacaaggagaagtgtatggcaacgtagaagctggagtggaaagaagcagaagtcataaccactcacagcccaaatcctacccttgtaaattttacaaaaaatatgagcacgttgctgggagtcttgggagcgattgaagcttcattcatttcacagtgactctgcctttttctgnaaacagttgggaggtgatatggtctggcttctgtgtccca

SEQ ID NO: 20280 - DNA, 104 bp, Zea mays
  Clone ID: MRT4577_118497C.1
cagcttgctcagcttgtacgagctcgatcactagtacgccgcagtgtgctgattcggacgaggggccggccaattctcacgcgctcgccgctaggagcattcac

SEQ ID NO: 20281 - DNA, 1348 bp, Zea mays
  unsure (1)..(1348): unsure at all n locations
  Clone ID: MRT4577_118498C.1
aattcggcacgagggttaggggttagggtcgtagcgagggctctgaaattggaatcccaacagaggaattacacccgctttgggacttcggagaagggaatgtcggcaaccatcgaccggctcgcgacaccgagtcatgagggtcgtgcacacagtgacgaaaagcgagagtgcaattctgatgaagagaactcagaaggagaaagaaagcccaaaaaggattccttcaagaagagagcagttactacagggtatagatttaggcattccttaaggagaaagagtaaaacaaagaatgataaccatatagcctcaatagaagacataagagatgttcaagagctggagattgttgaaaggtttcgccagtgtttacttgatgatggtctgttgccagaacatcacgatgattatcacacgatgttgaggttcctgaaagcaagaaaatttaatattgacaaagcaaaacatnatgtggtcagagatgcttagatggaggaaggaatttggtgctgacatatagaggtaaagctaattntgtttcaagtccaacagtttgagcttgttggcattcctcctgtctaagtgtagtgatcaaaaggctatcacaacaggccatcacatgtgacttccaaggatatacaggaaatggcacccttacatctgtattggcacggcttggtgaattggaggagaaggtacaggcaattgaagcaaagccatcccaagtgccatttgaaaagcaggaattgttgcatactttcgttaaccgcgtgggtgtgttggaagctgaactaatttctatgaagaaggtcttgtatgagacattggttcggcaggatgagctgcttgcatatattgaccaacgacgggcagccaaattttgtcggcagaagttctgcttctgagtgctgaagtacctgccacctatgttcttctattcggagttggcatgctgctattgtggacacagaatacttgcaaatatcttcatattttgttgcggtgtaaagaattgcaatatttagacaaagatgggattgaaaagggttgcttctcttgacaccttgtttcaacggaaaaaaagagaggaatgctcgatatcttgtgcacattttcaagcagataaaggcgtaatttttttctagtatttggtgcaaggttcgaactgtctgtaactctatagtgcatatggcgtgtgtttgtttggtggatgtggatggggctcgattgtatatcttggctgagggatacagactgagtgaaaaatgtcggacctcaccccttgtcgcggaaatgagagggaattgaactggaacaaggaacaatgaattgtaaaatgttttgt

SEQ ID NO: 20282 - DNA, 300 bp, Zea mays
  Clone ID: MRT4577_118499C.1
ttcctgctcccggccagcatccattcccagcctctcgagatccaagaagtcccgcactagcggcgtacggtgccgtgtgtgtgtagtaagtaggtacgtacgtgatgggcgacgacggcgtcaaggcggccaccacgacgatcgtgcggctgcgggagctgctgcacaagtgggccctcggcgccaggggcgacgccgacgacggcgaggagggggagggggaggagacgcacgcgccggcggcgggggcgggagcgggagcgggaggtgcgccgtcgtcgatcccgccgttcgtgctgc

SEQ ID NO: 20283 - DNA, 184 bp, Zea mays
  Clone ID: MRT4577_11849C.1
gcggaccctttgccttcgccactgctcagcgtctgcacatccctacaatggctaaaacagcaatggcctacaaggaaaaaatgaagagctgtccatgctgtcactgatctgctcttgcttttacccggaacctcgcaacatcaacatctatacttacgatgatatggaagtgaagcaaatcaac

SEQ ID NO: 20284 - DNA, 396 bp, Zea mays
  Clone ID: MRT4577_1184C.1
actctcatgcgtgcggtagtaaaccctagcggctggatggggtttagttcgccccggttcctgctgatccggctgggttccctcgttggttgattcctacttcctagggggacgcatgggcgcggagacggtaggcctaccgacactcctgcgggagatccaacggatcgacaccatccggctctacgcggttggaagcattggctggcaacctggaagatgcggcattttccatcattagacatgccccaaagttgaacctatcacacatacatagagaatcaaatgtaccagaatggaagcaagggaagctgctccacgctgttgatgctgtgagtgagacatcgaacgagaattagtacggatcagcaccactaggccgcattggaccaacct

SEQ ID NO: 20285 - DNA, 132 bp, Zea mays
  Clone ID: MRT4577_118500C.1
gggaaggcacaggttgacatacggtggaggggaattatatcaatgattcggttactgacgaatgtcccatcaaagccataaggcactctggggggaaacgtcttttgcgctacaggagcaatctgaaacctt

SEQ ID NO: 20286 - DNA, 576 bp, Zea mays
  Clone ID: MRT4577_118501C.1
gggtccgggccccccctcgggtcgacccacgcgtccgcgcccatccacacacgacactaaccaggcaagcagcttgcctgacggagtgaaccctatggcaacactgcgcggacgacgggggggccactaccgatggactggggatacggtgcgacaccggcacctcctccattccagacgtggtgtgtcccaggaacgcgcgcggcacaacagcagcttaaaggctctaagggcaatgcaaatcatacgcctggggcgcaaaacattaactatacaacccggcactggcagctggagtgaccacacattgtaccagctacaacagtatgcaccagggagcaccacatgcaacggaaaggctaagcccaaataacgtgagagcaaaaagagggtccccatgggagcaaagaaaggggcaacatccactgctagagaaagcccgaggacgctgacgaagctaggaaggtgatgccatagcacatataggctaaggacgtgtgaatgcatgtactgcgagggcacgcttgtcacgtatagtgcaagatagcgagggacgacttgatgaactgctcttag

SEQ ID NO: 20287 - DNA, 580 bp, Zea mays
  Clone ID: MRT4577_118502C.1
cgagtatgaggacgaggagccagctgatggcatgtgaggggtggctgttaaatgtgaagcctggtgatgtcccatttccgtgttgtcggttgtcgccatgttacactattacactagcataccaccctcgtggcccaaaaaaaaaaaaaaaaaaaaaaaaaatcggagtaccagcagtaccaggatgcgactgctgatgacgatgaggaggccgagtatgaggacgaggagccagctgatggcatgtgaggggaggctgttaaatgtgaagcctggggatgtcccatttccgtgttgtcggttgtcgccatgttacactattacactagcataccaccctcggggcccaaaaaaaaaaaaaaaaaaaaaaaaatcggggtcccagcagtaccaggatgcaactgttgatgacaatgagggggccgagtttgaggacgaggagccagctgatggcatgtgaggggaggctgttaaatgtgaagcctggggatgtcccatttccgggttgtcggttgtggccatgttacacttttacactagcataccaccctcgggggccaaaaaaaaaaaataaaaaggg

SEQ ID NO: 20288 - DNA, 262 bp, Zea mays
  Clone ID: MRT4577_118503C.1
cacccatcgagcggttgctgggggcgggccaaaaacaagttagggacgcctgcacaaacaaacaatggtcccgaaagaccatgattactccagccgcacggacaccaactcatcagggggagccagaagcgtcagccaaggtgcctgactcacggcgtactcacgcgtcggaattacggcggaaaaccagatagtcgggtaccggacacaagacccaatgtcttcacgctacgcgtttacagccgaatatggattacgggtg

SEQ ID NO: 20289 - DNA, 664 bp, Zea mays
  Clone ID: MRT4577_118504C.1
acatcagtattgcgactctcggacctcggactatcctgtgctcatctcaagctaccaaatacacaccaatgtgtgttgttcacaagatggatggcatatgcatgctgacactgaccactcgccacttgatactaactggccgatgctgagctcgcgatggtgcatgtggacgccgtgtctacggatcatcgtctgctctctgggcgccatgggcgctcagcctccgagagaacgagtaaatgaccctggacctccatgactccgtggtgttgatttggtgtgcagagtgcgaggccggagaactgcttctgtacccccgagactcctcgaggttgatttggatagcataggaatgagccggaaaactgcttctgtgcccccgcgcatgcatgatcgtcgctgtgagatgacgagaacgctggcgaataactgattgtgtgaccacgtaactccagggaggggatattcaggcgcactgactgccaaggactggaatgatactgggaagagaatgatgaataatggatgtgcactcaaagtatctgcttggggatcatcgctgtcgcgtatcttggatgtccaacaataagtacgcatatgaagagggcatgtctgctggtacatctgcatgcacagcactaatgctctgttaggtgcagatgct

SEQ ID NO: 20290 - DNA, 428 bp, Zea mays
  Clone ID: MRT4577_118505C.1
tggcttggaacctttgggctgctttatgtgcttgtaatcacggaagacgtctatctggtcccgtcagactctgataacgatatcgtgcccgccggcgcccccgacggatacggaggaaaagcagctgttaaacctcgcgtaaaacactcatatagagaagcctctaggagcgaagttcacgtagtcggcgattcgggcgtcgtcgcttatagagtccatcctagaacggacgaaacgacgtgaggctaaagaggacggtgggaatcctaagtatccggagacaagacaaactagcccagcggtacaacagaaggtccaacccggctcttcaaagtaagcgacctaaacgacagatacgacgaccgggtccccgaggagggattatatctcgaccccatcgggttaaaccgcgggagcatagttcgcgc

SEQ ID NO: 20291 - DNA, 366 bp, Zea mays
  Clone ID: MRT4577_118506C.1
tcgagcggccgcccgggcaggtacaagctttttttgttttttttttttttttgacgcattattatcaatacatcaaggtttcctcttgttatccgaagatggcattttaccaaaatgacccttgggcctccaacactcatgagccctattacaacagctacctggggtgcattgattggcccaaaacatcagggcacatcagctacaacaacgggagctagcaaaccttgctgcctactctcagcgtcagcagttgcctccattcaaccaactgggggcattgaactctgggcctggggggcaacaacagcaactaccatacattcagcgtcctgctgcccacccccagcattttgttgcataaac

SEQ ID NO: 20292 - DNA, 275 bp, Zea mays
  unsure (1)..(275): unsure at all n locations
  Clone ID: MRT4577_118507C.1
ntcgatcccatcgtcgtccnngccgttgggtaaggggatggcttcgagggcgggcccgtccgctggctgcggtcggtccgggcgtggtctgagcgcaatggtcacgggtcccttgggtgcgcgaacgtccctatacgtgtggtcggggcngtgtgcggcgtggcagagggcgcnncggttgcttagcttgtngattctgacattaaagaaggcgttcnaagtcataantnnccggcacaaacggtagcntttcgcgcncnnactggtcttttcaa

SEQ ID NO: 20293 - DNA, 1226 bp, Zea mays
  Clone ID: MRT4577_118508C.1
ttgggtacctcgaggccggccgggaaggactatctttaatctctaatcgtcgcagagatgatctatatcaaggccctgctacctctcgcccttgttggccttgcgacagcccggaactgcaccaacatcatcatcgaaacccccatcgtctcccggcaaggaaagtttcgagaggtcccacttgagagcaatgtggatgtcggcgaatttgcaactcggctcgccaagttccagagcaactatagtgcagagttgctcgagggataccagactttgaaaaagactttcaacatatctactcaatactgcgagcccgatggcggaagcagtgataccatccagttattgattcacggtattggtttcgacaagacatactgggacctggagtacgacaactacaactacagttatgtcaacgttgctctagacgcaggatacagcacactcgccattgaccgtctcggcatcggaaggtcgtcgcatggagaccccttcaacgaaatccaagcccaagccccactcgaagccctcaactccctcaccctccaactccgcaacggcacaatctgcgccatcggccgccccttcaaaaaagtcatccacgtcggccactccttcggctccgtcctctcctactggctctccgccaaatacccctcaaacaccgacggcctcatcctcaccggcttctccgtctcgtcccaattcctcccttacatcatcgccggctggaacctacacagcgcacgcctcaaccagcccttccgcttcggcaacgcttccaacaccggtatccggaaactcgcaacgcagtattctctcctttcaaacctcgcctcgggcttccagaaaatactcagattcgcgggtgtgaatctcgcggccaacgacgtctggaacatcttatcgacaaccgaactctctgattttataaccgggtataataggtcggaagtgcactctttgaattacccatcaggttacatgacgcattccagcctcacagccctccaatacgccttcctccaaccatccaactacgacatcaacctcgcactgcacggcgaagcaacgaaacaagccgtgacggccggcgagctactcaccatcggtagcggacccgcctcatcctcttttacgggcccagtcctcgttatcacagggggaaacggatgtaccgttttgcggcggaattgctacggcaagatcccggcatgcagttt

SEQ ID NO: 20294 - DNA, 983 bp, Zea mays
  Clone ID: MRT4577_118509C.1
gttctagatcgcgagcggcctcccttttttttttttttttttttttgacagcagaagcgtgcggcattctacaaggtttttctttctaaaaacatacaatgcctccaactattcgtgtagtacatttatttttgttcaattaagtaagcgcgtgtaatccacacaccatggaaagaccaccacacagcgtacagaaagatcaccttcgcctggaccctctgcccctgcgttcggtgcctctagcatgcttcgtctcggtctcgggctccggcacggcgcacctggggcacatccagtcgtcgtcggggacggcgtccaggggagggtcgcagcagtcgatgtgcatgccgatcccgcagccggcctcgccggcctcgtcgccgcagatcagcatcacgtctccccggtccctgcggccgcacgccgagcagctcaggtcctccggatcgtcgtcttccgacggttccgacttctccgccgttgccatctctacctgcttcttcgtgagtttctccagggacttgctggccacgcagttcgtctcgaagagaacgtgccggtccaggggctggcccggcttgcacacgtactcgaccaggtaatcggcgctgacacagggaatgccgtggctgatgaattcctggacccacgcgtctgttcgtgatatgctctctgataccacggcgaagtcgactccagagtctaggaaccgggtgtatggcggcgatgttgctaaaacggcgccatcgccggcctttactgcacgctttactgtgtccagagttggtaatatgaactgtccgtaggcaacgatctgcattccgtagaaggcgccatggcccatctgctgccttatgtttcgccatttcctgggagcgtcgaaactgattgttcgtccatcgttgaagcctgtgccgaaccattcaaacggttcttcgtccacgaacttgccggcctcaatgcacgcggtcaagtactctctc

SEQ ID NO: 20295 - DNA, 214 bp, Zea mays
  Clone ID: MRT4577_11850C.1
ttggttttaagatctaacataaatttcattatacatcctcacgcgaactaggaatataggtctacgggtgacaaaggcaggggatgggctgactcagcaccattgacccgcatatatcggacaccacatgatgcttacaccgaaaaatcatcctatgtacgcaccatagtaaccagtttacacaggcactagctctgatgccgtcttggactac

SEQ ID NO: 20296 - DNA, 106 bp, Zea mays
  Clone ID: MRT4577_118510C.1
ctcgtctctcatacgcctctgttttcagactctgggggtgcgttattttcggtgagcggcttattcacatctcttggcgaaaagtcacacgtccttccatgagtgc

SEQ ID NO: 20297 - DNA, 264 bp, Zea mays
  Clone ID: MRT4577_118511C.1
acgacgcctcccacgactcctccgaccactcctgcctacaaaagtactccggaagatgcggtcagctgtacagctgataagcgacatcgccaaggcttgcaatgcgaactaaactgaattataatgccccttcatggagcgcctctgctggcatggtcttcaataatcatgcttcactcacgccaagcacatctacatctcggacatgatgaaccatgatatccagaaggcgacactcatcgtgctgggagcggtagaactgct

SEQ ID NO: 20298 - DNA, 224 bp, Zea mays
  Clone ID: MRT4577_118512C.1
gctagtcgtagaccgcgagcgccgccacatcgtacgggatcttttcatttttttgttcctatggcgggttttcatggccgtggcatcaagctggtttacaagctgatgatggacggctaggggaaaaccagcgcgcccaacggggcggaacaggcgggaacgcaggcgcaggacaaaaaaaaaagcgcgatcctggtagggacgggaaacactctcacccccgc

SEQ ID NO: 20299 - DNA, 659 bp, Zea mays
  Clone ID: MRT4577_118513C.1
ctcgagccgcactgatggataggagcaacgccaaagctggtgcttcagacgatgaacgtgagggggctcagcattgctcatgtaaaaagtcacctgcagatgtacagaagcaagaagctggaccacgagtctgctggagctggacacgatagagcagccatctactccggttctcaattctcatctcaattctctctcccctccgcctccccccacccccgcctccaaattttagtttagttttatctactccacagaagcatactgcacacgtacatagaaaacgccatggactacgtactgcatcatttccttaaccatcgtcgctgctcaattttggcagttttcaagcccatggatttgcacatgatgatgaggagaggagaccatcgcttccatgacatgtttctccatcgagctgccgctgccggctcggtcatctcctccccgctgctccacaacggggatttgttcgggtcacgggacgccgtctcgccggaggccagcaggctctacgcgctcctccaacgccggcagcagccttcctccacgcaaacgttcgccctcatgaactacagtagtagcctgatagatatgatgtacttaatcaaccaccagatcgaaatgaagaacaccatgcatgcatgcgcactgcactc

SEQ ID NO: 20300 - DNA, 230 bp, Zea mays
  Clone ID: MRT4577_118514C.1
tggcttttcgccgcttgcttgctcaagaataacgcttgccatgttcgtttagtagccagccgtttgcacattgttcttggtgtggctgaaaaggggtaggggagttcttaattcttgtgtaaacatcggatatagaagttacaggacctcagtaaaaaacgtcatgagaaatgcaacttgataattttcactaaaaaaaaaaaaaaaaaaaaaaaaaaaaaaaaaaagag

SEQ ID NO: 20301 - DNA, 972 bp, Zea mays
  unsure (1)..(972): unsure at all n locations
  Clone ID: MRT4577_118515C.1
attcggctcgaggaagggctcacgatcgtgtttaacaagacctccagtattattgaggaaacaaagaaaattcagatcaggaggaaacctgctggctcaagccctcacgtgccgaattcagcggtagatacgcatacgctcagcacccctgatctttcactccggcagcctgaatctgctgcccaggagactggactgaaagcttctcgcgacgttgctaatgcaatggctgctaaagcaaaacttgtactccgtgaactaaaatctgttaaagcagatctagcctttgcgaagcagcgatgtgctcagctggaggaagagaacaggctcttgcgagaaacaaagcacaaagggagcaaaactgaagaagacgatgacttgattcgcgtgcagctggagacattgctgtccgagaaatcgaggctggcgcaggaaaactcgacgtatgcccgtgaaaaccgcttcctgcgtgagattgtcgacttccatcagttcaccacccacgacgttgtctcattggatgacggcgacatggaaggcaccgaaccagaagaagacgacgacaacgacaacggcctcatatgtgctgagaacgtgctgcctgcggttgaagaaaatccagtagacgaagaacactgccctgtcccctccaagctagaatctccagtggccagcctgggcgagccatcatcatcccccaggtccagcgattgtcacagtgcctcgaagccagacgcctcagcgtctgatgtagcttgatgatgcatgcgacattggtgactttgccatcttgtttggggtttcagttggcgttggttgtgagtgatgcatgtgtgtataatggtttttgtccattgtccacattggattggnttggagcatagttaccaggtttctgcttttgtatagagcatataggtggctgggttttgatggggaaaactgactcgtatggtccgccaagtttttagg

SEQ ID NO: 20302 - DNA, 1567 bp, Zea mays
  unsure (1)..(1567): unsure at all n locations
  Clone ID: MRT4577_118516C.1
attatttcaggtggcgggcgcacgggcggcgatagcaagacctccactccgtgtgcggaaacctggtaaagccggtccagccggtgccctgctgccgctgccccccgcgggccgaagtcagcgggcgcttcccagacgctcagcaccccgggtccttcactccggcagccggtgtctgcggccccggccccccccccccctgattatttcaggttgctaatgcaatggctgctaaagcaaaacttgtactccgtgaactaaaatctgttaaagcagatctagcctttgcgaagcagcgatgcgctcagctggaggaagagaacaggctcttgcgagaaacaaagcagaaagggagcaaaactgaagaagacgatgacttggtaatcttccccccccccccctgatcaaacgtatctgttgtcaggttcaatgtctttttcgtggattacatgcatataccttggccttcaattcatcaacaacattccaataggtgataactcgtcaccagactgacaaaaagaatattagtacatgtgaatctttaaattaaattatataagttgctgttaatatccattcctcttttgaaattcagcattacataaatttagattcatatgaaacaatagtatatggtcatgattcatgaaaaattttggcccggtatcttgtcggtactgtcgcttgttctttaacaacacctaaagagtatcactgcatcctctgaaatgcggtatataaaacatggtcatgtgcttgtgaaccaacgagtgcaacctgttctccgtatctattgaaatagtcatctattgaaatagtcgtcactctgaactacccattgtcgaatcagattcgcgtgcagctggagacattgctgtccgagaaatcgaggctggcgcaggaaaactcgacgtatgcccgtgaaaaccgcttcctgcgtgagattgtggacttccatcagttcaccacccacgacgttgtctcattggatgacggcgacatggaaggcaccgaaccagaagaagacgacgacaacgacaacggcctcatatgtgctgagaacgtgctgcctgcggttgaagaaaatccagtagacgaagaacactgccctgtcccctccaagctagaatctccagtggccagcctgggcgagccatcatcatcccccaggtccagcgattgtcacagtgcctcaaagccagacgcgtcagcgtctgatgtagcttgatgatgcatgcgacattggtgactttgccatcttgtttgtggtttcagttggcgttggttgtgagtgatgcatgtgtgtataatttttttgtccattgtccacattggattggtttgtagcatagttacaggtttctgcttttgtatagagcatatagtgctgtgttttgatgggaaaactgactcgtatggtccgccaagttttaaggtgcatatggtttggtccacatgtaattacctgtggatttgactgttataaactggccaagtgaaagaatatattgaagactgagattgttgcttgcaaccaaaccaaaaaaaataanccaaaacacaa

SEQ ID NO: 20303 - DNA, 394 bp, Zea mays
  Clone ID: MRT4577_118517C.1
gaagactttgacgaacgttcagaagctcccgcaggcccagtcgcaagggcctgcggaatgggggagataagccattggctgctctgttggcccgtgttggtgggaatattgaagttcttggttttaatgctcgtcagcgaaaagcctttcttaatgcaattatgcgctatgggatgccccctcaggatgctttttaccacccacaggcttttgcataacctgttttgccatatatacaaggggggcctggcattttcatggacttttttgcgggcatatttgtttcacccccaaaaatgccactcggggtcaaaaacagccttacttaaaaagcaacgaattccaggctttagggcagacactcacacgtacctgggcaggacctttgggagca

SEQ ID NO: 20304 - DNA, 235 bp, Zea mays
  Clone ID: MRT4577_118518C.1
ctcgcgggtcgacacaagcctcaacactcagtcctactacccccgccgggcagcacctcagccgccgcaaccgcgagactatccatgggcgcctacgcaaccaatcgcaagactcttgatgggcatgaccgacttgacgccgtcgtctccacacacaaagttgcgcccgacgccattccagtctcagttgaagttgcggctgatgaaaaggtacatcataacgtggtgctggatg

SEQ ID NO: 20305 - DNA, 2210 bp, Zea mays
  Clone ID: MRT4577_118519C.1
gcagaggtaatggatgggcggaggaggggcggcggagctatggcgtggctgctgctgcttctcgcctcgctgtgcaccggcgcgtgcgggctcaatgcggacggggtgctgctcatgtccttcaagaacacggtcaccgcggacccgctgggcgcgctggccggctggagctacagcgacgccgcgccgtgcgcctggaacggcgtcatctgcaacggcttcccgcaggacgacaccgcgccggcggcggcgaacgtgacctcggcctccgccgacggcaacggcaccgcgacggtcgcgcgcaacgccaccggagcaaccgcggcggccggcctcggcgcgtcgctggcggcggccacggtgtcgcgggtcatcagcctcgtcctacccaacgcgcagctctcggggacgctgccgcccgacctcggccgcgtcgagcacctgcgccacctcgacctctccgggaacggcctcagcggcagcctgccgcctacgctgctcaacgccaccgagctccgcgtcctctcgctcgccgggaacgcgctgtcaggcgagctcccggacgcggcggcggcctatgcgcgcggcctgcagcagctcaacctctcgggcaacgcgctcgcgggccgcctccccgccgcgctgtgcaggctgccgagcctccttgcgctggggctcgccagcaaccacctcgccggtgagctccccgtcggaggcctcgggacgttggagcttgttgacctgagcgacaacgacttcaacggctcgctcccgtcggacttcggtgggaccgcactccgcctcctcaacgtttcgtccaacaagctcgccggcgctgtgccgaccgagctggccgccgtcgtccccgcgaacgcgacggtggacctgtcgcggaacaacttcaccggcgcgatcccacaggccggcccgtttgccgcgcagccggcggcggcgtacgagggcaacccgaacctgtgcgggccgccgctgaagcaggcgtgctcgatcccgtcgtcgctgtcgaagcctcccaacgccaccgactcgccgccggcgttcgcggccatccccaagaaccccgctcgcgctccgccgcaagcccaggggcagccgccgagcgagcaggataagcttcgtcccgcgtccattgtggccatcgtcgtcggggacatcgccggcgtcggcctcctcttcatgctgttcatgtacgcgtaccacgtcaggaagaagaggcggcagcgtcgggagcaggacccgacgccgccgctgcacctgcagcagaagagcgcgcgaggtttcgacggcggcgtagtcaagacgctcgacatcgccggaggcaaagaagagaaggcgtccacgtcgacggggtgctgcattggccgtaggaacgacagctcggacagctccgagtactccgcgtcgtcggacggcgagtcctccgacgaggagggcctcaagaagaggggaagcttcatcggccggagcaccccgcaggagcacggcagcaagaagcacaacctgccccagcagcagcagcaggcgccccccgcgcctgcgacgctggtgacggtcgacggcgacggcgagctcgagatggagacgctgctcaaggcgtcggcctacatcctcggcgccacgggttccagcatcgtgtacaaggccgtgctcggcgacggcaccgcgctggccgtccggcgcatcggcgagagcggcggcgccgaaaagctcaaggacttcgaggcgcaggtgcgcgccgtcgcccggttccgccatcccaacatcctccggctgcgcggcttctactggggcgccgacgagaagctcctcatccacgactacgcccccaacggcagccttgccaacatcgcattcagcaggcgcttcgggtcgtcgtcgccgctgcacctgagcctggaggcgcggctgcggatcgcgcgcggcgtggcgcgcgggctggcgtacatccacgagaagaagggcgtgcacgggaacctgaagccgagcaacatccttctgggcggcgacatggagccatggatcggggacctgggcctggaccggctggcgtcgggcgaggcggcgccgcactaccgcgcgggcgcgtcggcgcggctgttcgggagcaagcggtcgatgcactcgacgagcagcctgccggacctgtcacagatgcccgggccgggcgcgagcccgtgcgggtcggcgtccgc

SEQ ID NO: 20306 - DNA, 835 bp, Zea mays
  Clone ID: MRT4577_11851C.1
gccctccatcgtctccctcaccaccagtcaccaccgccagctccccgcctctgcctcctccaggcgaccaggcccccagctttggcgtcgacggacagatacagcggcgccatttccaaagagagacacagatcgcgctgcccaaggaaaagaagccgcgccttctcccctctcccttctttcttcccttttattgacgggatcgtccgccggttccattccaacactaattcctcacgggggttccatttggattcggcctggatccgcgagatcaagaaaaacgcctgcaattaaactgccaagattaacagaaaaaaaataaccaaccttgattggctgcaatctttcttcaaaaaaaaaaaaaaggagagagcctgccgatcttggctcggatggcagcgccgccgcagccgctggcgtcgctggactactggcggtgcttcttcagcggcgcgcgggctagcatctttgacgccatcgacgccgccatccgaatagccgccgccgaccaccccgacgccctccgcgcgcgccgcgacgccatcgccgagcgcctctacaccgcgattgtgccgcttcctgcacaggaggcgccggggcagtccaccccgggccagccggcgctcctccttcccgagggcgccgccagcgtgcccagcctctgcagctcggaccgcgccgaggtcgtcaacaacgacggcggcggcgcgccgcggaccaacagcgatgacgacgtgctcgccgaggcgttccgtatcaaggcggctctctccaatgcccaagacaagtcagaggctgagttgctagagcttttggggaagctggggcagct

SEQ ID NO: 20307 - DNA, 843 bp, Zea mays
  Clone ID: MRT4577_118520C.1
tcgaggccggccgggccgggtcaaaagaggaaaggcttgcggtggatacctaggcacccagagacgaggaagggcgtagcaagcgacgaaatgcttcggggagttgaaaatgacagctccaggttggccatcgcccacccatcgtcgccagcacggaagaggcaactcgctaggcggcggcggagaactggccacgacgcgtccccggaagggccggttgcttgactgatcctcttcttgggcggcacggtgtcctgtgccgtgccgcgtgaaagattccaccggcatccccaatccccatggcctaccgccggaagcagggagtcgccgccgccgatcaccggagctcctatccccaggactccgcctcgtcccacggctacacgtcgttcaaaagcatagatgagcccaagctcgggctgtggcgaactctggctaccaaagccaaggggatcctcgacgaggacgggttggcgcataagttcgaagacttgaggaaagaacggcctccgtagcgacgccacggcatccagcaaagatcaggctcctaactctcgctggtcatttgagaaccactggaaggccggagacgccgcgtcacggatcagacccgaggctctttctgcttctgtcaaccagcttagtggaaaaataaagaatgctttggaagaggggctcacgatcgtggataacaagacctccagtattattgaggaaacaaagaaaattcagatcaggaggaaacctgctggctcaagccctcacgtgccgaattcagcggtagatacgcatacgctcagcacccctgatctttcactccggcagcctgaatctgctgcccag

SEQ ID NO: 20308 - DNA, 373 bp, Zea mays
  Clone ID: MRT4577_118521C.1
caaaaaatcgatagtgagtaaagaggatcgtatattaaaacagtatgaaaatagtgatcgtcgggggggtgtgattctctcagtcagctaccagcgcttcttacttgcagatgccatgcccagtgtcgggactacatgcacttgtacagtgatggcgcccgcacaaccagcatgataggcgccatttgtctgtgaccctacggacattacctatggaaaaccctgttcactctgctgagctaaacacgctactatgcctggtgctgtcagacatgcgcaatgtacgaacctacttggcaatacagatgctagaagaagatgaggatgatggaagtccagtcgctcaggcagaaggttcacaagatgatccagc

SEQ ID NO: 20309 - DNA, 641 bp, Zea mays
  Clone ID: MRT4577_118522C.1
cggacgcgtgggcactgatctcggtcacctcccttcctgaatcttctagtgcgaattgctggcctgctgcagtagatgaatgttaaaaaaagcattggtctatgcgaccatactgatgtgatttggtgtatagtgctgctgcctgctctttagaccactgattcaccgaagttcacatgagccaagtattaactaggacacgtataatatatattaaagtaccagctaggacatgaattatctctaccttcatgattggggacatctgcctctaaagtccgaatgttaaatccggtactgccacaattctttagcatagttagaattgtggttatggtagatgatctttttatagtaattagcttaactttttaggtaattagcttaacttttttatagtaattagcttaacttttttggacatctgcctctaaagtccgaatgtgttacattattgggtttattcctgtaacagcactatgtttacactattcatgcagttgctgcagcctctgatggtgtgaaggcgtgggacatattaaaggaaaaatctttcaacatagaccttgttttaactgaagttgaactgcctttgatgtctgggttcctcttgttatccacgatcatggagcatgatgcat

SEQ ID NO: 20310 - DNA, 464 bp, Zea mays
  Clone ID: MRT4577_118523C.1
ccggccggggaagtcgacttacaccaccaacctcgccgagcctcgcgtcacgatttctcttaacgcagaggctactggtagaaggaggctctctagttcatgccacccatcgcaggggatgcgctcatcattcggcgtggagactggtccgtcgctgatggtcccgaggatcatgaagcgccgcggcgatgtcacgtgcctggagggcttcaacgcctacagcgccctcatggaggtcgacaaggtgaacatgctgcttgtgaccaagaccgacgactactccttcgacgaggtagttccgcggctcattcccgcagacatcgacagcgacaccaccggcgcgttcggcgaccgagatgaactgcaccgcctagatgttgatgctggccggcgccaggaaagaactcgtgctcctcgccgtactctgcgggatcacgctgctccgtaagtcatgcgtacaacta

SEQ ID NO: 20311 - DNA, 591 bp, Zea mays
  unsure (1)..(591): unsure at all n locations
  Clone ID: MRT4577_118524C.1
ccccgcgtccgacttcatctcagtgcagacccccatgctcaacgccattgccggtggtgctactgctaagcccttcattactcaccacaatgatctcagcatggacatgttcctccgtatcgctcccgagctttacctcaagatgcttgttgtcggtggattgaatcgagtctacgagatgggacgccagttccgaaatgagagcatggatttaactcacaatcctgaattcaccactctggagttttatatggcctacgccgattacaatgacctcatggggatgactgaggaccttgtttccggcctggtcaagcacatccacggctcttacatcaccaagtaccacaccatcaacggcgaggagctggagatcaactgggagggcccatggaagagaattgagatgatttctacactggaggagtgcgttggcgagaagttncctcctgccgacgagctccacaccgacgaggccaacgtgttctttaagagaatcctgaaaaagactggcgttgagtgcagtgctcctttgaccaacgcccgtgtgcttgatgcccttggtggagagttttttggaatcccaatgca

SEQ ID NO: 20312 - DNA, 346 bp, Zea mays
  Clone ID: MRT4577_118525C.1
ccgcgctcctcgccccgccgccgccggccatgaagcgcgcgcgcagctccgaggtattcatcggcgtaggccggctgcgcgcacgcaggggcctggcgccgcttctcgcagcggcggctttcgcctacctactgttcgtgtccgtcaagctcacttacctcggcagcgctgggcccgcgcctgccgtcggccgcctggccaccaccggcgcgggcgagccagctgcgcgcgcgcgctcgagcggcggcggggccgtgtccgggtacggccgcatcaccggcgagattctccggcggcacgaacccttctaggtacggcggaagcgatgccgtccagctgcggaact

SEQ ID NO: 20313 - DNA, 152 bp, Zea mays
  Clone ID: MRT4577_118526C.1
atcccccaactccttcttcatgagtgacaaggcgccaggagattctaccgcataaccacggatgcagccactcccaaactggtgtgggagcccaggctgccaaactgttctttgtcagcctacggcaggaacggcgaggttcagcggaggga

SEQ ID NO: 20314 - DNA, 366 bp, Zea mays
  Clone ID: MRT4577_118527C.1
ggggggggggggggttttttttataacaacattttttgtcggcactaaaataggggatcatcattgtgaccgcttcaatactacttcaaactgtgtttcagacgagacattaccaagtgtttgaagtgtccttattttgagatcaagagcgtggggggggggagaggctcctgaatacactcgggccccatgtgagagctaaaaaagtgtgataatcctatcagaggggggagcaccacatgaacgtgctcaccagcagcaccataagcctatgtatgcgagccgtgtacgctttccagtgaccgtgtgtcatgaaaactgcgtcaatgtggtgaccactccatgctcttgaggtgaatgccagcc

SEQ ID NO: 20315 - DNA, 472 bp, Zea mays
  Clone ID: MRT4577_118528C.1
gtcagtcacctacgccgcggtcctgccccattcgttccctgtcgctcgaggctaaccacggaagcagctgcagctagctagaagcctggaacgcacagaccgctgctcgatggcgcctgctgatacgacgcgagtgtgcttggccgcactggtggtggctctagcgtacctcttcctcttggacggcggcgtgcatgccgcgtcggcaacggtagcgcagggggggatacaggaccagagcctgcttaggcttatcaacaaggcccgctgttcgtgaccatcaagagcccagatggggataccataaactgtgcgcacatctggaaacaggccgagttcaaccatgcttccctcaagcatccatacccctgatgagaagcccattctgccaccacacgacaaggcctgtataacaagtgacacgacattgcgcacagtgagcgctcgtgacgcaaacatgggatcacaatgg

SEQ ID NO: 20316 - DNA, 1299 bp, Zea mays
  Clone ID: MRT4577_118529C.1
gcaggcctcctccccgacccaattcgccaccatccccatctatatccagtcctctgctcctcctatagtcctatacctttgctttgcctctgcttcacttcacttcaactccatcgcccgttgcagcggcggcggcggcaatcatatcacccagacgcggacgccatagtagattagattgatctctccgtggggaggaagaggagcaagagccatgtccagccccacgcacgtccgcaaggccatccgcttcgcctccctgcgggcaaagatcgcgcagcagggtaagacaggcctggcgctgcgcctgctcctcgccgccgcactcgccggcttcctcctcgtgttcgccgcgcgcaccctggtcacgccgtcccctgccccgacctcgtcgtcccaggcgcaggaatatcaccaggacgccgcgccggagtgcggcaaggggaacgcgggcctgccgctggcggtggcggaggcgctggtgcactacaccacctcgaacgtgacgccgcagcagaccgcggacgagatcggggtgtcgctgcgcgtgctgcagcgccgcgcgccctgcaacttcctcgtcttcgggctgggcctcgacagccctatgtgggcggcgctgaaccacggcggccgcaccaattcggcacgaggggacgcgtcgtggatcgccagcgtgcggtccaagcacccggggctcgagtcctaccacgtcgcctacgacaccgtgctcaccgacgccgactcgctcctggggctccgcgaccacccggcctgcgtcgcgcagccagacctcgccgccgccgccgccgcgtcctgccgcctcgcgctcgccctcaagggcctcccgcccgtcttccacgaactggagtgggacctcgtcatggtcgacgcgcccacggggtggacgccgcaggcgcccggacggatggccgccatctacaccgccggcatggcggcgcgcgcgcgcaggcccggggacggacccaccgacgtcttcgtgcacgacgtcgaccgacccgtcgaggacaacttctccaaggcgttcctgtgcgagggatacctcgccgagcaggtcggccggatcaggcacttcgtcatcccgtcccaccgcgagaaggacggcacaccattctgcccttgacaaactttattttgattctttgagagtttgagtgagagccatccatccataatccatcttttttttttgcttttcatgcgctctgccttggctttatttacatacaaatatataagacgaaaaaaaccctacagcaggcatatgcagcagccgtc

SEQ ID NO: 20317 - DNA, 528 bp, Zea mays
  Clone ID: MRT4577_11852C.1
ttttttttttttttttttttttttttttttttttggttttttttttttttttttttttttttttttttttttttttttttttttttttttttttttttttttttttttttttttttttttggggttttgaacaaaaaccaaagggggggggggggggtcattgccccaacttttaaatcaaaagggacctttagggggttttattggaaaagccccccgtgtaacaaaaataaggccccccccgggtttaatagcaaccaaaaccggccgggggggccccccaagggaatttccgggggggaacccccccgggggccccccggggggaaaaaggggtggccaacctggttggggaaaaccccgggccccaaagggttttgggggaaccccttggttttcatcttttggaaaaacccctttttttctttatttttgcccggagattttttaaacccccatttaacaaggagctcccccaaccacaaggggttggggaaatccccaaaaaattttttccggggggagtgg

SEQ ID NO: 20318 - DNA, 599 bp, Zea mays
  unsure (1)..(599): unsure at all n locations
  Clone ID: MRT4577_118530C.1
ccagnangtagtagactacgacagcgtccgtcgaaccggngggtcggaggcggaggcgaagatgaggaagaagctcggcacccggttccccgcggtacgttgcctcccccatccagctcccctctctcctcctgttcgtatcttctcgctctgatccgccgcgcccgcgcgcgtgatctgatctcggtcgccgcgcgcggtgcagatcctcgctcttccgggcgggatccggtggacgcagcccgccgttaacgcgcggcttctctttttggttccgtgggcggggatttggctgggttcttggtggggggcgccgtgggtggaggcgggctcgggctcagatcggctcctgtgctcgcgcgtgcgcggggaagtaatttcgtttcgttttgttttgttttcattctttccttccacttttttgagggtctacgtctatcgagagttcggattctcgttgctcaacagaggacatcgacaattaattatccggcttctgcactcgtgttgtgttgagcgggtggacggtggagagatttgtggccgctcgcggctgactagatcactgctgatgaaatttggtgagtgttagtccgtgt

SEQ ID NO: 20319 - DNA, 532 bp, Zea mays
  Clone ID: MRT4577_118531C.1
tgaaaccatcccactccaatcttcgaagggtcgaactaggcccgtcagagaatcagagctctgaggctgctcacatcaagccaccaccaacccctcacgtcggcggtggcgtcgtcggcgaaggcagagatggcgtccgtggccgcggcggaggtcgcggcggcggcgctccggtcggtgctgtcgcgcgcgcagcaggcggcggcgcgggcggggcgcgcgccggggtccgtgcgcgtggtggcggtgagcaagaccgctgcttcggcgagaactacgtccaggagctcatcgacaaggcgcctcagcttcctgaggatattgagtggcacttcattgggaatctgcaaagcaacaaagccagagccctacttgctggcgtgccaaaccttgatatggttgagagtgtcgatgatgagaagattgctaaccgtcttgatcgagtggtagctgacttggggagaaaacctcttaaggttttggtccaagtcaacactagtggagaagaatcgaaatttggagtagatccctc

SEQ ID NO: 20320 - DNA, 1164 bp, Zea mays
  Clone ID: MRT4577_118532C.1
tgggtacctcgaggcaggccgagggagaaaaccatcccactccaatcttcgaagggtcgaactaggcccgtcagagaatcagagctctgaggctgctcacatcaggccaccaccaacccctcacgtcggcggtggcgtcgtcggcgaaggcagagatggcgtccgtggccgcggcggaggtcgcggcggcggcgctccggtcggtgctgtcgcgcgcgcagcaggcggcggcgcgggcggggcgcgcgccggggtccgtgcgcgtggtggcggtgagcaagaccaagccggtgcctgtcatccggggcgtctacgacgcgggccaccgctgcttcggcgagaactacgtccaggagctcatcgacaaggcgcctcagcttcctgaggatattgagtggcacttcattgggaatctgcaaagcaacaaagccagagccctacttgctggcgtgccaaaccttgatatggttgagagtgtcgatgatgagaagattgctaaccgtcttgatcgagtggtagctgacttggggagaaaacctcttaaggttttggtccaagtcaacactagtggagaagaatcgaaatttggagtagatccctcaggatgcatggaactagcaaagcatgtcaaactgaactgcccgaaccttgtgttctctggtctgatgacaattgggatgcttgattactcctcaacccctgagaatttcaaggcgctggctaactgccgggaagaggtgtgcaaggagcttggaatacccgaagagcagtgcgaattgtctatgggcatgtcggctgattttgaacaagcgattgaaatgggaagcacaaatgtaagagttgggtcaaccatatttggtgcaagagaatacccaaagaagaactagggtgtttaactatatttggtgcccaaagaactagggtgcttatgcattcctgtcatgatggtagtggcacagaatctgcaacagatccaaatctgatgatgcatcatatatgtgcagttgtgtgcccattctactcagcttaaaacattttgacacccttttttggcccaaagtatcaataaggaaagttaataaaaagcattagaccacatgagtatcgattgtattttgatgtcgacagattttgtttacagttcaaacatccctgttacattaa

SEQ ID NO: 20321 - DNA, 281 bp, Zea mays
  Clone ID: MRT4577_118533C.1
tgcagtgattggctacatgtatgtatttggctctggcttacttggtgcatttcttttccgtttctttgttgaggacaaaacttttccctatggttggacattagtcatggagattgtcccaggattttccctctatcggggcctatatgaacttggtcagtatgcattctcgggaagcagtataggaactactggtatgacctggagaagtctgaaagatcccctcaatggaatgcgtgatgttatgatcgtaatgagtgtagaatgggcagtgctgctca

SEQ ID NO: 20322 - DNA, 284 bp, Zea mays
  unsure (1)..(284): unsure at all n locations
  Clone ID: MRT4577_118534C.1
tttntttttntttttttttttttattttttnttttttntttttnntggccgaactattatacagnttataacttattggtctccaggaattccataaaattttttttttttttttccccaacaggatccccaacaggggggggggggaaccggtacaaaaaggacggatgaattctattggagggggaaaggatacaaaaatngggtattaacaatagaactccaactgnaatagaactacttatgggcttataggaaagatcataacttttaaaggggcctta

SEQ ID NO: 20323 - DNA, 258 bp, Zea mays
  Clone ID: MRT4577_118535C.1
gttcaatatgccaagaaagatctcattcaggagatttatgacatggagggaacacacggcaactggaggcaccctttttctgagacataccatatgcaagctaagagagggctcctccaactttaggttgctggctacagaaggcaggattcatcaaacctaactggacggatggacaaaatcggtgcttgtgtaggaagggggccaccatggggatccccactcccactggatgaagcaaccgtagtgcgtgctgaa

SEQ ID NO: 20324 - DNA, 355 bp, Zea mays
  Clone ID: MRT4577_118536C.1
accggttcgaattcccgctcgacgcactcgtacgatgaatagtgtgaggactccattttggttttcacaatggacatgcttgcaaatgatggtgtccattctttcgcaatagggtttctgtaccattgctgatacatttttcttacacgatttcttcttttgcatcctttagcgttttaactaacaaagcagttcaatataatcaatcgcagccactgcatctaatccagaaacatcttaatcgcctcactgctgccgctacagattctccttttcgtaatcctcctaatctgacactcattataatgcacccctactacactctttcaattgcacaactacccaactataataa

SEQ ID NO: 20325 - DNA, 417 bp, Zea mays
  Clone ID: MRT4577_118537C.1
attatatatttttttttttttttgctttatagaacacaaagggagcgtttagttttaaaaaaactaaatatacccttattacaacatttctcaacttgtgacttgttataggagcacttggctttttgcacaataccataccaacaaaaaccacaccctacagaaccgaaccgggaaaaccaaacaactattgcgacaaccgttcattccttaattcaccacagacagaacttaaatggacatgctgctcgtaatacccttaactgggatgccagctgcgctaccccccatctcttaacatttgcggcaaagcacagcgtagggaaactctgccatgccaattaagattcttaggcaatggttccctgttatagctaaaacgcatttttcgttcctgacaaaacccccaccaaaacc

SEQ ID NO: 20326 - DNA, 120 bp, Zea mays
  Clone ID: MRT4577_118538C.1
cttccgtgctactggctggaacaagactagtacacctggctctggtgttcagtctgctcttagagctcttgctcgatctggcataaatataggccgtatgggtatgcatgatgacatatg

SEQ ID NO: 20327 - DNA, 378 bp, Zea mays
  Clone ID: MRT4577_118539C.1
gcatgcacccgtgcggaagctcggaattcgtctcgagcccatttaccaaccttagttttttgcctccggcgaagacaacaccccgtagggtggcaataaacctcagcgcgtgactatactagcggaatcctcccaagagaccaaccgccacaaaggtcctccaacataccttattccagggaaggacatgtactccgcttcctgacagtcagaacgctatatgcttacttaaaacaccaacatttgcctgatcaaagaaaatttccgagaacactgaagctaaaagatgctagctcgggactctgtctacgataacatctcatggcaatgcacctacaaaatcaaaccgtttatctaggactgttgtacaaagaaaac

SEQ ID NO: 20328 - DNA, 686 bp, Zea mays
  unsure (1)..(686): unsure at all n locations
  Clone ID: MRT4577_11853C.1
accttttgtaggtctgcactgaagcatgtgaaaattgagagagtcaagaagtttgactactgcatgccttgtaagcttaatctagtttgtgcataatattctatgatgctgcaactacatcttagttaaatgtttgcaatgcaactatatgtcagctaattcattggaacggtagttgaataatgtagtcatgaagaaacaaacttctaaactctttagtctttagaagctacttagttggctgattgttgtgttgtttatgggttgaaattttcttttgtaatatgagtgttgtgctcgttttgtagtcatgttgtaaagtatccaatcatgtttttgttataaaagtcgccacagaagcgttgagatggcacattgcgcgcaatgaccacctaaacctaaccagaaatcgtaaggtaggtgggacggtggtgcttaggaactgtctaggtggctgaggtcatcaccttctaaagcagcacagtcaatcatttgaaataacccgctgaacccttataagccctacctgtgttctcgcatgtttacacatcctcgaactattctacttatatattataagtcatttattttaaataatatgtatctgattntatgtatattttcctgagtaatctcatcatgtgtataaactgtgtctatcatctctgcagactatatgccgctgc

SEQ ID NO: 20329 - DNA, 123 bp, Zea mays
  Clone ID: MRT4577_118540C.1
attgtcgacgaaaatttcatcatgttaccaaccaacttctgggtatgacaatggccgaacatcttggttgacttagaacgaatattgtggtgaaaaaatctcccttacgaataggacaatcat

SEQ ID NO: 20330 - DNA, 436 bp, Zea mays
  unsure (1)..(436): unsure at all n locations
  Clone ID: MRT4577_118541C.1
ctgcacgtacctntccttaattcccgggaggagccactcnttctcttcttcaaccctccccttttctcttcactacttacaaccattattttttttataaggcaggatttatctagaggagggggggatccattactccacatactattatacatatgttatccttaaaagctccgccaatctcatcttgactaacacctatctaatcctttggacagtccaagttcatcacccactagttagcaccttttagaccatccctcgtatcttcatttacgccttccgagtatactttctccttatcattctccatatccctctcttcatggtcccttttataactttcacattcacaacttcctatttaaataacatcatcttagtttatcttaaattatattttctccatcattctattataaagctcttcttctac

SEQ ID NO: 20331 - DNA, 658 bp, Zea mays
  Clone ID: MRT4577_118542C.1
ccggccacccgtaatccgtgaacttctcttctaccccataggttatttacttttcttcccacgcgtccgcggacgcgtgggcggacgccgggaggcctcgtgccattctaaatagaagcactactgatggcccaaaacaagatgattgtggtggttctcctccttgccacctttcttgtggtggcaagatcgttgtgggttccagaagaaccctcaaatgcggatgacataagaggtgcttgcatcgaggagtgcaccaaagaaaataaggctcctggcgacaagaagacatgcgaagtgttgtgcaccaagctcacaaaaaagcctagcgaagaaggcaaacatgattgatgaagtagcactccgataatatataccctagtggatcagtggtcatctttgtagccatgtctgccacacgatggccttgactatattgtcttattgttttgtttttggtttccactagtatcctaattccttgttcatataacctaatttcactcaaagcattttatatgcttcacttaattaaataaatacaaaggcaaaggcatgttctgttttgaaaaaaaaaaaaaaaaaaggggcggcccgatctataaaaagaatggtaaagaatcttatagaaaaaaaaaaaaaaaaaagcggccaaaaa

SEQ ID NO: 20332 - DNA, 461 bp, Zea mays
  Clone ID: MRT4577_118543C.1
attggtacctcgagccggccgggaatactttccctccgtcgttttgcccctccctcaccacctgcacgaccaccgactccaactgactggtggtcatagcgagagtgagagcactgagctgagcgtgacggagcagatatcgctagggataatgcacaccctccaccatggggactcccggagagcatctcgctcggaggtcgtgtacgttgacatgcccgcaccctacgcgcggaccaagaagtttactcccttgagaggggtcagatctgacattgactttgtttcaccaactgtcgaggaaattaagaccaagaggcaattagctcagtacctaaaggtacaccctgctaggacctgctgtatctaagcttgattggcgaactgctgataccccttcttgttctgctcgtattaacgagaatgtgaaggtatttgatagcccagatgccgagaagatc

SEQ ID NO: 20333 - DNA, 363 bp, Zea mays
  Clone ID: MRT4577_118544C.1
gtagaggaacttacaccagtaagaaaagtaaccaacaacctacagggtgacatgaacccaattgctggccgtgttgacactaatggactgtcccaatacatagggcccacgtagaacgcgctccactaacacacaaaatacattgatcttaatgacgcatgcgggtataccgagaccgatcaatacgctagatgtgggatagcatgcacccgagcatgatcaagatggagaggaacaggggcttgacggctgggttgagcctaaccgacacccatatgtactacgcgcgcgggtagcgcttgaccaccgaatgtgctgtcagtccagatgaaacactgaaaggaccagatgcggaaagaccac

SEQ ID NO: 20334 - DNA, 659 bp, Zea mays
  Clone ID: MRT4577_118545C.1
ggtgctcctcggcgattctgcgacggattcggacgagcgaagggcgagcgagaggggttgcctgccaccagccggagcgctgcccgaccacgttccccgtcatcagaaggcgagcgagaggggttgcctgcctcctccagctccgctcatctggcgccgcctccccgccgcgctgctccttcctcgccgtcaagagagtgtgagagaggtagatcctatcgaaaaaatggaagaggtggaaaataccagcaagcgcaaagcacccgagctggattccgaggacagttccgctgccgctgttatgaatggacagcagtcgctgcctggctcggctgccaagcgtcagaacctcgcccggtcgtgcatccatgaggttgctgcccccaatggctacgatttgtctaaggacgaggccgtacatgggaccctttcaaaccctgtgtttaatgggaacatggccaagacatacccgtttcagctcgaccccttccagactgtctcggtcgcctgcttggagaggaacgaatctgtcttggtctcagctcacacctctgcggggaagacagccattgctgagtacgccattgcaatgccgtttagagacaagcagagggttattatattcatctccactgaaggatctgagcaatcagaagtac

SEQ ID NO: 20335 - DNA, 389 bp, Zea mays
  Clone ID: MRT4577_118546C.1
cccattcgtatctccgtcgccatcgccgctgactcctccagagacgcgtctacagctgctcctcttcagtggcgtcttcagtggcgccgtttcctgctcgcagtcatggtcgcacggaacgtgctgcggctcgtggtcggcgttgccgttgccgtcgccgtcgccaagtaaagagagacagggaggcacactagacggcggcgtggacaggagcgagtcaagcagaggatggaacggggactgcaaccggcactggactaccatgtcgactatgataacttctatggggattctgaagatcatgaagttcagcgtctacgtctgcgtgcacgtctcgctgacctacgtggtcacctacgacttcaagaccgtctagaagatcatgggca

SEQ ID NO: 20336 - DNA, 374 bp, Zea mays
  Clone ID: MRT4577_118547C.1
aaaaaataattttttttttgtttaagtgaaacgggaacaccccccacaaaatgggcgggagcaccacaaacagagagccccccaataagggaggggggggcaaaacttctcattgccaagcacagggggggggacacgccccttcaaattggggtaaccaccgtccccatcccccaaaaagggggccccccccccaaaaaggggggggaaccccccgaaaagcggatgctccgggacacaaagaaaccgggttgccacccctgaaagtgttactcccccctaagggcccctcaaaatggggtgcacacgtgtgagagggcaccccggcaaaggtgtggccccaggggcggaccataacacgggacattttgtta

SEQ ID NO: 20337 - DNA, 3190 bp, Zea mays
  Clone ID: MRT4577_118548C.1
cctcgaggccggccgggccgggcctcctgtaggcggtccggcacgaggtatcacacacagacacagctcagcagcagcagtattgccccgccacccggtgcttttgtctctctctcgctgggtcttaaaaatccaacgccaacgcggccgccggatgcgcattgccttgcccccctcctccctgtctcgtctcctcgtcgtggccacctcttcctctgctcccccttccaggggtcgttcttggagccccagttcctcgagctgcgtccgccggtggtcgcgtaggtggcggatgcccgcaatggggaggagcagccgcgcctgctcccttcttggttcaactcacctgctcctcctgctgctgctctcggtcggctccgccgtcgcccagaatggctctacctggaagaccctgagcggcaaggctccagcagtcgttgctaagggcgggttctccggactatttcccgattccagtgactatgcttatcagtttgttggcatagctagttcccctgacaccaccgtgtggtgtgatgttcggctgacgaaggatggtgctggtatctgcctaccgagcataaacatggataactgcacaataatagccagtgttttcccacaagggaagaagacctacaaggttaatggtgtatctacagcgggctggttctccgtagactatacaagcactgttctgctgcaaaacgtatctttgaagcaatcggtcctatctcgtacccctgcatatgatggtttgttccaaataaatcctgttgaaaatattttcaccttatataaggcacctgctgtttggttaaatgtccagcacgacagtttctacagccagtttaagcttagcatgagaagctatatcctgtccttatcgaaacaattcattgtcgattacatctcatcgcctgaagtgaacttcctcaccagtatatctggaagagttagcaagaagacaaagcttgtgttccgatttctcgacgaacgctctattgagccatcaacaaaccagacatatggctcaatgctgaaaaatctgacatttgtcaagacttttgcctctggaatacttgttcccaaaagctatatctggcctgttacaccagataattacctgctgccttatacttcagtggttgatgatgctcacaaagcaggactagaaatctatgctgctgattttgcaaatgacttaaccatcagctataactacagctttgatccattagcggaatatcttttcttcattgataacggtgccttctctgttgatggtgtattgactgatttcccgattactccttcagaggcagttggttgctttagtaacctgaacaccagcaagattgatcatgctaaacctctggttatctcgcataatggtgctagcggtgactacccagactgcactgaccaagcttatgaaaaggcagttgccgatggtgcggatgtcattgactgtcctgttcaagtgactaaagatggcatactgatatgcatgagctctgttgacctaatggatgttactactgttgcaaaatcacaatttgcttcgcaagtaactaccatcaacagtctgaaggctggttctggagtcttcaccttcaaccttacttgggatgatatttctaagaacctacagcccatgatatcgaacccaatgagcacctataaactgtacagaaatcctagaaacaagaacgcaggaaacttcatgagattgtcagactttttgacctttgcaaacggaaaggatttgtcaggaatcatgataactgttgagcatgctgcattcatggcagaggagcttgggtttggtgtggtagatgcagtggtcaaagcacttgatgactctggttatagcaaacagactgcccagaatgttatgattcagtcaaccaacagctcagttctggtgaagttcaagcaggaaaccaagtacaaccttgtctacatgatcgaagaaagtgtccgagatgccgcaccttcctcccttgcggacattaagaagtttgctgatgctgtttctgttggcaccacatctgttttcccggaaacccattactatttgacaaaccagaccaataagcttgttccgtcccttaagtctgcgggcctccaagtttacgtttacgtgctcatgaatgagtttgcttcccagccaaatgacttcttcgcagacgccacttcacagatcaatgcttatgtgcaaagtgctaaggtggatggtgtcatcactgatttccctgggactgctcacagatacaaactgaactcctgcacgagcatgggaaagaacatgccactattcatgcagcctccgcaaccaggtggcctcctttcaaccattctcccagatgcacagccaccagcagcagcgccaatgccgctcttgacggacgctgacgtcgcagaaccagcccttcctccggtcagcaacaccaccacggctgcatcgccttcgcatgccgccctcagaatgcgaacccatgtcttgagcatcaccacattgctgatgctatgtgcttccctcctcatctgaagatagtcctgctcaacatcatacgcggcgtggcgcattagagctgaggattttcacattgagctgctaatagcaattctttccaccacctttatgtagctatttttttcttgttctgtccggtgttttggaggatggatggatgttcagcttgatacctcaacggtggcacttgagcgtgctgccagctgtctctaggtacattttggtacatacgtgtggtgatacattgtccatgtcaccgtttctactgccaacctgcctgtggagggcaaaatattccctacaaacatacagtttagggtctgttggatacacctcaatcctgtcagggtgttctatgatttggtaaggctgtctccaatagatctacatatagttatgcaaaatactaaaaaaaaaaaaaaaaaaaaaaaaaaaaaaaaaaaaaagggaggcttggattgtggttcaaagaacttgatatacagaaagcccagaaacaagaatgcaggaaatttcatgagattatcagacaacaacttattgttaaaaaagtttaagcacgaaaccaataacagtcttgattacatgatagaagaaagtgtcagaaaagccgcacctttatcccttgcagactattaatatgtttgctta

SEQ ID NO: 20338 - DNA, 308 bp, Zea mays
  Clone ID: MRT4577_118549C.1
tttccttttttttttttttttttttttttttttttttttggaccaaagggaggccgttttgttaaacaatagtagcgagtgtataatatacgttaggggccatcatttaaaggcaggatagaattgttctgtatgggccaagtgaactaaaaatgaccttttgattgaaaggaaaccgttgaaaaaatccactgcgcattgtgggggtagacaaattttcttatttttggaaccagagagctgtttgaaacgggccaaataaccgaatacttattgcccccctccttgaggatcctggggggggggat

SEQ ID NO: 20339 - DNA, 529 bp, Zea mays
  Clone ID: MRT4577_11854C.1
atcacattccagcgctcaagttctcgcgcccacagccaaattttcctccactcaatcgcggcataagctgcactgcagccatggacgccagcggagccggtagcaaggcgaagaagggggcggctgggcgcaaggctgccgaccccagcaacaagtccaacaacagcatcaacaccgacgacaacaacaacaactccaccaccaccctcctcctcctcaacaacaccgaggcgccgaccatgctgacctccaccaagaagaatcttaatacggcccaccacaaaaacaaggtgacgtcatacagcgagacgaacagctaactgacttccttctaaaataacttcaacatcacactgagactcactccagccaagatggcaagaccagaccaacgcccacctcagctaaaccatacaacacgaccaaccccacgaccacttacccgaccctcacttcatacacaacacaaccaccattacactaccacgacctccacaactacatccatctacaactagatacacctaca

SEQ ID NO: 20340 - DNA, 311 bp, Zea mays
  Clone ID: MRT4577_118550C.1
tttgaacttaccctttatttgatggaaaaacataatgtatgggcaatatccattttaaaatctatccagcacatgcagctctggctggggggcttagaaaacgggacaattttttgacatgcgtgtttgtctcccgatgaaccgctcttattaaatttgattttctaggccgttaacttgacgaaaagcccctttatatatatatatttgcatggataggtgctggagcttgaagcttaaattagtatgcccttcaatataatacgctggctttaacctggctgctgaaaatggtcgacacgtatttaaaa

SEQ ID NO: 20341 - DNA, 895 bp, Zea mays
  Clone ID: MRT4577_118551C.1
tactgatgtgcaactttgttttttgtgaagctacttttggtccgagcagagtcagagatactgcgccttccaggtgagacgcaacaagcactccagacgctggattctatcaagtcacagatgaaaacagccttccaagggcacattgaaagaattaacgggaatacgtcgttggaggaatcacataatcaacagcatcaggtgcgtggggaggtattcacacctaagcatcccagcttgaggaagggttcttgggctgatgttaaatacaaaggtgagtggatgaaaaggccaatctcagaggctgaagtagcctggcttgcaaggattctgatccggctctctgactggttgaatgacgccctggggcttgagtgtgctgatgctgaaggtagtcctgctggcgccacctacattcagtttgatgggaacacgacggtgggcgggccaagggatgctgcgagaatggctctcggtgctgtatgttcattcatggtgctagtggggcaagcggtactgaagttgatgaggtcgcaaaggtgaagatcagtctgagagtgtttgcttcgaagaaactgctctcagccgctgttgtgctgtatgcagtggtggccgtgacacggaatgtatcgcgttgagagttttgatttgataatggggttatgctgtataagctaagcttgtagaggaagtcgatcgataggaggaaaagaaaagaaaagtgtgtcgttctgctgttgtccagtaagcttgatgtaaatgcctgcactggaatggttttggacttaaaaacgcaatggagtaattaggacagttctaacagtattaaaacagctgctagctcctcatggaagcgttaaatgtatcggtggcctttgaagttcacttaaaggtc

SEQ ID NO: 20342 - DNA, 416 bp, Zea mays
  Clone ID: MRT4577_118553C.1
acccacgcgtccgctctgaccagagcctgaacagggaagtccagaccaggccaaggccaagaggaatcagtttttggaaccaaagccatctagcatgtaaagcccatcccatcagttgcaggtttgggattccaagccctccaaggttcaatggcctggttattttctcccaagacatatgtcaacttccaccattcacttctttcctccctttctacaaaaaggcccttctcaatttatcaatagccttaaccacccatttccatttaggcacattcaaggcaatgaagtccttattttgaatcgattggtcagaattgaacttaataatattcagacctaaagctgtctggcattcccgatcaataaaattagtgtgcaaagtgagatccaaggatgcattaatgagtctgatt

SEQ ID NO: 20343 - DNA, 622 bp, Zea mays
  Clone ID: MRT4577_118554C.1
ggccgcttttttttttttttttttctttttttttttttttttaccaaagcttgactggttgtttgattattgttttttttttaaaccaaacaagttaacgtggtaacacaatgttgttatgacacattaaataactgcgggggttacataatgtacagataactcagcacacgcttacggctgtgtgctttggttaatcagaaacattgccgagcgtcagagatttgagagacggtcatgtgttgaatagttggatgagccaatccaattgctccttcatttatgaggtatgtgggagaacgaaaaaattttgttctttttgtaagcataatacgctataatggggaactttaaccctgttatgaacattacccctctcttattgggaaagaaaatgccgggggcacgatcgcccccgacttgatgcgcggacatgaaggatgccgcgacgacaccgaggattcctaaagcgacgagagcggtcccaaaggcaatttccttgaccggaaagccaggcgggcctcccacaaggccatctactaggtcttggcggccggtgattgttaaagcgtggtccacgtacgccattccgatgaatccattgaaaagggtgggcactcgt

SEQ ID NO: 20344 - DNA, 331 bp, Zea mays
  Clone ID: MRT4577_118555C.1
accacaccttccgtactccgaactacaagttacgcttctcggcgcgactactgtccgataccgccgccgccgccgacgcctgagttctttataaatggctgatggtgaggacattcaacctactctctgcgacaatctctctggaatggccaaagatggttttgctgaagacgacacaccaagggctcgcatgcctagtattgtgtgccaaactcaccacactgctggtcacggatggatgggacagatcgacacgtctgtcgtcgaccatacacagcccaagagaggtattgtcacgctcatgtatacgatcgcgcatagtattgtgagc

SEQ ID NO: 20345 - DNA, 684 bp, Zea mays
  Clone ID: MRT4577_118556C.1
cattgggtacctcgaggccggccgggagcacctacgagcacctctaagccaaagcaagttgctaggtcctttgaaccagcaactgaagcttcctcgtctcatcatcgagaccagtaagcaacatggcggctaatctcaagtgggctcctgttctagccctcgtcgtcgtcgttgctgccatggttggcaccacgagcgccggcaacatcgcagtgtactggggccagaacggcaacgaagggagcctggcggacgcctgcaactccggggtctacgcctacgtcaacatcgcggtcctcacaaccttcgggaacggacagaacccagtcctccacctccccggacactgggaaccccggtctgggagctggaccgggcagaagaacgacatccagaactggcagtcgctggggatcaagggggtcctctccatcggcgggggcagcgggagctacgggctctcctccaccgacgacggcaacagcgtgggcgactacctgtgggacaacttcctgggcgggagcgggtcgtcccgcccgctcggcgccggcgtggtcgacggcatcgacttcgacatcgagaacggccagtcggcgcactacgatgacctggcgaacgcgctcaagggcaaggggagcgtgctgctgacagcggcgccgcaatgcccctacccggacgcgtcgc

SEQ ID NO: 20346 - DNA, 1199 bp, Zea mays
  Clone ID: MRT4577_118557C.1
aaactcgctctcactttactcctatccctgcggcctggacgcgtgcgagagacttgacaaagcagcagcagggatggcgcctctgaagctgtacgggatgccgctgtcccccaacgtggtgcgcgtggccaccgtgctcaacgagaagggcctcgacttcgagatcgtccccgtcgacctcaccaccggcgcccacaagcagcccgacttcctcaccctcaaccctttcggccagatcccggctctcgtcgacggagacgaagtcctcttcgagtcccgtgcgatcaaccggtacatcgccagcaagtacgcgtcggagggcacggacctgctccccgcgacggcgtcggcggcgaagctggaggtgtggcatggagggggagcatgaccacttccaccccaactcctcgacgccggccgggacatttgggactcaatcttctgaggctgttggttcagaatagaattgctgagttccatactgagctggagcttttacctgttaaggcacttgagcatccttgcatcaagcatgctgtagagcttgagcaatccttcatggagggtgcctacaaccgagtgttaagcgctcggcaggctgtgccacatgagacctatgtttacttcatggaccttctcgccaagacagttagagatgagatcgctgggtgcagcgaaaaggggtatgattccctatctgtaagtgatgcaaaacaaatgcttatgttcagttctgaccaagatctgcacgagtacatcacagaggagcacccggaatgggagtttaagaatggcgccgtcttcttccagaaggcaaaggaatcacagccctacaaggagatcccatccttgcagctcatcaaccagacgctcagctatgcgagggagctggagcgtattgtatgatttaatttcacagtaatccctggtggatgtttatttctgtggccacttggcatggcatgtactgtcctttacatttgagatcagctctgatcgcagctcatgtcagctctgatcaatctctgaagggcttgatctctgcggcattgtttcaccacattaactgcattgcttgaaagatgcctgtcattcattgctgctgttaacttttgatgggcttaatattgaattacacatgaaaaaccaaaaaagtgcaaaaggcccctagggccccgggacaaaaaacaccgccgggc

SEQ ID NO: 20347 - DNA, 725 bp, Zea mays
  Clone ID: MRT4577_118558C.1
gggtacctcgaggccggccgggacattttttctcgcgccgagtcccatgcttgcactccagatacagaagtagcacaaccaaagagccagccgtgggtgggatcaccaacaccaactgtcaggatcctaagtgtaacatccttctagcccgccgaccagagaaccacgaccagagatggttgctgagcgcacatcaacccctacctcaactaccctcttcacattggtactgcagacggtgtgcgaaggtgctacagcccattctctaccgctgcgtcaagcgaaagccagagttggattaccacgacgaaactctcggagacatgacggcttacaggcgaagaattaatctcgcattgaaacgatcacatatgcacgagcggaacagtccaccgaggaccgtggacaactgtgaaaccgcagagaacagaggcatatgcttgggcgaagtgacatctatgtgtcgaagctggtccataaaaggagctaacagcagagcaccacaaggaaagaagacagcgagaataccaccagaaaaaattcatcgcattctacaagggaggagataccttgctacctgctgtgacttgcgtgaaactaggcggtaccactccgcatccaataggaaacaactactatattgcccgagctccattgaaaattatgggaaaaatagactctacaagcaagggacatactggctataatagggattccctgttatc

SEQ ID NO: 20348 - DNA, 2106 bp, Zea mays
  Clone ID: MRT4577_118559C.1
attcggctcgagtgtacctctaagcctttgtttgttgctaggtcctttgaaccagcaggtgaagctttctcgtcttatcatcgagaccagcaagcaacatggtggctaatctcaagtgggctcctgttctagccctcgtcgtcgtcgatgctgccatggttggaaccactagcgccggcaacatcgcagtgtactggggccagaacggcaacgaaggcagtctggcggacgcctgcaactccgggctctacgcctacgtcaacatcgcgttcctgacaaccttcggcaacggacagaccccagtcctcaacctggccggacactgcgaccccggttctggcagctgcaccggccagagcagcgacatccagacctgccagtcgctgggcatcaaggtgctcctttccatcggtggcaccagcggcagctacggcctctcctccaccgacgacgccaacagcgtggccgactacctgtgggacaacttcctgggcggcagcggctcgtcccgcccgctcggcgccgccgtgctcgacggcatcgacttcgacatcgagaacggccagtcggcgcactacgatgacctggcgaacgcgctcaagggcaaggggagcgtgctgctgacggcggcgccgcagtgcccctacccggacgcgtcgctggggccggcgctgcagacgggccagttcgacaacgtgtggatacaagcaccaacgagcacctctaagccaaagcaagttgctaggtcctttgaaccagcaactgaagcttcctcgtctcatcatcgagaccagtaagcaacatggcggctaatctcaagtgggctcctgttctagccctcgtcgtcgtcgttgctgccatggttggcaccacgagcgccggcaacatcgcagtgtactggggccagaacggcaacgaaggcagcctggcggacgcctgcaactccgggctctacgcctacgtcaacatcgcgttcctcacaaccttcggcaacggacagaccccagtcctcaacctcgccggacactgcgaccccggctctggcagctgcaccggccagagcagcgacatccagacctgccagtcgctgggcatcaaggtgctcctctccatcggcggcgccagcggcagctacggcctctcctccaccgacgacgccaacagcgtggccgactacctgtgggacaacttcctgggcggcagcggctcgtcccgcccgctcggcggcgccgtgctcgacggcatcgacttcgacatcgagaacggccagtcggcgcactacgatgacctggcgaacgcgctcaagggcaaggggagcgtgctgctgacggcggcgccgcagtgcccctacccggacgcgtcgctggggccggcgctgcagacgggccagttcgacaacgtgtggatacagttctacaacaaccccgggtgcgcgtacgccaacggggacgacaccaacctggtgaacgcatggaacacgtggaccagcagcatcaccgcggggagcttctacctcggcgtcccagcgtctccccaggccgcgggcagcgggtacatcgaccccggcaccctgacgggcacggtgatccccgccatccgaggcattggcaactacggcggcatcatggtgtgggaccgctttaacgacgtgcagaacaactacagcagccaggtgaagggcagcgtctgatgggcataccgcatacgaagcttcaagctacagcacctagccatgcatatatatatatatagtggctattcgtcaagttatcggactgctagatacaaatataataagagcggatcatcgggagacaaagacgcatgtcagctattgtctcgttttctaagcaacgagcgagagctgcatgcgctggttagatttaagggcctagatttaatatggatattgcccatacgttatgtaattaaatcaaataaatgttaagttcatattgaatgtgtcgaatcccatggtacaaccctatttaatatgagtctcttagggtttctatagaattaattgaaaaaatacaagagaagaactcttcgcgaagagtctgtctctattcactctccaaaaaaaaaaaaaaaaaacccgcggcc

SEQ ID NO: 20349 - DNA, 641 bp, Zea mays
  Clone ID: MRT4577_11855C.1
gcacgagaattgatccatcaccacctcattcctcatagttagttagtactaatatgagaaatggagtcatcctaccaaatttgagaaatggactcatgatgcactatctcattttggatagaggatttctcaaaccaaacaccctattaaagttttaaacaacatacacttcggttctctcatgacaactactaattatcaagagtaatcaagaaaacttataaagtgtttgctttgaggaatcactccatcaaagattaggtggtgcatcataagtccatttcttaaatttagggatgaccccattcgttatgagcaacgactaatatgcaagcatccattatgtgcaagcgtgcaagcagatcttttggtccgctagatctaaccgtatgctatatttaatatttaaatccatcccaccaccactcgtgtacttttataaaaaaagtccctaacaaaccacaattacacatatagttggatttagatccaatgtattaaaagagctgcttgcacgcttgcatctaatgaatgcttgcatattaatatgccttcattatgttagtactaactaactatgatgaatgagatgctgatgaatcaactcatttatttctacaaaccaaacaaaaaaaaaaaaa

SEQ ID NO: 20350 - DNA, 703 bp, Zea mays
  Clone ID: MRT4577_118560C.1
acctcgaggccggccgggccgggactcctactagtgtcagagccgattaaggcagagtccttctccctactcgacccaagcaggtgttgtagaaagagcagtgtgtgtttggctctctctgcgtctcatcgtatgtcaggagaaatgagggtaattgagaaatcccgtagtgctctctggttttggattcattgtttcatcaaaactgaaacctttattatctttgcagaaggagatggtcataagggtgcagacgagctccgagaagggccacagcaaagctatcaaggcggccgctgcgatctcaggggtggagtccgtgacgatcgccggcgaggacaagagcctgctgctggtgatccgcggcgtcggcatcgactccgaccgcatcaccaagaagctgcgccgcaaggtgggccacgccgaggtggtggagctgcggaccgtcgacgccgcagcggccgaccacgcgccgtaccgctactaccacgcgagcccgagcccgagcccgtgccggtaccactgctacggcggcatggaccaccggtacgccggcgccggcggagggtaccccgccgcgcagtaccagcagcagcacgactaccagctgtaccacccggcggctgccaccacgcacacggtggtgcaccacgagtacgcgaccgaccccaacggctggtcggtcatgtgatgcccgctggtg

SEQ ID NO: 20351 - DNA, 1590 bp, Zea mays
  unsure (1)..(1590): unsure at all n locations
  Clone ID: MRT4577_118561C.1
ccggccgggagccctttgtgtgagccgccgtcgcgcactcgccgctccgcccctacgcgcagtcgccacgggagctcgttcctctccggcggcagcaccctccacccctatcaacccaagccgcaagcaaaacccgcagcagagaagaggagtcgccgcgaccgagagctccagagcacgcccccggcacagcctccgacgatggatccaaagatgacagaggtgacccagatgttcgcccgcttcaaggcggcctacgcccgcaacgacctcaacacctgcgtcaccctcctctcgcagctcaaggtccatctcacccaattccccagccttccgcccttgtttcagcagacaccgaacattgtggaggagctcaaacttgcaagtaagatggccttgggcccatgtttttttattagttgatgccatgggaccccataagtgctctagtatatgaaaaattgcattcttgactatgcacattgctaacatggataacggtgagcacgataatggatatcacatttgatgctattttttgatgctattttttgatgctttgtttcatttctattcttgcacgcagagtcgcagatatgcagtaaactgttcttaacttatgttttcgtccttatgactaagctatctagtgatttagtagcagaaaagatcaagaggtccttgaactgttatgctgttcttttagttacccttccttaacagagcaagttttgaactcagcccanaacatttcaggggacatttatgagcatgctgttgttttgagtgtgaaacttgaggaccaagatgcgtttgaacgcgatttctgccagctgaagccttattacatggatacatgtggcataattcccgcctcgccagaggagtacccaattttgggactcaatcttctgaggctgttggttcagaatagaattgccgagttccacactgagctggagcttttacctgtcaaggcactcgagcatccttgcatcaagcatgctgtagagcttgagcaatccttcatggagggtgcctacaaccgagtgttaagtgctcggcaggctgtgccacatgagacctacgtttacttcatcgaccttctcgccaaaacagttagagatgagatcgctgggtgcagcgaaaaggggtatgattctctatccgtgagtgatgcaaagcaaatgcttatgttcagttctgaccaagatctgcacgagtacatcactgaggagcacccggaatgggagattaagaacggtgctgtcttcttccagaaggcgaaggagtcacagccctgcaaggagatcccatccttgcagcttatcaaccagaccctcagctacgccagggagctggagcgtattgtatgatttaaaccaatccctggtggttctttttcccccctgtggccgcttggcatggcttgtactgtcctttgcatttgggatcagctctcatctgactgaaacatcatgtgaatctctgaagggctcagtctctccggcattggtctgttaactccatttgtatttcaccacattatctgcattgcttgaaaaatgcccggcattcactgctgctgtg

SEQ ID NO: 20352 - DNA, 466 bp, Zea mays
  Clone ID: MRT4577_118562C.1
accaaaaagggtttattcaaacatgttctggaaaagaaagcacccctttgatgttcgagggagcctggtaaaacaagggttgacacgacggaaacaagcctacccccgggggggggcctatttttgaaaaaagaggaacccccagggggggtactaagcctgtttgcaaaaccaacccagatagatatgccccccctaaaattttatttataaaaagctggccctgcatgcaggggtggtttgctatggacccggggggtgctaaaaaaccaagaattttggggggctcctttttaaaaatgccggcctggagaaggaaaatagaaacgtttttcctttgaacacccctggagctgaatgaccttcccaagtttggggtcctggaccactggaccattggacaagaatttttttttgagatcttgggggattttgctgaaactaaactcctttttaaacccctgga

SEQ ID NO: 20353 - DNA, 308 bp, Zea mays
  unsure (1)..(308): unsure at all n locations
  Clone ID: MRT4577_118563C.1
accgccagacccaagccaacaaggaagaccgctctcgcttgtgacccgaaggcttgctgcnggggcgggaagaaccccacccgacgtacggcgagccggcgatggcgacggtggcgatggacatctcgaagccgacgccggcagcgtccggtggcgaggcagcggcggcggcgaatgggaggagcggcggcgggggcgatgggctgtggggggagagggggcancacattcattacctncatctccatatcccccanaatacccataacctcaacctcctcnatgcccaccccaactacctcaactcc

SEQ ID NO: 20354 - DNA, 537 bp, Zea mays
  unsure (1)..(537): unsure at all n locations
  Clone ID: MRT4577_118565C.1
tttttttttnnnnnnnnnnnnnnnnnnnnnnnnnnnnnnnnttttcttctcgaaaaaaaaaatggagaccattataatatctattcttataggcccgttacaacacacaccagcaagcaatagtaagcactaccttctacatagttgcaacatagaatagaacacaaaattacaagtagccaacaactaaattttacgacttggccctgcaagagtgccattatatatatggacatcactcgctaatcaaaatcacgaccctcgtgattagtatcagtaatcaataaaccactaaacgctgagcctcccccaaatccccatatctcgaaaaccctagactgtacacggcaatcccctgcgcccccacgggtgtggcggcagagccgacccaatgcagctcagcgagcgccccaaaaccctagctcaaggcaccggtacgagatcgatggagtcgaggcgaccccagatcggagaacaggggagaggtaaggggaccttgattcagcagcttctgcgccgtctcgttggggtccatgt

SEQ ID NO: 20355 - DNA, 1356 bp, Zea mays
  Clone ID: MRT4577_118566C.1
ccgggctctacgccaaagcattgctataggtctttggaaccagcaactgaagcttcctcgtctcatcatcgagaccagtaagcaacatggcggctaatctcaagtgggctcctgttctagccctcgtcgtcgtcgttgctgccatggttggcaccacgagcgccggcaacatcgcagtgtactggggccagaacggcaacgaaggcagcctggcggacgcctgcaactccgggctctacgcctacgtcaacatcgcgttcctcacaaccttcggcaacggacagaccccagtcctcaacctcgccggacactgcgaccccggctctggcagctgcaccggccagagcagcgacatccagacctgccagtcgctgggcatcaaggtgctcctctccatcggcggcgccagcggcagctacggtctctcctccaccgacgacgccaacagcgtggccgactacctgtgggacaacttcctgggcggcagcggctcgtcccgccctctcggcgccgccgtgctcgacggcatcgacttcgacatcgagaacggccagtcggcgcactacgacgacctggcgaacgcgctcaagggcaaggggagcgtgctgctgacggcggcgccgcagtgcccctacccggacgcgtcgctggggccggcgctgcagacgggccagttcgacaacgtgtggatacagttctacaacaaccccgggtgcgcgtacgccaacggggacgacaccaacctggtgaacgcatggaacacgtggaccagcagcatcaccgcggggagcttctacctcggcgtcccagcgtctccccaggccgcgggcagcgggtacatcgaccccggcaccctgacgggcacggtgatccccgccatccgaggcattggcaactacggcggcatcatggtgtgggaccgctttaacgacgtgcagaacaactacagcagccaggtgaagggcagcgtctgatgggcatacgaagcttcaagctacagcacctagccatgcatatatatatagtggctattcgtcaagttatcggactagatatacaaattaatataataagagcggatcatcgggagacagacgcatgtcagctattgtctcgttttctaagcaacgagcgagagctgcatgcgctggttagatttaagggcctagatttaatatggatattgcccatacgttatgtaattaaatcaaataaatgttaagttcatattgaatgtgtcggatcctatggtacaaccctatttaatatgagtctcttcagggtttctataaaattaattaaaaaaataaaagagaagaactcttcgtgaagagtctgtctctattcactcttaac

SEQ ID NO: 20356 - DNA, 1953 bp, Zea mays
  Clone ID: MRT4577_118568C.1
ccggccggaggtgagcctcctcctgtttcatttccatataacaaaacgcgtgggagctattgagatcgtgcgtgctgtacgtgcatcctccatatgtcgcttagaactactgcttggctatcggccaggccagggcaccaccagccggtgcagtgtttgtcggcgccggagaaaccacgccgccggtcggcgaactaccagcccacgtcttgggactacaacgctcttctgtcacttgattctggcagacctggtgatcaggtaagttcgtaaaatctttctaattaagtcctagtttgggaacctgatttatgatctgattaattaatatatagcagtggatcatagtagtaagttttattaccttcctccatcgaaattatagcacaatatatgtgacagagcaaaaatatggtggtctctgtctgatctggtcacactttgtccgtgtttctggtcagactccacatgcgtgcatgccttgacaagtagacgtggctgtaaagtcgtgacctgaaatgcacaccccttcttctgaacaataaagtcaagtttctttggcacacatcttctggaccagcttccaagctatttaaagctactttcagtcaaatagttattttgaaaacggctttactaatgaaattcctgaaaacctgaccaacgagcacctccaagccaaagcaagttgctaggtcctttgaaccagcaactgaagcttcctcgtctcatcatcgagaccagtaagcaacatggcggctaatctcaagtgggctcctgttctagccctcctcgtcgtcgttgctgccatggttggcaccaccagcgccggcaacatcgcagtgtactggggccagaacggcaacgaaggcagcctggcggacgcctgcaactccgggctctacgcctacgtcaacatcgcgttcctcacaaccttcggcaacggacagaccccagttctcaacctcgccggacactgcgaccccggctccggcagctgcaccggccagagcagcgacatccagacctgccagtcgctgggcatcaaggtgctcctctccatcggcggcgccagcggcagctacggcctctcctccaccgacgacgccaacagcgtggccgactacctgtgggacaacttcctgggcggcagcggctcgtcccgccctctcggcgccgccgtgctcgacggcatcgacttcgacatcgagaacggccagtcggcgcactacgacgacctggcgaacgcgctcaagggcaaggggagcgtgctgctgacggcggcgccgcagtgcccctacccggacgcgtcgctggggccggcgctgcagacgggccagttcgacaacgtgtggatacagttctacaacaaccccgggtgcgcgtacgccaacggggacgacaccaacctggtgaacgcatggaacacgtggaccagcagcatcaccgcggggagcttctacctcggcgtcccagcgtctccccaggccgcgggcagcgggtacatcgaccccggcaccctgacgggcacggtgatccccgccatccgaggcattggcaactacggcggcatcatggtgtgggaccgctttaacgacgtgcagaacaactacagcagccaggtgaagggcagcgtctgatgggcataccgcatacgaagcttcaagctacagcacctagccatgcatatatatatagtggctattcgtcaagttatcggactgctagatacaaatataataagagcggatcatcgggagacaaagacgcatgtcagctattgtctcgttttctaagcaacgagcgagagctgcatgcgctggttagatttaatatggatattgcccatacgttatgtaattaaatcaaataaatgttaagttcatactgaatgtgtctcttcagggtttctataaaattaatttaaataaaaaaaaaaaaaaaaaagcggcc

SEQ ID NO: 20357 - DNA, 437 bp, Zea mays
  Clone ID: MRT4577_118569C.1
ggccacaagccaccaaaaatattccatattattcaagggaaaagtatcccgaacccccccgggggggggggagggtgaaaagggtttacagggaacaaattgggaattttgggtttgacaacccccaaacgaattgggggcccaacccaaaaccaaaaaccctaacatgacattcacggaaagagaccccttaagccggggacccctttttaaacttggggagcccttgcctgaaagcacccccccttttaattttcgccaggatgactttgaacccataaaaggcattgggggaagctctccttttttggacaaaaaactttttgccccatgagctggtctcccacttgggcttaaaaaaaacttcccccatcgccttgaacaggggtgtcttcttggggacacctttgatgtcaatcttgatggcaaaaagggaa

SEQ ID NO: 20358 - DNA, 546 bp, Zea mays
  Clone ID: MRT4577_11856C.1
tgcttgtacaaaggttcctttcaacaacattgcttgctttgcaggcacaagaaagaaaaggcttgctcatacttcttcttcttcctcctcttctgagtttgggtcagctgttgggtgggtacggtgctatggtgtccactctttgctcacctccaccctcgctctgcttccttctcttcgccatcgtcctctacctcgccaagatgaaggaagagttcccggggccgggcatgtcgaggtggtgggacttcacgtcgccggcgccggactactgcagcttccgcggcgtcgcctgcgacacgtcgggcaacgtcacgggcatcgacgtcaccgtcgtggcgcctcgtcggccggctcccgcgggcgtctgcgcggcgctccccgcgctccgggagctccagatggcgtgcaacgacgtccgcggcgggttcccgtgggcgtgctcaactgcacctactggaggtgctcacctcagcttctccgcgtgtctgcgccgtgccccggcctgtcccgctggcgcgctggggtgctcgcctgtcaacacct

SEQ ID NO: 20359 - DNA, 217 bp, Zea mays
  Clone ID: MRT4577_118570C.1
cggctcgaggccactgctgcaccgctgcctacgcacgcgacgccttgaccggttccagctccgtacatggacgcgcccacggcgtcgtcgccgtcctcgtccttcaccgacacgagcgtcgtggtcctctccgtctccatcgtcggcatcctcgccaactcgctcctgctcctggcatactacctcgtcgtcacccgcgtgggcctcctcttcttct

SEQ ID NO: 20360 - DNA, 452 bp, Zea mays
  Clone ID: MRT4577_118571C.1
cccacgcgtccgtgggatcaacattagtgagaagctaacctatgttgaagcccgagtccttcctgcaccttggctgaagtatcatgacactggaaaagagaaagagtgcttaccacaggttggtcagtggaacatggtaaacaagaaagtgataaacggatgcaaggtgagccactgggcatgtataaacttctcaaggagtgttccagaagccacagctcggggattttgccaggaattggcacaaatgtgtcaaatttcgggcatggaatttaacagtgagcccgtgatgccaatatactcaactagaccacgatcaagttgtggagggacttaaaagtgggtataattattgcactgaacaaacttaagggttaagaactttgaccttctttggctatactcgccgacaacaaaggtccgttatatggtgccatcaaacgtattttgtg

SEQ ID NO: 20361 - DNA, 210 bp, Zea mays
  unsure (1)..(210): unsure at all n locations
  Clone ID: MRT4577_118572C.1
ggggggggggggggtggttcaccgagaccctgcggtcggctggttccttgagggcgctctgggggtcattcttcaccccttctttcgtggcgtaaactgggctctagggcgtgcttttttttctttnnngctggnggcncccctttgtggggggggggagttttttttttgcnccncctgcanctgatgcggctcacaccggtgtgttct

SEQ ID NO: 20362 - DNA, 767 bp, Zea mays
  Clone ID: MRT4577_118573C.1
tggatggtacgtattggtggaggggttttccctgtaatcaaagagccagattaccttgtaacggggaatatcgtattgacaagggggcagcaccaaaaatgctgaactgcctaatgtacaagctttgttactaccgatttggagaacttaccacagaatatggaaaacctccagggtatgaccgtgtacgaggagtggagattggcaacaaagatataaagcttgaatacttggaggaggcatttacaacttcaaactggatagtgcgcatatacaaggtgaaacccccaaagaacaggtcctgaggcgtcatcgctagtgaagtggttggagagctattacctcagacaagtacatattgtcaaaaaaactgaatctgagtggcctcaggagagggcggggtcgttgttatgagcacctgctttggcgagactgactattagcagccatagcatcagttcagctcaaagtcaagaacatctttcccctcattcggtttaggtgtgatcggtgtcattcagaggaaccaattgtggcaacagcgagtactttttaattgttgagcatctcatgaccgaactattaaagtttttgtaggcgcaatgacatatttgaatagaaacttgtctttgatcaatccaaggcaattgattttttttgttttcggcactcaaaaaaaaaaaaaaaaaaaaaaaacctgacaaaaaagaacaaaagacgaaattccaaaaaactgaaaaaaagaaaattccctgcccgggcggccg

SEQ ID NO: 20363 - DNA, 491 bp, Zea mays
  Clone ID: MRT4577_118574C.1
aaatttaagggccacccacgcgtgcgacggttttcacatccattttctggcaagaactcatgttcttgtagggcactaagctgcggatgacaagggcgtgtcatcctcaatctgatgggcagtcccagtcggccaaccgcgtcatcctcatgtatctacgctgtcttacgggggacagaccgcgggattggctcagatggctgccgtgggcggagtatctgttcaatacggcctatcaaacttcgctgaaagatactccgttcagggtggtttatgggcgcgatccgccgaccatccggtcatacgagccgggagacaccagggtgccagccgtcgcaaagaatatggaggaacgcgcagaatttttggcagacatgctccatcgcctggaacaagctcaaacatttcagaagcggcactatgaccgtgggcaccgaccgattcactataaggtgggcgattgggcgctgcttcgtctacgacaacgtgct

SEQ ID NO: 20364 - DNA, 711 bp, Zea mays
  Clone ID: MRT4577_118575C.1
tcgtcctgttcatccaggacatatgtatatagtatataactaattaactatatacggatataactatatataaagggtagggtaaacatgacatgaattctgcaatactgatcaaaggaataaggattcagaggatggcaacatgaacaaggatgtcaatatgaacagaatctctattctctatatgaactgagtcagaaacatagaaggacagaacacaatacagaatacagaagtaaatatgactgtcactgaatctggggccttgcgttgcgcgccgaggaagacgaattggggccaaggtttttgaatacatcgactgtcactgaatctgcgcgccggtgatcaacttaccaggaggcaagagccttgtgcagtgcgtcgacgccagtgatcaaaacccaagagccaggaggacagagaacgacaacaggagaagagaagaaattagagatagagacccagaactgcagaaggaaggagatgaagacgccaagaatcgaggagattagacacaaactgtcgtgtgcaagggtatatcacgacggcgcctctgacggttcagctcctgtagccggaccgcccgccaaaaaaggcctacaaattttttacatcatacaaaccctagtcgctaagtactgtctgatcgagcgatttatcgggcctagtcgtcgactagtacggacgactaggtcgaccagaacccgcgag

SEQ ID NO: 20365 - DNA, 1048 bp, Zea mays
  Clone ID: MRT4577_118576C.1
gggacctcgagccggccggccggccgggtgtcagtgccagcgccagcggagaaaagaaacagagttcgaccggccccgccccgcccccgcccccaccgcagcgcccgcgaagccgccaaacaccaccacctatccgccagaagcctcttcctccctcgctctccctcatcggcgcgctgccaatggccgcgtggtgaagcgcacccgacggaagaagcacgcaccaacacccaagccccctgtgccctcgccgtcgccgcccgcgcaagattgagatcccggattcagacaggtgctaccattcgatttgatttggcgcggagcactttcctatggccgcctccatcgcggcctcgtccttctttccagggtcaccggcgccggccgctcctaagaacggccttggggagcgcccagagagcctggacgtccgcggcgttgcggcgaagccgggagcctcgtctagtgccgtgagggcgggcaagacgcgcgcccacgctgcggtccccaagatgaacggtgggggcaagtccgcggtggcggatggggagcacgaaaccgtaccttcttcggtgccgaagactttctacaaccagcttcccgactggagcatgctccttgcggccatcaccaccatcttcttggccgcagagaagcagtggacgatgcttgactggaagcctaggaggcctgacatgctcactgacacgtttgggtttggccggatcatacatgatgggctcatgttcaggcagaacttctccattaggtcctatgagattggggcagataggacggcatctatagagacgctgatgaaccatttgcaggaaacggcactcaatcatgtgaagaccgctgggctgctaggtgatggatttggctccacaccagagatgagtaaacgaaacttattctgggtggttagccaaatgcaggccatcatcgagcgttcctgctaaggactcggccagagatgagtaacggcagaatctcatactatattgtatttgctgatattaaaattgacactcccactactcccccc

SEQ ID NO: 20366 - DNA, 726 bp, Zea mays
  Clone ID: MRT4577_118577C.1
gcggtcctggcggcgctgctgctggcgtcctcggagccggcatcggcggcggtgagctgcagcgacgtgacatcctcggtggcgccgtgcctcgggtacgcgatgggcaccacggcgtccccctccccggcgtgctgcaccggggtgcgctcgctcaacagccgcgcgtcgtcgacggccgaccgccaggccacctgcgcctgcctcaagagcatgacgagcaggctcggcggcggcggcggcggcgtcagcatgggtaacgccgccagcatcccctccaagtgcggcgtctccgtcggcgtgcccattagtcccaacgtcgactgctccaagatcaactgatgatcgatcataaggacatgcatgaggcatgctcgttggatggcgatcagcatgcagtcgttgttttaccagatgtccatgactccctcccatggatgatgcatgcaatgagatagatacataaattaaggagtagatcatgcatgcacctgttagtgatcactccgtttaattagtatttactgtttactaccttgagtttatacaccaactctgtcgtcgctgtggatgtcgtctcgtgtgcctcgatcgtacgtgtgtgtgtgtgtgtagtagtagcagggtagcaaagcagcactcaatgtcgtccttgggggtttgcttgcctttaaccttgttgctttggcacaggtttctgaataatgaaaacaagcttttgtgtcc

SEQ ID NO: 20367 - DNA, 1004 bp, Zea mays
  Clone ID: MRT4577_118578C.1
ccggccgggatgttttaaaggtcgcggtgggcaacgagccaacgaccggacggccgggcggtgccagcagagacgaccggccccggccccgccccggccgcagctgcccgaagccgccaaacaccgccagtcccccaccacatccgccagaaccctctccctccctccctccctccctcatcggcgcgccgccaatggccgtgtggtgaagcgcacccgacggaagaagcaggcaccaacagccaagccccctttgcccttgcccttgcccttgccctcgccgccgccgtccgcggaaggttgagatcccaggattcagactggtgccattcgatttgatttggcgcggggtactttcctatggccgcctccatcgcggcctcgcccttctttccagggtcgccggcgccggccgctcctaagaacggccttggagagcgcccagagagcctggacgtccgcggcgttgcggcgaagccgggagcctcgtctaatgccgtgagggcgggcaagacgcgcgcccacgctgccgtccccaaggtgaacggtggcaagtctgcggtggcggatgtggaacacgagaccgtaactgtaccttcgtcggtgccgaggactttctacaaccagcttcccgactggagcatgctccttgctgccatcacgaccatcttcttggccgccgagaagcagtggacgatgcttgattggaagcccaggcggcctgacatgctcactgacacttttgggtttggccggatcatacatgatggcctcatgttcaagcagaacttctccattaggtcctatgagattggggctgataggacggcatctatagagacaatgatgaaccatttgcaggaaacggcacttaatcatgtgaagaccgctgggctgctaggtgatggattcggctccacaccagagatgagtaaacggaacttattctgggtggttagccagatgcaggctatcgtcgagcgttatccatgctggggtgatac

SEQ ID NO: 20368 - DNA, 307 bp, Zea mays
  Clone ID: MRT4577_118579C.1
gacgctcactattcggcggccgcccgcgatctataacttgacgggagacaaatgcttggcttaattactcaggcttgcgagcacttgagaatggtatggtgaaacctcaagtcatgccactgcccataggctaacaactgcatgactgggggagctgtgcaatcacccaccgtaatcacagaggacaggatccaccttttttcagctagacgcacacagaaggggtccacaccgatcttaacaagcaacagctgcgctgcatgtaagagaaatgccactctccctgtagaggctcattaagaactgt

SEQ ID NO: 20369 - DNA, 417 bp, Zea mays
  Clone ID: MRT4577_11857C.1
tacccttggtacatttacattttctttacattactaggtgttaaacactcgggcgaggaagccaccgttccatgctcttcgaacaacccgggccgtaaattccccaagaaaccaaatccaccagctgggctaatctaaaggggagatctatctcgaaatgacgatggcgtctatgtacagagaggcacaacctcacactggttttttgcaacgctctacaacgggccgaaaccaaggtacgccaactgatggacccaacgcccacaaaggcataaaattaaaggccgcccagcttgatctcctcgagcttaaactcctagaacatttcttttttcttgaagaataacgacaggcccgaggcgcggtctcttgaactcatttttatcccagcgcttttaaatcgtgcgctcgtgctcg

SEQ ID NO: 20370 - DNA, 626 bp, Zea mays
  Clone ID: MRT4577_118580C.1
catttctcgcatgccctcctcggagttctccagtatctgcaaggatcttagcagcatcggcgacactgttattatttctgtcaccaaggagggtgtcaagttctccactgctggagatattggaaccgcaaacattgtttgcaggcagaacaagaccgttgacaagcctgaggaatctaccattatagaaatgcaagagccggtttcacttacctttgctctgaggtacatgaactccttcactaaggcaagcccactgtcagaccaagtcaccatcagcctctcatctgaactgccagtggttgttgagtacaagattggcgagatgggctacattaggttttatttggcacccaagattgaagaggatgaggaaatgaaggcatgattgtgtttcaaggatctgcttattttgccttcattaggttttatctggcaccccaagatcgaagagaatttaggaaatgaaggcaaattatgtttcaaggatgtgctcatcttgcctatgttcacagtcgttaaatcaacctccatttgcttaacgattgtttgtaagcaaaaatgatgttatgcttgttttagctacttgtatctgtgactggtggttcatggattttcatctatga

SEQ ID NO: 20371 - DNA, 166 bp, Zea mays
  Clone ID: MRT4577_118581C.1
atgttaaacaaggacacatcattattgtaccacacatggaagcgttatgacaagctaccattattcatctacataagtgataattatagcttgtcataacgcttccatgtgtggaacaataatgctgtgtccatgtttatgttaaacaatcgatgcctggaattta

SEQ ID NO: 20372 - DNA, 301 bp, Zea mays
  unsure (1)..(301): unsure at all n locations
  Clone ID: MRT4577_118582C.1
ccccagtcctttaaaaacccttcttgctttttaaaaactacttctatacagtcntaagttatttaaaaagataacttaaacccctgacaaactcttcttccggctcaataaaatctacatgattccacctcctccttctctcactggttctcatctacataaagatgacatctccttctattacaaatttgttaccaccaatgaagtcaattcctttttaccatcctcatctattaacgacctttcatcgacgtcaaccgaaaaggttcatttgctttacctaatttcagtgctacatacc

SEQ ID NO: 20373 - DNA, 132 bp, Zea mays
  unsure (1)..(132): unsure at all n locations
  Clone ID: MRT4577_118583C.1
aaagcttcgagctttctctctatactccattgagaaggaatgaagccggcacagtctactggccatgtggtgccggcaactgactaggatcgatnaataaggttcttcgagatctgccggtccatggcacag

SEQ ID NO: 20374 - DNA, 547 bp, Zea mays
  Clone ID: MRT4577_118584C.1
cgaggatactacatgtgattccagttagttacaacaggctgataatcattatatgattttaactgtttttacttaaatccaacatatttaagctgtttagatctgaaggagcaggctgagataagaacattttgcttactctcgtatggagctcgattgtgattttgcccctatttttttaacttcctgtttttacccctacatgtattcgttgtatttactccaatttctaactccattagctagaggctagagcagaaataaaggaacccaaaagaaaagaactttttagaaaattggaaaaacgaccattctgcgtcactacctcatgagaagccgtggccctgtgacccttcctcggtttccccctcttgttgcataagtgacagtgaacactgggtgctgtgttagactcggctgggcacggcacggacggcacacggcgttgtcgacaggcttagggggctaattggaggtgggtatttttaattgtactgacaccattagatccttccaatggtataggggcaaacttaatctttaattt

SEQ ID NO: 20375 - DNA, 482 bp, Zea mays
  Clone ID: MRT4577_118585C.1
tttcttatttctggcaagccacaatcatcatccgaaaatactaacattatgtgaactataactcataagcaatctaaagtgggtaccaccaatgataggttgatggtcaaacgctgctgcatctggcaaaacaagaacctttgtgtggactctatagaagaagatgttatagggtgccagcgattggctcaatgtgcactgtgaacggtaacaactgcagctagtgccaagaaggcaatatggctgacatctactagctggatgaatggtgatagaagcaactggtgtaaataaacactgcagtttattgctgacagctgcatctatgaaaaaaaatgctggtggttggcaggagctattgactgaatgggacacacagcagcaaataagcagtatacctgaacgctgccacctaacgctaatggaataaacatatgtggtcaatagtatgcattaagccaactagctcaaacaaacgcaac

SEQ ID NO: 20376 - DNA, 863 bp, Zea mays
  Clone ID: MRT4577_118586C.1
ccgtacgtatgctcggaatgcggctggtgggtttgtgcaagaggagaagacaaatggatgatacgattgaatgttgggatcagccacacgtaagtctaggtatcgacctagtcgccgccggccggaacaagaagaccgagcgcactgcatacctcaagctcctcctcaagctgtaccgcttcaacgccgtgatcctcaagcggtacttcattagcaagaccaaccgccctgcctctctcgctccaccgtctcatcagcttcatggaaggggggaggaaacgtgactgacgacaagagggtctacgaagtatctgcagtgaaggtggctgcgtgggcacggattctgagcgcgggtgacgagtgcctcgcctttgaccattgtccattgtcagggaaaccgtgaaggactttggctctgcgtttggtgtgccacataaccacacgggcgcaagggaaggaagcttgagaaggcaagggggaggaggaaaacctctgcttccacctcggaagagaagcaacgaaacaacgaagagatgaaagagaaaatagcatcaaagaggggtgactgggctgtggcaccgaggtaacacggctcggcgtcatagatcttggcgctgaggtgcgtccttcgctggcaacaacagactgacgtggcggcgacgtggccgagctcaagtcatgattcatggcactgaggtccagtcaaaatcggcacctgggcatgcatgttacgacgttacgtatgtagcgagcatgcatttggacttttggagcctcgtcgttttcgtactctagccatgcacctactaatgttgtctttgttgcttcaaccccaaccggtatggatgatggatcgcttcctc

SEQ ID NO: 20377 - DNA, 491 bp, Zea mays
  Clone ID: MRT4577_118587C.1
ggcagaaaaacatactcacctgactatctatctagcgagacacacagaggaaagatagttacctaccatgtggtgaggcacaaagaacgttccacggggcgtgtcggcgctgatgattctccagatgtcgttaactccgacgacggcgacggcccgcctcctgaagtggtatacctccaccggggttgccctgaacatcatcacgagcgagtttgcccatccagtgacaggcatcctctgtggagaaacctgtgccttcctactcatgctatacgatcacccatgagttgccaatgcattggacaacatgctgcatgatgtgatatctggactagcagctatttgtaatttgagtatgagagaaacacaaagacaccacggtggcgttcaacttatgtgcatgtgtatggtgatctaataagtaaagtataataaaaagggatatgttggatgtgtacttaaaaaaagaaaaaaaaaaggaccctagggcc

SEQ ID NO: 20378 - DNA, 952 bp, Zea mays
  unsure (1)..(952): unsure at all n locations
  Clone ID: MRT4577_118588C.1
cggcatgaccaacttgttagcanttttatgcaatcaagacttccctggttaaggtccagagtaatgacaaagtgtgacgcatttcaatgcgcctctggcacgaagggccaccatacgaacaacccataggcgcagtaacagctagcacgctatcagaaaccacttacagaagcaaattcagtactgagagatcaccccttttcagccatggtaaacatggttcttaaaatgtgcagagtagagaagtgacggggatgcaacacgattgacactgagcatcagtgctcaaggtggaaaacacactcagtcaggcgctgcagtttgctcgcatcaagcttctggttgatctgagcctttggctttttgacagtaagcatcttggtcgctgcgcccaaactccaaccgatttgcacagcatagtttgtagcatcctcctcactcatccccatgaaatgagccacatcagcaacgctaattgtcgaatatgcagaagtcaacagtttgaatatcctttgtctgtagctctctaggaaggcagtgatgaattcagtgaggtcagggccccactcgaacccctgtgcggccgtgttgacaccagcatagtctctgttccagaggcactgaccaatcctccagaccgcggcgagctccggccgcgtgtccttcacctcctgcggcagcgatttccagaagaaccgcgcgctgttcaggtcattgatgtagaggtgggccaggaggtggacagagtagggccattcgtcggtattggttcccttggacgcggcctgtaggaggagctcgtcgcagagggaggcgacggcggtgtaggacttgtcggagagggcggcctggacggcggagaggtccattggcagcgaaggagggaaattggctatagagccacccctcctcccgaaagggtgcctccgttttgccgacttcccggcctaca

SEQ ID NO: 20379 - DNA, 476 bp, Zea mays
  Clone ID: MRT4577_118589C.1
ggaaaggggagcccgggggaatttttaaccccataaaaccaaaaggttagttccctaaagcggaaaaaggcccgcccaaaaagagggggggggcggggaaaggggaacattacccggggaaacccctttggggggttaaaccccagggggggccggggcttggtcatttttatgatcccaggggcattgggggccggggcatttccttaaccctttttttttttttcctttttcccttaagggtcccttttggggcccccggtttaaccacgttctggggggcttaaactggcaaaaccaccccttcggggggactttccattttaacgggttttggcccggaaatttttgtttcttgggggggtcctgggcccgccaagggttttgtttgggggctccctttcccaaccaaccctttcccgggccctatacccgggggggatgggaattaaaatttgggagggggggaggggttt

SEQ ID NO: 20380 - DNA, 267 bp, Zea mays
  Clone ID: MRT4577_11858C.1
tggctcttcccccaccccaaaccctaattctcttcttcctcctggcctcgctggcccccgcggtcaccgcggttggcgttctcgggcctcgacgcttgtttcgcgtcggcagccgtgcgcgacccgtctgccggcaacgataccgtcgccgctctaccggccgcccttcgttgcgcgctctccgcacgtacctccctcctcccttccttcgttctcaacctctctgccacggtccccgtccacgtccgtcttgccggttcctccttc

SEQ ID NO: 20381 - DNA, 337 bp, Zea mays
  Clone ID: MRT4577_118590C.1
agcggacgcgtggggcagcaagaatgaaagaagctagcgcttatagcttgtcagccatggccaccgccgccgcgtctagcctcctcgggtcctccgtcgggtgctcccggctcccagccgccacgcagacgacacccacggccctcgtggtggccatcggcccgcgcggcgctggcgcggagcccatctgcgcgtccatgtccatgtcctcggcgagggcgccctacgaccggacgtccgtccggttcagccccatcaaggagtccatcgtgtcccgcgagatgacccgtcgctacatgaccgacattatcacctacggcgacaccgacgtcgtcat

SEQ ID NO: 20382 - DNA, 246 bp, Zea mays
  Clone ID: MRT4577_118591C.1
gggttggagactcagaaccattgcaaactcattaactttagacaaaaaaacatcaataccgctgtttttaagattaatgtatattgaaaaaaactggcaccactcaccaataaactcaggaccaagatggttataatagactcaggtccgaacaacatttttgttgtagacttggtgggattaactggccttccaccacaaacttgacgagctgagccgctgccgtttgccaaactcagaaactga

SEQ ID NO: 20383 - DNA, 342 bp, Zea mays
  Clone ID: MRT4577_118592C.1
tccacacatcctataatactaataaaatgcttgcatgcatatattcatgcaattcccttacgtgtcctaaaaatgaagcaccaatctattctatacgtacaacataaccaaataacaaacacactgaacacaataatataatcacacaaaatactatatctgtatttctattaatatcgatattttctaagctaattgccagacaccaaaatataccaaaactataacttcaaacctaatctaacgcacaactgtcttcttgatcaatttaatgcataatactaataacgcttgttcgtacgtactactatacttctccacaaggaaaccagtaaacagcaa

SEQ ID NO: 20384 - DNA, 359 bp, Zea mays
  Clone ID: MRT4577_118593C.1
ggttaaaaaaatttcattgggggccaaataaatttggggggcggggggtgcaatcgggtcaaccaacatggggggggacccacggtcgttcatgggcccaaagactggcccccaaaatgggggggggggttgcaaactgaaaaaccctggttttttttttttcacacccccccaaaaaaacctatgtttgggagccagcttgggcccgctttttattggtcaaccccccccccaaggctgatagataaaaatcaattccctgggccggccatcggtgggaacaaaaattgcagggggtggaacctgcatttgcccccccagcttgaaacccggggggggggcttgcggggactcccccc

SEQ ID NO: 20385 - DNA, 403 bp, Zea mays
  Clone ID: MRT4577_118594C.1
atcaacacattgttaatccgcacctatattgatcatgtgttcttacaccccagggagaaaagtgtaacaaggggctggcaacaggtacacaccacgcaggaaacttatcaacattccgggctgtcctgatagttttcatcagcagcccctagtaccaactgaaggtcaacgggtcactacgctttggccttattccgttcaggccacttgccgcagtactctgtgttccttgctctgaaactgtttgggttttgaagctccttttcatatgggataacaataacccttaacttgctcggcccattattgtcaaacttcatgaggccatttatcatagaaaagattatgtgaaccttgtccatctcaacggtattctccctatataccatgttgcaccgctggc

SEQ ID NO: 20386 - DNA, 576 bp, Zea mays
  Clone ID: MRT4577_118595C.1
ggcgattgggttcctcgaggccggccgggacctcgaggccgggccattagccatggcggcggtggatctgtccaagctggtgaaggagaagcgcttctgggtggcctccttcctcgtcgtatgggcagcagcgctgcagggccacatgatgtggatgcagcgccaggacaccttcaagcacaagtttggtatcgaccaagcagacggacccgatgctcaggattcctcatcttcgtcttcgtcttcctcttcttagtcagttaccttgtatcgtctgaagcggtttgttcggaacaaatgagacatccatcctttaataaagcgggcgggagagaaggcagatgacaagacaagtgcagtgtgtgtaaccactaccaggcgttcctttgatgaatgtcatttttcttctctttagtcctgaataaattctgataccatatcttttgggtgtgggatgcaaaactctgctagcttatcattgccacaaactcatgtatttgagttgtgttttatagattgaagtgcactttccagcagaaaaaaaaaaaaaaaaaaaaaaacgcggcccctagggcc

SEQ ID NO: 20387 - DNA, 318 bp, Zea mays
  Clone ID: MRT4577_118596C.1
gggccaatgaaacaaaacccttattagctcaaaatcgtcagtcaaattacacggtcacttttaagctaatttgccatcccgtttttttaatcgatgtcccaaacagcaaaaaacataaacccgtgactcacataaaaaccatttttgcaacttttcgcaagcggatccttttaaaaataatttttgcacggtttttcttaccgtccaaagcaagcccaaattacaaatcaacagggtttaatgctctgctaaaatcatccccaacaaatggaggcactttaggcaaaaagacgataccacctaaatgttgtgcccact

SEQ ID NO: 20388 - DNA, 537 bp, Zea mays
  Clone ID: MRT4577_118597C.1
acatctctaaagattaaagaacattgttgccttttgtatagtctgataacagctgaagccattttacattttggttgcttaacttagtgtttggctaaccgcatttatttctcttgaaacggatgagctatttcctgtgaaattatgtagcccaagtagtggacgaatcatcatttgatcagtttcaacggccgaatcatggcgttgtcctcatgatccaaaatgtggcaatggtacacgtatcctggctccgccgtggcgtcgaacgggtagctcctgccggtgtcgaccatgaggaacttgacgaccaccgtggtcatgaaccccggggcgatcttgacgacgttcttccacgtcctctcgtgctccggcacggccacctcctcccccacggcgtgccggcccacgtcgcagcggaccgcgtcgttgagcctctccatgcagtgcttgaactcctccaggccgtccagcccccgcgcgcgcacggcttggaacgtggccaggtgcaggtgcagcgggtggttgtcctgcgtgagg

SEQ ID NO: 20389 - DNA, 439 bp, Zea mays
  Clone ID: MRT4577_118598C.1
gaacctttgggctgatttatgtgcttggccctctctctgctgtgtaatactagagcctaagtgaggaatttagcttagctttgggaacggagcgtgcaccgggtgcggccggttgtgatcctgtgtcggcggtggttgatatccttgttgcgtagagcacctctgcttataagattgatgaggataaggcgacggcgtctgatctgtaaaagtcgacgggtgtcctaggggagttcggcgactgggcgtaacccatggagcctacatagaagaattcatattcgcattagccttggaatattactttgtctctaattgttgttgttgttaatcctatatgtggtgaatctgttatagtttcctgtaagaacttacacacggctaacaccacctccggcggccacgacaaggacgccggcgtcctttctcatcatactga

SEQ ID NO: 20390 - DNA, 236 bp, Zea mays
  Clone ID: MRT4577_118599C.1
gcggccgccctttctttctttttacatttcaccgtcgtcatggcagccttcatccgtcctcttctcttcgtgaaagccctggagggcgagatggacacggacacccccggcatcccctggccgggcgaattaaaaacaacaatccggccaaactctctctcataggcgcccaagctgcaaaactgcaacaagcaccattcttacacaatctccctccgcgctggccaccagacgtc

SEQ ID NO: 20391 - DNA, 688 bp, Zea mays
  unsure (1)..(688): unsure at all n locations
  Clone ID: MRT4577_11859C.1
cacaaannnnncatctccaggctccttgggtttagctagggaggttgattctggaaattgcctctccctcttggataaccggaattgtcctatgactaggacctcaaaggcaaatcacaacaattgtaggcaaactgcggacatcttggattttaatctcagagaatgtagttccttcaagaaaggtcatagcaagggtccttgtgaaagcaccttcatcaaacaacggcacagccaacnnnnnnnnnnnnnnnnnnnnnnnactggagttggtgaatttgcagaatagctcagaaaagcaccttcatcaaacaacgtaacaggttcgacagattagagcaaggaaggtgccagtgtaaacagctactcacatatgatcttggtatttatgtaatttccgtccgatgtaaataaatacttagttctgaaatcatttatacatgcatatccacttgagagtactgttataatggtaggaatcttggtcccggttcaccatgtaacattataatttaaatagggatgggcatgagcctcttaggctatttctagtagatcctctaccttgtatcctatttcaaannnnnctgcaaacactgtcagtgtcatctacaattttgtgctccctattttccatggtcnnnnnnnnnnnnnnnnnnnnnnnnnnnnnnnnnnnnnnnnnagttct

SEQ ID NO: 20392 - DNA, 746 bp, Zea mays
  unsure (1)..(746): unsure at all n locations
  Clone ID: MRT4577_1185C.1
ttccccatctctcctcccagaaacctcctcttcttcctcctcctcctcctcgccgccgccgccgccaccgccgaggatggcggcgaagcagccgttggcggacgtggaggacgggctcctcgcccacctcaacgcgaacgccgagatccccgactcccggtccttcgcctcctccctcggcgtcccgcacaaagacgtggaggacgtcatcaagaggctcaccgccttccgcatcgttgagagtgcggacatcaccaaggagacgtgggtgctcaccgatgaggccaaggggtatgccgcgaggggctcccccgaggtgcagctcgtcgcggccatcccgcccgagggtgcctccaagggcgcgctcaaggagagtttgggggacgtgttcgatattggaatgaaggctgcagccaagaacaagtggattggatttgagaagggaaacaaagacctcgtactgagaaaggttgaggataccaatgatgaattgcaagagcagcttataagactggagaatggggaggttattgctgacaaagtaatagatgatttgaagagaagaaagcttgtaacaaaagagaaatctatttggtattcactgaagaaggggcctgaatttgttgcaaagagaaaaacattggcaaccgatgtgacacgagaacatctcaagagtggcgactggaaggatctggaatttanagattataactatggagctcaaggacaacctattgcgataggat

SEQ ID NO: 20393 - DNA, 1630 bp, Zea mays
  Clone ID: MRT4577_118600C.1
ccccgccgtctcccctccccccacgcgtccgcgatcgtacggacaggataccacgacgaacggaacctacgccggctgcgaacgcgaatctgaatacaacgaggtagatcctcctccgtaaagcgaaagcaaaaaccaactaaacaagctagctagagctagccaagccgcggcgtgcctccgctccggccggcccgcccctgtcagagcccccaccgccgctgccacctccgccagccgtcaccccaggcgttggatcggggccctctcgatccgcgcccggcgaatccagacggacccgcattggggttggggccccttcgatccggcgcttggtgggggtttggctgggagctccaggctgaggggacggggcggggggacctgatccttcattccgttcggatttcgcttttcccccgtggggtctcgactgccggagggggaggaggacatggatttggcgtcggtcaacgaggagctggccgagatcgacgggcagatcggcgatatcctccgcgtattgcaaaatgggttccagaagctggagaagatcaaggatgccaaccgccgcagcaggcagcttgaagagcttactgataagatgcgagactgcaagagactcatcaaagacttcgagcgagttagcaaagctgaggctgagcatactgatccagcaacagcaaaaatgttgcatgacagaaagcagtcgatgatcaaagaattaaactcctacgttgctctaaagaaacagcaggcaagtgaaaacaagagaatcgatctttttgatgggccaagtgctgaagatggctttggtgaagaaaatgtcctgttagcatcaaatatgacaaaccagcagttaatggatcaaggcaatcaactaatggatgaaactgatcaagctattgcacgatctaagcagactgtccaagaaaccgtcaatgtgggcacagaaactgcagctgctctgaaagcacagacagaacaaatgagcagagttgttaatgagttggattccatccatttctccatcaaaaaggcatctcaattggtgaaagaaatcggtcgacaggttgcaactgatcgatgcatcatggccatgctttttctcattgttgctggagtcatagctataataattgttaagattgtgaacccacacaacaaggacattcgcgacatccctggcttggcaccacccgtcagcaggcggctgttgcgatagaggacaggtgaattgcatacctggtgtaaaaattgatgtggcgcggcgccttggcaagcccatctgtattctacgtcttgtaaaacgctgctccagtcatgtggtatattgctgtaaaacttctcatgggatccactcctactccttggctacacacagtgcgtatatgttcctcctagttcgccttcctgtttttgcaaaactaactctgaacggtgttctgttagaatcatgtgcacacatgatggttgagatgtgtctatgatgttcattgtgacgaacgattcttaaaaatctcatcggctttagttgaattgaacacatggttgagttgagttgaacacatggttgagcataatatatttcttatgatgagtgatcctcccggaggatcagctttagttg

SEQ ID NO: 20394 - DNA, 574 bp, Zea mays
  unsure (1)..(574): unsure at all n locations
  Clone ID: MRT4577_118601C.1
taatctgactcaagcgctatacaaatcccagacacctcccagccctagtgacaccacccagattgtacgggatcatgtggaacctggagaacactgacgcatcagatgttagacctgagagttcatcttcatatctggtggagcgtcaagggcgcacgagcgagatggagagagaatggatgcaagaagctcaaggtcaataacgggatcgagaagggcagcatggacggcgctctcatctacattgagaaccccatatcgatagcgcaccgagcacatgaactaccttcgactcgcttttcagcttgatgcctgtggggcccgaccttgcactcacgccaagaggcaggatatccgcacgtccatgcgatcccatcacacgtagatcgactccggactctccaccgtgaacttncataagatgcatcggaccatgggcatttgctagcgccagcgtcttaacatgaaagtacaaggcaagcatatggacggcgccatggacgactacggctaactctctatgccctgaaccgaggatagcagccttatgcatctaggctgggacgactacggg

SEQ ID NO: 20395 - DNA, 618 bp, Zea mays
  Clone ID: MRT4577_118602C.1
tgagaagaacagcacatctcttttctttaaataaaaaccgtacactaggggcgagacggtagtgagaggaacggagagagggggaacggaagccgcccgcgtcttgcgctagattcaccggagcctcagccacaaggttcggacggtgggcatcgtcttggttcacaggatgcatgagcgttccttggtgcaagtttgttgagcttggtgaatccgatgtgctcgttccaattaccatgcagccatttcaccatgccgagcagcggccgttttttgctctttgcctaaagcaccgggttgatgctcaagctgtgttcgatgatgttgtgactggctcctactagattgaaggatgaccaggcgaagccatccttgttgttgcgaaggcaggttatcaatttttcctcgtcttcgctgttgaggtgttcgatgacgagtattgtatggttgagtactgctaggcctaggtggacttgtttggcccattttgtgctttggattgggtgcttttccttttttccattttctccatgcgaaggcttgagtggtgtttggtttctttgtcaaggtaatgtacatttctctagatgggaatgaagtccctttcgatgttgtgag

SEQ ID NO: 20396 - DNA, 422 bp, Zea mays
  unsure (1)..(422): unsure at all n locations
  Clone ID: MRT4577_118603C.1
caagtacatagnaaaatagaattccatcaagataagtacaaccacaaaaagatgggccaaggcacagaaatataatcagaatcaatggtaacatcagaaacagaagggcaataacctatcttatttcaaaggatacataatagtcactacgcagacaaaaagggtggatacacaagaaatcctgcacgtgatctactactccacagatttatctcccacttaatttgcttcctttctatatcatgggctggtcacacaaaacattgtgcattgagatcagcagcctggaactagagtttctgtgattaaactctacccatgttgcaagaattagcacgctcttaaaagagtgatatgggccacttttataaaataggaacgggcatcacctcggcaagctcactttttatcaacagttcatg

SEQ ID NO: 20397 - DNA, 699 bp, Zea mays
  unsure (1)..(699): unsure at all n locations
  Clone ID: MRT4577_118604C.1
tggacgcctgcggttccggtccggaattcccgggtcgacccacgcgtccgcacggagctgcgcgacctgctggtgcagacgctggagaacagcggcgtgctgaaccgcatcaaggctgaactcagagcggctgtgtttttagcactagaagaacaagaaaaagtagagaacaaaactccattggtcaatgagaacttgaaaaagtttttaaacacaaaagatggtcgtttagtggctagtctcgtcgcagaatttcttcagttttttaatcttgacttcaccttggctgttttccatcctgaaactagcacaattcaaggtcttgaaggtcgagagaacttggcccaggatttaggcatcattgaagcagaaggtactgtgggtggacccttattattagaagtgattagacgctgtcaacagaaagaaaaaggaccggccagtgtggaaggtgcactggatctatccgatggacatcctccatcaaagtcacctgaaggaaaatcaagtgcaaactccaccccaagtaagaagactagcagtgagaccagtcagagtgagccaagtgtctccttgtcagagtccaagagtaaaagcagcctgcactcactggcccatgagacaagaattgcatctttcttaagcagcagcgctgnaaatgccagagacagcagtgccctttgtccaaatggggatgat

SEQ ID NO: 20398 - DNA, 751 bp, Zea mays
  Clone ID: MRT4577_118605C.1
accctctctctcaccaagcagcagctagctaagctaagccaagccaaagcttctctagcttcgatagtccaggaaacatgaggctcgcagtggttctcttgtgtgcccttgtggccgtccaggtcgcgctcctcgccgccccggcggaggccggcgagctggtggtcgggtactacgacaagaaatgcaggggcgtggagaacgtcgtccagtggcatgtcaggagggcgctcaagaccaaccgccgcgccggtgccgcccttgtccgcctcctcttccacgactgctttgtcaggggttgcgatgcctccgtcctccttgacgcgtcccccgagaaccctcacccggagaaggaggcgccggtgaacatctggctggcggccttcgacctcctggaggagatcaaggcggccgtcgaggacaggtgccccggggtggtgtcctgctccgacatcctcatctacgcggcccgtgatgcggccagcgccctcagcaacgggaacatccacttcgacgtccccgccgggcgtctcgacgggctcgtctcctcagcctccgaggcccaggcggagctcccagactccaccttcaccgtgcagcagctcatcgacaacttcgcccgcaaggacttcgacgtggaggagctggtcatcctgtccggcgcggactccatcggggtcgggcactgctcctccttcaccggccgcctcaccgcgccgccggaacagattaacccggcctaccgcaacct

SEQ ID NO: 20399 - DNA, 365 bp, Zea mays
  Clone ID: MRT4577_118606C.1
cccttcttttccccgtctgtctccctctcgtcggttcttcacttttttttttgttcccccatctgcccccacctgccccgccttctaaaccttaacccccgcccccataacggaccgaatggccccccacctaaccgcccccatagacttctttccactcgcccacgtgttctcaccaaccccccctgactcaaaaaaaaccgctcaaaaaatcccctccgccttctacccaccgacaaatttctcgccgctcctgaccactaccgctctcttgcacgaaccccagaacccaatccctgttctcgccatccttgagaactatccaaggccgggacactaccaaccccgtcccagctttgacaaac

SEQ ID NO: 20400 - DNA, 356 bp, Zea mays
  Clone ID: MRT4577_118607C.1
gcttaagatactagttcaatacgcatgagttgcaacaaccttatccttcgaaaaaacaggttgtggtaagtctttcggaggcttcaagcagaaacccccatggcttccaaggcgtacaaacgttagtctgaatcacaagttgatcgaggaacaaattccctatctactactgctatatgtgtacacaatgacttgcaaaaaaataaaaagacaacttttccttttatttgctttacttaggcttgtttgtttctctcctaaattatataagttcgattatggtaaaaaggtaggagggtaaaatatcattttaggactacaaataagctaaaataagctacccattggtagcttat

SEQ ID NO: 20401 - DNA, 615 bp, Zea mays
  Clone ID: MRT4577_118608C.1
agaatctctcctccttcccagaaacgcaacaggcccaaaatcctccaaccccggcgtagctgggcgatagcgagcttgccgatggtggcggcgggccagatccggtgcctagctgggcgattgcgcccagtggaggtccagatccagcacccccaccgtcttgctgccggcgtcctcgctgccccagcagatctcctcgcggacaaatactctgctccatcgtcctgccccggcggaccgtctcgaaggtactcttctccgacgtccagtggaaaacctcacgcattcttcacacgtcgctcgcacccccgcgtctagctccgccatctgggaacgctggagaagaaatctcccgtcttcagatgcatggtactctgacaagcggaagcatcaggactacagatggatagaaaaagcttttatcaaagttccccctttctgacaattgagagaatttctctgcaacttgactttaactctgttgttgatcaggcatctgtacgtgtctgtgctcaactgaatcgtgttttcttggtgtgatccctcccaaaacaagaagcttgatgaatgatgaacaaggagtagtagaacaggagggaaatgctagagcatttc

SEQ ID NO: 20402 - DNA, 239 bp, Zea mays
  Clone ID: MRT4577_118609C.1
aagggggggttctcttattttgtgggggtgattatttttttgggaaacaaggtagcaaagcccattattttttacaataaacacatgtccacacggggggctggattccggttctacttgacaatccatgttacgaattttgacaggccttgtcccccggtttgattttcaacaaacagtctggtgtggggggggaagggattcactttaggtttaacctagcccgcgtcatggcaaac

SEQ ID NO: 20403 - DNA, 1720 bp, Zea mays
  unsure (1)..(1720): unsure at all n locations
  Clone ID: MRT4577_11860C.1
gggtacctcgaggccggccgggatctgtgctgcaattagctacaagatgggattcacatatttcaccagaattatttcgtaacacacttctcatagcaagggattcttcatatactgttcgcaagtcatttatttgcaaactttatggcctcttgaagaaacgggcaatcccgtttagatatgcatgtgcttttgcactaacggcaacagattgctccagagattttcgtactgaatcggcaagttacttaagtgaggtcctgaaggagcaaagaaggttttttgtttatcagaacagaacaagcaaagaatctattgtggacaacccagcatantgctgtggtttttttgatccatactctagcatatgatggggcgctcccttccgattactatgtagacgggagtagctttcctgaattttgcagcccactttgtgtgatgttgagagaactagttgaaatagatagttctagcaaaactgagcatggtcccacagccagttttgtatcagttctgtctgggattctccgtggtattcagaaggctgaggatccgattaattctgagatcactcctacactgcatgttctctcaaaaatcggcttgcttattgtaaaagaacttgataagcattgcaagatgtctgattgtccacgccatatcctcttgccgtcatcttattatagattgtctgtgagtgagaggaaatcatatgaatgttgccaagaaaatttcattagtgataagcttgtaaagagaattcttaaagctcatgaaccttataaccataatgacaatactaaatgttctgttgtttctgagagggtatcatatgaatttgttcctgaaaggaaagcttgctcctcattaaacaaatcagtggtacagaatgcaagtggttgtgatagcaataggaacaaatgtttggcatctgggaaagctgtgtccaagaaaaaagatcagagtaccaataatagcttggataaagaaaatatgtcatcttgtggttctggtggcacaaaggtgtcatctccaggctccttgggtttagctagggaggttgattctggaaattgtctctccctcttggataaccggaattgtcctatgactaggacctcaaaggcaaatcacaacaattgtaggcaaactgcggacatcttggattttaatctcagagaatgtagttccttcaagaaaggtcatagcaagggtttatctgaagcccagaagcatgaaaagtcgcttcctggctcttcaattgcatgtgatattgaagtgccggtgattgctgatattgaagatgccggtgattgcaatgataaccttgtgaaagcaccttcatcaaacaacgtaacagccaactttaagaaaaagggtaagagaacactggagttggtgaatttgcagaatagctcagatttaactgatgttgtcacaaaagataacgttcgacagattagagcaaggaaggtgccagtgtaaacagctactcacatatgatcttggtatttatgtaatttccgtccgatgtaaataaatacttagttctgaaatcatttatacatgcatatccacttgagagtactgttataatggtaggaatcttggtcccggttcaccatgtaacattataatttaaatagggatgggcatgagcctcttaggctatttctagcagatcctatatcttatatcctatttcaaatttttctgc

SEQ ID NO: 20404 - DNA, 1028 bp, Zea mays
  Clone ID: MRT4577_118610C.1
gggcgcgactctcgacctcggatatctcagctctcgtatcgatgaagaacatagcctaatgcgctagctggtatgaatttcagaatcccgcgacccatcgaggatgtgaacgcaagttgctgccgaagccttctggcgggggcccccgcggccggccgggccgggatcgatcgggtaaggctcagctcagctagcatatttgagtttctctcgtgctctagctactagcaacctcgacatcaatggcttctggtgccgccgccccggttaagatgtccactgcagtgactgcctgcatcctgctggcggtcctgctgcccatggcgcccaagctagtaatgggtgattgttccggcagttgtgttaccctttgcgacacctttgctgatgggttctgcacgggcaacgccgaccccgccatttgtccaccggaagtgcaggagctatgccatcccacggttttcacagggtgtatcactgaatgcaatacactctgcgctacaagcggattcgctccttgcgctgcttgatgagaaagtatcgtttgcggcagaataaaggtgagtgcaagagcaaccagcaggcctcttccccatgcatacgcacactgcagcgcgacctgagggaggaagcatgcaataagcttccacgatgatctacctactatatcccacatttccttactatattttcctttgtttaattcagtcaagattgtgtcgttcagagtccagagcatgcatggggtgcgtacgtattactagtattattgtacttctccatatgcatatggaaaagtgcactgtgctagcttgtgtacgtgtgccttttctgtgcatgcatgtgtggtctttcagtgtctactctagctattagtaggcatatgtcattgtcatgtaatcgatctctcgcggccgggcttactaccatcagcacagctgagggaatttctattatattgaaataaatcatatgaaaaaaaatatatttcgttccttgaaaaaaaaaaaaaaaaagcccctagggcc

SEQ ID NO: 20405 - DNA, 644 bp, Zea mays
  Clone ID: MRT4577_118611C.1
ccggccggggcagaaggccatcagctgatccaagttcttgtattgtgcaaaactgctctttgtcgcgcagcagatcaaccgcgccaggctctcttctccaggtccgcgtgtgagaatcgactactatgttgattttcacaaatttcaaaccactttcctaccagcgtcgagaagacgctgggatccatggggccattacagcataccaggcgcgcttggcaccccaacccctgtggatcgcctgtcatgcgagtaccgtgcgttctagggcggtcggcccgcgttgatgtcgttacagatctgtgatcttgttaccgagcttcaaggactggactggacactcgttaccgaccaagagatcgaactcttccagttcatacgaggctgaagaatctgatcatatagatggctgaaggtggtctttgctgcaatctatgctcacgttaggaagtgggctttgctttggatctccaatgaacccaataattcgactagtaggcagattatgctagccgacctttcccagtcatactgcctgagggggatcgccaacgtcgtctacatcgcggttatcgcgactccgatgaatcatatgagaatggctctagtctgcaagatcatgacgtactatctatagttatgcg

SEQ ID NO: 20406 - DNA, 159 bp, Zea mays
  Clone ID: MRT4577_118612C.1
tcggttactctttactaggcctctggttctctggaatggggggggggactttctttttcacctaacttggcattgggcggaaaaacctaaaacccggccccttcggaggcacaggcggcaacttcgggttctttcccggcacgcaaaattcattgcttg

SEQ ID NO: 20407 - DNA, 797 bp, Zea mays
  unsure (1)..(797): unsure at all n locations
  Clone ID: MRT4577_118613C.1
acatacaccatccgccgctcgtcccgtctcgtctcgtctcgtctcccccaaccaggcgaaaacccgcatcgcgaacgccacaagaccaaacccccgaatccgagccaagcagcaagggcaaaaccccatctgcggcggcggcgatggaatcggtggaggcgctcgtggcgcacatccagggcctctccgggagcgcggacgagctggcgcagctccacggcctcctcaagcaggccgacggcgacgccctgcgcgtccactccgccggcctcctgcccttcctctcccacctccatcccggcgcccactccctcggctacctctacctcctggattctttcgtgtcgtcgtccgctaatctgagggcgcacgccggcggggaccttcttgtgaccgtggccgatttcctcacctcttgctcggcagaccagatacgcctggcgcccgacaaatttctgaatgtgtgtagggtgctcaagaacgaggtcatgcagctcaatgcgccgatcagagggattgctccgctgcgggcggccgtccgcaagatccagacatcgtcagagcagcttaccccactccacgcggaatacctgatgctgtgcctgctggccaagcagtacaaggctggcctgagcgtcctggaagacgatatattcgaagttgatcagcccaaggacttgttcctctactgctactacggggcgatgatatatattgngctgaagaagttccgtaaagcattggagcttcttcaacatgctggtactgccccaatgtcctcattgaatgcaattact

SEQ ID NO: 20408 - DNA, 431 bp, Zea mays
  Clone ID: MRT4577_118614C.1
tctgtctcacctccgcgcctattccctcgctcggcgtcccgctttcccgtgctgtgcgcccgcctcgctctccttcaagcgccatgcctcagctgcaggcctgccgctccaggacctacccttcggcattggcgtccgcctggccggcggggtcaacgccgtctcgctgctctcactgtccaccggccagatctgggtgctctctccgaagctggccgcggacggccggacagtggagctgcacaagtgcgcggtcgtcgagctcgagccggcgcggcccgtgtacgcaatggaagtcgcaatgggaaggctgctgctcggggaggttggcggtttgcgcgtcttcccgctacggggtttgatgaagggtggaaaggagagggatgtgaagaaggaagttgctgtggttgtaggaaggtagggctgtcaca

SEQ ID NO: 20409 - DNA, 429 bp, Zea mays
  Clone ID: MRT4577_118615C.1
caaaaaaacccaaacccggggctgggggaaaaaaagggggttaccaaaaaacgggggggggctgtaaactgtaaaagggccccccccccccccgcccccgccggggttgggtcccacctttgtaaggggggaatccccagtttccccgtttaaaaattaaaaaaactgcctttgggggaaaaaaatggttttttccttttcaaacttttggccccaaaaatggcccccctccaaaccaaaacccttgttaaggttttcctggaaaggggctcaatttgaagccccttgggggggcccattgttgaaaaccaggcctcttttttcaacgaaattttggggcaaaatttttccccgtttccttgggggaaaaacaagaaaaaaggccgttttcaaaccccttgtttccaaaaacttaaaccggacccgggg

SEQ ID NO: 20410 - DNA, 201 bp, Zea mays
  unsure (1)..(201): unsure at all n locations
  Clone ID: MRT4577_118616C.1
atagtgagtcgtattaaaanagtgtcactcttctcccggactctcatctacacggtggcgtcgatctcgggattcatcatccgcatcatctactgctgcacaggaggaggatagactgcccggtgctaatccagctgtcgagcagtggtacacttcaccatccaggcgcccgctcacactcgcagactcgcatcctacgtg

SEQ ID NO: 20411 - DNA, 283 bp, Zea mays
  Clone ID: MRT4577_118617C.1
cggcatcacaagtcccatctttcacattgactttttcaaagaaataaaaaaaaacaaatcccgcgcatggctgcacgggcataatcacaagtcgtccatccctcctgttctccatgattccatcccccatgagtccatgctggccatgctgtccatgctgtccatgctgccgtcggggcccatgctgcatcttctggataaacaaggcccatttttcacattggctttttaacaaaagcaccctgcatgggtccatgctgccgtcgggtctgggtaaaccaac

SEQ ID NO: 20412 - DNA, 330 bp, Zea mays
  Clone ID: MRT4577_118618C.1
ccaacaggcaggattcgcttttttttttttggaacaaggggccccttttttttttttcgaaacctctaaggtaaaccaatttcgggcccaagagccccaaatttttttttgtaccacagttgcccaggggcatgcccctcttttcctaaacgcctaaatgccccgggggcccccttggaatccaattaaatactggggtctcggtccggggcgggggcgtataaaaaaattcaaatttttttgaccctgccggggaactcgaagggcgattttttctgcccgaccggatagggggaggcccttttttcctcttcccgacccgggggtccc

SEQ ID NO: 20413 - DNA, 3290 bp, Zea mays
  Clone ID: MRT4577_118619C.1
atggccagaatccgttctactgctaggattgaaggcgagggagaggaaactgaagcttcggagaccgtccctatctccgaagccatgcaacggtccgggctagtgatttcggaaaagattcctattgatgatgcagaacaagcaatcgctgaagcagaaggagaagaagctgaggaaacaatctccgaagatgattatcaccttgccacaccaagcaaacccagccatttggacttcgggaaatctactgtttcgaaggctgacttgtccaagatggtaaagtcaggctattttactgaaaatcaaaagaagctactacgcttcggaggagaagagactaccccaaagccggagaaagatgaaattgttatttttaaaagcttcttaaaggctgggttgagattcccccttcacgggattattgcagagatattgaataattttggaatctattttcaccagctaacccctaacgctatcgttaggcttaatgtttatatttgggcactccgaagccaggcagtggaaccgtttgcggacagcttttgccgagttcatgaactgcactatcagacaaaggctagaaaggatgggttacatgacaactttggttgctataattttgcttatcggaaaacttcgaagtgtcctgtgattagctaccgaagcaaatgggcagcagggtggaaatcggaatggttctatgttaaggttgatgatgataaagagaagcttgtgcaaagcccactggaactgaccttcggagaaacccgcccccagtgccacatgttaccagagggtccaacgcaaaaagcaatgtacgaattcaaaataattgcagaaaatatcggtacaagggacctggtccaggaattcttggctttcaaaattttccctagtgtaaaagagtgggaaatgccgaagctggagggggaaaagaaaaagggtgaacttgttcgtctgccttatcactttaaattcaagaagtactttaagaaaccctgcaaagagtggttagacacagttgagacaatgtgcaatgaaatcttggggaattactccaaaaaggaggatcaattaatgacagcagccttcggcacccgaccgaagcgaagactgaaccgagtattcgatgccctgggcttcgagtacccagattatgagcagttgaataagggtgccgaaggccacaaaagaaaaagagtggctgaaattctgaccaaggatgaagagcaaccagcagcagagaagaaaattccgaagaaaaggaaaatatcaactccgaaacgaaaaatgtccgaagaagagagaacccccacaccgccttctgctagcgacatagaagaaattttaaaggtaatgactgaacccatgcctacgaagctaagtccactagggctccaactgacgaagctttttcgaaaggtggacgagccggatcagacgaggacaagcaaacccaagcggcaaagaatcattgcggtcactgaagttatcgataagacgccgccaagggcgtcaattcaaaaaacggcagctgccgaaggtgcagcaatcgttgaaggcgtagcttcggaggtcgcggctaccgaagccgctacagccgaagatacaaacttagaaaccacgattaagaatatcaacaagattttggaagacatggccgcggaagaagctggtgctactactgaaaaaaccatggccacagtgcctgagaaaggaaaagaaatagccgaagacccttcggacgacgaagcatacactttccagaacttagttgggcaaaaactaacgaaggacgaaatagaagaacttaaagactacgccaagtcttgcgggtacaagtcaggtgccctcctatttgggggtgtagatgatgaacaactgggctgcatccgggactcagctggggctaaggtcatcggtactctatcaaagagtatcggttttccgaagctggagtcagacatcagccgctaccgacgacaacatgtcgttggtagtttattttactccaacttcaagagtatgttattgagcaaagccttgcaaatgcagcaagatcttgaagataaaaagcatgaaattataatcggaaatttggaaaacaaaataaaggagcaatcagatgcttttgagaaaaagaactttgagctccaggcagccgaaggcttactggcggaagctgaagcaaaaatatcagaactaaactcgaagcttctccgccagtccgagcagttcgaacgagaaaaacaagatctcaatgcaaaacttgaagccgaagctcagcaaaattcggatttgagaaaactactgacaaatcttcaagaaaaatgcctagaatttagcaacaagtgcattcagcgactaagaaagatttttcattcggttggagctagcagcgaaaaatttaccccctcagctgaagacctaccgcgaaccttcgaacacattgagggggaaattgacgagctcgacgaagtcatagctgggcatggtgatttctgtgcctgggtagcttctcgagggactgctgcagccttcatgaaggctggctgtgaacatggaaaagttgttaacaggcccaacttcgccttatctccatcaatcctggatgatatgcctgaccttgcccgaagtatttccaacagatttataaaaatgatatggacaaaaggcgggcgggagaaggctggagatgaagcacgaagccatcttgaaccagttgacgaaggtgaagatgatgcttaaagccgatgcgtgcagcggctgaaggatgtgtttcattctattggagccagctctgaaaaatttacactttcagctgaaaacttgcccaacacattagaatatattgaaggcgaggttgaagctcttgacgaagttattggtagccatgctgacttctgcgccctggtagcttctcggggcacagctaccgcttttctgaaagctggttgcacgcatggaaaaattgttaataggcccaactatagcttatcatcatcagatctgatagatattccaagcctagctcgaagtatcggaaatagatttatgacccagatttgggtaaatggcgggcggaaaatgacgggtgacgaagctcgaagtcatcttaagccggatgacgaagctgaagtataacaaatctgaagtatgacgaagctgaagcttgatagttgctacaatattctttcctgcaaaaattctggagagacttttgtaatattattatgtaaaaactcatgtaaatttgtacataccttgtaatatattttgtttccgct

SEQ ID NO: 20414 - DNA, 2765 bp, Zea mays
  unsure (1)..(2765): unsure at all n locations
  Clone ID: MRT4577_11861C.1
gccaaantacaggtagcgctggaggtacaaacatggctaatacaggaacagtaacactagtgccttacaaaggaggctcacaaggttgtcaaatggaatcaaggaatttgactgtagaaactagcggtttagttccaccaaataattctgggatgagatcacttgttacttctgaatgtggaaagtcaaaagtgtcagaggatgacaatgatggtaccatccaacctcgtcagccagactgggcggcggtattggatgcagctactaaaagaaggtcagaggttcttgcccctgagaatcttgagaacatgtgggcaattggaagaaattatcaaaagaaaatggttaaattagaccactcatcaagacagaaaggctctgaaggttcagataatagtacaagtgcaggggcagttggtaaagagctatcctctaacttcaacgagagaattgcatctgttgatgataaatacatggtcaatttgatgcaaagtaaaaataggaatgctcaatctaccttcgtcacaggtagtcatccacttgctctacaaaatatgaatgaagtgaaaccaaaagaggggagtcaagttaatttcaccagcaaggaaaaaccacatgaaaccagcaacagagtaaaagcccaactaaaacggtgtaatagtactcctgatattgagaaaagatatttggcaaaaagtaaccagcccatggtttccagtgaaaggctaaatgtgaggataaatcaggatgagagaggtgttggtcctgcctcacatgttgaggtgctaatgcatgttccgaagataagatgtcgggttgttggtgcatattttgagaaacaaggttcaaaatcttttgcagtttattctattgtggtgactgatgcggataacaagagctggtttgtgaaaagaagataccggaattttgaacgtctccatcgacaactgaaggagatacctaattattcattacatctgcctccaaagagttttctttcatctagcgttgatgattatcttgtgcaccaacggtgcattctcctggacaaatatcttcaagatctcttgtctatagctaatattgcagagcagcatgaagttttggattttctgagtgcatcctcaaagacttactctgctggaaagtcctcctctgttatgaaaaccttggctgttaatgttgatgatgcaatggatgacattgttcgacaatttaaaggagtttcagatggtttgaaacgggcggttggcacatcaccttctagtgcaactgcccaatttgcagataataggatgtctctatcttggaaccaggaagagaaagataaccacaacttgcatcaaagaaacttggaaagggctcatagcctttcagatggtgatagtaactatgaagatcacatctcttctgtgaatagtggatgccattcagacaatgaggtcaataatagaggacatacttcaaatgatgttgagcacatcgaaacatgctctagtttggataaacaagccagcgaccaaataggaaaacctgcaaaggaatattctgattcttcaaacatgtcatctctaaatgcattcgaggatccaacaggaattcctcctgagtggatgccaacaaatgttagtgtgcctttattgaacctggttgacaaagtattccagctaaagcgacggggttggatacggagacaggttctttggatatcaaaacaaattttgcagttggtcatggaagatgcaattgatgaatggatcataagacaaatcaattggctccgaagagaagatgtcattgtacaaggaatacattggattcaagataccctttggccaaatggtatattcttcaccaagttggatgaatataaagggaatgcaggcacaagtgaatttgacaagcagtcattagggagtcccacactggctgttggcaataaaaagggccgcacaagctcttttgaacttcatcttgaggcatccagaaatgccagtgaggtcaaaaaacttattttagatggaactccatcggccttggtcagcataattggatacaagcagtaccggcgcagcgcaagggacatgtactacttcctccaatccaacgtctgcatcaaacagctcgcatatgcaatgctagagcaggtcctcgtgacagtcttcccagagcttcgccagctaatagaagacatacatgagaaaggccgcaaagagcaagcctcattcacataccaactctgacccaagagaaaacatgctaattcagagaggagtcgcaacaattttgaacgcacttgcattgctccacggtgagttactgaaacacaaagcctttgcaattatattttgatggtgcataagttggattgaggaagtgcttggtgcttaagaatgatctgtacagatgtatatcagaggttatgtaaattatccccctgatgtagtcaaccagaactacttacagtgagatcttgtaggtgttgaatgtaatgtatcattctttaattcccccccaagaattaagttattctccccctgtcttatgctgaggcttgtaaagttttgaaagttccaagtgtatagctgtactgtttgtgttgctgagtaaatcaaaatgttgcgcgaaaaaaaaaaaaaaaaaaaaaaaaaaaaaaaaaaaaaacaaaaaccaggccaaagggatgctatttttgctagcccaactaattgactccatgttgcgttggctgtaataaaagcgcttctattaaacccgaaccccac

SEQ ID NO: 20415 - DNA, 411 bp, Zea mays
  Clone ID: MRT4577_118620C.1
aacccagaaccccagttaagggggggcccccaacatgagcaaaggggcgggggggaacatataaaagggtttttacaggccatgcacggcccgtaaatcgcccaggggttttgggctgggctttgggctagcaggagctacactacatactggggagcacaacccctaaacccacatgatcatgatttttaaacatgaaaatcaaactgatcctggaataaaacaaacaaaagggtttgttggtttttgttggcaaacaacggaaccgggcgggcaagccaaggggggaaggcctactcgggggcgtcctttttagggggggggcctccctggacctggttagggcgtccgttgttaatgttgccttttttggaaataaggccaaggtcctcgtcggggaaccccaacccg

SEQ ID NO: 20416 - DNA, 169 bp, Zea mays
  Clone ID: MRT4577_118621C.1
gggggggaaacagattaaaaagttccacagtttttttggcccttggggacaggattcccaaataggaaaggcgggagctattagtagagcctttggcaccttttcaatataaacacgggccagggtgtgtataaaaatacttaggggtgggcccaataacacccataaa

SEQ ID NO: 20417 - DNA, 299 bp, Zea mays
  Clone ID: MRT4577_118622C.1
cgccgtgctaggagatcaccgcgctcgcgcggggggggatttatataaaaattggggggcctccaaaaaaaaagaccaaattgtgaagttcatcatcaatccttgcttccccgagcacattccctcaattgtcacatatatcatctgttatgtatattccggtacccttcatggataatagttttgatatgtgaaaacccagctcttcaaccatatatgcttcaacaagcaatctcaggtagcaacatacctttatagaccttgttgtttcaacaatcgccagccctatctttggtgca

SEQ ID NO: 20418 - DNA, 169 bp, Zea mays
  Clone ID: MRT4577_118623C.1
gtcgcgcgtgtctcctctctcgtcgtatgtcataaacgtgtgcaccggtgccgcgcgcacgcagggaggatgcaccaccatgacaagggcggcggcggcctggcggcggtggcgctcgcgcacgcccttgtgctcgtggtcgccgaggggtgcgccttcaacatttccg

SEQ ID NO: 20419 - DNA, 479 bp, Zea mays
  Clone ID: MRT4577_118624C.1
tacgtaagctcggaattcgtctctagctctcgagcagccgtagttcactcactgtggcacctcgtgcattctggagctgctctagctatagccctagctagtgactagccactcacactgggggttatcggccggctgaccgtcaccgagggtcactgtcggagtcccaaccccgaccgcaggggcgagcggggaaacgccaggggtggagaccccggctccggccgccagcgcgcccgcggaggctgctcccgccgccgaggccactgtggaggagccagctgccccggcctagaccgagccagctgccgccgctgagcccgaggcggtccccgtaggcggcggaggaagagacgccaaatgacgaagagacggcaaaggaggcggagtcggagccggagcctgcagctgctgaagaggtgacagaagaagctgcagcttccgctgccgagacagaagcagaaccggcagccgctgag

SEQ ID NO: 20420 - DNA, 371 bp, Zea mays
  Clone ID: MRT4577_118625C.1
agcatttctattatgggaacaacctcacgtgggagacgtcctgggggcggccaacaaaatgaaaatctacagccttgtgcggtcactaacagtatgactaagggcatgtttgtttggaattctaatgtgttcggattatataatccaatatattttgaactacttaggctctgtttatttcccttctagattatataagctgaattatggtaaaaggttaagagggtaaaataacacattgggatcataaataaactaaaataagctactcaatactagcttatttcagcttatttatggtcctgcagtgatattttatcctcctaccctttctattataatccaacttatattatcgagtaaaacaaacg

SEQ ID NO: 20421 - DNA, 1872 bp, Zea mays
  Clone ID: MRT4577_118626C.1
ggtacccgagtccggtttgttgggaaaaaaaaaaaaaaaaaaaaaaaaaaaaaaaaaaaaaaaaaaaaaaaaaaaaaaaaaaaaaccgggacggcgactctgcctgcacagcattgaccgccgccttcgctcctccacctccccgctcgctctcctgcctccgcgcgggccgcggatcccttcactcgccacagcaagcgctagaagagggaatggagcccggcctcgcatcccgcgtcgcccgttcagccgctcagccgctttccggctgcctgtcgcggcactcgctctcgccgtggctcaagatccagaaccacatttatccgatgccaagtctctgtcacaaggttcctagcacggcaaaatgccacacttctatgacaacaagttacatggaaacatcagatgtcactgatttggactgggaaaaccttggctttggcctcatcgagactgactttatgtatgttgcaaaatgtggaactgatggaatcttttccaaaggtgaagtcctaccatttggtcctatagcactgagtccttcagctggagtcttaaattatgggcagggattgtttgaaggcctaaaagcatataggaaaactgatgggtccatccttctatttcgtccagaggagaatgctataaggatgctaagcggtgcagagaggatgtgtatgcctgctccaactgttgagcaattcgttgatgctgttaaacaaactgttttggcaaataaaagatgggtgcctcctactggtaaaggttccctatatatcaggccactcctaataggaagcggtgcagttcttggtcttgcgcctgctcctgagtatagctttatcatttttgtatcccctgttgggaattatttcaaggaaggtttatctcctattaatttgatcgttgaggataaatttcaccgtgccagccctggtggaactggaggtgtgaaaaccattggaaactatgcctcggtactgaaagcacaaaagattgcaaaggggaaaggatattctgatgtcctttatttggatgctgttcatgacaaatatctcgaagaagtctcttcctgcaatatttttgttgtgaaagacaatgttatttctacgcctgccattaaaggaacaatacttcctggtataacgaggaaaagtatcattgaagttgctcagagcaaaggtttcaaggttgaggagcgtctggtgtgtgtagatgagttgattaacgctgatgaagttttctgcacggggactgctgttgtggtgtcacctgtggggagtgttacatatatggggaaaagggtggaatatggcaaccaaggagtcggtgtcgtgtctcagcaactatacaagtcacttacaagcctccagatgggcaatgtggaggactggatgggttggaccatgcaacttaatcagtagcggatcacagatattgccttggcagatcccagattattacagctactgggtgcgatagtttttttttttggcagatccatcttgagcatatttgactgtaccggtttcccttgagactaagacgaaagtgatcttactgatcttttgtttcaaatctgtaacgataaaataaaatgtggtttgcaccttgccatgtactgtaagaatggacccaaaaaaaaattcatgctgctgttgcttgaaaaaaaaaaaaaaaaaaaaaaaaaaaaaaaaaataaaaaaaaaaaaaaaaaaaaaaaaaagggctggcctccacttatggactctgtcaccctgaaattaaattccgacccgtgtcttttaagcagtccacattttccttttagtaggcctattataactttggctaaatattgacattagtgtttcccttgtgaaattggtattc

SEQ ID NO: 20422 - DNA, 243 bp, Zea mays
  Clone ID: MRT4577_118627C.1
ccggccggggtgcttttccagaggtgggttgagcttctcctccctctccggatcgtcgttcgggttcgagaggcatactccgcagtattcggtttcgtgggctgagcggatcgacatggcggcgtccgatgttgagtaccgctgcttcatcgtcggcactcgcctgcgccacaaacgaccactccctccacaacgtcttcagcaactacggcgaggtcctcgagtccaagatcatcctcgatc

SEQ ID NO: 20423 - DNA, 463 bp, Zea mays
  Clone ID: MRT4577_118628C.1
ccggccgggaaaagcgcttgaaattcaacaaacagaacttctcgatctcaccgagacctgacgtacaatacagcagatggcgtgcccacatcgagtactgtggtcacgtgcctcacataaagctgaaatcaagacccacatcatgaaggctccactgagacgccaagctgatgttcatcgagttgactgccgactggagggtgccatgacacgccatcaacccactgttcatcgaacacgacaagaagttcactcagctcgccttcctgaaagtgtacgtgtactaatggaacaaagtcaccgcgaactgacgaggccgagacgatgtcgaccttccacttcgacaagaacgttaatgacgccgctaccatactgtgtgccagcaagaactgagctcctagaccagatcgataacaatgacgcggctgtccctgctactgcttctgcctataggacatcagcc

SEQ ID NO: 20424 - DNA, 272 bp, Zea mays
  Clone ID: MRT4577_118629C.1
actttctacctaacaaaccaacctagccttctgtatcctttatctcgcatctaataaccccctatactacacccttctcttctcttcccaaccatcatctacttcctctatctattttaccacagtctctctacactacctctcctactacttattctcactgcacccattcatcttttgcttaaatcattctcctatatcaccataatcaccattccttccaatatcccaactacatcaatatgcttttttcaactattattttttttttt

SEQ ID NO: 20425 - DNA, 362 bp, Zea mays
  Clone ID: MRT4577_11862C.1
tggatagagagcctggagaccgagggcgccgagaagcttattgatcggatgctgctatcaggaacatttgctgacgatgaatcctacacttcggttgtgggcctgcttatcagacagaacctcgctggtccatctcagaagttgggtatctggtgcttaaatcgggctacatgttagaactaactgttttcacagattatatgcgagcatgtctgagatctgtgaggttggacacgtgctcttctattattgagaaatgcgagacaactgatttgaacacagtcttgtgtccagagtggacttggcgcattgacataccagatgctgcatttcaagctgacaacagcccactaactcttttt

SEQ ID NO: 20426 - DNA, 345 bp, Zea mays
  unsure (1)..(345): unsure at all n locations
  Clone ID: MRT4577_118630C.1
gcctctccagtccnccgagggcgcannnancggcccgtctcgcccgncgtngccggggaggtngagcacgagcgcacgtgttaggactcganagatnntnaactatgcctgggcagggncaagcanatncaaactctggtnnaggtncgtagcggtcntgacgtgcaaatcggtcgtccgacctgggtataggaggcgatanataatccnaaccatnctagtagctggntccctccgaatttncctcaggataanttgngctctcgaagaaccgangcaccccgnnaagcaattttatccggtnaancgatgataanagtcttgggcngaaagtctnaactattt

SEQ ID NO: 20427 - DNA, 623 bp, Zea mays
  Clone ID: MRT4577_118631C.1
tccctaaaccgcaaagcttcaagcaccagcgacctccctccatctccgtcccttctactcttctcacccatctcccctccctcccatggctggagtaaacacgaaccacaaggatagtacaaagtagtgcagcggagtggcgtggggagctggtcaagcgcagcagcctagctcagctccatcctcacagcatccaacctccaaccaccgccgcgaccatgcgtgccgccgtggcgctcctcctcgccgccgtcctctgcctcggcggcggcggtgcggcgtccgcgtcgccggacttcgactacccggcggcgttcaacttcggcgactccaactccgacacgggcggccgcatcgccgcgggcttcgagcccatgcccccgccctacggctccaccttcttcggcgccccctccggccgcttctccgacggccgcctcatcctcgacttcctcatggatgcgatggatatgccattcctcaatgcatacttggattctcttggtgcgcctaacttccgggcaggtgttaattttgctcaagctggctgttcgattactccagcaagtgcaacatctgtcagcccgttttcatttggtcttcagattaagcaattctttgcc

SEQ ID NO: 20428 - DNA, 385 bp, Zea mays
  unsure (1)..(385): unsure at all n locations
  Clone ID: MRT4577_118632C.1
gtgagatggatcatctgattttagtgacgcatctgactgctattgcccaccacatcttggggacaataacactgttgtaataacagggattgcattatctgacctgagagagttgcatagatcttacaatgaagagaactacttacctatgactctaatgatggaggtctgtgacctgaccccaaaaaatctgataggatcgaatcaattgaagcgagcatatcaacaatgctagcatatggacatgatgtctgtcaacctgtacctcacacatacgtcggtcacgttaatcgtgaaacggtgaagcgagtgtctttcatcgatccaaatgacgaatatgttgtcagtgagtcagactgcagtctgatctntattaggatacagg

SEQ ID NO: 20429 - DNA, 1972 bp, Zea mays
  Clone ID: MRT4577_118633C.1
ccggccgggattcgttgagtgcgcgcgcggcgcggcgcggcggcttgccattacccgtcctctctcttaccccgtcgtcctcttcacctgcaattgagcatttgcttgctccccctccccgacaaaaaccccctgtcccgtcgagcctcgcatccctagttccctacaagcaaggaaggaaacccgggcaacacgacaccggcggtgccagtgccacggaaaattagccggctccctccccgacgtccggcggcggccgagcaacggtgctggctcccaacatggagacatataccacagacgacgcgcttaccattatggggtttggaaaattccaagcgcttgttcttttctacgctggaatgggctgggttgcagaagctatggagctcatgctcttgtcgtttctcgggccattcatacgagaggagtggaacgtctccccagagaacgagagcctcctttcgagtgttgtctttgctggcatgctgctaggtgcctgtgcttggggctttgtttccgacaaatatggacggaggactggtttaatattttcaactctatttactagtggaatgggttttctaagcgctttatctcctaactacttatgcttggtggctcttcggtttctggttggagtaggagtgggtggcagccatgtgtttatatcttggtttttggagtttgttcctgcacaaaatcgtggcacttggatggttattttctcccttttctggactctcggcacgatcttggaagcttcacttgcatgggtcgtattgccagcattgaattggaggtggctgctagtcttcaccgcccttccatgcttcctcttgcttcctttctttggactaacacctgagtctccgcgctacctttgtgcacaaaatagaatgtctgatgccacatctgttctagagagaatggccaacgcaaaccaatcagctcttcccccgggagttctcacgtacaatagacaaacaaaatgtgaccacgacgttctcgctcccgagagtgaatgtcttcttcctgtcagagagaaggaatgcacagttgacaatgccaagagctccgaatctggcagtcttgctgcactgcgcatgctattatcgcgcgaactgctcagatcaactctgcttctttggtttgttttctatgcaaattcctttgcttattacgggttagtattgctgacatcgcagttgagtgatgcaaataaaagttgtgcatctggtgtgtcttttggtctgcgccaaaaggaaatcaatctttacaaagacactttcatcactagtttagcagaaatcccaggtttatttttgtctgctgttcttgttgattggtttggtcgaaaagcttcgatgtggtctatgatgttcgcatgctgtgctttccttggaccacttgtacttcaacagactgagttgttgacaactattcttctatttggtgcccgtgcatgtgccatggggagctttacagtcttgtgcctttatgctccagaggtgtatccaacatttgtccggtcaaccggtgcaggaattgcgaccgccattggtaggattggtggggttgtttgccctctcgttgctgtcgccatgctgcggagctgccatcagatggaagcactcattgtgtttgaggtgatattatgccttgctgcagttgcctgcatgttcttccctgtagagaccaagggccgtggaatggactgatgcaatatcaggcttcagcatctagatgagcttgtagttcatcactgtttgttttatgccatcattatgtacagagaatatacatgtaacatggtgtggatagttcctcaaaatatgtgcaggactttccaaatttgtaagacagattttgtactgaaagacagctggttctgtactgccaaaacactgaaagacagagttgtattactcctcaacaaatcttgcaagccgggacaatttcgaaggataaa

SEQ ID NO: 20430 - DNA, 871 bp, Zea mays
  Clone ID: MRT4577_118634C.1
ctcgaggccggccgggatttgcttgctccccctccccgaaaaaaccccctgtcccgtcgagcctcgcatccctagttccctacaagcaaggaaggaaacccgggcaacacgacaccggcggtgccagtgccacggaaaattagccggctccctccccgacgtccggcggcggccgagcaacggtgctggctcccaacatggagacatataccacagacgacgcgcttaccattatggggtttggaaaattccaagcgcttgttcttttctacgctggaatgggctgggttgcagaagctatggagctcatgctcttgtcgtttctcgggccattcatacgagaggagtggaacgtctccccagagaacgagagcctcctttcgagtgttgtctttgctggcatgctgctaggtgcctgtgcttggggctttgtttccgacaaatatggacggaggtgtatccaacatttgtccggtcaaccggtgcaggaattgcgaccgccattggtaggattggtggggttgtttgccctctcgttgctgtcgccatgctgcggagctgccatcagatggaagcactcattgtgtttgaggtgatattatgccttgctgcaggtgcctgcatgttcttccctgtagagaccaagggcccctggaatggactgatgcaatatcaggcttcagcatctagatgagcttgtagttcatcactgtttgttttatgccatcattatgtacagagaatatacatgtaacatggtgtggatagttcctcaaatatgtggagaattttcaaattggaagacagattttgactggaagaccgctggttcggacctgcaaaacctggaagaaagagtggattactcctc

SEQ ID NO: 20431 - DNA, 1981 bp, Zea mays
  Clone ID: MRT4577_118635C.1
cgcatgtgcttgcgccccctccccggcaaaaaccccctgtcccgtcgagcctcgcatccctagttccctacaagcaaggaaggaaacccgggcaacacgacaccggcggtgccagtgccacggaaaattagccggctccctccccgacgtccggcggcggccgagcaacggtgctggctcccaacatggagacatataccacagacgacgcgcttaccattatggggtttggaaaattccaagcgcttgttcttttctacgctggaatgggctgggttgcagaagctatggagctcatgctcttgtcgtttctcgggccattcatacgagaggagtggaacgtctccccagagaacgagagcctcctttcgagtgttgtctttgctggcatgctgctaggtgcctgtgcttggggctttgtttccgacaaatatggacggagcggtattggtagtggtttgctcatggcatccggctggactagatttgcttcgtcagcaaactaactagccatgtcagcaatctacctcatacaatgattcacaaggattacagggactggtttaatattttcaactctatttactagtggaatgggttttctaagcgctttatctcctaactacttatgcttggtggctcttcggtttctggttggagtaggagtgggtggcagccatgtgtttatatcttggtttttggagtttgttcctgcacaaaatcgtggcacttggatggttattttctcccttttctggactctcggcacgatcttggaagcttcacttgcatgggtcgtattgccagcattgaattggaggtggctgctagtcttcaccgcccttccatgcttcctcttgcttcctttctttggactaacacctgagtctccgcgctacctttgtgcacaaaatagaatgtctgatgccacatctgttctagagagaatggccaacgcaaaccaatcagctcttcccccgggagttctcacgtacaatagacaaacaaaatgtgaccacgacgttctcgctcccgagagtgaatgtcttcttcctgtcagagagaaggaatgcacagttgacaatgccaagagctccgaatctggcagtcttgctgcactgcgcatgctattatcgcgcgaactgctcagatcaactctgcttctttggtttgttttctatgcaaattcctttgcttattacgggttagtattgctgacatcgcagttgagtgatgcaaataaaagttgtgcatctggtgtgtcttttggtctgcgccaaaaggaaatcaatctttacaaagacactttcatcactagtttagcagaaatcccaggtttatttttgtctgctgttcttgttgattggtttggtcgaaaagcttcgatgtggtctatgatgttcgcatgctgtgctttccttggaccacttgtacttcaacagactgagttgttgacaactattcttctatttggtgcccgtgcatgtgccatggggagctttacagtcttgtgcctttatgctccagaggtgtatccaacatttgtccggtcaaccggtgcaggaattgcgaccgccattggtaggattggtggggttgtttgccctctcgttgctgtcgccatgctgcggagctgccatcagatggaagcactcattgtgtttgaggtgatattatgccttgctgcagttgcctgcatgttcttccctgtagagaccaagggccgtggaatggactgatgcaatatcaggcttcagcatctagatgagcttgtagttcatcactgtttgttttatgccatcattatgtacagagaatatacatgtaacatggtgtggatagttcctcaaaatatgtgcaggactttccaaatttgtaagacagattttgtactgaaagacagctggttctgtactgccaaaacactgaaagacagagttgtattactcctcgcaaaaaaaaaaaaaaaaaacccgcggcc

SEQ ID NO: 20432 - DNA, 542 bp, Zea mays
  Clone ID: MRT4577_118636C.1
ttttttttttttttttttccggggaggggcacatagcgatagatactttagaaacctatcactaagaataagaagcgggctcactgaaaaccaaactgttcgtatttctttaaaacgctgctgccctagccgggggtctgtctatagaagaagggaatcaataggaaggagtctagcccgagtgaagggttgattcaaccaaagcaagaaacaaccctatcttctgagtgaagggacaacccaatcattcctaagtaccagagccatggcgcggagtaccattacatgaccggcacttttctttgaatcacttctttgatcattaagatcctgttccccgagcaacccgatccgatattccttaactgctatctttccttgcttttaaataaacaactacttcatttcaattcatttgcaagaccaggcttgctctccgaggtggcatcccctcctaagcgaaatactagagtagagggcttcccgtctttacttgcttctggttgatgacagctacatccttagctggtttgacctcgtgc

SEQ ID NO: 20433 - DNA, 271 bp, Zea mays
  Clone ID: MRT4577_118637C.1
agtgacagcgtttaacaaagcttagagaaacctccaggagactgctaccatggcagagaagcccaagctccactactccaatgcacggggcagaatggagtccacccggtggctcctggctgcagctggagtagagtttgaagagaaatttataaaatctgcagaagatttggacaagttaagaaatgatggatatttgatgttccagcaagtgccaatggttgagattgatgggatgaagctggtgcagaccagtgccattctcaactac

SEQ ID NO: 20434 - DNA, 336 bp, Zea mays
  Clone ID: MRT4577_118638C.1
gggggcagagccactaacttgctagggctgctaagtttttgctttacaaaggaaatacactgcagtcttacatggttacccaagcccggaataactcgtgctcgatgatcgccatcccaatcacctgggggatcgccgaatctgggcaccatattcttttaatggcgctaggggccctctgttttctatagttagcctctagaatatattaaaacagtgttcttagcgggcgccgccgagtaagcttcgaaaatggcgatcttgacaacgtattccgctctacgttccccttcgaggagtttgtggacacacgccacctcctcaacccgattgacg

SEQ ID NO: 20435 - DNA, 141 bp, Zea mays
  Clone ID: MRT4577_118639C.1
gcgcccacgcgtccgcccacgcgtccgggaaagagttacatagttgcaaccaaaggcgcacacgaagctggttaaggaaatatccaaatctcggaagactaaccaaaccgtggaaacttacactgtacatgtcgttacgct

SEQ ID NO: 20436 - DNA, 746 bp, Zea mays
  unsure (1)..(746): unsure at all n locations
  Clone ID: MRT4577_11863C.1
aaanaattggctccgaaaagaagagtcatcgtacaagnaatacattggattcaagatatggaactccatcggccttggtcagcataattggatacaagcagtaccggcgcagcgcaagggacatgtactacttcctccaatccaacgtctgcatcaaacagctcgcatatgcaatgctagagcaggtcctcgtgacagtcttcccagagcttcgccagctaatagaagacatacatgagaaaggccgcaaagagcaagcctcattcacataccaactctgacccaagagaaaacatgctaattcagagaggagtcgcaacaattttgaacgcacttgcattgctccacggtgagttactgaaacacaaagcctttgcaattatattttgatgatgcataagttggattgaggaagtgcttggtgcttaagaatgatctgtacagatgtatatcaggggttatgtaaattatccccctgatgtagtcaacccgaacaccttacagtgagatcttgtaggtgttgaatgtaatggtatcattctttaatttcccccccccccccccccccccccccccaagaattaagttattcccccccctgacttatgctgaggcttgtaaagtttttaaagttcccagtggaaaactgtactgtttgtgttgctgagtaaatcaaaatgttgcgcgaaaaaaaaaaaaaaaaaaaaaaaaaaaaaaaaaaaaaaaaaaaaaaaaaaacccccaca

SEQ ID NO: 20437 - DNA, 536 bp, Zea mays
  Clone ID: MRT4577_118640C.1
gccggccgggctccccaactaactgccacattccaccagactctgccaaggctaacaggctagtttgacctgaaccttgcgaataaccaccttcaactaccaattcctgacaacctaagaccatgtgagaatcacaatagtttctctgcatatgccccacaagttaaatgtaaacattcctcgctcgctgcggaaacttaaaagcatgacctatttaaatctctcggcaaatttcataagagcatctatacctattgagctatctaggatctcacaatatggacacgaagcacttatcctgtaacatgatgaccggtccaattacatacataccattgccaacctagagcatctattgaagattaacttgatcaataacgatcttgctcgaattcatccctgcgaaccaagtcaacctaaaaagagtcatagaaattgatttatcctataatcatctttaaacgctgattcctcaagaaccctgaatgctgccaaacctgatgtcgctaaaactgtacaacactctataactggcg

SEQ ID NO: 20438 - DNA, 822 bp, Zea mays
  unsure (1)..(822): unsure at all n locations
  Clone ID: MRT4577_118641C.1
ggataagtcttatcttctccaacaacaacaaataaatcccgccataacacgcatgacgatcgtgctcgccaaagtgatctgtgtcttctacccgctcgccgacatgctccgccaggacgacgcctacccactcgacggccgcatccaccaggacgacaccgatggcggtgctctcaccgtcgagaacgacgagggcgtggaggtcttcgagggcgaagccgaggccgagcgcgtctccttccacccgatcgccagccgcatcctcgaggacgacgcgatggcggcgcactcgccatcgagggagacgagggcgtggacttctttgaaggcaggcaagtggtggcaatggtgctcggctcaccagtgaagcgcctgctgccgcaggcggccatgcagtgactggagaaggccgatctaaccgttgcggtgatgctgctgctcctcctccacctcgacgccaccttgctccacgtgcaatggaagcaacaaacctctgtaccatcagtgacctaacaaacaatccgctatggctatcggataagccttatcttctccaacaaacaacaaataaatccttccattacttctcggacgttgtagcatgcatgacgatcgtgcttgccgaagtgatccatgtcttctacccgctcgccaacacccttcgccaggacgacgcctacccactcaacgattgcatccaccaggacggcaccgatggcgaagcgctcgccgttgagggcgacgagggcgcggaggtcttcnaggccgagggcgagcacgtctccttcacccgctcgtcggtcgcatcctccaggacgaacg

SEQ ID NO: 20439 - DNA, 658 bp, Zea mays
  Clone ID: MRT4577_118642C.1
gaaccgtttgtgtcagttgggcggcgtcggcatggacgaggctacgaagaaggtggaggctacggtgctggagatcccgcgaggctctgatatggagtccgtaacggagaacaaggaggaggcgaaggcggcggaggagggcgacgctggcagggagagcaaggacaaggaacgtaaggaagatgaggaggaggatgaaggtaagggtggcgggaagagagagtacgacgaccaaggggaccttattctgtgccgcttgtcgagcaagaggagggtgactctgtcggagttcaagggcaggtcgctggtgtccatccgagagttctacgtgaaggacggaaaggagatgccctccgccaaaggtattagtatgacaatggagcagtgggaagcattttgcaatgctgtacctgcgatagaggctgccatcaaaaagcttgaagattcagactgaggacttgttttaggaggctcttcttttggcagggagctggacgtgatgcaatatatatatcgctgtagtaaggctgtctgaattacaaacgactttggtgatgttccagcggtcgcacatgggctttagggtggtgtatggctcctcggctctacgttttttagccatgttctacgaagctctactccataaaaaagtcagatc

SEQ ID NO: 20440 - DNA, 429 bp, Zea mays
  Clone ID: MRT4577_118643C.1
atgcgttcgttcttatgacatataagagacgattgtagtaccagcactggcttatcaatggtaaggcacactcttgcacatagaactttatgattgagctattactgataagatatctaaacgagggcaccaccaatgattggttgtcggtagaatgctgtcgtgttagcaaaagcagtgtggttgatatggaaaacaatatgttgtaaacgctataggatgcaacaggcaggcgcagctggcatgttaaacggatcaatcgtggttgtgcaaagaaatcagcacgtattacaccagctacctgtgtggcaggtattggcacataacatcagggctcaacaactacaacaactggtgctagcaaaccttgctgactactctcagcaacaacagtttcttacattcaaccaactagctgcattgaactct

SEQ ID NO: 20441 - DNA, 465 bp, Zea mays
  Clone ID: MRT4577_118644C.1
gccggccgggtcctcctctccctccctctccccatgccactctccctactcccttcctctctctctctctatctctctctctctagctccccatgcagcagcagcctcctcccatggagctggcgaccgaaccctcccatgctcctccctcaccttggcagcgctcccatggcgtctccccctcctctacgacagcaaggtactccttaggatgattggttgatggtgtgacttggcctccatccctgccaccgggatagacagccgagtgggttattgctaccgcaggagaggaccaggaggagtagcgtggccaggcttcgccatgttactcggttttctccgttagttatttctgctgcattaaattttatggttattatttctgaaactccggtaatgtaatcactaatgatacttattaaatttgtggtattacaaaaaaaaaaaaaaaaaaggccccta

SEQ ID NO: 20442 - DNA, 425 bp, Zea mays
  unsure (1)..(425): unsure at all n locations
  Clone ID: MRT4577_118645C.1
cccacgcgtccgccattcctggccgtgcccaggaagtcctgtccgtgggttggggccaaggctttccctggttggcctcgccgtgagcagcacccccgatatctgcgcgcgctgccggctcgctgttttgggaagcccagtggacaacacgacgtcgacgctcaccgggtgtttgctgtttttgcgcagccccatccgcgacgtcgttcacccccgaaggcaagccgctcaacgctcgtcgacgttcggagctatgcacaaatcagaatcgccatcgatcttacaaacgccgattgagtttgtttatggaacgaaagaggatgatcgtgcaagtgatgtggtgccacccacaagatgcagtcggtggacgaaccaaggaaggatggacataacangtggatgctcgccaagcgagtaccctccct

SEQ ID NO: 20443 - DNA, 380 bp, Zea mays
  Clone ID: MRT4577_118646C.1
gtccggtgtacgagagttctatctctacaaatcgggtgtcttaagcggaagctgaaccacgaaccttgaccatggtgtcaccacgatcgcgtacggtccagataactggaacactactggatcgtcctcaagtccagggccccaacggggcaagactgtttacatccctatggagaggcacgtctacttcagcactggcaagtacttcatcgtcatgatggactgctagcccacaaagaaggtcgcgaacatgttcatggcgaatacagctgcttcgacagcgctgtatgtccctgacaatttctaactcgagaacttctcttgctccgagggcagaaccttctactacaactttggcttcatgaacataatcttcgaca

SEQ ID NO: 20444 - DNA, 689 bp, Zea mays
  unsure (1)..(689): unsure at all n locations
  Clone ID: MRT4577_118647C.1
gccggccgggccgggcctttgccctctcctccttctgccgccacaagaaaaaggaaagcgccgccaccagaaatagccattgacagcaagtccggagagagtagctgggtggagatatcgccacgtctcaagtctcgggggcgaattcaggagctttggtcgcgttgaagggtctcgcgcgaggtgttgccgtgtatggtgggtgctcggctggtcgggaactcgccgccgtcgtgggatctccgtgtccggccactgcgggtcgtgccggctcacccaccatctcctcggtcgtcggaccgagagatgatgattgagcgagtgatgtggtgccaaccacaagatgcagatggtggaaccaaggaaggatgaacttaactagtggatgctcgccgagcgagtatctcccccagcaaacactatctaagtgtcaaattaaaggtactcattaggttgattggttgttggtgtgacttggcctccatccttgccaccgggatagacggtcgagtgggttactgcttccgcaggagaggaccaggaggagtagcgtggccaggcttcgccatgttactcggttcttctccgttagttatttccgctgcattaaaatttatggttattatttctgaaactccgataatgtaatcactaatgatacttattnnaatttgtggattatgttttac

SEQ ID NO: 20445 - DNA, 364 bp, Zea mays
  unsure (1)..(364): unsure at all n locations
  Clone ID: MRT4577_118648C.1
cccacgcgttcggcgacgaaaccctcgccagtccccaactcgaacctcantcatgggtcgtgaggaggtagaggtcaaggacccattcggcttctggcgagatgaagcttaacgtcaagaccctcaagggcaccaacttcgagatcgaggcgagccccgatgcgtctgttgctgacgtgaagaggatcattgagaccacttatggtcagagtacctaccggtcggaccagcaaatgcttatataccaaggtaaaattttaatggatgagaccactttggaaagcaacggattttgctgagaacagattccttgttataatgtttttcattgctaatgcattgtttagtgtagcttctaccactt

SEQ ID NO: 20446 - DNA, 535 bp, Zea mays
  Clone ID: MRT4577_118649C.1
agcccctcctcgacgtgcggtggcccttggctgagcgccatgtgccatggccgaaccccccctccatgccatgttcgtgtgcgtgcgtgagatggaggaagaagatgactccctgagccaatgacaagtgggcccagggacggatgaccgagagatgatgatcgagccagtgatgtggtgccaaccacaagatgcaattggtggacgacctgaaggatggacataaccagtggatgctcgccaagcgagtgcctcccccagcaaacactatctaagtgtcaaattaaaaggtactccttaggatgattggttgatggtgtgacttgaccttcatccctgccaccgggatagacggtcgagtgggttattgcttccgcaggagaggaccaggaggagtagcgtggccaggcttcaccatgttactcggttcttctccgttagttatttccgctgcattaaaatttatggttattatttctgaaactccgataatgtaatcactaatgatacttattaaattgtggtattatgtttt

SEQ ID NO: 20447 - DNA, 310 bp, Zea mays
  Clone ID: MRT4577_11864C.1
aagaagaaagctcgtgtctttttcaagacttatgctgatgggatcacagcttgtgccaaggagatgacaaagctctctggcatatgttaaatcatcccagagatggagatctgggactatgacttcgaacccatgtgcttctccatgaatgccatccatggctcttcattcttcacaatccatgtgacatcagtggaccttattatctactccagacacgatgtgatgggcttgacttccaatactgaaggctatggtaacctttttacgttggatcgccagtccttctgcacacataatgaactcttgt

SEQ ID NO: 20448 - DNA, 528 bp, Zea mays
  Clone ID: MRT4577_118650C.1
aaaacataataccacaaatttaataagtatcattagtgattacattatcggagtttcagaaataataaccataagtttttaatgcagcggaaataactaacggagaaaaccgagtaacatggcgaagcctggccacgctactcctcctggtcctctcctgcggaagcaataacccacttgaccgtctatcccggtggcagggatggaggccaagtcacaccagcaaccaatcaccctaaggggtacctttttaacacataggtagtgtttgctgggggaggtactcgcttggcgagcatccactggttaagtccatccttccttgtgtcgtccaccacggcatctcgtggttggcaccacatcactggctcgatcatcatctctcggtcatcggctcaccataaacaaacccaatcggtgtttgtaaggacgatggcgattccgatttgtgcatcgctccgagcatccgacgagcgttgaacgacttgccttctccacgcaacacacggggttcctcgcctccacaaa

SEQ ID NO: 20449 - DNA, 607 bp, Zea mays
  Clone ID: MRT4577_118651C.1
gccggtgagaccgcgtaaatcctcattcgattccgcatcgtcattattttcatacgattaattatgtatgtgtgctgttttattttatttggtggaggagaggcaccccgtgttttgcgagaagaaggccaatcgttcaacgctcgtcgatgtgcggagcaatgcacaaatcggaatcaccgtcgttcttgcaaacgtcgtttgggtttgatatggaccgggagatggtgatcgtgcacgtgatatggtgccaaccataggatgccgttggtggacgacccaaggaaggatggacttaaccactggatgctcgccaagcgagtacctcccccagcaacactatctaagtgttaaattaaaggtacttcttaggtcgattggttgatggtgtgacttggccttcatccctgccaccgggatagacggtcgagtgggttattgcttccgcaggagaggaccaggaggagtagcgtggccaggcttcgccatgttactcggttttctccgttagttatttccgctgcattaaaatttatggttattatttctgaaactcccgatatgtaatcactaatgatacttattaaattgtggtattatgttttat

SEQ ID NO: 20450 - DNA, 868 bp, Zea mays
  unsure (1)..(868): unsure at all n locations
  Clone ID: MRT4577_118652C.1
attgggtacctcgaggccggccggggcctcgcctctgcattctgctcgcctcgactccctcattcctctattgcagcacactaacgccatggatggacgacggaagctccctgctacctccaaatccctgtcctcagcagccggttgtttaaattgagtttgccatcacctccccctcgccacaacgatccgttcgaacccttccccgagcgcagccatgaccggcgatgcccgcgccattgctgcagcaggctgccaccgcgggctcgcgtggccaggccacctggagctgccgccggcccagccaactccttggctgtgcgcgcgctccaccagggacggctcggctggccctgccgcgctcggccaacgccggcgagccccggccaggaaaggccgatcccctttccctgtacgttccaaggaagaagacgatggaccaatctgcaaattccagaacagcaggggggaccgagagatgatgatcgagctagtgatgtggtgccaaccacaagatgcagtggtggacaacctaaagactgatggacataaccagtggatgctcgccaagcgagtacctccccccccccagcanacactatctnagtgttaaaaattaaaggtactccttaggatgagttgttgctggtgtgacttggcctccatccctgccaccgggatagatggtcgagtgggttactgcttccgcaggagaggaccaggaggagtagtgtggccaggcttcgccatgttactcggttcttctccgttagttatttccgctgcattaaaattcatggttattattcctgaaactccnatnatgtaatctgtaatgaaaactattanatttgtgggattatgtttt

SEQ ID NO: 20451 - DNA, 588 bp, Zea mays
  Clone ID: MRT4577_118653C.1
ccgggccgggatttcctctccctccctctcccacgccactctccctactccctccctctctctctatctccctctctctagctccccatgcagcagcagcccctcctcccttggagctggcgaccagccctcccaagctccactctcaccttggcaagctctcccatggcgtctccccctcctctacggcagtaagatgaccgagagatgatgatcgagccagtgatgtggtgccaaccacaagacgcagttggtggacgacctgaagaatggacttaaccagtggatactcgccgagcgagtaccctccccagcaaacactacttaattgttaaattaaaggtactccttaggatgattggttgatggtgtgacttagcctccatccctgccaccgggatagatggtcgagtgggttactgcttccgcaggagaggaccaggaggagtagcgtggccaggcttcgccatgttactcgggttttctccgttagttatttccgctgcattaaaatttatggttattatttctgaaactccgataatgtaatccctaatggtacttcttaaatttgtggtattatgcttt

SEQ ID NO: 20452 - DNA, 567 bp, Zea mays
  Clone ID: MRT4577_118654C.1
cacctcacctcacccagcggcggcgaacggagatgccaaggcactctgcggcttcccctatttatacggcactcgctcgcctcgccaatttcaacagcggccgccgcgtcctcctcgcctccagaaagacgagctccagctctgctagaagtagcgccaagaccagaccttttctgtgcctcgccgtgttgctcctgctgattcttgttgtgaccgccgtcttcttgttcccaccagccatcatgtcttcgtcttcctcgtcgtcggcggcggccgcgtccgtgccgtttcagagcccgaggaaggtggtgaagaaggtgctgtccttgtcccagtccgagggccagggcgccaccgtccgccggagcatcggcgggcacgaggtccggaacctggacccgttcctcctgctcgacgagttctccgtctccaagcccgctggattccccgaccacccccaccggggcttcgagaccgtcacctacatgctcgatggggtgttcacccaccaggacttctccggacacacgggcaccatcaggaccggagatgtgcagtggatgacgg

SEQ ID NO: 20453 - DNA, 524 bp, Zea mays
  Clone ID: MRT4577_118655C.1
tgctttgttttatttttgtggaggagagaaaccccgtgtttgcgtggaggaggcaagtcgttcaacgctcgtcgatgtgcgaagctatgcacaaatcggaatcaccgtcgttcttgcaaacgccgtttgggtttgtttatggaccgcgagatgatgatcgtgcaagtgatgtggtgccaacaacaagatgcagttggtggacgacctgaagaatggacttaaccaatggatgctcgccaagcgagtacctcccccagcacacactacccaagtgttaaattaaaggtaccctttaggatgattggttgctggtgtgacttggccttcatccctgccaccgggatagatggtcgagtgggttactgcttccgcaggagaggaccaggaggagtagtgtggccaggcttcgccatgttactcggttcttctccgttagttattttcgctgcattaaaatttatggttattatttctgaaactccgataatgtaatcactattgatacttattaaatttgtggtatt

SEQ ID NO: 20454 - DNA, 177 bp, Zea mays
  Clone ID: MRT4577_118656C.1
tttattgttattattaatatttttctcccggatcagatgcaagaacagactttcatatatagaaatatacgactaacactctatttacagttatacttgattagattcaaaaagtgatgaacttaaccataccactactaataaaaaccaaatatactcggtttatgatcgatacat

SEQ ID NO: 20455 - DNA, 361 bp, Zea mays
  unsure (1)..(361): unsure at all n locations
  Clone ID: MRT4577_118657C.1
ttttnctgccttacgactaggacgacgcaagcaccgggcatcctacaacggagggggggtgcccaagtctctgtcgggccttgttcggcaacgagcaccctacagatggctgggaggcacaccattattgtgatgcagccatcttaaaatagggcttgtagaacatttatggaatacaataacattaatcatgcatcggatggaatctgtgtgctttatgaaaagaaaactaaggatatcaacccaaagatccgaaacataacttatgacatcaacgacctctataactacagtgatggcctaggccacattaacacgcatggttatgaaaactctattcagacattcctgccataaacat

SEQ ID NO: 20456 - DNA, 904 bp, Zea mays
  Clone ID: MRT4577_118658C.1
gcttcgagggccggcctggggccgggaaaaaccctaaaacccatctccccctctctcgttttcctccacccttccccgaagggcgaccactcccgccgccatgccgaagcactaccgccccgcggtaatcctcccgtctcctccctcccccgccttcctcccaaggtccttcttctccgcgccgccggcagagtccctcacccgctgcttctgctgtgctccagggcaagaagaaggaggggaacgccgccaagtacatcaccaggaccaaggcggtcaagtacctgcagatcagcctcgccgtcttcaggaaactatgcattctcaagggagtgtttcccagggagcccaagaagaaggtggaggggaaccacaagacctattaccacatgaaggacatcgccttccttgcccatgaccccttgattgagaagttcagagaaatcaaggttcacagaaagaaagttaaaaaggctatggctaagaaaaacagggatctggcggacagattgttgaatcgaccaccaacttacaaacttgatagacttatcattgaaagatatccatcttttgttgatgccctcagagacttggatgattgcctaacgatggtgcatttattcgcggctttacctgctattgaaggtgaacgtgtgcaagtacaacgaatccataactgccgcaggttaagccatgaatggcaagcatatatttctcgaactaattccctgcggaagacattcatatctgtgaagggcatatactaccaggctgaagttcaagggcaaaagatcacttggcttactccgcatgctcttcagcaagttttaactgatgatgtcgacttcaatgtgatgctcacctttttgaattctacgagactcttctaggatttgtgaacttc

SEQ ID NO: 20457 - DNA, 385 bp, Zea mays
  Clone ID: MRT4577_118659C.1
gagctctcttgtcggcggccgcccttcttttttttttttggatattatgtccggctttagtttatatatagcatcaaatcatatcatcgcggaccaacttatatatggttacagccgaggcaaccggaccaaccaacatgcaggtagacacacgtacgtacatgagcacaatgactgacgccaaacatgcaaagagagatcccaaactgcagaactctgggtctctgtctctcacacacaccacacaatacctatgtatggcagccagctcggcctcgctcattattgttcaaccaccaccacaagctagatagatttttttcatatccatggcccccggtcgatgtgatcagcagttgcaggggtcgcacttgcagttgccacc

SEQ ID NO: 20458 - DNA, 437 bp, Zea mays
  Clone ID: MRT4577_11865C.1
cttaaatagtccataacagcacttcagctttaagtttattatttatataagaggatgaaagtgcaagtctacaacttactagaccagtagagtagtagactatgaccaaggtccaagaaggcaacacctatatgagatcatcatccagcttgaattgatcaccagcagctccagattcttcttcatcatcaattgctttttctgcagcatcttggtcattttgagttggctcttgatgatcattttcgttgtgactgtcactgccactgccatctccttgctgcaagtcctgagctactgtaactttttggcgcttcctactcctaacataggtctcggagtaggtcctcccaccacgtgtagctgctgccctaggcaagtttctgccctgggtagcttgagttgcacctaaaacttcatctactgcactccaaagc

SEQ ID NO: 20459 - DNA, 718 bp, Zea mays
  Clone ID: MRT4577_118660C.1
tttttttttttttttttatctagatgaataaataaatcggtcacaaaaacaaaaaaactagatgaaaaataaatctggacggacaaatcagcgacataaacgaaaaatatggacaacaaaaaaaacaaattagtgataaaaaaatacgtccaccatggagcttgaacccacaacctcaagttaaaagtcttccactctactgactgagctagacataatttgctgttacatagccaagctcggcgccatagatcttggcgccgagctcggtaccacgttggcgccacgtcgtttaggttgggccagcgtagcacgcacctcggtgccatagcctatggcgccgaactgtgttacctcggcgctatgggctatggcgccgagcaaaaggtccaaaaatgatatttaaattttctaaagtccaaacgtgaattttttctgaggaaggactaaaatataaaaaattcggtgctgctgctgcgtacggagcgcagctggtcacgagctgcaatggtcaagtcaaactgtgctttgtacttacaggtaggagagatgtcgacatgtggtcgttgcctggcgcaaatggcttttgccctgaccagtaggctggctgagctgacaagatggccactctggcacaaaccattctcgtcccggtcttctacgctctcctgctgcatctcccaaccacccaagatgcgccgtcgttatggtgagcgag

SEQ ID NO: 20460 - DNA, 435 bp, Zea mays
  Clone ID: MRT4577_118661C.1
tctttgacagctgggccgcaccgtggtgggaggcacggtctactacgtggggctactcgggggggcgtgccatcacaccgattcatggttcgctctcctaacttggcgcagggtctgacagcttggcttgcaagaagcacggacgatgggcttgttccgagcgaaggcacgtttacgaggacagatcagactgtcggacgaccagtctatcagggacctcaaagtgcagagggatgtccgggaagacaggcccaccgatgctattgtacagatggcggtcacgtgaataagtatttgcatgacatccaggtcgatgggcgcgatcaaagtctatacggtactggcaaagatggcggtgctggtgaatctctggtacaccgtgtggttcttgatacctgtaccttagcttgaggaaagcacgaaagagttggacgt

SEQ ID NO: 20461 - DNA, 258 bp, Zea mays
  Clone ID: MRT4577_118662C.1
gccgcgatggacgtgttcctcatgatccggcgccacaagaccaccatcttcacggacgccaaggagtccagcacggtgttcgaactgaagcgcatcgtcgagggcatcctcaagcggcctcctgacgagcagcggctgtacaaggatgaccaactcttggatgatggcaagacactgggcgattgtcgcttcaccagtcaaacagcacggccacaggccccagccacagtggggctggccttccgggcagatgacacc

SEQ ID NO: 20462 - DNA, 1506 bp, Zea mays
  unsure (1)..(1506): unsure at all n locations
  Clone ID: MRT4577_118663C.1
tcgtggccgcggggagggacaaagcctacggggggcggtcacactttcgtgcactttgcggtccggtccgaccgccttctccgcgagcgctaggagcaataaacggcaggcaccattctcggactcggaggcaacgcccagacgcgcaagcggaaggaagggggagcgcaacacgcgcggtcgccgggagagagagagagaaagggcgagctagcgagcgagatccccctctcccgctgccggatccgatctgacctgacctcgtcgccgcctgccgtgggagggagaagaggaagaggaggcggaggcggcggagatggcaccggtgtcagcgctcgccaagtacaagctcgtcttcctgggggaccagtccgtcggcaagacgagcatcatcacccgcttcatgtacgacaagttcgataacacctaccaggctacgattggtattgatttcctgtcaaagacaatgtaccttgaagatagaactgtgagactccaactctgggatactgctggtcaggaaagattcaggagtttaattccaagctatattagagactcttcagttgctgtcattgtattcgatgttgcaagcaggcagtccttcttaaatacatctaagtggatagaggaagttcgcactgagaggggcagtgatgttatcattgtgcttgttgggaacaaaactgaccttgttgacaagaggcaagtctcaatagaggaaggggagggcaaggcgaaggaccttggagtcatgtttattgaaaccagtgctaaggctgggtttaacattaaggcgctgttccgtaaaattgctgctgcacttcctggaatggagacgctctcatcagcgaagcaggaagacatggttgatgtgaacttgaggtccggcaatgcaaactcgtcccagtctcaggctcaggctgggggatgcagttgttagttgcagtctctgacacttgcttgctcatgatctttgggactctgagcatcagaaggcgttatcactgatgcttctctcgggaagaagagttgattgcctctcgccagtgaacacaccatagtctttacccggtgaatggaccgtttgcattggaacgatacgttttatgagttttctgttatttcctcagtggcctaagctagcaacagtgtatagttgggttgacacttcaaacttctaccattcgagttgggtattagaactagttattattggttcatgttgaacttatatatatttccatccttttgcagttagtttgagtcgtatttgctgtgtaccaaacatgtattgcaaatttggaatttttgtaagctataataaggccagcacggcaatatccccacatgataaccccgaaatttgtatcgttcaaagttcaaaccatggtatcctaattcaaaaattttgcctttttttttttttttntgagataaattgcaacctatagatttaatacctctagccatcacatgccagtatgagtgagtcgttatcgaggt

SEQ ID NO: 20463 - DNA, 1242 bp, Zea mays
  Clone ID: MRT4577_118664C.1
ttgtgggcctcgggaggggccgggagacaggggggcggtcacacacacgcggaccgcgcgagctagcgagcgagcgagatccccctctcgcgctgctggatccgatctgacctgaccttacctcgtcgccgccagccgtgagagagagaagaggaagaggaggaggaggcggagatggcaccggtgtcggcgctcgccaagtacaagctcgtcttcctgggggaccagtccgtcggcaagaccagcatcatcacccgcttcatgtacgataagttcgacaacacttaccaggctacaattggtattgatttcctgtcaaagacaatgtaccttgaagatagaactgtgagactccaactctgggatacagctggtcaggaaaggttcaggagtttaattccaagctatatcagagactcttcagttgctgtcattgtattcgatgttgcaagcaggcagtctttcttaaatacatccaagtggatagatgaagttcgcactgagaggggcagtgatgttatcattgtgcttgttgggaacaaaactgaccttgttgacaagaggcaagtctcgatagaggaaggagaaggcaaggcaaaggaccttggtgtcatgtttattgaaaccagtgctaaagctgggtttaacattaaggcgctgttccgtaaaattgctgctgcccttcctggtatggagacactctcatcagcgaagcaggaagacatggttgatgtgaacttgaggtctggcaatgcaaactcgtcccagtctcaggctcaggctgggggatgcagttgttagttgcagtctctgacacttgctgctcatgatctctgagaccctgagcatcagaacgcgttaccactgatgcttctctcgggaaggagagttgatcggcattgaacacgcacacgctatagtttttacccggtgaatggaccatttgcattggaacgatacgtttgagttctctagtgttatttccagtggcctaagctagcaacagtgtatagttgggttggcactgcaaacttctaccgttcgagttgggtattagagctagttattggttcatgttgaacttatattattttctatcttgctgcagttatgtttgctatgtgtaccaaacatgtattggaatttttgtaagctataatatggccagcacagcagtagcctcacatgataccccttgaatcagaaaaaaaaaaaaaatggtaccctaaatttatatcgttc

SEQ ID NO: 20464 - DNA, 630 bp, Zea mays
  Clone ID: MRT4577_118665C.1
ttgggtacctcgaaggccggccggggaaaattcaaaaaaaaaaaaaaaaaaaaaaaaaaaaataaaaaaaaaaaaaaaaaaaaaaaaaaaaaaaaaaaaaaaaaaaaaaaaaaaaaaaaaaaaaaaaaaaaaaaaaaaaaccctttcgtttccaaaaaaaaaaaaaaaaacccggggccgtccaaacggttcggtttccgggttaatttccccccgggccatgggggcaaaaaaaggacccggccctggggaaaaaaaccccttcattaaaggggaatttccgaaagtgggcccaagaaagggtccccaagaaaaaaaacttcttcaaaaaaaaggggttgttcgaaaacgttttccaaaaaatccccaagaacccccagggcccaacctttcgaaaatttgccaagaagggtaaaaaggggccgcccaatttggggggaaaggaaaacccaaaaaattggggaaatttcggcccaaatttaagggggtgggcccccgcaaacccaatcttgggggggagtccatcctggaaatggttaaaccccccaaactgggcaaagaaggggaaaatgggcacccccccccaaaaaaaaaatttaaaaaaggggggtttccccaacaaggtttccc

SEQ ID NO: 20465 - DNA, 433 bp, Zea mays
  Clone ID: MRT4577_118666C.1
gcattcactttgccttcgctttagcctttgtgctgctactactaacttgcaagggacgtcggcgacggccaggccggcgcaccgctcggcggcccggccagcccacccggccagcccaccagcagcgcgcggagggcggccgaggcggcgcgccggacgatgcaggcgggcggggagtgggagcccggcctgcagagcatccccgaggaggtttactagctagtaatctctgcttcactaattatgggttgggttgggtacgttttgatcactgcctcgctgctaagtgctactagtagtagatgcgtgtgtgtgtacagcgctgtttttgctctggaccctcgttatcatgggttccattccaatgcctgcttgacatatccccccccgcgagttgctgcaaaaaaaaaaaacaaaaaagggcggccccggg

SEQ ID NO: 20466 - DNA, 270 bp, Zea mays
  Clone ID: MRT4577_118667C.1
ccacgcgtacggagctacaccatctatgcagttcttcatcctctggaagatgcgcctggttttaagctcagtgctttgatctggcattacgatttctctcccttcatggttcttatcattgcgattctcaatgacggtactatcacgaccatctctaatgacagagttaagccatctccattgcccgacagttggcaactgaaggagatctttgctacgggcatcgtgcttggaagctaccttgctcttatgactgtcattttcttctgg

SEQ ID NO: 20467 - DNA, 680 bp, Zea mays
  unsure (1)..(680): unsure at all n locations
  Clone ID: MRT4577_118668C.1
cggacgcgtgggcaaatggtgcaaatgtggtccaaaatgttaaataaaagaaagcaatccacgcatatcaagtgaaattataaattggtttaattccaagtaacctatgcacttaccttatgcaaactagttcaattctgcacttatatatttgctttggtttgtgttggcatcaatcaccaaaaagggagagattgaaagggaaatagggtttaactttttccaataaataattttggtggttgaatacccaacacaaatattggactaactagtttgctttagattatatattctacaggtgcataaaggttcaacacaaaccaataaaagattgaagttagggatcaaattcaaaggagcaaagaaaccgagtatgccctagtctggcgcaccggactgttcggtgtgccaccggacattgttcggtgcaccagggccgtacaacgtccaattctccactctcgggtttcttagggcgcgctccgctataattcaccagactgtccggtgcaccagcggagcaacggctactcgcgcaacggtcgactgcaaaagccgcgctgaccgttgaacagtgaagaacagtgcacgtagagtcaaagcacagaagtcagaggcgcataggacagtgaacagtgcgtgtncggtgcggcactggactgtctggtgccgcttga

SEQ ID NO: 20468 - DNA, 509 bp, Zea mays
  Clone ID: MRT4577_118669C.1
ccggggaaagcaaagttttatttgggggggaaattccaaccccaaataaaccccaaaacggggtttgaaaaccaaaaaacaagcccttggggggggccaaggcgttttggggcccagggttgcattccgggaaacccctttcctggagtccccataaaaaaaaaagcaaccccttgccgggggaagccttcgtttctttgaaaggccggtcaggcccccaaaaacggggaacagcccctgaaagctaagggccccccccccattggcccccatggccgaaaacatttgccggaacaggccccttccaggcagaacgttgacctcctcccccccgccggttccgacccccagttggggagctccccccccctgcccagggtggacccctgggatttgccgggggccttgaaaagccccctcccaaccctttacccccaattattccggaaaaccctggcttcctttgtcttaccgggggtgggggcccaaatttagccgatgctaattcc

SEQ ID NO: 20469 - DNA, 446 bp, Zea mays
  unsure (1)..(446): unsure at all n locations
  Clone ID: MRT4577_11866C.1
cggacgcttgggctcgaaaccttttgttgagcggggtctgagtgtttccaaagcacacgaaagaggtcgaggatgccttgcagctgcggatcaagctgcatctgcggatcaagctgcaactgcagcaagatgtaccctgacctggaggagaagagcggcggaggctctcaggccagggggggcgccgtcatcctcggcgttgcccctgagacaaacaatgcggtgcacttagaggcagcggacgagtctggcgaggccgcccacggctgcagctgcggcgacagctgcaagtgcagcccctgcaactgctgatcctgctgcgttgcttcgattgcggcatgcatggatgcaaccttttttttactgtctggtttgnagcttgtggcgngtcaagaataaaggatggagccattagctgggctgactctggctctcaacatgcatgc

SEQ ID NO: 20470 - DNA, 241 bp, Zea mays
  Clone ID: MRT4577_118670C.1
gtgccaactgctgtgtcctattggttttcatgagataacagagataggaaaactgacttgatattgtgccatttgtaccgagtactctaaaggactcatccctgtcagttttcacaaatttgtttacgtataaatgctgagtactagtagcattcatggtgttattggacacagtaataataagtataaggtaatactaggaaaatgtctgaaactagcacgcagaagataattccattgc

SEQ ID NO: 20471 - DNA, 755 bp, Zea mays
  Clone ID: MRT4577_118671C.1
ctgtctcctccccgctgccataaacgcaggctcacgcggacgcctccctcccgtgccaagcgcccaagaccaaacccaccagcacagcaccaattcaaccgcgacccaacccaccgcccgcaccccattcccgcaccctcctcccccagatctcccggccgcgacgacgccatgacggccaagggcggcgccacgccgtcccccggcggcgcgggccccgcggcggggaacggccgcctcttcaccgtcgggctggtcaccgcctggtacccctccaacatcggcgtgctcctgctcaacaagtacctcctcagcaactacggcttcaagtacctcatcttcctcaccatgtgccacatgtccgcctgcgccctgctctcctacgccgccatcgcctggctgcgcgtcgtgcccatgcagctcgtgcgctcccgcgtccagctcgccaagatcgccgcgctcagcctcgtcttctgcggctccgtcgtctccggcaacgtatcgctgcgctacctccccgtctccttcaaccaggcggtcggcgccaccacgcccttcttcaccgccgtcttcgcctacgtcatgaccgtcaagcgcgagtcctgggtcacctacctcaccctcgtgcccgtcgtcaccggagtcatctgtttggattcatcatgtgcataggagcaactgcagcaagggcgttgaagacagtattgcaaggaattcttctgtcttccgatggggagaagcttaattctatgaat

SEQ ID NO: 20472 - DNA, 464 bp, Zea mays
  Clone ID: MRT4577_118672C.1
gccgacacggcggcttactatccagatggcacacatgaaggtaaccctgagcaccatgggccgccgttactccgctggacagctcctcagggtgaacatatacagacaccatctcgccatgcccgcagccatcatcatccgccagcgcagcgccagggtctatcctgaatataacgtcggaatggtcatggatcacacactcttctctttgatagacggactcctcaagttcgagatgtatcggcctatcatgaagaacgtttgtgtttacccatatgagaaggtgcctgataacccatactggtacagagcaaggaatagagagtacttccgcatgcagagtctacggatgaacgcgacatcctaaggcgccgctgatcctgagttgatactagctgctgccgatgaaaactctgaagtcatcgcgtactgttgataagtttcctgtgtggtgcttctctttt

SEQ ID NO: 20473 - DNA, 1645 bp, Zea mays
  Clone ID: MRT4577_118673C.1
aaatcgcaaaccgattcaccgcgacccattcccccgtcattctcaccaccggcgcctcccccctcctcagatccacgcgcgcccgcgcgcgaccagccgcgatgacggccaagggcggcgcgtcgccggcgccgggcggcgcgggagctgcggccaacgggcgcttcttcacggtcgggctcgtcaccgcctggtactcctccaacatcggcgtgctcctgctcaacaagtacctcctcagcaactatggcttcaagtaccccatcttcctcaccatgtgccacatgtccgcctgcgcgctcttctcctacgccgccatcgcctggctccggatcgtgcccatgcagctcgtgcgctcccgcgtccagctcgccaagatctccgccctcagcctcgtcttctgcggctccgtcgtctccggcaacgtctcgctccgctacctgcccgtctccttcaaccaggccgtcggtgccaccacccctttcttcaccgccgtattcgcctacatcatgaccgtcaagcgggagtcgtggatcacgtacctcactctcgtccccgtcgtcaccggcgtcgtcatcgccagcggcggcgagcctagctttcatctgtttggattcatcatgtgcattggagccactgccgcaagggcgttgaagaccgtgtcggacgtggtcattctgtcttccgatggggagaagcttaattctatgaatctgttgttgtacatggctccaatcgctgttatcttcttgcttcctgcaactatctttatggaggataatgttgtcggcgttacaattgagcttgcaaagaaggatttcacgattgtttggttgcttttgttcaattcttgcttgtcgtattttgtcaatttgaccaatttcttggtgaccaagcatactagtgcactgactctacaggttctcggaaatgcaaagggtgccgtggcagttgtcgtctcgattatgatattcaggaatcccgtgtccataacaggaatgctcggttatactctcacagtttttggcgtcattctttacagcgaatccaaaaagcgcagcaacaagccatgaacaccctaggagacagtaaatatgggaaatcatttctttgtcctgtcagcgcctagagctaatatatgatgagaaatcacatcggtggcgaccacaacaaatcctatgccatactgcctcagcaattggacatcaaggatagaagtccaataactaccttggcatatgggaggcattttgttttatggcgttgatggatagaatataaatatttttttgtgtgtgttagagaactatggctcacactgccagcattggttgatacgtttagctcttgggaaattgcctcttgtattcatcttctgctgctgcagtttccattttgttttgttgtgaagaccacctataccacactttgatccaggttccgggacctaattaatatattgtgacactgaattgatgctcagttagcggacttttggtgacacaatgttgtcccatcatgactgccaatgtaaagtctacatgactacatagctacattgttggttcagatttgcatgcaactgcccagctgttttgactgtgaaaaaaaaaaaaaaaaaaactcgaactatctctcctcgtgc

SEQ ID NO: 20474 - DNA, 1592 bp, Zea mays
  Clone ID: MRT4577_118674C.1
cattgggtacctcgaggccggccggggttacggacactcagctaaaaaaaaagtgccaagcgcccaagaccaaacccaccagcacagcaccaattcaaccgcgacccaacccaccgccccgcaccccattcccgcaccctcctcccccagatctccggccgcgacgacgccatgacggccaagggcggcgccacgccgtcccccggcggcgcgggccccgcggcggggaacggccgcctcttcaccgtcgggctggtcaccgcctggtactcctccaacatcggcgtgctcctgctcaacaagtacctcctcagcaactacggcttcaagtaccccatcttcctcaccatgtgccacatgtccgcctgcgccctgctctcctacgccgccatcgcctggctgcgcgtcgtgcccatgcagctcgtgcgctcccgcgtccagctcgccaagatcgccgcgctcagcctcgtcttctgcggctccgtcgtctccggcaacgtctcgctgcgctacctccccgtctccttcaaccaggcggtcggcgccaccacgcccttcttcaccgccgtcttcgcgtacatcatgaccgtcaagcgcgagtcgtggatcacctacctcaccctcgtgcccgtcgtcactggagtcatcatcgccagcggcggcgagcctagctttcatctgtttggattcatcatgtgcataggagcaactgcagcaagggcgttgaagacagtattgcaaggaattcttctgtcttccgatggggagaagcttaattctatgaatctgttattgtacatggctccaatcgctgttatcttcttgcttcctgcaactatctttatggaggataatgttgttggcatcacaattcagcttgcaaagaaggatttcacgattgtttggttgctactgttcaattcttgcttgtcatattttgtcaatttgaccaatttcttggtgaccaaacatactagcgcactgactctacaggttctcggaaatgcaaagggtgccgtggcagtcgtcatctcaatcatgatattcaggaatcctgtgtccataacaggaatgctcggttacactctcacagtttttggcgtcattctttacagtgaatccaaaaagcgcagcaacaagccgtgaccaccctagaagacagtaaatacggccatcatttctttgtcctgccagcgcctagagctaatatatgatgagaaactacaccggtggcgatcacaacaaatccaatgccgtaccgcctcagcaattggacatcaagggtagaagtccaataatacctgtagtattaaattggcatgtgggaggcattttttttaatggcattgatggatagaatatatatattttttgtgttagagaagtgtggctcagactgccagcattggttagtacgtttagctcttgggatattgcctcttctattcatcggctactgtaacttccattttcttttgttctgaagactacctgtaccagactttgatccaggttccagggcctaattaatatattgacactgaatttaagctcaaaaaaaaaaaaaaaaaaaaaaaaaaaaaaaacaaaaa

SEQ ID NO: 20475 - DNA, 767 bp, Zea mays
  Clone ID: MRT4577_118675C.1
ccgggctaggcttttgttcacacgaggtgcgagcgcgatcgggcctacgagttccatcgctccgagtcgtcggcgccaggcgacagtgccctcatccgcctcctagctccgtctgaacctgctcacgcccaggcggagccaccgctgacccgagctccacctaggccgcccacctgcactggcagaccaaggtcatctccgcggacgccgtgcagccgagctcctcccacggagtcacgggcccacccccagccgaggcaccgagctccgccccgccccgcatgggcacacccctgcacaggccgagccgcctcgctcctgttcctcgccacggttctagtgacgacgaggctgagcgacgattccagcgtctcgatgtctgacccgagttcaactcctcttccgtcaatctcgagatcctagtggatgagtcagatggcggaggagacgacgtgcaagagctgcctgtttatttggccgcagtggatctcgcatgttctgaagagttcctggaacttatcaagagtgcacttcttgcagccctatacgttctcaacgggcgcgtggatggagatgcaagggcttgctgcatatggatatttgttttgcttattgttttatttggatctagatcatcgatgactatgagtcatatgtaaatatatttttatcctaccaaaagtgtctcgaacatatattatatatgaaactatggatcaacttcttgtaatgcaactattgatttttaatatatattatttttgctt

SEQ ID NO: 20476 - DNA, 291 bp, Zea mays
  Clone ID: MRT4577_118676C.1
cccggcccgacccacgcgtccggtcggcccttcgctccaagagcattttagttctcggggtaatacacgtccgagggtcgggtgtactttgcaagcggcgaggtgaacccaccggatctttaaacctagctgatgcccaactcgttattcaacttagatgcgacaattgcactggaaagggcatcgctaattaagctaaacatgtttgaccaaaagctcatttggacaccatcgcaaagtgtgagcaccactcaaaagtatgggataaaaatacactgaaagacacatgtg

SEQ ID NO: 20477 - DNA, 377 bp, Zea mays
  Clone ID: MRT4577_118677C.1
gcacaaacggatactggagcatatatatagaccgaatgtgacgcggaagagggcatgaaatgacatacaccaaacatggcatcggtagcagcccatacacacataccagcttgtacacatatgtatacggaccttagtatctcactctaggcttaaacaaatacactagacatctggcaacacacaaatcgttactgtcgaaggggctcacgtgaccggaccaaaaagccgagcccatatacatacgctacaccgacgtggggaaccaacaatcgtgacggaaggccatccgaaaaacaaaagattgcagaagcaagccagtatatggacatcacttcctgagctgggcgaagaagacacactaccatacgtgagac

SEQ ID NO: 20478 - DNA, 464 bp, Zea mays
  Clone ID: MRT4577_118678C.1
ccacgcgtccgatcgccaaatcaagaacaagccataccccaagtccaggtactgccgtggtgtccctgaccccaagattaggatctacgatgttggcatgaagagaaagggtgttgatgagttcccctactgtgtgcaccttgtctcttgggagaaggagaatgtctccagtgaggctcttgatgctgcccgtattgcctgcaacaagtacatgaccaagtctgcaggaaaggatgccttccacctttgggtccgggttcaccccttccatgtccttcgtatcaacaagatgctttcgtgtgctggggctgataggctccagactggaatgaggggtgcctttggcaagcctcatggcacctgtgctagggtggacattggtcaggtactcctttctggtcgatgcaaggacaactatgcttcacatgccaattaaacatcttgcgacgcgccaagttcaagtc

SEQ ID NO: 20479 - DNA, 568 bp, Zea mays
  Clone ID: MRT4577_118679C.1
cccgggtgcgcccagcgtccggcctgcggggagctatcgccaatcaggggcaagcgctaccccaagtccaggtactgccgtggtgtccctgaccccaagataggatctacgatgttggcatgaagagaagggggttgatgagttcccctactgtgtgcaccttgtctcttgggagaaggagaatgtctccagtgaggcgggggagggtgcccgtattgcctgcgacaagtacatgaccaagtctgcaggaaaggatgccttccaccttcgggtccgggttcaccccttccatgtgcttcgtatcaacaagatgctttcgtgtgctggggctgataggctccagactggaatgaggggtgcctttgggaagcctcagggcacctgtgctaggggggacattggtcaggtactcctttctgtgcgatgcaaggacaacaatgctgcacatgccagtgaagctctgcgacgcgccaagttcaaggtccctgggcggcaaaagattattgagagcagaagtgggggttcaccaagttcaggcgtgccgactacctgaagtacaagagtgagg

SEQ ID NO: 20480 - DNA, 123 bp, Zea mays
  Clone ID: MRT4577_11867C.1
ccttcctttttggtttcgtaactgttaaggaactgagtgtgtctaattaaatggatggggggtgctattcaaaaatttccgaagggggccaatgccgaccgcggggaaggtgatcaagttcaa

SEQ ID NO: 20481 - DNA, 585 bp, Zea mays
  Clone ID: MRT4577_118680C.1
atgccgcgtcctcaccgccgtacgtgatcttgcacgcgatctcagtgcaccctagatgtgctgacgaccgtggatcatgtccgccgcgtgcgcagcctcaagatcgctatcagagtgcatttcgcacagactcgacggctgcccgccagtgtggcgtcgtccagagccacgaagaaggtggctacctgctcaagaacaacctcttcatcacacacacgccttaatacatactacgtggagaaccgacctcactgccacgctcaagcgctagcttccatgaaggcaatgacatctacttcagagacacgttctctttgccatgactgacgccgctgctgctcaacttgcgcaaccacgaacagatccccgtctgctcgctcatctctcaatacaacctggaggactactgagatgacactgaccagcacactgctcgacgtcacttgaaggcgcgtgccactgaaggttgtcatctctgctcctaccaaggatctctcatgttagtcgatgctgtcaacgcatacgaacacaagtgtcacattaacattgctcgcaatgctagctgcacaaccaactggcttgctc

SEQ ID NO: 20482 - DNA, 261 bp, Zea mays
  Clone ID: MRT4577_118681C.1
atcattttcaacttgagcgttttgcacagcggctttgcgttctcagcaaaccaacatttcctgcatcggcgtcccacggcggagttttcttcgggtgttttgctctttttcctcacgataccatacatcttggtgttttgggcgtgctttttctcctctcaaacacattacggaagcggcgactttctctatcatcacgataaaaaaaggtcttaacggttgacgggtctcacaagctcatctcatcttcagagaaaagaa

SEQ ID NO: 20483 - DNA, 1944 bp, Zea mays
  Clone ID: MRT4577_118682C.1
atggccagagtgcgctctaccgctagagttgagcgtgagggaggcgaagccgaaggagcggagactgttcctatctccgaagcaatgcgacgatccggactggtgacctcggaaggaatccccactgctgagacagaacagactgttgccgatacagaacaagttgctgccgaagcggaggaaggagatattgaggaagaacatattggcactagagatttagtgcaagaagttctggccttcagggtatttccaactatgaaagagtggactatgccgaagcttaaaggggaaaagaaagagggggaactcgttcgactgccctattattataagtttaagaaatattttaaagcaccatgccaagaatggctcgatacaattgaaataatgagtaatgaaattcttggaaattactccaaaaaagaggaccaactgatgacagcagccttcggcactcggccgaaacgaaggctgaacagggtgcttgatgctataggatttgaatatgctgattatggtcgactgggcggagatgccggaggctcgaagcgaaaaagaattgccagcgctactgacgaagaagtcgccaaggtggccaaaaagaaaaagaaagattctgaaaaacttagccctgaagagttaaacgctgagccgaaggtggccactgcaagaaagagaaaaagtgcatctcccgagccggaaacgctggttcgagaagaagatactcctgctactccttctgctgttgaagtagaagagattatgaaggtaatgactgaacccttgcctatcaggctaagtccgctggcgctggaactgacaaagttttttcagaaggacaaggcagcttcggcagacgaaggtcctgcactgccgaaaaaacgaaggattattcaaatagcagacgtaattcatgggacaccgtctccaacaccggcgtcaaaaattgccattgatcaaactgccgaaactgccgaagctaaaggcgccacatccgaagccaccagaacggaaattttcgaagccgatactggcgcagccgaagctgtcgaggctgaaatcggggccacagaagatccaaacctagaagagacacttgaagttattgataacatactcctaaaaatgactgaggaggaatctgttgtggctgcggcaagcacagctactgaaaaggggaaaaaacaagctgaggacattttggaggaagaagattttgaatttcaagatttacttgggcaagggctgacagacgctgaaaaagcagagcttaaaaatctagaagcagacctgtgccgttatcaacgacaccatatcgccggaagcttgctttatgctaacttcaaggaccttgaaatcatggtcaaagagcacgaaggtgcattagaaaagaaagattttgttattcagaccatggagggttctttggctgaagtccaaactgagaataacaagttaaagaatgaattgctgcgacagtcagaaaaattcgagcaagaaaagaaatatcttgaagcaagcctcaaaactgaagtagataaaaattcaaatttgcagaaatcttttaaagaacttcaggagaaatgcttaagcttcggcagccgatgcgtgcagcggctgaaggatgtgtttcactctgttggagctagctctgcgaaatttacaccttcagctgaaaatctgcccagaacattagaatatattgaaggcgaagttgatgcccttgacgaagttattggtgggcacgccgacttctgcgccctggtagcttctcggggcacagctactgcttttttgaaagctggctgcacgcatggaaacattgtgaacagaccaaacttcagcctgtcagcatcagatctaatagatatcccaagcctagcccgaagcattggaaacagattcatgacccagatctgggatgtcgaagctgaagaatga

SEQ ID NO: 20484 - DNA, 411 bp, Zea mays
  Clone ID: MRT4577_118683C.1
ggggggggaataaaaattggttttttttttttataaatatgggggggggaggaaaaaaaaaaaaaatttttttttaaaaaaaaaaagggggtttgaaaaaaaaaacttagaaaaaaaattcccttggggcccccggaatgccaaaaaaaaattgtttttccaccccccttggggggggggaaaaattgaaattttttttttggggaaaaaacctctcgaaatataactgcgggtgcccaaaaccaaacccgggattattacttggaaaaacgttttctggggaaaaaaaaaaaccttttttttttaagagggggggttttttttaaaaagaaatggggggcttttatcttaataaaccacaatttggggaggggcatggtttgaccaacccccttttaaaacacccttttt

SEQ ID NO: 20485 - DNA, 2697 bp, Zea mays
  Clone ID: MRT4577_118684C.1
atgacctcagaaggaacccccactgccgagacagaacagactgttgccgatacagaacaagttgctgccgaagcggaggaaggagatattgaggaagctgattccgatgatgattaccatatcgccgtaccgaccaagcccaaccatttggacttcggaaagtcgactgtctctaaggctgatttctctaaaatggtgaagtcgggctatttcagtgaaaatgagaagaagctgcttcgcttcaggggggaggaaactaccccgaagccagaaaaggatgaaatagttattttcaagagttttctgaaagctgggttgagatttcctttgaatagaatgatttctgatgtgctgcaaaggtttgggatctattttcatcagctgactcctaacgccattgtcaggcttagcgtctatatctgggctctccgaagccaggcggtggagccgtttgccgacaacttctgtcgagttcatgagctgcattaccagactaaggccagaaaagatggattgcatgaaaattttgattgctataattttgcctatcggaaaaccacaaagtttcctgtgatcagctaccgaagcaaatggccggcaggctggaagtcagaatggttttatgtcaaagttgacgaagacaaagagaagctggttcagagccctcttgaactaatcttcggagaaacaagaccccgatgcaaaatggcagtagaaggtccaacttgggctgcactgggtgagttcaaaattattgcagaacatattggcactagagatttagtgcaagaatttctggccttcagggtatttccaactatgaaagagtggactatgccaaagcttaaaggggaaaagaaagagggggaactcgtccgactgccttattattataagtttaagaaatattttaaagtacccagccaagaatggctcgatacaattgaaataatgagtaatgaaattcttggaaattactccaaaaaagaggaccaactgatgacagcagccttcggcactcggccgaagcgaaggctgaacagggtgcttgatgctataggatttgaatatgctgattatggtcgactgggcggagatgctggaggcccgaagcgaaaaagaattgccagcgctactgacgaagaagtcgccaaggtagcaaaaaagaaaaagaaagattctgaaaaacttagccctgaagagttaaaccctgagccgaatgtggccactacaagaaagagaaaaagtgcatctccagagccggaaacgctggttcgagaagaagatactcctgctactccttctgctgttgaagtagaagagattatgaaggtaatgactgaacccttgcctatcaggctaagtccgctggcgctggaactgacaaagttttttcagaaggacaaggcagcttcggcagacgaaggtcctgcactgccgaaaaaacgaaggattattcaaatagcagatgttattcatgggacaccgtctccaacaccggcatcaaaaattgccattgatcaaactgccgaagctgaaggcgccgcagccgaagccaccagagcggaaattttcgaagctgatactggcgcagccgaagctgccgaggctgaaatcggggtcacagaagatccaaacctagaagagacacttgaagttattgataacatactcctaaaaatgactgaggaggaatctgttgtggctgcggcaagcacagctactgaaaaggggaaagaacaagctgaggacattttggaggaagaagattttgaatttcaagatttacttgggcaaggactgacagacgctgaaaaagcagaacttaaaaaatgtgctatagcctgcggatataagccaggggctacactgttcggcggtgttaacgaaggaaaactgagatcgtttcgacagagcatattattaagcaaggttctaaaaatgcaacaagatctggaagaagagaaaaacaaggccgtaattcaagatttggctgaaaaagttgaaaattacgaagctagtctgaaaaagaaaaacttcacaatccaggaccttgaaatcatggtcaaagagcacgaaggtgcattagaaaagaaagattttgttattcagaccatggagggttctttggctgaagtccaaactgagaataacaagttaaagaatgaattgctccgacagtcagaaaaattcgagcaagaaaagaaatatcttgaagcaagcctcaaaactgaagtggataaaaattcaaatttgcagaaatcttttaaagaacttcaggagaaatgcttaagcttcggcagtcgatgcgtgcagcggctgaaggatgtgtttcactctgttggagctagctctgcgaaatttacaccttcagctgaaaatctgcccagaacattagaatatattgaaggcgaagttgatgcccttgacgaagttattggtgggcacgccgacttctgcgccctagtagcttctcggggcacaactactgcttttttgaaagctggctgtacgcatgaaaacattgtgaacagaccaaacttcagcttgtcagcatcagatctgatagatatcccaagcctagcccgaagcattggaaatagattcatgacccagatctgggtaagtggcgggcgaaaaatggcaggtgacgaagctcgaagccatcttaagccggatgacgaagctgaagaatga

SEQ ID NO: 20486 - DNA, 356 bp, Zea mays
  Clone ID: MRT4577_118685C.1
aaaaaaaaaaaaaaaaaaaaaaagaaaataaaaaaaccgaaagttccagccccatggccccttccgcccctccaaattccgagtttttgagcccttaagtagaggtaaaattaggcgtttgccgcaataaagaaaaaaaaaggttccctggggcaactcatacccaattttatagttccataaaaaagaggaaatggagggggagattgttcacactgattggtttaatgagtggggttgctttccttgtccgccttgggctcactgcccgttttcaagaagggaaacgatgacagcgaagaggatcaaggaataggccaactcccgcctatagtttttttgctcacccccccctc

SEQ ID NO: 20487 - DNA, 2724 bp, Zea mays
  Clone ID: MRT4577_118686C.1
atggccagagtgcgctctaccgctagggttgagcgtgagggaggcgaagctgaaggatcggagagtgttcccatctccgaagcgatgcaacgatctggactggtgacctcggaaggaatccgtactgccgagacagagcagactgttgccgagacagaacaagttgctgccgaagcagaagaaggaaatattgaggaagatgatcccgatgatgattaccatattgccgtgccaagcaagcccagccacttggacttcggaaagtcgactgtctctaaggctgatctctccaagatggtgaagtcgggttacttcagtgagaatgagaagaagctacttcgcttcgggggggaagaaactaccccgaagccagaaaaggatgaaatagtcattttcaagagcttcctaaaggctgggttaagatttcccttaaataggatgatctctgacgtgctacaaagatttggcatctattttcaccaactgacgcccaacgcgattgtcaggctcagcgtctatatctgggctctccgaagccaggcggtggagccatttgccgacagcttctgtcgagttcatgagctgcattaccaaacaaaagccagaaaagatggattgcatgaaaattttggctggaaatcagaatggttttatgtcaaagttgacgaagacaaagaaaagctggttcagagccctcttgaactaaccttcggagaaacaagaccccgatgcagaatggaagtagaaggtccaacttgggctgcactgggcgaattcaaaattattgcagaacatattggcactagagatttagtgcaagaattcctggccttcagggtttttccaactatgaaagagtggacaatgccgatgcttaaaggggaaaagaaaacgggggaactcgtccgactgccctaccattataagtttaagaaatactttaaagtgccctgccaagaatggcttgatacaattgaaataatgagcaatgaaattcttgggaattactctaaaaaagaggaccaactgatgacagcggccttcggcactcggccgaaacgaaggctgaacagagtacttgatgtcataggatttgaatatgctgactacggtcgtctaggcggagatgctgggggcccgaagcgaaaaaggattgctagcactactgacgaagaagtcgtcaaggcagcaaaaaagaaaaagaaagattctgataacattagcgctgaagagttaaatcctgagccgaaggtgcctacggcaaaaaagagaaaaagtgcatccccagagccggaaacgccggtccaagaagaagacactcctgcttctccttctgctattgaagctaagtccgctggcactggaactgacgaagttttttcagaaggacaaggcagtttcggcagtagaaagtcctgcgaagccaaaaagcggagaattattcaagtaacagatgtgatccatcagacgccgccaccggcaacggtgtcaaaaattgtttttgctgaaactgccgaagccgaagctactgaaatgaaaactgctgaagctgaatctggcgaagccgaagctaccggggccgaagctggggccaccgaagagtcgaacctagaaaccacacttgaggttattgacaacatactgctgaaaatggctaaaaaggaagctaccgtggctacagtgaatacggcaactgagaaggggaaagagcaaattgatcaaatttcagaagaagaagattttaactttcaagatttgctcggacaagaattaacagacgccgaaaaagaggagttgaaaaaatatgccacatcctgcggatacaaatcaggggatatgctttttggtggggtcaacgaagggaaatcaagatgccttcggaaccgcgccgaagccaaaattgttagaaccctttccaaaagcattggcttgccgaagctagaagtggacttgtgtcgttatcaacgacaccacatcgccggaagcttgctttatgctaacttcaagagcatattattaagcaaggttctgaagatgcaacaagatctggaggaagagaaaaacaaaaccgtcattcaagatttgactgaaaaagttgaaaatcatgaagccaatctgaaaaagaaagacttcgcaattcaagatcttgaaatcatggtcaaagagcacgaaggtgcactagaaaagaaggattttattattcagaccatggagggctctttggctgaagtccaaactgaaaatgacaaattaaagaatgaattgctccgtcaatcagaaaaattcgagcaagaaaagaaatattttgaagcaagcctgaagactgaagtggataaatactcaaatctgcagaaatcctttacagaacttcaggagaaatgcttaaacttcggcatccgatctgaaaacttgccaagaacattagaacatattgaaggcgaagttgatgcccttgacgaagttattgatgggcacgctgacttctgcgccctggtagcttctcggggcacagctgctgcttttttgaaggctggctgcacacatggaaacactgtgaacagaccaaacttcagcctatcagcttcagatttgttagatatcccaagcttagccagaagcatcagaaatagattcatgacccagatctgggtaaatggcgggcggaaaatggcaggcgacgaagctcgaagccatcttaagccggatgacgaagctgaagattga

SEQ ID NO: 20488 - DNA, 2774 bp, Zea mays
  Clone ID: MRT4577_118687C.1
atggccagagtgcgctctaccgctagagttgagcgtgagggaggcgaagccgaaggagcggagactgttcctatctccgaagcaatgcgacgatccggattgatgtcctcggaaggaatccccaccgccgaaacagaacagactgttgccgatacagaacaagttgctaccgaagcggaggaaggagatattgaggaaactgcttccgatgatgattaccatatcgctgtaccgagcaagcccagccatttggacttcggaaagtcgactgtctccaaggctgatttctccaaaatggtaaagtcgggctatttcagtgaaaatgagaagaagctgcttcgcttcaggggggaggaaactaccccgaagccagaaaaggatgaaatagttattttcaagagttttctgaaagctgggttgaggttccctttgaatagaatgatttctgatgtgctgcaaagctaccgaagcaaatggccggcaggctggaaatcagaatggttttatgtcaaagttgacgaagacaaagagaagctggtacagagccctcttgaacttatcttcggagaaacaagaccccgatgcaaaatggcagtagaaggtccaacttgggctgcactggctgaattcaaaattattgcagaacatattggcactagagatttagtgcaggaattcctggccttcagggtttttccaactatgaaagagtggactatgccgaagcttaaaggggaaaagaaagaaggggaacttgtcagactgccttattattataagtttaaaaaatattttaaagcaccctgccaagaatggctcgatataattgaaacaatgagtaatgaaattcttggaaattactccaaaaaagaggaccagctgatgacagcagccttcagcactcggccgaagcgaaggctgaacagggtacttgacgctataggttttgaatatgctgactatggtcgagtgggcggggatgctggaggcccaaagagaaaaagaattgccagcgctactgacgaagaggtcgccaaggtagcaaaaaagaaaaagaaaggttctgacaaacctagccttgaagagttaaactctgagccgaaggtggccactacaagaaagagaaaaagcgcatctccagggccggaaacgctggttcgaaaagaagatactcctgttactccttctgctgctgaagtagaagagattatgaaggtaatgactgaacccttgcctatcaggctaagtccgctggcactggaactgacgaagttttttcagaaggacaaggcagcttcggcagcagaaagtcctgcgaagccgaaaaaacggagaattattcaagtgacagatgtgatccatcagacgccgccaccggcaacggtgtcaaaaattgtctttgccgagtctgccgaagccgaaggcgccgcagttgaagctaccggagcggaaaccactgaagatgaaaccggcgaagccgaagctactggggccgaagccgggaccaccgaagagtcgaacctggaaaccacacttgaggtgattgataatatactcatgaaaatggctgaagaagaagctactgtggctgcgttaacagacgccgagaaaaaggaattgagaaaatatgctatatcttgcggatataaatcaggggatgtgctatttggtggggtcaacgaagggaaactaagatgccttcggaaccgcaccgaggccaaaattgttagaaccctctccaaaagcattggcttgccgaagctggaagcggacttgtgccgttaccaacgacaccacatcgccggaagcttgctttatgctaacttcaagagcatattattaagcaaagttctaaaaatgcaacaagatctggaagaagagaaaaacaaagccgtcattcaagatttggctgaaaaagttgaaaatcacgaagccaatctgaaaaagaaagacttcgcaatccaagaccttgaaatcatggtcaaagagcacgaaggtgcattagaaaagaaggattttgttattcagaccatggagggctctttggccgaagtccaaacggagaatgacaaattaaagaatgaattgctccgacaatcagaaaaattcgagcaagaaaagaaatatcttgaagcaagcctgaaaactgaagtggataaatactcaaatttgcagaaatcctttaaagaacttcaggagaaatgcttaagcttcggcagccgatgtgtgcagcggctgaaggatgtgtttcactctgtcggagctagctcttcgaaatttacaccttcagctgaaaatctgccgagaacattagaatatattgaaggcgaagttgattcccttgacgaagttattggtgggcacgccgacttctgcgccctggtagcttcttggggcacagctactgcttttttgaaggctggctgcacgcatggaaacattatgaacagaccaaactttagcttgtcagcttcagatttgattgatatcccaagcttagccagaagcatcggaaatagattcatgacccagatctgggtaagtggcgggcgaaaaatggtaggcgacgaagctcgaagccatcttaagccggatgacgaagctgaagaatgatgaagctgaagtttaacgaagctgaagacgaagcctaagctgaagcttaaagttgtttacaatatgctttcctgcaaaaattctagagaaactcttgtaatatggctatgaaacaacttatgtaaatttgtacataccttgtaatatattctgtctctctt

SEQ ID NO: 20489 - DNA, 2805 bp, Zea mays
  Clone ID: MRT4577_118688C.1
atggccagagtgcgctctaccgctagagttgagcgtgagggaggcgaagccgaaggagcgaagactattcctatctccgaagcgatgcaacgatccggactggtgacctcggaaggaatccgtactgccgagacagggcagactgctgccgagacagaagaagctgttgccgaagcggaagaaggaaatattgaggaagctaattctgatgatgattaccatattgccgtgccaagcaagcccaaccacttggacttcgggaagtcgactgtctccaaggctgatttctccaagatgagctttctaaaagctggattaagatttcccttaaataggatgatatctgatgtgctgcaaagatttggtatctactttcaccaactgactcccaacgcaattgttaggctcagcgtttatatctgggctctccgaagccaggcagtagagccatttgctgacaacttctgtcgagttcatgagttgcattaccaatctaaggccagaaaagatggattgcatgaaaattttggctgttataattttgcttatcggaaaaccacgaagtttcccgtgatcagctaccgaagcaaatggccggcaggctggaaatcagaatggttttatgtcaaagttgatgaagataaagagaagctggttcagagccctcttgaattaatcttcggagaaacaagaccccgatgcaaaatggcagtagaaggtccaacttgggctgcactgggcgaattcaaaattatagcagaacatattggcactagagatttagtgcaagaattcctggccttcagagtttttccaacgatgaaagagtggacaatgccgaagcttaaagaggaaaaaaaagagggggaactcgtcaggctaccttatcattataaattcaagaaatattttaaagtaccctgccaagaatggcttgatacaattgaaataatgagcaatgaaattcttgggaactactctaaaaaagaggaccaactgatgacagcggccttcggcactcggccgaaacgaaggctgaacagagtgcttgatgccataggatttgagtacgctgactacggtcgactgggcggagatgccggaggcccgaagcgaaaaaggattgccagcgctactaacgaagaggtcgtcaaggtagccaaaaagaaaaagaaagattatgaaaatcttagcgctgaagagttaaatcctgagccgaaggtggccacttcaagaaagagaaaaggtgcatccccggagccggaaacgccggtccgagaagaagatattcccgcttctccttctgctgttgaagtagaagagattatgaaggtaatgactgaacccttgcctatcaagctaagtccactggcactggaactgacgaagttttttcagaaggacaaggctgcttcggcagcagaaagtcctgcgaagccgaaaaaacggagaattattcaagtaacagatgtgatccaccagacgccgccaccggcaacggtgccgaaaattgcctttgctgaaactgccgaagccgaagctactgggatgaaaactactgaagctgaaaccagcgaaaccgaagccaccggggctgaagccggggccaccgaagagtcgaacctggaaactacacttgaggttatcgacaatattctcctgaaaatggccgaagaagaagctactgtagctgcagtgaatacggcaactgaaaaggggaaagagcaaattggtgaaatttctgaaggagaagattttaactttcaagacctacttggacaagagttaacagacgctgagaaagaggagttgaaaaaatatggcatatcttgcggatataaatcaggcgctatgctatttggtggggtaaacgaagggaaactaaggtgccttcggaatcgcaccgaggccaaaattgtcagaaccctttccaaaagcattggcttgccgaaggtggaagcggacttgtgtcgttatcaacgacaccacatcgccggaagcttgctttatgctaacttcaagagcatattattaagcaaggttctaaaaatacaacaagatctggaggaagagaaaaataaagccgtcattcaagatttggctgaaaaggttgaaaactacgaagccaatctgaaaaagaaagacttcgcaatccaagatcttgaaatcatggtcaaagagcacgaaggtgcattagaaaagaaggattttgttattcagaccatggagggctctttggctgaagtccaaactaaaaatgacaaattaaagaatgaattgctccgtcaatcagaaaaattcgagcaagaaaagaaatattttgaaacaagcctgaaagctgaagtggataaatactcaaatttgcagaaatcctttacagaacttcaggagaaatgcttaagcttcggcatccgatgtgtgcagcggctgaaggacgtatttcactctgtcggagctagctcttcgaaatttacaccttcagctcaaaatctgccaagaacattagaacatattgaaggcgaagttgatgcccttgacgaagttattggtgggcacgctgacttctgcgccctggtatcttctcggggcacatctgctgcttttttgaaggctggctgcacacatggaaacatcgtgaacagaccaaacttcagcttgtcagcttcagatttgttagatatcccaagcttagccagaagcattggaaatagattcatgacccagatctgggtaagtggcgggcggaaaatggcaggcgacgaagctcgaagccatctgaagccggatgacgaagctgaagattga

SEQ ID NO: 20490 - DNA, 1195 bp, Zea mays
  Clone ID: MRT4577_118689C.1
gggtactgccgagacagagcagactgttgccgagacattcaagttgctgccgaagcagaagaaggaaatattgaggaagctgatcccgatgatgattaccatattgccgtgccaagcaagcccagccacttggacttcggaaagtcgactgtctctaaggctgatctctccaagatggtgaagtcgggttatttcagtgagaatgacaagaagctacttcacttcgggggggaagaaactaccccgaagccagaaaaggatgaaatagtcatttttaagagcttcctaaaagctgggttgagatttcccttaaataggatgatctctgatgtgctgcaaagatttggcatctattttcaccaactgactcccatcgcgattgttaggctcagcgtctatatctgggctctccgaagccaggcggtggagcgatttgccgacagcttctgtcgagttcatgagctgcattaccaaactaaagccagaaaagatggattgcatgaaaattttggttgctataattttgcttatcggaaaaccatgaagtttcccgtgatcagctaccgaagcaaatggtcggcaggctggaaatcagaatggttttatgtcaaggttgacgaagacaaggagaagctggtgcaaagtccactcgagctaaccttcggagaaacccgaccccatgcaacatgacaccagagggtcaaactcaacgggcaatggatgaattcagaatcattgcagagcatattggtaccagggatctggttcaagaattcttagcattcaaagtcttccctactctgaaaaaatgggaaatgccaaagttaaagggggagaagaaggaaggggatcttgtccggcttccttaccacttcaaattcaagaaatattttaagaagccctgccaagagtggctggatacagttgaggtgatgtgtaatgaaattcttggaaattattcgaaaaaagaagatcaactgatgacagcagccttcggcacccgtccgaagcgaaggctgaaccgagtgcttgatgcactgggtttcgaatatcctgattatgcgcagctgaacaagggtgctgagggccagagaagaaaaagagcggccgaagctttaaacaaggatgaagaccaccccccaaaaaaaaaaaaaaaaaaaaaaaaaaaaaagtactctgcgttgttaccactgct

SEQ ID NO: 20491 - DNA, 387 bp, Zea mays
  Clone ID: MRT4577_11868C.1
gcaaggtcgccaacttcagcggcgtggaggaaccccacctgtcctcctcggagaagttcgacatctaccgcaaggcctttgtgctgtaaacctcctctgcatcggccattgcaaactactgccgtctggactctttaaattgccgtgtcgggataataaaccagacggggcctatgtgtcaacaatgtgtctttgtgtcatcagtcacccgaggagaatatttgtgtttatgcacacgccaacaatggctccttgctactaaacctttatggcacattgtaataaggctattgtatctcttctacatgactctaaaataaactaagtgttatggtggtaattaatatcactttcaaaaaaaaaacgggggagcgctcgcgatctaga

SEQ ID NO: 20492 - DNA, 482 bp, Zea mays
  Clone ID: MRT4577_118690C.1
tcgctgcacgcgtcttttgcttggtcctctagacggccgtcttttttttctaccccaagacaaccaagaatggggttactcatagtctgctggggcgcgtcatgctcaagactcttgctgaacctggtgccaccaccgttaacctacttccccccgggacggggttagcctctttggcgggaggtcccgtaactcagaacgggcaagcacgcaccctcctttccctaaggacaggtcaaagtgcacgtggcgtgggaacatactggcgtacggtgacaagctaacgactccagcgcgcgccaaacccgatccacctcctgaacgcgctaagctaggaggattacggagcgaggagctgatactaaaggcggggagctacctgagagtgtcgaccgcgaagcgagtggagtctggtgcggtacagatgcacgcaagggcgcgacagagttaagctcatgtttcacgtggtgcacgacgcgtac

SEQ ID NO: 20493 - DNA, 2865 bp, Zea mays
  Clone ID: MRT4577_118691C.1
atggccagagtgcgctctactgctagagttgagcgtgagggagacgaagccgaaggtgcggagactgttcctatctccgaagcaatgcaacgatccggattggtgacctcggaaagaatccccactgccgaaacagaacaagctgctaccgaagcggaacaaggagatattgaggaagctgattctgacggtgattaccatatcgcagtaccgagcaagcctagccatttggacttcggaaagtcgactatctccaaggctgatttttccaaaatggtgaagtcgggctatttcagtgaagatgagaagaagctgattcgcttcgggggagaggaaactaccccgaagccagaaaaggatgaaatagttattttcaagagttttctaaaagctgggttgagatttcctttaaatagaatgatttctgatgtgctgcaaaagtttgggatctattttcaccaactgactcctaacgccattgtcagacttagcgtttatatctgggctctccgaagccaggcggtggagccgtttgacaacagattctatcgagtacatgagctgcattaccagactaaggccagaagggatgggttgcatgaaaattttggttgttataattttgcctatcggaaaaccacaaaatttcctgtgattagctaccgaagcaaatggccggcaggctggaagtcagaatggttttatttcaaagttgacgatgacaaagagaagctggtacagagccctcttgaactgatcttcggagaaaccagaccccgatgcaatatgacagcagaaggtccaacttggaccgcactggctgaattcaaaattattgtagaacacattggcactagagatttagtgcaggaatttctggccttcagagtatttccaactataaaggagtggactatgccgaagcttaaaggagaaaagaaagagggggagcttgtccgactaccctattattgtaagtttaagaaatattttaaagcaccctgccaagaatggctcgatacaatcgaagtaatgagtaatgaaattcttggaaattactccaaaaaagaggaccagctgatgacagcagccttcggcactcggccgaagcgaaggctgaacagggtgcttgatgctataggatttgaatatgctgattatggtcgactgggcggagatgctggaggcccgaagcgaaaaagaattgccagcgctgctgacgaagaggtcgccaaggtagccaaaaagaaaagggaagattctgaaaaacttagccttgaagagttgaaccctgagccgaaggtggccactgcaagaaagaggaaaactgcatctccagaatcaaaaatgttggttcgagaagaaggtactcctgcaacgccttctgctgttgaagtagaagagattatgaaggtaatgactgaacccttgcctgtcaagctaagtccgctggcgctggaactgacgaagttttttcagaaggacaaggcaacttcggcagaagaaggtcctggactgccgaaaaaacgaaggattattcaaatagcagatgtaattcatgggacaccgtcaccgacaccggcatcaagaattgctattgaccagactgccgaaaccgccgaagctgaaggcgccgcagccgaagccaccagagcggaaaccttcgaagctgaaactggcgcagccgaagctgccggggctgaaaccggggccacagaagatccgaacctggaagacacacttgaagttattgataacatactcctaaaaatgactgagaaagaatatgttgtggctgcggcgagcacaactactgaaaagggaaaaaagcaagctaaagacattttggaggaagaagattttgaatttcaagatttacttgggcaagaactgacagacgctgaaaaagcagatcttaaaaaatgtgtcatagcctgcggatataagccaggggctacactgttcggtggggttaacgaaggaaagttgaggtgccttcgaaaccgcagcgaagctaaaattgttagaactctctgcaaaaacattggcttgccgaagctagaaacggacctctgccgttaccaacgacaccatatcgccggaagcttgctttatgctaacttcaagagcatattattaagtaaggttctaaaaatgcaacaagatctcgaagaagagaagaacaaagccgtcattcaagatttggctgaaaaagttgaaaattacgaagctaatctgaaaaagaaagacttcaccatccaggaccttgaaatcatggttaaagagcacgagggtgcattagaaaagaaagattttgttattcagactatggagggttctttggctgaatcagaaaaatttgagcaagaaaagaaatatcttgaagcaagcctgaaaactgaggtggataaaaattcaaatttgcagaaatcctttaaagaacttcaagagaaatgcctaagcttcggcagtcgatgcgtacaacggctgaaggatgtgtttcattctatcggagctagctctgaaaagtttacaccttcagctgacaacttgcccagtacactagaatatattgaaggcgaagttgatgctcttgacgaagttattggtggacacgccgacttctacgccctggtagcttctcagggcacagctactgcttttctgaaggctggctgcacgcatggaaatattgtgaatagaccaaacttcagcttgtcagcatcagatctgatagatatcccaagcctggcccgaagcattggaaatagattcatgacccagatctgggtaagtggcgggcgaaaaatggcaggtgacgaagctcgaagtcatcttaagccggatgacgaagctgaagcttga

SEQ ID NO: 20494 - DNA, 675 bp, Zea mays
  Clone ID: MRT4577_118692C.1
atggccagagtgcgctctaccgctagggttgagcgtgagggaggcgaagctgaaggatcggagagtgttcccatctccgaagcgatgcaacgatctggactggtgacctcggaaggaatccgtactgccgagacagagcagactgttgccgagacagaacaagttgctgccgaagcagaagaaggaaatattgaggaagatgatcccgatgatgattaccatattgccgtgccaagcaagcccagccacttggacttcggaaagtcgactgtctctaaggctgatctctccaagatggtgaagtcgggttacttcagtgagaatgagaagaagctacttcgcttcgggggggaagaaactaccccgaagccagaaaaggatgaaatagtcattttcaagagcttcctaaaggctgggttaagatttcccttaaataggatgatctctgacgtgctacaaagatttggcatctattttcaccaactgacgcccaacgcgattgtcaggctcagcgtctatatctgggctctccgaagccaggcggtggagccatttgccgacagcttctgtcgagttcatgagctgcattaccaaacaaaagccagaaaagatggattgcatgaaaattttggtactataactttgcttatcggaaaaccacgaagtttcccgtga

SEQ ID NO: 20495 - DNA, 321 bp, Zea mays
  Clone ID: MRT4577_118693C.1
gggtccgaaaaaaaaatgggccgaatctccttctatgggttcttttccgaccgggaaggaggggcccctggggctccctacccaaattttggccaggggttaaccaaaaggggcaagagccttatttgccccggcccttctatggggcgcttcctttttgggggggggcccccccccccctttgggggcatctactaattcggaacttaattggaaaggcatttttcgccccggcccctttggggagggttttaataaccaacggaggggaggggcccttccttggttaaaacccatttcaaacgggactttccgggggga

SEQ ID NO: 20496 - DNA, 354 bp, Zea mays
  Clone ID: MRT4577_118694C.1
gcgtgcgcgaactcgggatcggggtggaggaacctgctctgagtttccgtggggccaagagggtccggtgctcgagctgggtcctccagagctggccggtgaacacgcggcagctctactggcgcgtgaagacctgccaggatcagactggccagactaggggacccctggggaacgtctgcagagatccgccagcactgcgtgtccggcaaacaccaacgtggatctcgcctgtgtttgagtagacatgaccagtcacacgatccattacaccagtttcactgagtgtaataatgaatctactatcaaacataaacacctccaaaaaaagaaaacacagggcggacaccgact

SEQ ID NO: 20497 - DNA, 2742 bp, Zea mays
  Clone ID: MRT4577_118695C.1
atggccagagttcgctctacagctagggttgagcgtgagggggacgaaactgaagcttcggagactgtgcccatctccgaagcgatgcagcgctccggactggtgactacggaagaaatgcctgctgccgaagcaaacccgacagctgccgaaggagaagggaacattgaagaaaccgactccgaagatgactaccgtattgccatgcccagcaaacccagccacctagacttcggaaaatcgactgtttcaaaggttgatctcgccaagatggtgaaagcaggttttttcagtgaagatcagaagaagctacttcgcttcgggggagaagagaccaccccgaagccagagaaggacgaggttgtcatcttcaaaagctttttaaaggctgggctaagattccctgttcacgagattgttgcggagatattgaagaggtttggcatctaccttcaccagttaactcctaacgctatcgttaggcttagcgtttatatttgggccctccgaagccaagcagtggagccttttgctgacagtttctgtcgagttcatgaattgcattatcaaacaaaggccagaaaagatgggcttcatgaaaacttcggttgctacaattttgcctaccggaaaaccgcaaagtttcctgtaattagctaccgaagcaaatggccggcaggctggaaatcagaatggttctatgtcaaggttgatgaggacaaggagaagcttgtgcaaagtccactcgagctaactttcggagaaacccgaccccactgcaacatgacaccagagggtcaaactcaacgggcaatggatgaattcagaatcattgcagagcatattggtaccagggatctggttcaagaattcttagcattcaaagttttccctactctgaaaaaatgggaaatgccaaagttaaagggggagaagaaggaaggggatcttgtccggcttccttaccacttcaaattcaagaaatattttaagaagccctgccaagagtggctggacacagttgaggtgatgtgtaatgaaattcttggaaattattcgaaaaaagaagatcaactgatgacagcagccttcggtacccgtccgaagcgaaggctgaaccgagtgcttgatgcactgggcttcgaatatcctgactatgcgcagctgaacaaggatgctgagggccagagaagaaaaagagaggccgaagctttaaacaaggatgaagaacaaccaccaaaaaagaagaaaattgtcaagagaaaaatatcaactccaaagcgaaaactatccgaaggagaggggacccccacaccaccttctaccagcgacgtggaggaaattctaaaggtaatgactgaacccatgcccacgaagctaagtccattagggcctcgactgacgaagctttttcaaaaggtggcggagccggaaaaaacgaagataaccaaagcaaaaaggcaaagaattattgccgtaacagaagttattgacaagacgccaccgagagcatcaattcagaaaacagcagctgctgaagacacaacaaacgtcgaagtcgcaccttcggaggtcgcggctaccgaagccgctacagccgaagatgtgaacttagagactaccattgagaatatcgacaaaattttagaagacatggctgcagaagaagctgccgctgctgctaaaaaagtcatggccgcagtgcctgagaaggggaaagaaatagccgaagtcgcttcggacgacgaagcctacacatttcaaaatttaattgggcaaaaactttcggaggacgaaatagaagagctaaaagactatgccaaatcttgcggatacaggccaggagctcttctattcggaggtgtggacgatgaaaaattaggctgcattcgagaccaaaccggagctaaggtcatcggtactctgtcaaagagtatcggttttccgaagctagagatagatatcagccgctaccgacgacagcatatcgtcggcagcttattttattccaatttcaagagcatgctactgagcaaagctctgaagatgcagcaggatttagaggacaaaaaacacgaagctataattggaaatttggagagcaaaataaaagaacaatcagtcatcattgaaaagaaagacttcgaacttcaatcaaccgaaggcttgctggcagagaccgaagctaaaatatcagaattgaattcgaagcttatcggtcaatcaaaacagtttgaacaagaaaagctagagcttaattctaaacttgaagccgaagtccaagccaactcaaatttgaagaaatcattaacaagccttcaggataaatgtttgaattttagcaacaattgtatccaacaactaaagaagatcttttactcagttggagccagcagcgggaaatttaccccttcggatgaagatttaccaaaagccttcgatcatatcgaagctgaaattgaagaacttgacgaagttatagctgggcacggtgacttctgtgcctgggtagcttctcggggtactgctgcagcattcctgaaggctggctgcgagcatggaaagatcgtcaacaggcccaacttcaccctgtctccatcaatcctggacgatatacctgacctcgcccgaagtatctcaaatagatttataaaaatgatatggacaaaaggcgggcgggagaaggctggagacgaagctcgaagtcatcttgaaccagatgacgaagctgaaggtgattaa

SEQ ID NO: 20498 - DNA, 209 bp, Zea mays
  Clone ID: MRT4577_118696C.1
aaaaaaaaaaaaaaaaaaaaaaaaaaaaaataaaaaaaaaaaaaaaaaaaaaacaagctagggtacacataaataacggcacgagatctattatataataatacaatacatacaattcattgatacgggttagataatgtattgactgacaaaacttttgtcgacctgaactctataacaacgagcagatcgtcaactccatagctttc

SEQ ID NO: 20499 - DNA, 511 bp, Zea mays
  Clone ID: MRT4577_118697C.1
gattgctttgcatgggacggggaatggggaaatggttgctggtggggggtctctcggtctcggtggcacagaggttattcacccccgacagtagccctcgagcctctagagaagtcgggcgcacctttggaggtttgttttaacgatgacgcttttggcccttattgaggacgtgtgagtggactcaatgagtctagcccttcgggcctctaaagggaccatgggttcgttcggaaggtccttcgtttgggatgtggtacacgttcccgcctaaggatgttctgtgatcacgctttcgatcttgttttgcgatgtcggcttttgagccttcgctcgtgtggatcgatcatagagtcgatgtgactctttcttcgtcatttctttcgtgtctcggtcgctggagacggggggttgtaccacgcctccactttgccttgattgtatggtagtgcaaacgagttcattcgagtgatgactcttaaaaggaaaatggatcttgacccatttgatt

SEQ ID NO: 20500 - DNA, 475 bp, Zea mays
  unsure (1)..(475): unsure at all n locations
  Clone ID: MRT4577_118698C.1
ataaacgtcagatcttgaccgaaaaaaagagtgagattgtagtcatcaggcgtcaggtgccttggattttgatcggttgagactgtgatcgtgaggtgttagatttcagttgagcacgtttcgttcacttttcttggtgatctacttaacctgctcagttgagactgtttttccccctcgcatatggtgtcctggtcatcttttacatcaataggccggtggcaatttcggttgccgaaatggacgttgagtatgagttttcaattgtagattatccactgctgcgttgagcatctngggtgggttttgcaccttttgatgtagcaggagggttttgtttcaattctgtacttatgggagagnaggtttttggtttcaaatttgcagtatgagcaagcgacaatgtacttattctgtacaattttagacggtgtgttatttctgtaaactgagacccctaaagattgtttataat

SEQ ID NO: 20501 - DNA, 140 bp, Zea mays
  Clone ID: MRT4577_118699C.1
ccgagcacaagtcgactcggtagctgcagacggactccggggccgccgaggccttgacgtgctgactgctgatgctctagggctctgcatctgctgacatgaggacagttgctataagctagatcagtctagactggtgt

SEQ ID NO: 20502 - DNA, 265 bp, Zea mays
  Clone ID: MRT4577_11869C.1
cccacgcgttcgctgctgtagaatgatcctaggtgcctgaaccacaggtttgccgccgggatcttcatgcacagggtcctgtattggtgaactggccataccttcaatggcgttgactggatatatggtgtagacgacgagctgctcgatgcgcgatagctgcccgagagaatgcacgctgcccaaaaagatcgcgaagaagatactgcagaggcaccaaataaccggctacacatgtatgtgctaggatataacgcaggactca

SEQ ID NO: 20503 - DNA, 503 bp, Zea mays
  Clone ID: MRT4577_1186C.1
tcaagcgggcgcccgggcaggtgctttttttttttttctttgttttttttttttcttttattgtttatttttttttttcattttatcatcattgtttaccattatatgattcaaacttgaggctcccccacttttataaaagtgttgctaacaccccctgggggcccatgctcaaacaactgggatggacttctttatttatgggtgggaccaatactagctccaaaaagcttaaaacccagattcccaccaattacgctttaaaagggggccccaccaaggatcgtacctttgtcaggagggtggtgggatcaataaacaaagctggacaaagggcaacaattgtggacaaatccaaaagggttccggggttaacccaaaactgcttgcaaaaaggcaaaaactgttgctggggcaaaaaggaagcaccacttgctgcaactagctcgttaaagggcaaaagaattggctgctgaaaacaaacaggggggttcagggcggcc

SEQ ID NO: 20504 - DNA, 394 bp, Zea mays
  Clone ID: MRT4577_118700C.1
cccagcaaaaaaaacatcattaggcagggtataactggggtcaaaaacacccataacttttaaaaagggcccaggtaaacccgggaagcaaacccagggccgggggatagatttgtcggccccccaaaacatccagaccgcatggtcggcccaaaaattatggtcccaaaacactggggaggctttaaaacgcaggcccccgatgcccccaaaaaaaaaaccgggggggggggttaattaaaacacatcccgtccataatattaacagaccgggggcccccctctaaggaagcttcgggggccgaaaagggcatttaagcaacagactcgggcaggaggctgctcccacagggggcttccgggctacccaggcgtgagcccatgaccccggcct

SEQ ID NO: 20505 - DNA, 226 bp, Zea mays
  Clone ID: MRT4577_118701C.1
gtgtacaaaagggaatggggggatttattactggttgggcccgatgttccacaccaaaaaaaaaaaacgccagctctcctaacaaacgagagctccaataacaaacgacagggggggggaacctctctcttccagggataacataaagagatcgtcgggggggggggggtccaaccccccggggaaagagaggggggggaaataaaaaaagagcccgaggttgccc

SEQ ID NO: 20506 - DNA, 540 bp, Zea mays
  Clone ID: MRT4577_118702C.1
gatttaggcacatcgtacatgttcttgtcatattaagtgtcacctatgctcaagagttggtagtgtagataattttctctatgcaaatgcaattgttagagaccgcatttattctatgatggtattttttagtaccaacaatggacaaggaccccatcgaaatggtagagagcacagtgtgagtgatccagggaagccttgatatcattcgcagcctggtcactaatggtgttgtgaatgtaacccacctcagtctatctattcccttaagaccacattgtttcaaataatagatgtgtgtgacatgcttgacaagtgtgtcgtctccatgatttttttgctaaagctaagagggaagaagttattcaagcttaggatacatccaccacaacagatgaagccacagatgaaggtgcgagcagtgaaggtgcgagccgaagttggtaacttcgacaatggagaaaagcttcgagcgcaagccagcgaaggagaagaagtcaaaacttgcgcagaataatagaaagggaaaagacgacaatg

SEQ ID NO: 20507 - DNA, 450 bp, Zea mays
  unsure (1)..(450): unsure at all n locations
  Clone ID: MRT4577_118703C.1
cggacgcgtggggtcaactcgatcgatccatcgcatctctgccttgtattttggatgtcgatccgtgtggactgttacaaaatattacatatgtgaccaatccaaggggtgcgacagttttccccaagggacacaccccttgggatacaccccttcacttgtatataagtgtaatgatctatggaatacaatcactgttctctgcctctctctttgttaccactgagtaaacttgagtatacttcaacacgttatcagcactgcttgcgagatcagagaaaaagacttgtgctaagttccttgttcagatgaacgtggacttggatcgctacagcatgcaacaacggattttcttaaaacanatcgctcataagttggagaaaggtgatggtatggaaactactcttnctctccgcttttcgctgtctgctgtctgcgtgtaattttata

SEQ ID NO: 20508 - DNA, 711 bp, Zea mays
  Clone ID: MRT4577_118704C.1
gactatccaagaccaaccaacccacttctgactgaccactgtgccgcgccgtggtcaccggacggacacacagaacgacgatggtcgcgtcggcgctgcaccagaccaccagcttcctcgggcaggccctggtcgcccgcgccgccgggagggatgccgagcaagctttgcccatgagcccaaagaagatcctgctgcttatcgtcgcacctacatcgtcttcgtctcgccacccgtgaatgccgacgccatgagccgaagcgcgcatcgccagtggcacgagagcttcctgcctaccaccaccgagcagctgacggatgagtctgggtccaccggcgacacgcgcctggtgggctcgtacacggcagtcttccatgggttcgccgcccggctcaccgaagccgagctttcggcggtggcgaagcagccgggcttcctacgcgcgctccccgaccgcaagctggagctcttcaccacgcgcacgcgtcgttcctcgggcttagcagggacgagcaccggttctggagcgacgccggctacggcagcggagtcgtcatcggcgttgtggactcggggatcgacggcaagcatgtctctttccgcgacgacggggtcccggagccaccagccaggtggaacggggcctgcacaggctctgaagaaaacaccggccggtgcactcgcaagctcgtcggatccaagtccttcgtc

SEQ ID NO: 20509 - DNA, 441 bp, Zea mays
  Clone ID: MRT4577_118705C.1
cagatacttactctacagcaaagaatgagtttctacgctgtgaactcgatagtaccctagaggaagagctcatttgactcactgccatacatccactatatagaccgcatcgacagttgtgccatatcaattaataacgcacacgccgtaactaatgaaatcattgcgcatcacttgaatgcgactaccactacattccaataaatgactaatagaaccatatttgcactggaataagtcattgctactctaatgcacgactacttaacaataggattcaccacagatactaatctgtctcactatagccgcaacaacggcctactcattcacatccaccgacccatgcactcacatattgatagacatacaaatcatgacttgcatatccgtggattatctaaagcatagctgatgtctgagagagatcatatgcactac

SEQ ID NO: 20510 - DNA, 166 bp, Zea mays
  Clone ID: MRT4577_118706C.1
aacacaacaatgcattgcaacgtacacgagatacaagactcgtacaaagtatccaaaacccactgaaaaatatctgcttacaccaaatgctgaaagctccagcgggagcaataatgcctgataacatcacaatcaaaagagacgaggtttatgatgagctgttcct

SEQ ID NO: 20511 - DNA, 362 bp, Zea mays
  Clone ID: MRT4577_118707C.1
gtgtggcgtcacttttgagggattttttgggtctgacaaggatcagcgctgggatgggcctcgcgcttcccttcggttcatggaggaggttctgctcacccttaacccgttccggttcaaggccgtctgggcgggggccactggccccaaattcttctgaggccctatgaaatcctactcccgcccggctttatataatacccgggccgccccccctttcccgacttcctttttttctcagatagtgacatccggtttttcgagaggcacccctcctcccctgcgaatcgagagcccctatggccgcaagcccgtaaccataagtcctcctcctcttttcgagggcccgccgcccgcgcccc

SEQ ID NO: 20512 - DNA, 369 bp, Zea mays
  Clone ID: MRT4577_118708C.1
gaggcgcgtagacgaactcgtcggcgcacttctgccgtatgctaaagcgtcagcagcgaggtcatgtttgcaagatgagatgcctaacatcatagaggtcatggatgacagaaacgggggcccatgagcgcacggtcgatggctcaacgggcggcgctgtataagcaacagcaactcctgacggagaacatgagcttgcatccatctcgtgtaaagagaacatcgtcaaggagatccagcgagcagatgcaactgagaactggaaagcgaacgcgaaccctgaggaaccataccattaaaccgacttgatcttcggaaaactcaaggagggaactagcgtggtctctggagaaccatttccaaaagatg

SEQ ID NO: 20513 - DNA, 848 bp, Zea mays
  Clone ID: MRT4577_118709C.1
acggcagtagcagccagcctcctcacgcacgccaggcagggcattcttcttccccgcgcgcagaggctccttgcagccatctccctctctccttccacatcctagccaactccagccccttggtcacgcgctccctctcccaggtctgagctcaagcggttgacgcccaggctggagaccgaactcgcctctgccctggctgcgttggtggccgaagttctcgtcgttggtggagatctcggctagtcctgcaacagctcctcccatggccgcctccctggcgcacctcgccagcagcagggagtgtccaagtgcaggcgagcagcagctcctcctctcctccattggcgcgcaaccccttccccttggcttcacctccctccgcggcgcccttcttccccaagaaggagcagcggctcccatggccaagagctcaacgccggcctccttcctgtgtcccttgccgcaggagcagtagctcttcctccccatgcttgcgccattccctgctcttgccgtggccgagctcacccctgccaggagctcgccccatttctccctggccgaatgcttcccctgctgctagctctccacccatgacaagccgccctcccggcagcaagctcctctgtcggcgccggcccacagcagcaggaagcctccctgggcgcttgtttccccgacgctcgccccgtcaacagccatcgacctcgcgcagcaacaacaacaccctctgctgtgtcgcgctcgccgggtcgggcctcacgccgtcgttctgcgcagcgtttctgcgtcgtcatcaaaaccatggcccttgtcgacgtcacgcctcgcgcatcgctcgtcgg

SEQ ID NO: 20514 - DNA, 579 bp, Zea mays
  Clone ID: MRT4577_11870C.1
cctcgaggccggccggggagagcctagctgcctaggccccaaccccaaagccgtggagcactggcccatccgcgaccgcgaagacccagctggccccaaagccgtggagcacggccccatccggtcgccggccgccggagacgaagacccagcgccagccgccggagacgtgcgcgccggccccaaagcagtggagacccatccgccgtggagacgtgcgcctccaccgcgccgaccgccgtgcgccacgaagacccatccgccctccagccactgctccatccaagggaggtgagttcccctgccaccgtcgatccactgccaccgcctacgtcgatccaccgccaccgctaagggagcagtgcgctggatcctcgtgcgctggatccaccgccaagggagcagtgcgcttgatttgctaagtatccatcaattgtgtacaatatataattagtactgatacacaattgatttgctacgtacctaagtatcagtacaagggagcttgatatataatgggctatggaattatataccggacacaattgatttgctaaaaaaaaaaaaaaaaaagcgggc

SEQ ID NO: 20515 - DNA, 548 bp, Zea mays
  Clone ID: MRT4577_118710C.1
acgtctgtgctacggtgatggtgcaagtagagggccctcagcctggctagacggtttattcgctttggtacgttgaccccatgctcttaatacaaggactatgggtgcatactgtgacaacacccaaccttttctggaggccttctttatggggaattaaggacatttgtcggtttgggtctattggattaaacatgaactggattctcgataatagagctcccattataacccaatctttactcttacaatatacgaggctctttccgaggaaatgtgtgcttgacccctatttgaacattgcaggtcaagacacccacccttgtttctcaccatgagacactcaccttcgatgagagcgagactatagcagaccaacgaggagcatctctataaagcactttgcgtgtggtgccttattccctcttcttgcgggattgaggagatactgattctgctcaccatccaacacagcggaaagtaaacttatgctcccttatcaagaagaaccaccagagtgtgacatgcctctgcgtctcaaccaccat

SEQ ID NO: 20516 - DNA, 431 bp, Zea mays
  unsure (1)..(431): unsure at all n locations
  Clone ID: MRT4577_118711C.1
cttctcttgtctgtccctgctttggtcttgttctctttttcggttttccgcgttccagctttggcttctctcttggggggcgggttccttgttggcttttgttcctccccggccggctgttggttggtccaacttgtcgtcctctgctgattcccgttaacactaggttttgcttgaaagtgtttgtcctcttgctcccgctaactgggtgtatatgcaccctctgctgttctccacttgttgctcagtttgtttctttggggcgccgggacctctcgttgcccaccgccgnggcggactgttcttcctggcgtggctctgctgctgacctcctgtgtctacgtgtcttccccggctccttctggcctgtcgtccattcttttccactctcttgaattcctggcctttggtcgtcccctgtctgtggcaat

SEQ ID NO: 20517 - DNA, 459 bp, Zea mays
  Clone ID: MRT4577_118712C.1
ggctcttcaaggtaataaagttgggaagaaaatatccaaactcctttctcttactacgtgtgggatcacatcaaggcaccttctgtgtgtaatgggcgcaccattggaaagactctcgtttgcagtacacaaggtaccaggattggttctgagggtgggaagggcatattatttgaagttttgctacctgatctgcatggcgacctggatcaagctcacatgcatatcatgctcacgagctgatagatgtgcattgcacagtatgtgctcacatacttgtgatgtctgaattataccactgataaactgcatatcctatggaataagtagcgaacattaatacctgcccctgcagatgtcacaacaaccctcaactacatgttgcatatgttatccatcgccttaacgaacacgctcccctaccaggtcaacaatacctgctatgctcaggcatctcca

SEQ ID NO: 20518 - DNA, 289 bp, Zea mays
  unsure (1)..(289): unsure at all n locations
  Clone ID: MRT4577_118713C.1
ccccnnaaaaccaacaacaggcggacggagacggaaanacgaggaggaaaggaagcacgnacancacagagccaggagggagggacgccgacggaacaaacaagcagcgaaaaccaaagaacaagagagagagagacagaaaaaagaagccaaaaagaaacggaancacgaggaccccgcaccgaagaaacaacaacggagcagacgcgcgcggagggcgagaaccaccaccagaagccccggcagagacggaacccgccgccccacggccgcggcnggcgccgaaacc

SEQ ID NO: 20519 - DNA, 267 bp, Zea mays
  Clone ID: MRT4577_118714C.1
cgtccagctcctgtggagatctcctatgagaacatgcgttttctgataactcacaaccctaccaatgctactctcaagaatttcacagaggaacttaagaagtatggagtgacgactttggtacgagtttgtgatgctacatatgataaagctccagttgatcaagaatgaatccacgttctagattggccatttgatgatggagttcactccctaatcagatagtagatgattggttaaacctgtctaaaacccaatttcgtgaaa

SEQ ID NO: 20520 - DNA, 860 bp, Zea mays
  unsure (1)..(860): unsure at all n locations
  Clone ID: MRT4577_118715C.1
aattaccctgcatgtgactgtttacatgttatttgtgatgctatagtatctagtccgttatctatagtttagaccagtaagaaatgtaagaaaggaggcagttgattatccttccatggcatggcacaatgtctgaagccgatacttgttacagttataacggaagggaggcaccgggtatgtgtagcctttccgctttgatgagactgttgcgcaaattcgtcgatcctcggagcatcgagacacagacaaacccgatcgaccggtctatcgctctgctacttttccaccagtcatcggaccatgcggctgtggctgtcgacgatgcctcatcacttaaaccccctgctggtagcaaacaccaccagggccctgctgctaaccaaaaccaaggcctgataccagattcatcggtgtattcccctggagatggggcccccaaggatgtacagtccctggacaagttctgaatttatgtccctgctctccatgggcatgttcggttccccgggaatggtcgtctggaacgaatcctggtcggattgtttctctaatttatataagctttgatcagttggaacgattcttgggggaatttcgggataaatgaacaggccctaatgcgtctccgtgacctggttaaggcggcataatctaggcagatgtaaaaaacaagtatattgtgtacccaatagtctgtagcctgttccaatcacattggttttgacatgcttgtatcctatgggtaggcggccgttgtgctctctagtggcgttgactcacatatgtgtaatctaaaaaaaaaattctttctttcaaaaaaaaaaaaaaaaaaaaacncgagaaaaggggcgtgtacc

SEQ ID NO: 20521 - DNA, 516 bp, Zea mays
  Clone ID: MRT4577_118716C.1
cttggaagctggatctttattcccattaattaattattcggggaccccctgacataccccttggggatgaaaaaaattaagcaaacaaatgcagttttggaagcaggggcccccggaggggtttccccatgaggacggggagctgagcgcccccgggggggaaatcaacgcccccctcttccacctttttccaggggaaggcccctacgaggtgggcgacaaaatacccgaggagcaggaaagcgatcctggggcccgggaaaatccttctgccccccccaaagggaatcatcttcatcccctgggggccggggaggtccagggcctcggtttccccgccgggaaggaacccccccggaatgaacactggtggggggccccacggggggtcgcccatgcccaggtcgaacagaatgaagttgatccctgaccccttgggcaccacgtagtcccccccctccacgtcctccctcaccctgggggggggaatctgatgcccccgggggatggccccgg

SEQ ID NO: 20522 - DNA, 377 bp, Zea mays
  Clone ID: MRT4577_118717C.1
gcagtcagcagtcagtatttttaccgtacaccgagcatgacgcgtgcaacgaccaactacattttttatattcaacaatccaaaaaccaaacacggaggacgtatgacaattgtgaatggaatacataatacatatccttgaggctccaagcggcaaaagggatttaaacataaaaaaatgactacttactgctgaaataactgaacacggaaaactcatatcgcattggggttaggggataagcaataaaagctactaacccattacatatgtcacacaccaaaaacgaaaactgaagtctctatgcacaagtaaaaagttaatcgttcttgctccaccaaccaactatgaacgaatcaagaatgaactgggtaat

SEQ ID NO: 20523 - DNA, 2138 bp, Zea mays
  Clone ID: MRT4577_118718C.1
atttactggaagcaaaggcaccacttagattccaattcaccaagcaacattacttatgaggcctatgaagaaaagttcggtccatctagtggttcttttgcacaaaggaatttaaaagtgcagaagaaaactatgaacatgcaaccaacacagccgataaatgataatgtcatgaacagacatcctcaaacattgacaagaagtgcttcttatccttgtgagaacaatgaatctgaaagaagaggattagggaaaagaactctgggggatcctcaagttacaatgggtacttcaatggtagtggatggctcatttgtatcatccatgtcctctgatatctctgttgaagaaagcagctttcgacaactgcagaatgctgttagtcagctggatgtgcaaaccaaattgtgcattagagatggtttataccgattggcacgaagtgcgcagcacaggcaagttattccaaatatgatgagcagcaatgaagacaacccggatataaaggatctgcagaatgcagaaactttgcgcaagtatgatatttctaacaaagatcttatatatacttacacaagcatgaatcagtatctctatggctttgaaaagtgtagtcgttagcattcccctcattgtttaattagaaacttcacattgttgtctaagcgctcctaatgcaccatctttcctctgaaacacccaatgcgatgtgttttgcacagcctgctatctctaaaatatcttggtccttaagatgctagttgattgagggtgaattgggtgtttggttcccctgactaaagtttagtttgtgtcacatcaaatatttaaatatcaattatgagtattaaagataggcttaattaggtttaataaatttgccttgccggttactgtagcatcttatgagtgaatcatagactaggccggccggaaactcatcttaacgtttagtacttagctgtgtaatttattttataattagactacatttaatactttaaacgagtattcaaacatccgatgtgacgaatttagtcccttggatccaaacggccccttaaatatagctcttaatttgagtcacagattaattaacctgcctgttgactgtttacatgttatttgtgatgctatagtatctagtccgttatctatagtttagaacagtaagaaatgtaagaaaggaggcagttgattatccttccatggcatggcacaatgtctgaagccgatacttgttacagtacttataacgcaagggaggcaagaaatatgtgtagcctttcctttttgatgtttctgtttggcaggttcgtcgatcctcggagcatcgagacacagacaaacccgatcgaccggtctatcgctctgctacttttccaccagtcatcggaccatgcggctgtggctgtcgacgatgcctcatcacttaaaccccctgctggtgtatgaccttctgcatcgtacagatccatatgggggctatagccctttgcaagcatgacgatgcatgtttcccccttgcagagcaaacaacaccagggccctgctgctaaccaaaaccaaggcctgatgcctgattcatcggtgtattcccctggagatggggcccccaaggatgtacagtccctggacaagttctgaatttatgtccctgctctccatgacctagttaagggcatgttcggttccccgggaatgggcatgttcggttccccgggaatggtcgttctggaatgaatcctggtcggatttcttcactaatttatataagctttgatcagttggaacgattctcgggaggaatttcaggataaacgaacagggcctaaggcgtctccatgacctggttaaggcggcataatacggcgtccacatgatgtttctaggcatatatgtaaaaaacaagcatattgtgtacccaatagtctgtagcctgttccaatcacattggttttgacatgcttgtatcctattggtaggcggccgttgtgctctctagtggcgttgactcacatatgtgtaatctaaaaaaaaattctttctttccgtggatctctaactatacctttgaagtttgaactgatacgggagtggatggattcgcccaacgatcattatgccatgttgctaag

SEQ ID NO: 20524 - DNA, 1103 bp, Zea mays
  Clone ID: MRT4577_118719C.1
gctggtgtgacacttaagtgcgcaaatgctttgcagaagaaaactgtcaacatacaaccgagacggtcagcaaatgataatgttatgaacacaagcagagcttcttacccttgtgagaactatgaaactgaaagaagaggattagggaaaagaactctgggggatcctcaagttacaatgggtagttcaatggtagtggatggctcatttgtatcatctatgtcctctgataactcagtcgaagaaagcagctttcaacaactgcaggatgctgttagtcaggtatcatgggttactagttttctttttgatttcttttaatttcccatatagcataaactctagcctacagcagggggatccttacgttacggtggtggcttcaatggtagtggatggctcatttgtattatccatgtcctctgattatctctgttgaagaaagcagctttcgacaactgcagaatgctgttagtcagattcgtcgatcctcggagcatcgagacacagacaaacccgatcgagcggtctatcgctctgctacttttccaccagtcatcggaccatgcggctgtggctgtcgacgatgcctcatcacttaaaccccctgctggtagcaaacaccaccagggccctgctgctaaccaaaaccaaggcctgataccagattcatcggtgtattcccctggagatggggcccccaaggatgtacagtccctggacaagttctgaatttatgtccctgctctccatgggcacgttcggttcccggggaatggtcgtctggaacgaatcctggtcgcagtgcttctctaattgatataagctttgatcggttggaacgattcttggtggaatttcgggatcaatgaacggcccctaatgcgtctccgtgcttcggtgacgccggcataatacggcgggaccatggtgtttctccaccctggctaaagccgagttaacttatttatcctatagtatcgtgttaccgttcgcttctgtgcaccgtgttagtgtccgttctacctttggattaggtgttggtacccctgttgttccctttgtttgctcccgctatgaaacgagacgagagaagaatgagc

SEQ ID NO: 20525 - DNA, 207 bp, Zea mays
  unsure (1)..(207): unsure at all n locations
  Clone ID: MRT4577_11871C.1
gccttcgcttcgaagcganaagtcctaatagtagaaganccctccataaacctggagtgactatatggatgcnccccaccctaccacacattcgaagaacccgtatacataaaatctagacaataaaggaaggaatcgaaccccccaaagctggtttcaagccaaccccatggcctccatgactttttcnaatnaagannanaacnt

SEQ ID NO: 20526 - DNA, 657 bp, Zea mays
  unsure (1)..(657): unsure at all n locations
  Clone ID: MRT4577_118720C.1
aaaaaagaaagggataggagaagccgaccgcttcgacgtagcagaggccggcggcggcggccaccaccacgtagtccggcagcggcgcaggtgcgccgcccccctgagccactccccgccatggagtccaacgatggcgcatatccttgatccattggattaatccaccactggaagcagcagcctagtcaccattcctactctgacatcccctcaacgtgaagctggtgagataccagtatcacaggctgagcccatgaatatagaatcagttgtcatagaggaagacagcgaagaagatgaagcaaaagcggaagaaaatgaagcagaagaagtagtcgttcgtcctaggaggaagttgacatctcctgtttggaaggagtttaagaaagtaaaagtgatgaacagaatgaaggccaagtgtaactggtgctcaaagaagcttggaggggaaccaagaaatggaacgaagcatctccttgaccatttaaagattgtacatgggaaagaaggtttagagcgcatcacactatagaggcggttccttctgtacttactacaagtcagctcaacttcaacaaataatgatgccgaacacataccaaaggctgtangctgttagcttgctacctctgcaatacttttgcgcatgatcat

SEQ ID NO: 20527 - DNA, 2551 bp, Zea mays
  Clone ID: MRT4577_118721C.1
aaacatttctttccttttttttctctctctcttatccgagaaaaaaattcgttctgctaatttcggagctcaagacgctcgccccatctctcctctcgtcgtctctctcataattcctcacgaggaaaaaacgaaaaaaaaaaatactcctgctgtttgctagagcgagtgaaaaaaaaagaatagtctcagaaccatctagagacagcggcccgtggagcggacagctgagcgagcaagcctgcgccgccgccggcgtcctcccgaagtagaagctgttctgatccacagctctcgattccggaaggagttggtcaagaactggggatcctgagttgaatatgatatcaaatccggtggactggtatagtttcggacccggatagaattggtagggatgccagattggagggtgcgtgagtttgaaggtaaattcactgatgagtttgcccacagtaacaacaacaaacatgaaagtggagttgaggctcctggtgtcactagtagtaagaagttgaagcatacagttgccggtgagaaaattcaaggtgtcatccctggaataaatagctcagatccacagaaatgtaattcagagaacatccaacatgagaacaggatagtatcccagaatataaacagtgctggtgactgcattggagactgcaaagacagctccaacgccttctcttcaagggaagaaaatacaatcgctgaaaccagatgtccaacggatgactggaactcctgtcagtttgcactgagcaatggttcatccattctcaataaccacagtgctccacaggatagcctcacttatggagataatgatctaaactacattgattggcctggcattgacaattttgaggatgttgacacattattcaggagatctgatttcacatatgatccgcagcagctggagaatacagatgggttatcttggcttccttcttcagatgctgtttactcttctgatgttgctttgcagcaagggtttgactcgtcttattccgattatgatattctggatgatctctcagcattccaatgtgcagaagataaatcactaccctcagttggtccttcatcggatttatgtgataatcaattcaatgatacctatctgttcagtgagcagaagaatgcgaatgcatatggtgaacagatataccaagaggatgtgatggagttgttgcccactgaccagatatgcagtggacatgaaaacattgatatgttgcagggtggaaaccagtattcatctgaacatacaattcaaggtattgaagacaagaaattttctatagcatcaacttctcagctgagctcctctcagaatttactgaagcaaaggcaccacttagattccaattcaccaagcaacattacttatgaggcctatgaagaaaagttcggtccatctagtggttcttttgcacaaaggaatttaaaagtgcagaagaaaactatgaacatgcaaccaacacagccgataaatgataatgtcatgaacagacatcctcaaacattgacaagaagtgcttcttatccttgtgagaacaatgaatctgaaagaagaggattagggaaaagaactctgggggatcctcaagttacaatgggtacttcaatggtagtggatggctcatttgtatcatccatgtcctctgatatctctgttgaagaaagcagctttcgacaactgcagaatgctgttagtcagctggatgtgcaaaccaaattgtgcattagagatggtttataccgattggcacgaagtgcgcagcacaggcaagttattccaaatatgatgagcagcaatgaagacaacccggatataaaggatctgcagaatgcagaaactttgcgcaaattcgtcgatcctcggagcatcgagacacagacaaacccgatcgaccggtctatcgctctgctacttttccaccagtcatcggaccatgcggctgtggctgtcgacgatgcctcatcacttaaaccccctgctggtagcaaacaccaccagggccctgctgctaaccaaaaccaaggcctgataccagattcatcggtgtattcccctggagatggggcccccaaggatgtacagtccctggacaagttctgaatttatgtccctgctctccatgggcacgttcggttcccggggaatggtcgtctggaacgaatcctggtcggattgcttctctaattgatataagctttgatcggttggaacgattcttggtggaatttcgggataaatgaacaggccctaatgcgtctccgtgacctggttaaggcggcataatacggctttcacatgatgtttctaggcagatgtaaaaaacaagtatattgtgtacccaatagtctgtagcctgttccaatcacattggttttgacatgcgtgtatcctatgggtaggcggccgttgtgctctctagtggcgttgactcacatctgtgtaatctaaaaaaaattctttctttccaaaaaaaaaaaaaaaaacctttgaactgatatacgggagtggatggattcggcc

SEQ ID NO: 20528 - DNA, 479 bp, Zea mays
  unsure (1)..(479): unsure at all n locations
  Clone ID: MRT4577_118722C.1
aacagagtcgcaggtgcgagacaatcgacagangcaccgacgctaccgatatagactacgagaacttcgcgctcgagcgcgccggtcccgcgggtctgtctcttgcttcaacagtgtttggacggaacagatccggggactctcttccagcctccgaccgccctccgatttcctctccgcttgcaacctccgggaccatcttctcggccatctcctgcttctgggacctgccagcaccgtttttgtggttagctccttcttgccaaccaaccatgagctcccagattcgtcagaattattccaccgacgtggaggcagccgtcaacagcctggtcaatttgtacctgcaggcctcctacacctacctctctctgggcttctatttcgaccgcgatgatgtggctctggaaggcgtgaccacttcttccgcgaattggccgaggagaagcgcgagggctacgagcgtctgctgcagatgc

SEQ ID NO: 20529 - DNA, 405 bp, Zea mays
  unsure (1)..(405): unsure at all n locations
  Clone ID: MRT4577_118723C.1
gtcgaccccgcgtcctganagctggactttttccttttcccgtgttgtgttcctctcccatgaaagctgcttttcttctgaggctcagtttcaaccctttctatttcacttttccttgagaaacgtactcatgctttgttgcaataattaggccaacgacaatgatggtgccatgcgcccttggcacattgcagagggagtgttaaacagctatggtgaatggctggttttcataaatgatgatgatcaatatatgtatttttgcacaaaaaaaaaaaaaaaaaaaaaaaaaaccaaaaaaaaaaaaaaaaaaaaaaaaaaaaaaaaaaaaaaaagaanaaagaaaaaaaaagaaacaaaaaaaaaggaaaagnaaagaggaaagaggaggggtttatngttaag

SEQ ID NO: 20530 - DNA, 470 bp, Zea mays
  Clone ID: MRT4577_118724C.1
ctgtgcggcgctcgaggcggccgtttcggatccttcagaattcaggcgaccatctgcctcaaccataatcatcctcattcctcaaccagcggccggccgtcgaccgagccgcccgagtagccgagcagcgcgagcagcggtgcgatggctgcctgctcgcgccctccttctcggcttcactggctgctggtcatcgaccctgatgccgagtcgccgagcgccgcagcgtgccctcgccccgtccctcgtcggctcgcggttgcgccactgcgccagcgcggtcgcgccgccccaccctggtgaccccgtccgggtccggcgaccccaaccggccaagggccaaccccaactccccgagggctaaggtccaaccggccaaggcacaaccgcacaaagcagtgagggactgagggtgattattttttatttggatagaaataaaataacgtgcctaatctaatagatttttg

SEQ ID NO: 20531 - DNA, 488 bp, Zea mays
  unsure (1)..(488): unsure at all n locations
  Clone ID: MRT4577_118725C.1
gtgggtggggtttttttttttttacatattgcggcaaaaagaccagatgaccgtaaaccaacattgattagatacatataaaattcctgtgtaaaatgatgcacatatgcacatgcccatgttttattatacagcgagtgcctatttctgtgggggggcggaggcttttattagcagacagttttattgcaagctgcctccagacattcaacttctatgagaaacaactgggcctctttagttttttccttcatttacttaatgcatggggctacaaatggggcctatggttggttgagtttgggccttggtgcctttaatagcgactattctaaactggaaatactgaatccggttcatgatcaacttagaacaaaaccagcttntgaatttattgcgtacaatagatggggttgcatatgctttttggttttatggggggggtggtttagaaggtttatgcaggtaggtgatgttgggaagtggtt

SEQ ID NO: 20532 - DNA, 484 bp, Zea mays
  unsure (1)..(484): unsure at all n locations
  Clone ID: MRT4577_118726C.1
cagcaaacacgcatggcgagcacccatggccttctccagcttcccggcaggcaggacgtgccgcgctctcttcggcgaggcccgcgtgacgatgccagaggggcaagcaaagccggcggcagctccggcagcccgggtacggcccgccgtgctctacctgggcccgtgccggcgcgcccccgactacctgacgcgagttcccgggcgactacgtgggacaccggggctgcggcggacccgaacttcgccaagaaccgggagctggaggtcatccactcccgtgggccatgctgggcgcgtgggctgcgtgttcccggagctgtcccccaacggcgtaagtcggcaggccggtggtaaggccggtcgcaacttcacgagggtggctggactacctcngaacccaccgaccaccgcaacatctccattggcctgcagtcggctcatggcccatcgagggtaccggtcgcgcggccgtcgagagtcg

SEQ ID NO: 20533 - DNA, 450 bp, Zea mays
  unsure (1)..(450): unsure at all n locations
  Clone ID: MRT4577_118727C.1
ggaggggcagcgggggcatttttttcccgacattaataaacgtacaaagtttgcgggttagcaaaggtaaaaaaaacccgccccccccatttaaaacccgatggccagactaggcgacctcctcctttttgttttcgccagggttttcctccaaagggggcatgtggggggtgggcctccggagcctggtcctggtggatgctgaggcccattttgagcatgcgggggatgcggccgccaaaggggttggnggtcgtaaaggttgaaccccggggggagcagggccgtttaaaacaaaagcatgacagggtccttgacagactttggcgtttttgggggcctccgggcgcttgggcagttcctcatgatgggcgttgcccgggtttgatctccatggtcttttggggggacatgtacccaaacatgctcgagtccctgagggccggggcc

SEQ ID NO: 20534 - DNA, 177 bp, Zea mays
  Clone ID: MRT4577_118728C.1
ggacccaggcaaagaactaacaattttcattcactgagattgacacagtacgtggggggggggataggggaggagctactgctacgggggttatagagatggctcgccgccttcggcgctgggggccacctgccgagcgccaaggctggagcggaggatctcgtcaaaccgcggggc

SEQ ID NO: 20535 - DNA, 500 bp, Zea mays
  Clone ID: MRT4577_118729C.1
atctataactatttccttttttttttttttttttttttttgaacaaaacgcggaaggggcttaaccaattctatgatctaactgacgggcacatgaacgcacaaaacacatgagccagacctggtctaggcaaacgctgtaactaaagggggcagccctgtctaaaaaagaaaaagaaacacatccttcaaggggatctaaaaggggaggtggcctttattggaacctaaatggcgccctgaaaccacctcttgaataatgacatgccacactataaatatgcagcccccgcggataaaactgcggccaccgaagagcaggtgatggcctgccttttttgggcacggccagccgctgaccagaaacaccctgcatgagcaccaagccgtccttaaggaggaggatgtgctcacaacctagaacttgcttacccttgctgatttcaaccttcctttggaggggatcatgacgagtgtagtctgccatccgaactggtatat

SEQ ID NO: 20536 - DNA, 1482 bp, Zea mays
  Clone ID: MRT4577_11872C.1
tacctcgaggccggccggggctgcctccctggaggaagcgcggtagttgccactgccgtcccctccagaggtgcgatacaggtcggagttcggattcagatcgcggccggtgcgaacccacgaaggcacgaacggtagaacccgaccgagcgcggcagcgcaaacctccgatccctgctgcgagcaagggatggcggcggcatgggcagtgctggcggcggtcctcgtcgcggcgcaggtggcgtctgcggcgccggtcacggcgccagcgttcctctgggcgcctaagaactacggattccgctctgatgatgctaaggaggtagtccattatcaaacaatctcaccaaagaacttagctaaatctgttcttgaggaaggtggctggtcaacctttatgtgttcaagggaggatactgagaagcatgttgatgttgccattgtttttattggctcaaagctacaatcatcagacatatcgaaagataagcaagttgatccagctttagcagatacattgaagctctccttcacagaatcagagttttctatggcattcccctacgtttccacatcagacgatgagaaactggaggagtcattgctatcaggcttcactgagaactgtaaaagtggttttggaagaaaccgtatcacctacacagacacgtgcgccgtgagtggccaagatctgaagacgtatcacaacatggatgctatcaatgacttggtagtgtcaggaagaaccaacccgagtggacagactgatgtaatcgtcttctgcagcggcgggttcgagaagttaggcaccacggaatcggaaggggagctgctttcccagcttgtcgacttgctgaagctgtctggggctagacacacgattctctacgcttcccagccatctggttatctactggagaacccttccggctcgccagtggctaggcaccttgcggagaggactaacggtacaaaaactggcctactgagcaaatgtgacggagagtgcctagtcaaatcaactcttcttgaaggaacctttgtcggaatagtgctccttatcatcttgatatcagggctcatgtgtatgatgggaatcgatactccctccaagtttgaagctccccaggagtcttgatctcccttcgaagcagaacccttgttttgttggtctgcactgtggatagatattattcagtttccccctttgaaagcgcctttcgtataattattattatttttttactgagccatctgttatttacgatgtgctcaaacttttgacaccaaacgaatgcatgtgtgtgaggcttgtgctgtgaccagacatagcattgcctccaggtgttttctgtgaataacctggaatttcaggtgggtactgtgcatcaaataaaaaagatgaaatcttgctgttgcaaaaaaaaaaaaaaaaaggggggggggggggggggggtactcgaggggggggcccgggtaccc

SEQ ID NO: 20537 - DNA, 329 bp, Zea mays
  Clone ID: MRT4577_118730C.1
gcgagggccccaaccagagctggaaggagctggcctgtggggacgaggtctacacaccaaggcggtacgctcctacttcgcctgatcaggctgaaccaggctactgtggataccgtgccgcggctgtagggggctacgcgccgacgcctacggctggcctaatggaaccaggctacggcgggtacccttctacagcagctgcagggggctacgcgcctcctactgcaggtgctcagatggaaccaggctacggactgtaccctactacgccatctgcaaggggctactcgccgacacatacgactgtgcctgtgcaggagcctgactac

SEQ ID NO: 20538 - DNA, 246 bp, Zea mays
  Clone ID: MRT4577_118731C.1
aaaaaaaagctaggtgtttattccagcttctggtttttcacaccgggaagctcaaacaaataaatttgtttaccagacatggaagacatttatgttcatgggttgctcaatgacttgacaatagtttttggccagcaacaagagcacagtcacagtttcaggtcccgacatcatgttttttcaatttttcattgccgaatcacaggggcaacgaaaaaacatttgctctttgctggctgcacaaac

SEQ ID NO: 20539 - DNA, 427 bp, Zea mays
  Clone ID: MRT4577_118733C.1
ggagaaaacaagggcaaaaaggattatgtatgggaggggccatatataaaaaaaactagttaaatgcccgggctttgcaagggcataaaaaatattggacaaaatatcacttaaaaaaccaaaggacctggcataaaggaaaaccagactaatggctccacaaccaaggcatgccaatattaaaggggcagaactcactccgggtggcactaaaaagggggttgggtggggcccttccccctcaagaagccccctggggcttgggataaaaaaaataataatcctgggaattttgggcttaataatgggcctaaccaaacataacttaaaattcctcatctggagaagcctctctagctaggaaaccatgatacaacatggggggaaatcttgtcgctgggggcttctgttacccatgctgaaatga

SEQ ID NO: 20540 - DNA, 547 bp, Zea mays
  Clone ID: MRT4577_118734C.1
ggcagcaaatagttaatcacgctaacattaatggtctttttcatacgggagggcacaatttaaaaaggggtatgggtctgtctttggggggggggggaaaagcctatagatctaaaaggccgttcccgcagcgggaaacaacagggggagggggcatatccaacacaggggggaaaattggctgcagacccgggggaaaaaggcccctatgcttcctaggctatggcagcaagatcatcaaagattccggggggagaggaaaaagaaaaaagaaggggtacaactggggatcgaccaactggggcctttgctaaaaggcggggagacctaaaaggaacggggcagtaatctccacgcggggccggggggtactccgaccttaactccccggtcaaaaagcttttaccctgggagaacttcttctggctggcttcctttttttcattccgctttggggaagcctcatgggtagcaacgatccccctgaggatgggacttggggggaaatccagggggctctccagccggggggggatgcccatagcct

SEQ ID NO: 20541 - DNA, 704 bp, Zea mays
  Clone ID: MRT4577_118735C.1
gacccagcgtccgcccacgcgtccggggacacgcgggtgcaggtgtattctcgtcagtgctgagactgttctcaggggaggatatatgtcaagtcatggacacatcactccttgacagttgtcaaacttaagatgacactgtgagctgttgacaatagtgataccagccactacaacgttgaaactaccataaaacctcaatgcctgcatcaagtttaatctgtggcattctttcaaactccacatcgtactgcatgaaagcatccaaagctggtgtgtctatgccgctatatgccacaatcatgtgagacggaaagaacaagacaaagcagggaacagattgaaacatatgcaaataacactgcatatacgtatggtgcccgtgacaacttttcagcctgtctactgcatatctgtgagaaagtgagagtaaaactgctatggtcataagcaccttcaaacgctcactatcataagctgtggtggatctcgcgaatgaatgcatggtgcactccagcttctaagaattctggcgagagagagcgagagaaaaatacgcattgccaattggaatctcaagatgtcattgggacgacaggtcccctggatggatgtgattgacatcactgagttctcatgcaagtcatgtaaagatcagtttgaaacagagcatgtaagcccaaaccggctaaagggattgcaaa

SEQ ID NO: 20542 - DNA, 463 bp, Zea mays
  Clone ID: MRT4577_118736C.1
tagaaacatgtcactctacttggcgccacggccgccgctgccaccaccaccaccaccaccctcccaaggcagctgctaccagcgccgtccatcgacctaaggcggctggaacgacgtggcatggcgctgcccctgccaccggcgccggcgccgccgccaccgctggtcagtgccaacaacaggcatgccggagcgaagcacaaggccgtggtggtgatgggcgccacggggaccggcaagtcgcggctggcggtggacctggcgctccggttcggcggcgaggtcatcaactcggacaagatccagctgcacgccggcctggacgtgaccacgaacaaggtgaccgagcaggaccgcgccggcgtgccgcaccacctgctcggggtggcgcggcccgacgaggagttcacggccgcggacttccggcgcgaggcgacccgcgccgcgcgcgccatcaccgcgc

SEQ ID NO: 20543 - DNA, 411 bp, Zea mays
  unsure (1)..(411): unsure at all n locations
  Clone ID: MRT4577_118737C.1
tagtcggcacgagggaattcggcacggtgcgtgcgtgcgtgggggagagtgagatgcctgcctccctgtagcgtgataggagtagctctggcctcttcctctacctccagccgtgcggttttctgctgcggaagaaacgggagcagtgtcgctcgtcccgctcgcgcgcacatcctcaactcgtctccgtctctcccgcggcaactgacgacgatgccgtgctcgtcgccggccccgacatggctgctgcgagtgtcgccagcggctgccgcggccgaccaggccgccgcctcgtcctcgtgctcatccaaggccggaggccgcgtgctcacggccggtaccaccaccatggacacggacgccaccgctgccgccggtggcantgccggcggccttacgagagctgaacga

SEQ ID NO: 20544 - DNA, 514 bp, Zea mays
  unsure (1)..(514): unsure at all n locations
  Clone ID: MRT4577_118738C.1
gcccaccggccaccgcctccggcaccancacaaggagaaacaaaggcggcgagnnaagcncaagcncgcgcgccanccccggcccggcngcngcccccaacggaacgacggccagaggaagcnaccagagncgancgancgancgagancgagagagagagagagagagagcanggcnggcaggagnnnccggaggcgggcccccaaggttgtgattccaacgccgccgncagagaagcngnaccgcngggagcaaagaacgccgccagacgggggacngnggnngcagnncccacgnnggngggcngccgngnccccccaaaagcaaaggaaaancncaacnacacngcacaagcacncannanancngcagccnngnanggcnggcnncnncancacggcggacaaaaccannncnacggaacgcacgacaaaacaccancgggaagcnggacaagncaacnngangcagagangnagcngaagcngaaaaggnncccgggnggccgcggcg

SEQ ID NO: 20545 - DNA, 504 bp, Zea mays
  Clone ID: MRT4577_118739C.1
aaaaccttggcctaaattaaaaaaacggggggggcattttccttgggttgccccactgaaaacattttttgggccgcaggctttttttaaaacccccggaatcccagtttggttttttaccccggggcccctactggcccctgtaacccctttacaagtttttttttcccaccctggaaaacccccccaaaagggggggttatgatttttttttttttggaaaaccccctttttttcaaaaagggggggtggccccagcaaaaaaaaacccaaacccccccaagggggccgggaaaaaaaacttcctttttttaaaaaaacccccgggggacccccttccaaaaaaaaaccccattcccccggggggggccccccccaaaaccttggggcccttggggaagggcccccccaccacccccccgggggggacaaaatggtaaagggaccccctggcccaaacctttttgtacccggggtttttggggcggaacatttgcccccccc

SEQ ID NO: 20546 - DNA, 756 bp, Zea mays
  unsure (1)..(756): unsure at all n locations
  Clone ID: MRT4577_11873C.1
gggtacctcgaggccggccgggcgaactgtagaacccgaccgagcgcggcagcgcaaacctccgatccctgctgcgagcaagggatggcggcggcatgggcagtgctggcggcggtcctcgtcgcggcgcaggtggcgtctgcggcgccggtcacggcgccagcgttcctctgggcgcctaagaactacggattccgctctgatgatgctaaggaggtagtccattatcaaacaatctcaccaaagaacttagctaaatctgttcttgaggaaggtggctggtcaacctttatgtgttcaagggaggatactgagaagcatgttgatgttgccattgtttttattggctcaaagctacaatcatcagacatatcgaaagataagcaagttgatccagctttagcagatacattgaagctctccttcacagaatcagagttttctatggcattcccctacgtttccacatcagacgatgagaaactggaggagtcattgctatcaggcttcactgagaactgtaaaagtggttttggaagaaaccgtatcacctacacagacgtgcgccgtgagtggccaagatctgaagacgtatcacaacatggatgctatcaatgtaagtcgatacgcattttccggntctgcttctgttctatatttgctccctgtaccgagttcacgcatttttgcaggacttggtagtgtcaggaagaaccaacccgagtggacagactgatgtaatcgtcttctgcagcg

SEQ ID NO: 20547 - DNA, 377 bp, Zea mays
  Clone ID: MRT4577_118740C.1
ttgtttaccacgcgtccgttactcgtccgggcgtgccatcggactggaggccgcgtttttttaaacacatcttggtttcataccttggctatcgtgaggttagacttgtaaacaaagaaccgctacatcctggtggtgaccctattgtcctttgttttgttgtttttgagaatcctactcaatctgattttgcattggattctttgccaggctatatgtttgacctgctttatcgtatttcacccaatctgcggctgtaatttgtttctttctcaagtccaaaggggatttcacggacctgttgtttttagcaggccattaacttttggctttactttttgccaggccagttccctggtgaattcccatgtggattt

SEQ ID NO: 20548 - DNA, 246 bp, Zea mays
  Clone ID: MRT4577_118741C.1
attcggctcgagcccgaccccacccatttctttccaagaaaccaacctgacgtttgcggcggggtttttataattgccctggggggcgcaacaccccaaagcacgctcggtgagatgacggccccggcctttggcctgatccttgcttcaatgcacgcctacactctttaagggtcccttctctttggtaacgattccagttaaagcccggttaccctaacgacccatgaaccgtagcaccagctg

SEQ ID NO: 20549 - DNA, 393 bp, Zea mays
  Clone ID: MRT4577_118742C.1
cccacgcgtgcgacaacccgcacggctctataggccttgatacgccttggtcttctaccgatggcgcttcactcctgctgcacaaaagcgagagcttctgcatcagaacaactaatcacactcctgacccgctcggggccaaccaaacctcgacacccaatttgcatgtccgagcttggcgcccagctagcatatgtcttcggttccagcgctgaggcagatgctgcggactctgctgctgctcctggaacgaatgattatgtgcatgggcccatcccatgtctcaacggccgcaagagtctgactacagcccagggggtgcagaatgagtgcaggtattgctagatcctgaaggatgtggagaaggaattctgatctaagggaactgacatt

SEQ ID NO: 20550 - DNA, 873 bp, Zea mays
  Clone ID: MRT4577_118743C.1
gcagcaacaaccactttgtatcttgaggcatgcatcgcacaccaaccaatcctcccctgatactgagcttcaccatcatagtagtcacctcgttcttcagaggtggcgcgctgcagcaaccaggcggcggagcatgctggccctccgagagggccgccttgctctccttcaagaagggcatcacgagtgatcctggcaacctcctctcctcatggcgtggttgggactgttgcagctggagaggcgtctcatgtagcaaccggaccggccacgtcctcaagcttcatcttgcgaatccagatccagacatcgactccagaacaaaccatgctgagtcatatattctggctggtgagataagtccctctctgctttccctgcagcatcttgagtacctagacctcagcatgaactacttgggaggaggaagaggggaaacaggaagccctatgcctcggttcttgggatccatggaaaacttgagatatctaaacctctctggcatacagtttgctggtagcgtgcctccagaacttggcaacctttctaaattgcagtatcttgaccttagtgccactgtggacacggtcgacgacctcacattgtttcgaaatctacctatgctgcaataccttaccttgagccaaatcgatctctcgctgacagtcgactggcctcaaaagatcaatatgatcccatctctaagggcccttgatctctcttactgtcagcttcaaagagcagaccagtcgcttccgtaccttaatctcacaaaactcgagaagcttaacctttatgagaacgattttaaccatacaattacatcttgcttggttttggaaagcaacaagcatcaagtttcctcagtcttgg

SEQ ID NO: 20551 - DNA, 327 bp, Zea mays
  Clone ID: MRT4577_118744C.1
cgcggccccgggggctaccaacgccgacctgtttgtttggaaaaacctttgtgccacgtaggcccggggatatggaatcgccgggggccatcggaccggtggtgttcaagcgggggccgttcttagtggaggctaggaacgtttattacagcagggtccccagggggccaaaacctttaatgggggtggccccaaccaacaccgtggggacccccggggccgttttccagaaacggttgaacaacggccaaaagttggtattgaaagccttttgtggatcgtggggatcaaaggattatattgcaggggggccccagcttaactggg

SEQ ID NO: 20552 - DNA, 261 bp, Zea mays
  Clone ID: MRT4577_118745C.1
ttacgctaggggatcataatacaaatccatatcagttacagccattacaccaggtttaactctatgttttttaattcttatccgctgggcgcagccgttggtagcatcgtacaatctagcgaggcgccacccatcgtgtttcctctgatgctctgcgatcgtcgttgtcttgttgtatgcactgaggctgaacgcgctgttgctcctctgcctgtgcgcgttctccgccccggcgcagtcgcagaacacgaccatggccat

SEQ ID NO: 20553 - DNA, 391 bp, Zea mays
  Clone ID: MRT4577_118746C.1
aagtcaactgctgaacatgcaatacaacatccattcttcaatgtgtgcaattgggtagcaaaagctgtacatgatgcttaccatacagaatcactccgccctaatgctgagccaagattggaactgaacctgtgggatctcagcacagaacctgatgattgtgtccctgatttatctctcagtctcaatccacgtttttctggaacagacattggtaagcatgttccacgacatacataagatgaattactcctgtacccgggatatgagaatacccccgtaaagtccggtttttggcctctggtgccatccgatcatcccgttggtgatattccggccataccatccttgcaacaggcctacatggctgacagcccaagggcatattctg

SEQ ID NO: 20554 - DNA, 697 bp, Zea mays
  unsure (1)..(697): unsure at all n locations
  Clone ID: MRT4577_118747C.1
gctcaagcctgtggaaccggtgacggtgagtgaacaccagccgtcttggcctgctcctcccctgctgcagccatggcgacctccgcggcgctctcgaccgccgccaaccccacccaggtcaagaacaggtaccccagaatgaggcgcatggaggatgctatgatgagttcgtgagtggtctagaccgtcgtctcccagtcaactttggattgctagaccattgtcttcatatgatataattatttaactattttgtatagaactccgttatatattaatgttgtgacatcgtttatgtaccatgagtcatcatatgtgtaagacttggtcctagcacacttggtgattatgttcacgcccgggtccctaaaactccgggtgtcacacttgtgtcccaagctcgtgtcttgcactggaagcctcatgtgtcttgttgtgattgtcgcatgggtgtttgcaacagaagcatggtcgaatattcatgtcatagttcaatcaggcagaagtattcggtgcacgacaaatttgtaatgcatggtaaggcaagcttgtcgcgtatagaactctattctattcgagtaagttggatccaactttgtaaaggtaaattaaaccctttgtattccataatggtgtatgaaacatatgaacgtacttaatgtttataaaaaananaaaaaaaaaggcccctagggcc

SEQ ID NO: 20555 - DNA, 388 bp, Zea mays
  Clone ID: MRT4577_118748C.1
attcggctcgaggagctatttgatgatgtcattcttatagccgaaggtcaaatcgtataccaaggtccacgtgaatatgcagttgacttttttggtgctatgggattcaggtgtccagaaagaaaaaacgtggctgattttttgcaagaagttttgtccaagaaagatcaacagcagtattggtgccactatgattatccataccaatttgtttctgtatcaaaatttgctgaagccttcaaaacatttattattggtaagagattgcatcaggaattaactgttccatacaaccgacatcacaatcatcctggaggagcacttcgggtttcgccacgacttcctcggcgccgttgcggccatggtggccggcttctgcgtcctcttc

SEQ ID NO: 20556 - DNA, 1942 bp, Zea mays
  Clone ID: MRT4577_118749C.1
ggaaaaacaggggttcttgttttatacagggggtttatttagggggggcacaaagagcaagggaatttgtgggaacaacccccacggaaaacgaacccaagcctttttcctcatcacaaggaacgggggcatacatagggctcatgggggagcactgagcaccggtggttccggatcatcctatataagaagagatgataaacaggtgttcttgttttatacagtgtgtatatatagagagagacaaagagcaagtgaatttgtaggaacaacgcccacggagaacgaacgcaagcctatttcctcatcacaaggaacggaggcatacataggtctcatgtgtgagcactgagcaccgctggttccggatcatcctcatgccttccaccatgggtcctcgccggtcctgaagtcggtctccacccacgggacgaagaggaccttgccgtcgtcgacgtcggcgtgaaccagggccagcgacagaggcgccggtccacggaccaccttgccctggttgttgtactgggatccgtggcaggggcagatgaacttgttctcagcgccgttccacggcacgacgcagccgaggtgagtgcacacggcgttgatcccgtaggtggccagcgtcttgtcctgcctgcttcgtgctcagaccgagcgggagatcctgcagtccctggaccatccatttctaccaaccctgtatactcactttgagacagacaagttttcatgcttggttatggaattctgccctggaggggatcttcacacccttcgccaaaggcagcctggaaaatatttttcagagcaagccgcaaagttctatgtagctgaggtgctccttgcattggaatacctgcatatgcttgggattatataccgtgatcttaaaccagagaatgtcctcgttcgggaagatggccacatcatgctgtcggacttcgatctatctcttcgctgttcagtgagcctaacggtgatcaagtccgcaaatcctggcctagatgcaatgcagaggaacaatgcagcgtactgtgcccagcctgcttgcatcgaaccatcctgcattcagccctcctgtgtagctccaaccacttgctttggcccccggttcttctccaaatccaagtccaagtctaagtccaagtccaagaaggagaagtcgaagcctgatggtccaaaccaagagaacctcttcccggagctgattgctgagccaactgatgctcgctcgatgtcctttgttggcactcatgagtacttggccccagaaataataaaaggggagggccatggaagtgctgtggattggtggatctttggcatattcttgtacgagctgttgttcggcaagacccctttcaaaggttccggcaaccgggctacactcttcaacgtcgtgggccagcccctgaggttcccggagtccccgatagtgagcttctctgcgagggacatgataaggggattgctcgtcaaggacccgcagcaccggctcgggtccaagcgtggtgctaccgagataaagcagcaccctttcttcgagggcgtgaactgggctctcataaggtgcgcgagccctccggacataccaaagcccctcgagctcgagtgtcgcccaaagcaagtgccatcagcaaacggaaaggtggcgccggtcgctaaccaaaagggcccagataattatctagagttcgaattcttctagttttttgttttttgtttttgtgattttctgaactgaaagagtgcgtctgggctgatgctgtgaaagaaagtgaaagatgataacatacaaaaaaaaaaaaaaaaaaaaaaaaaaaattaatgttctgccattagactgtactacgctcgtttcaggatatccgagttatttttttgtttctctgttgaactgcttaactctaaggtgtactcaatccatcatgtatgttgc

SEQ ID NO: 20557 - DNA, 579 bp, Zea mays
  Clone ID: MRT4577_11874C.1
cccacgcgtccgcccacgcgtccgccacgcgtccgcccacgcgtccggaccacttctagatcggaaggggagctgctttcccagcttgtcgacttgctgaagctgtctggggctagacacacgattctctacgcttcccagccatctggttatctactggagaacccttccggctcgccagtggctaggcaccttgcggagaggactaacggtacaaaaactggcctactgagcaaatgtgacggagagtgcctagtcaaatcaactcttcttgaaggaacctttgtcggaatagtgctccttatcatcttgatatcagggctcatgtgtatgatgggaatcgatactccctccaagtttgaagctccccaggagtcttgatctcccttcgaagcagaacccttgttttgttggtctgcactgtggatagatattattcagtttccccctttgaaagcgcctttcgtataattattattatttttttactgagccatctgttatttacgatgtgctcaaacttttgacaccaaacgaatgcatgtgtgtgaggcttgtgctgtgaccagacatagcatt

SEQ ID NO: 20558 - DNA, 479 bp, Zea mays
  Clone ID: MRT4577_118750C.1
ccagggagtgaacaccagccgtcttggcccgcttgtcccctgctgcggccatggcgacctccgcggcgctctcggccgacgccaaccccacccagctctgccggtcccgcgctgcgctgggcaagccagtgaaggggcttggcctgcggatgggccgggagcgcgcatgccagcggatcatcacgtgccaggcggcgagcagcatccccgccgaccgcgtgcccgacatggagaagcggaagctgatgaacctcctcctcctgggcgccatatcgctgcccaccgacggaatggtcgatccctacggcgccttgttccgacccgctggctcccggaacggcggcggcggtacctacgccaaggacatgctgggcaacgacatcacggtggaggagtggctcaacacgcacggtcccaacgaccgaacgcttgcgcaggggctgaagggggaccccacgtacctggtggcggagcaggac

SEQ ID NO: 20559 - DNA, 260 bp, Zea mays
  Clone ID: MRT4577_118751C.1
ccggcttaaatgggcctactaggccatgcagttgttctagcttgcttattagatttcgaattagcaatatataaataatattttgtctattttttaattttttgatagttaaatgcacggtgccccctgaactcttcaatggatgtcacttgggagttgggtccacgaactttggaaatacatttctatatcctcgaacttgttaaatgatggaccacacatccttaaactggtaaaaatggtgattaacaggccaattt

SEQ ID NO: 20560 - DNA, 550 bp, Zea mays
  Clone ID: MRT4577_118752C.1
cctcgaggccggccgggaagccttcgaaagagtgagtgaacccagccgtattgccccgagtcccgaccccgaccgatcctcgcctgctgcagccatggcgacctccgcggcgctctccaccgccgccaatcccacccaggtgagccagcaacttccttcttccgccgcggtgcgcctctctcacctggccttgaaccttgtctcgtgtcagtttggccgtggggaaacagagtctctgcccatggcgttgctagttttcatcagcgtgttcgatcttgctcaccaaagataaatttgaatcgcgcgaataatacgcatgctttatttgtatgtgctgcccgtgcctgcaatgtcagctctgccggtcccgcgcttcgatgggcaagccggtgaaggggcttggcttgagcataggccgcgagcgcgcccagcggagcattgcgtgccaggcggcgagcagcatctccgccgaccgcgtccccgacatggagaagcggaagctgatgaacctcctcctcctcggcgccatctcgctgcccaccgtcggcat

SEQ ID NO: 20561 - DNA, 580 bp, Zea mays
  unsure (1)..(580): unsure at all n locations
  Clone ID: MRT4577_118753C.1
cattgggtacctcgagccggccgggggatagagcagcagaagcagcgacacgatcgcgagcgcacgcacgtaagcacgttgtcggcagctcaagttagaagaagcaccagtgcctgatcgatggcggcccaggctctcctctccggccggcagctgctgggccgccccgtgcagtcaccccgtctctaggcacgtcgccgatgcgggggaccccctgctgacccaataaaagccgagcgcccgcacaaccgtccgccgcagaagcagaacgcggagaatggaacgaccacgaacggtgatgacccaaaggaattgcctaagcacgtgtacttcaagggaaacaacggactgcaccagatttttcgtgnggtcccccccccccccacctggagtttgcgtcggaagaaataggcaatccgagtgtgaaaatcaccacgtaccactacatgatcgatggcaagcgggtgatccccatcaagtcacaccacttcggaaagttctggcaaagcagcccgaactggatctggtgcgacacggacgacaccaacaccgacaacccagacaccctgttcgagatcgt

SEQ ID NO: 20562 - DNA, 594 bp, Zea mays
  Clone ID: MRT4577_118754C.1
agtgaatccaagtgcgcatggctaaaacatacagagagaggtatgctcttcagccatggatgcattacactcttaaaggactgggatctcacaaaaaggataaagagtaagatgacaccagttcaaaatccataagcttagactgtgatatgatctgactcgtgcttggtgtcagcaaaaaaaacaagcacatatctaatgaataactgtatgttcctattcctggaggcaaactcagctcgacagtagggcacactacgtggaataatagatggccggatgggtttatacccagctgaatgcatcaagagattactatcactagcaaccaattgtcgtcaggatgaaactgatgacaggactttcatgtcggtgattgttagagaacttgaactcatcttgaggatgatgcctgaaaggattatttggtgtggaaacctcagagacagactcaacgatgtcagtaagtcgttgtcatttccgcgacgggacctcttgtctcgcacagcctctggagtctgatgcgagcagcggatgatcttggagagaactcccgtaggatgtgtaaacttggatatgcagttgtctgacata

SEQ ID NO: 20563 - DNA, 390 bp, Zea mays
  Clone ID: MRT4577_118755C.1
cgcgagtgagtgaacaccagccgtatattcctgaccccgaccgatcctcgcctgctggaggcatggcgacctccgcggcgctctccaccgccgccaatcccacccagctctaccggtcccgcgctttgctgggcaagccggtgaaggggcttggcctgagcatgggccgcgagcgcgcccagcggagcattgtgtgccaggctgcgagcagcatctccgccgaccgcgtccccgacatggagaagcggaagctgatgaacctcctgctcctcggcgccatctcggtgcctaccgtcggcatggtacgaccctacggctccttcttcgttcctgcctgctacgggaacgccggcggtgggacccacgcgaaggacaagctgggctacgaca

SEQ ID NO: 20564 - DNA, 186 bp, Zea mays
  Clone ID: MRT4577_118756C.1
acgcgtccgcctgctcctcctcgccatcttcatcccggctatcaccacccccgtcgaggcccacattctcgcccaggtgtttggcgacgaccaattccaacgggcagggcaaccagctgcacctcacgaacatctcccaggccttgccgatgctcccgagggtgacaacgccgcgcgaactgctgc

SEQ ID NO: 20565 - DNA, 646 bp, Zea mays
  Clone ID: MRT4577_118757C.1
ggccaaaaaaaaaaaaaaaaaaaaaaaaaaaaaaaaaaaaaaaaaaaaaaaaaaaaaaaaaaaaaaaaaaaaaaaaaaaaaaaggcctggggacgccagtgagtgaacaccagccgttttggcccgtttttcccctgttggggccatggcgacctccggggggttttcgaccgccgccaaccccacccagttttgccggtcccgcgctgcgctgggcaagccagggaaggggcttggcctggggatggggcggaagcgcgcaagccagcggagcatcacgtgccaggcggggagcagaatccccgccgaccgggtccccgacgtggaaaagcggaagctgatgaacctcctcctcctgggcgccatatcgttgcccaccgtcggaatggtcgtcccctacggggcctttttcgtccccgccggttccggaaacgggggggggggaacctacgccaaggacaagctgggcaacgacatcacgggggaggaggggttaaacacgcacggtcccaacgaccgaacgctcgcgcaggggctcaagggtgaccccacgtacctggggggggagcaggacaagacgctggccacctacgggatcaacgccgggtgcacccacctcggttgcgtcgtgccggggaacggcgcc

SEQ ID NO: 20566 - DNA, 1200 bp, Zea mays
  Clone ID: MRT4577_118758C.1
aagtagatctagatcaagatctaaaaacttgtacattcattggggaagagaaatattgaccaagtaactagaaattgatgtgagcctactacataaaagtcatttcggcaaaaaaaaaaaggtctaaattgctctccctgctggtcacttgatcagcagatggcagaaaaagtctatatttgattccattagatttcaaagtgttcaaaaggttatagtgaagagatgacaaacagctgtgttcttgtttcatgcagggtgtgtaatatatataatttggaggcaagaggcaagtgaatttgtagcaacaacgccctcggagaaagcctatgagcactgagcaccgcttgtgtcggatgatcctcctcatgcactccaccacgggtcctggccggtcctgaagtcggtctccatccacgggacgaaaaggaccttgccgtcgtcgacgtcggcgtgaaccggagacagcgaacctgccgcgctgtcgacgtcaccttgccctaccagggccagcgacagaggcgccggtccgcggaccaccttgccctggttgttgtactgggatccatggcaggggcagatgaacttgttctcggcgccgttccacggcacgacgcagccgaggtgggtgcacacggcgttgatcccgtaggtggccagcgtcttgtcctgctccaccaccaggtacgtggggtcacccttgagcccctgcgcgagcgtgcggtcgttgggaccgtgcgtgttgagccactcctccaccgtgatgtcgttgcccagcttgtccttggcgtaggtcccgccgccgccgttcccggagccggcggggacgaagaaggcgccgtaggggacgaccatgccgacggtgggcagcgatatggcgccgaggaggaggaggttcatcagcttccgcttctccatgtcggggacgcggtcggcggggatgctgctcgccgcctggcacgtgatgctccgctggcttgcgcgctcccggcccatccccaggccaagccccttcactggcttgcccagcgcagcgcgggaccggcagagctgggtggggttggcggcggtcgagagcgccgcggaggtcgccatggctgcagcaggggaggagcaggccaagacggctggtgttcactcaccgtcaccggtgtccacaggctccgggaattcccggccgggtcccggccggcctcgagg

SEQ ID NO: 20567 - DNA, 1180 bp, Zea mays
  Clone ID: MRT4577_118759C.1
cacaatgtgcgaaagggtgtataaaaaaaaatgataaacaggtgttcttgttttatacagggtgtttttttagagagagacaaagagcaagtgaatttgtaggaacaacccccacggaaaacgaacgcaagcctatttcctcattacaaggaacggaggcatacataggtctcatgtgtgagcactgagcaccgttggttgcctgtgctgctcgtgctttagtctaggctgccccctttttcttcccgttcgctttgggcacataaaaaaatttttccccctttctttgctaatctctctggcgctggcccacttcgcccccctatttttgtggggaatgccggggtgggggcttgtgatttttgagccctcgttctagtgcttggccttttggggagtgttgatgcggcgttatggggcgatggatctgttgtgaaacgcgagctcgtagcactagcactagcttgtccgggaccgggagcctgcgagatcaggagctggggattgccctgccactctgctgaaagttttggagaagttgtggtgtttccctgcctattagagtctgcgcttctgtgttcctgatcaactgctactacgcgattgttgtcttctcaatctgtctggccaagcatggctggccagacgtcaaaggcaaaggaagcaggaaaagatgacagagaagaacccggagctgaggcggcgaaagagaagttagtgccgtctcaccagcagcaagagtctccagcttctgtggtggacaaggattcttcaggtgtgtcttcagttcctggtgatgagtcaccggtcctagaaggggattctgttgagttgaaagtggaggaaaacttggatggtaatgggaataaggaaaataaaacgtcccagaagagcagtacaagtgatggctttgcttctgctaaagtgagtgatgggacaagtagtttgaggaagaccagtggtagtgtggccatgagtactcgggctgatttcactgagagtgggaagagcagcatgtgccgtgcgagcaccgccagtgacattagcgatgagagctcctgcagcagcatgagcagtgccaccacgaagccacacaaggggaatgattcaaggtgggaggctatccatgtggtgaagtccagggataaagttcttggactgaatcatttcaggctgctta

SEQ ID NO: 20568 - DNA, 310 bp, Zea mays
  unsure (1)..(310): unsure at all n locations
  Clone ID: MRT4577_11875C.1
ggnaaacggcgaggnggnggccaggcgggacagcgccaagngccccnacgacgccagggccgaggaggagagggcgaccgagaaggggaaggcggcgancgccaacgnggcggcnggcgacgacaagnaccccanngncgaagcncncaagcagcangagnncaggcccggcnngggggccggggggagcgaagacncaacagncgncangggggcaccgggggaggcggngcgggcagcaaccaagagganggnggagaagcaggcgagcncagcngagggggcggggggaagcaagccgnaaggcaac

SEQ ID NO: 20569 - DNA, 537 bp, Zea mays
  unsure (1)..(537): unsure at all n locations
  Clone ID: MRT4577_118760C.1
tcgcagcagcgtactaactnggacctctaacggccgcccgggggggggggttttttttttttttttttgttttttttttttttttttttttttttttttttttttttttttttttttttttttcccgggggaaaccaccaccaaaattttatgttcattacaaataaaacaaaacacaggggggcgggggcaaactgttcccaaaaaccctactgaaaaaaaaggcaaccccaaaaggggaaaaattttttttcctgaaaagggtccaaaccaaaacggggcctaaaccgggattgaaacgggggcatccattccggacaaattggaggggaagaaaaaaatgggggggaaaagggggcccaaaaaaaaaagacctgggagggccgcactgacaaaaaaattggggaggtggaaacaaacaaaaaaattttggaggggcagccaaagccccggggccaaaaaagagggggcaaaaaaaacactcaaaacaaagggggaaatggagtttcaaaaaaccttaaaccctgggagccccaa

SEQ ID NO: 20570 - DNA, 501 bp, Zea mays
  Clone ID: MRT4577_118761C.1
gtggccggcgccgcgctgctggcgtggtgggccgtcgcgttccacccgtcctacgcgcagctgtggatggtgccgctcggcctcgtgctcgccggcaccccgcccgtcgtctgcctcgcgctccgcttcagccccgacgcccgcgcgccgccggcggcgggcaaagacgacggctcgtcgtccggacccgcgggtgcgcgtgcgccgccgccgccgccgttggtcgccgttgtcatcgacaagcagtagcgcgttcgtacgtgtgtgcatggtgcgtacatatcaaagacacatctctgctgccgtgtgtatattctttgattagtttcatttgggccgggaggcgagggcataatatgctgtgatatgtacagaggtagacgacgatggagtcatggagatgatcatcctgagatgtacgtgctttgatttggggttcgaaaaaaaggcctcgaataaagaatgtaataaacagcaacaaacaattctgtgattggtaaa

SEQ ID NO: 20571 - DNA, 739 bp, Zea mays
  Clone ID: MRT4577_118762C.1
gcctttgttggcactcatgagtacctggccccagaaataataaaaggggagggccatggaagtgctgtggattggtggacctttggcatattcttgtacgagctgttgttcgggaagaccccattcaaaggttcaggcaaccgggctacactcttcaacgttgttggccagcccttgaggttcccagagtccccaatagtgagcttctctgcgagggacatgataaggggattgctagtcaaggacccgcagcaccgacttgggtataagcgtggcgctaccgagataaagcagcatcctttcttcgagggcgtgaactgggctctgataaggtgtgcgagccctccagacataccaaagcctgttgagctcgagtgtcgcccaaagcaagtgccatcagcaaatggaaaggtcgcgccagcccctaaccaaaaggggccagataattatctagagtttgaattcttctagggaatttttttttgtgatttctgaactgaaagagtgcatctgggcagatgctgtgaaagaaagtgaaagatgatgagctactctaggcatgtgcttggctggatcttttttttttctgccattagactgtacgctcgtttcaggatatccgagttgttttttcctgctgaactgcttaactctagggtgtactcaatccatcatgtatgttgcaattttcagaacttgcctatggtacttgaaatggacttcagggctacttgctccc

SEQ ID NO: 20572 - DNA, 271 bp, Zea mays
  unsure (1)..(271): unsure at all n locations
  Clone ID: MRT4577_118763C.1
gttgaaaggggtttttttattgccaggttttgttggtccgaaagggccttacctattaccaaaaatgggagggttgaccctttccctttggggaaagttaaaacccttttaggctcaacgtctctccctggaggtacttannnaaaataaagggactaaaattcctcgtccaaaaccaccccggcttaaacccttgggcacccattactctgcgaggattacccgagttaagagaaaacactttaagggtgttcttgcctttggggaagca

SEQ ID NO: 20573 - DNA, 298 bp, Zea mays
  Clone ID: MRT4577_118764C.1
cccacgcgtccgtccacgcgtccgtttacgcgtccggttttgttcacggacaaaagcggaggaacttcattacttaggaaaaatttaaccgaacttaaccactggaattaccttccaaacattacggccgggaccatgtgccacaaggtcaattcatggtcaagcttaagggccccaagtgtgccttaaaagcagagaccaaaccaagcttggacaccaaccttcacttttcttacggttttttaaaacggaccagggcaaaccaatggttccaaaacatttgggcaaaaacttgacc

SEQ ID NO: 20574 - DNA, 1254 bp, Zea mays
  Clone ID: MRT4577_118765C.1
aatatgcaccacttgttgatgaattatggaaagatcctgctattcaagctacatatagaagaagtgaactgccattccttccacctgctgccagttattttcttgacaaggctgttgatatatctcgaacggaatatgagctgtcagatatggatatactgtatgctgatgggattacatcctcagatggggtagcatcaactgaattctctttccctcagctgtctttgggtggactgggtgttgatgagcccgatgcacaagacactttgctaaggtaccaattgatcaggataaacagtagaggtttgcatgggaactgcaaatggctgcaaatgtttgatgacgtaaggcttgttatcttctgtgttgctgctagcgactacgatgagttctacgaagatgcaaacggtaccattgtcaacaagatggtagagagcaggcagctgttcgagagcatcaccctccatccgacattcgagcaagcagacttccttctgctcctcaccaagttcgatctcctagagcagaagatcagcagttccccgctgacctcgtgcgactggttcagcgacttcactcccctgatcagccgcaacctcctcaacggcggcagcggcggccgccgcaggaccgcgcgcggcagcaccggcgcgacactgccccagatggctgcgcactacatggcgaccaagttcaaaaggctgttcgagtcgatgacggggcggaagctttacgtgtcgtacgtgaacgctttggaccaggagtccgtccggtcggcgatccgctacgggcgggaggtcgtcaagtgggaggaggagaagcccgtgttcggtgccagcgagacagtctacagcgaggagccgagctccttcactgcctgaccttccttcgtcgtgtgcagaagaagaggtgtaaatatctgtgcatttctttcctccccagcacgctctcttagagctgtacccccatccgtcccttttgttcgtcgcagatcgtccgtcttgtgtggctgttcagttgttttgcaaagtagaatggtggagacgacccggcccattctgattcttgtaaattttattgtgggttgcttgcgtttgatgcattattaggctggcgcgaagtgaagtctgccagaccatcggcttgtatgctggttacttctggtatatattgtctggttcgccatcagtgtgaagagagaccataccatgggaaggatgctttgttccattgctgaaatattttgctggg

SEQ ID NO: 20575 - DNA, 552 bp, Zea mays
  Clone ID: MRT4577_118766C.1
tacaggtgccgccgctggccgcggccgacgatgacatgctggatgacggtgcccatggcgccagcgcttctctctgtctctggagcttcgactcgagagactcctacttcagatactagcaagcaagcaagctacgtctatactagacaacatgcatgctgatgctgtacaaggtcatggggcgggcggctagctcatggctacgctacaagatggcggcgcatgcatgtgtctcaacagctagccccccatgcatcctgctgcattgctacacatatcggccggcattatttcagaacaagcatgatgcatgctcactactgaagcaggtcatatcgagtagtatatacatgaccagtgaccttttttaacggaactttgggagtaatcatggatgcatggtagctacgtagaattcatcaagcaagagagcgtagaatttatgcaaaagaagaagaagagttaatttgcgtgtaatttcatgcccatgctttcagttgattaaaagcctataggctattatatatttggctagctatataatataaaaaa

SEQ ID NO: 20576 - DNA, 164 bp, Zea mays
  unsure (1)..(164): unsure at all n locations
  Clone ID: MRT4577_118767C.1
gggtcctcaatctcaancccacaccacgaccacctcctttggtccccaacccctgtgtcagctcaggcgccggccatgaactgcctcaccgacctggtcaacctcaacctctcggacaacaccgagaagatcatcgcggaatacatatgcgatcggtgggcctg

SEQ ID NO: 20577 - DNA, 234 bp, Zea mays
  Clone ID: MRT4577_118768C.1
aaaaacgactcggggaattgcttcttgactgaataaacaaatttacaatcaataatctgcccaattgaaatccaattcccggagaacaaaaagataagctggcctcccctgctttaaaaacaatctgcaagcttcttttccttgttcttgccacccaaaaggaggcataattgcatttggtccttcgagcattgaatcctattagtaggattaggggcagtatcatccccagcc

SEQ ID NO: 20578 - DNA, 694 bp, Zea mays
  unsure (1)..(694): unsure at all n locations
  Clone ID: MRT4577_118769C.1
aaaccctttcttgtcgtcgcaccgcctccacgtccccccagatcgaccacaaaatnngtccgcaaccacaactacacccgccctcccgctcgccgcagccagaaccagctccaacccaaccagaaccagctcgccccggccgccgcgaccgtcccccctcatcgactcgaggcaaccaaacggccgggggggagcagcancctgaccctgacgcgatgagcccgcccgccatgctactacccgtctgctccgccgcgcccagctgctcccccctctgcccggtgacggcctcacacgccgtcgcccgggtggcgcggagggtggacctcnncnccgcgcggagggcctaccccgacccgctcttttttcagggccccgaccgcccccccctacccaccccccccccacccccccaccccccccccccaacaccaccccgccggccccaccccctaacccccccgcccccccccccccccccaccccccccgccaccccccccccaccccgccctgccccaccacctacaccccccccccccccctcaacccaccccaccacacacacaccccccccaacacccaaacccccccgcccccccgacaccacaaacacccccaagaccccccgccccgagcccggccccccccccccccccccccataagaaacccgcccccccccccccttccccc

SEQ ID NO: 20579 - DNA, 362 bp, Zea mays
  Clone ID: MRT4577_11876C.1
attcggctcgaggcggctgggtgctttttctcgccctgcggggggaactacggcatagaggccacagcgaactgcggcgcgcccatcttcagtgggcccgaccaggcttgccagcctacaaacgctgtacttgtggaaggaagagtgaatggggggcctgataacgacgagaaacagaccaagaggattggcagggacagagaagataaacacatggagctcctacatggctaccgctcaggatcactgtcaaccatgaagaggatgacagacttgaatacacatgtacacgcagctagggctacaagaccttgtaaggcaacgctccatgaacactttgtgagatcattccaagctcttga

SEQ ID NO: 20580 - DNA, 371 bp, Zea mays
  Clone ID: MRT4577_118770C.1
aaggcccacaaagggggggatatctacaggagtggggtgagtcctatcttactttcacatgcacaacctatctgacatactgcaagacaggcccgcctatatgggtggggccaagcctaagacggccgactacgtgaacaagcgagaaaacatgtatatggaatacacagcgaaaaactagaattacaatgagaggaatcccacaagaccattagataataatatcgacatgatacagacaccagtcaaggccaatgtgaccagccacagctgatctagtatcctattcagaatcttacaacacgaaacccggatggaaatatatacacgaatactttacacaagcatactaggaaccggatatctcatat

SEQ ID NO: 20581 - DNA, 370 bp, Zea mays
  Clone ID: MRT4577_118771C.1
aggccacaaagcttgctaccttttacaaagttgtaccatcataatataaagggggaacacattgggtgggttcagtttccgaaaaaaaatccccaagccaagccacaagtttttgattccaagttaaaaagaagaagaaaggtacctttggatttgaccaaccaagtcaagcatataatacaaactgaacttgttctatggaactctgaataaaaatccaagtctctactaacaagatctgtaaagcttatgaattaagaaacatgaaaaggcctctagctgagttggttaggtagtttgaatagcacttcccaagtcccccatgtgagcgaattttaggttggggttaaaaaatccccttgtctgtccc

SEQ ID NO: 20582 - DNA, 436 bp, Zea mays
  Clone ID: MRT4577_118772C.1
gttgacatattttaagtggtaaattcatatttttggacaaataaaacagccagaacaggcttataagacacatataccagtccgagcctttaattccaacattgcaatttacaaaacaaaataaaccctagaaatcaactatgattacaattaactgatggcggacccagataataatcgaaacacctcaattataaccttaacaaacacaggagcattgtcgaatgcgggaactgatcatgacataagctcattcaaatctgctgccatagcatacaaaaactcaaacagcatgggtgaccacatcaagcaatatacatccaaagccagggctgccaaaattcgcttgacccactgactgggatattaacaaattgggacattttttttttactaggatgatggatacacatctatattggcctaacaaaatact

SEQ ID NO: 20583 - DNA, 216 bp, Zea mays
  Clone ID: MRT4577_118773C.1
aaaaagggggaaattcgattccaaggccagattttttcaaaaagggcggtacctttttgcaacaacaaatcgttgggcccactgctcgggattatttaccgggaccccaaaaacaaaacagcccatacgggcaagagggaaccccattttaaaaaaagaagggcccgtaccccctagattcaaattgcacactgtttttggaaacagaaaaagcat

SEQ ID NO: 20584 - DNA, 1350 bp, Zea mays
  Clone ID: MRT4577_118774C.1
cattgggtacctcgtaagaggaagggtcgtttggcgtcctagcccaggacaagttccctttttcttctcccaagtctgcgactaggaggcgacgggccgacgggccaagtttcctttctcttctcagtctgcgactaggcggcggcggcggccttcacgcacaagccttcgccgcctatacttgcgctccgtcgagccggtgaattgcggtctaagcacaggaaggaaggatcttttctccagacttggtaattttggacgacaagatgcacttccttgcatcatttcatgtccctacaggttttgtattatctgatttttcgggatggatgccaaaaggttcctgcatctggtcgaggagaagaaaagaaggatcctcgagaagaaagaagccccactaaagtgggagcagaagctagaaacagcagctaaggccaaagctgatgcagaagcaaaggtgaagaagctaaattcaagaaagcacaggaggagaggagatttttcctcagactctgatagtgactatgacagcgatgttgatcgaaaacacttgaagaggaagaaccgcagaaggaacaagaagcatgagcattctgactctgatgatgccaggagacgcaatcgtaggtccagaaagggctccgactcaagtgatgagagcaacagtgaatatgaaagcgggtctgaagaagaacgtacaaagaagaagcgttcgcacagaagaaggcatcacagacactcttcaatgtcagactctgaagacaacagtgatgaggaagagcggagatctgccaaggaccattctcagccccgcagacgccaccatcagtcttctgatgatgactcggacaaggtcaggttgagacatgggaagggtctgagatcacgtgacgaggatgcaagggcagatttcaacagccataagcatctcaggagccaatccttggaggagtcatcagatgatagagatgctgatgaatctgagaagatgaggaatggcaaaaggtctcacaagaatggcggccaccgtcaccatcaccatcgacaccaccatgaatgacatagtaactctgcagaacctaatgacaggaggcaagtactgaaagatggccagagggcccttgaaggtgacagcgcatactgaagatatcccagcaaggtcgagttaattgtccttattaaggacatgaagatcatttttttttcgttcctgatgttctcagataattattgtattgctgacaacatttctttgatttgtgaatatactaaacatgttggctatgcaaatttctatgcattgagaatttgataatactgagttaacaatgaggggaaaaaaaaaaaaaa

SEQ ID NO: 20585 - DNA, 371 bp, Zea mays
  Clone ID: MRT4577_118775C.1
gggcgcgagcggccgagagggtttttatgagtttcggcttttttttccccgcggaaaacgggtatctgttggcatagccttacgacattatcaataggggatttgcatatatccatcacaaattgttcatgggcacgccgttgacgtaggcaaaggtaactgacttgtaaagccccaaagagagcatggctccatgtaaggactctaacgagttcaaaattaacgtggttagctaagacaaaatatcgggccgacgtcctagcaaagaaaatatgtgcgcatttgttgatccacctcaagggcataacgaataagcgctggttgtcccacttacttacagatctactgcatatacgtggggcactgttcac

SEQ ID NO: 20586 - DNA, 1289 bp, Zea mays
  Clone ID: MRT4577_118776C.1
ccggccggggatgtatgtgcacctggctgtcttataaaattgtcggccttggcccaagccaaggaccctttcgcttctctcagtctacgactaggcggcggcggcggccttcacgcacgagccttcgccgcctatacttgcgcttcgtcgagccggtgaattgtggtctaagaacaagagggaaggatctttctccagacttcgcaattttggacgacgaggttttgtgttatctggtttgtcgggatggatgccaaaaagttcctgcagctggtcgaagagaagaaaaggaggatcctcgagaagaaagaagccccactaaagtggcagcagaagctagaagcagcagttaacgtcaaagctgatgcagaagcgaaggcgaaaaaactaaaatcgagaaagcataggaggagaggagattcttcctcggactctgacagtgactatggcagcgatgttgatcggaaacacctgaagaggaagaaccgtagaaggaacaagaagcatgagcattctgactctgatgatgccaggagatgcaatcgtagatctagaaggagcaccgactcaagtgatgacagcgacagtgaatatgagaccaggtctgaagaagaacgtccaaggaagaagcgctcgcacagaagaaggcatcaccggcactcttcaaggtcagactctgaaaactacagcagtgatgaggaagaacggagatctgccaaggaccatactcagagccgcaggcggcaccatcggtcgtctgatgatgactcaggcaaggacaaggtcaagtcaagacatgggaagggtctgagatctcgtgacgaggatgcaagggcagatttcaacagccataagcgtctcaggagccaatccttggaggagtcatcagatgatagagatgctgatgaatctgagaagatgaggaatggcaaaaggtctcacaagaatggcggccaccgtcaccatcgacaccaccatgaatgacatagtaactctgcagaacctaatgacaggaggcaagtactgaaagatggccagagggcccttgaaggtgacagtgcatactgaagatatcccagcaaggtcgagttaattgtccttattaaggacaggaagatcatttttttcgttcctgatgttctcacataattcttgtcttgctgacaacatttctttgatttgtgaatgtactaaacatgttggctttgaaaatttggtgatacgtgatcgcctatgcatttgcttacatgtcaggctgaagtcgataaaagggctagagcggagaaaat

SEQ ID NO: 20587 - DNA, 736 bp, Zea mays
  Clone ID: MRT4577_118777C.1
ggccgggatgtgcacctgctgtcttataaaattgtcggccttggcccaagccaggaccctttcgcttctctcagtctacgactaggcggcggcggcggccttcacgcacgagccttcgccgcctatacttgcgcttcgtcgagccggtgaattgtggtctaagaacaagagggaaggatctttctccagacttcgcaattttggacgacgagatgcacttccttgcatcatttcatgtccctacaggttttgtgttatctggtttgtcgggatggatgccaaaaagttcctgcagctggtcgaagagaagaaaaggaggatcctcgagaagaaagaagccccactaaagtggcagcagaagcttgaagcagcagttaacgtcaaagctgatgcagaagcgaaggcgaaaaaactaaaatcaagaaagcataggaggagaggagattcttcctcggactctgacagtgactatgacagcgatgttgatcggaaacaccggaggaggaaggatcgtagaaggaacaagaagcatgagcattctgactctgatgatgccaggagacgcaagcataggtccagaaagggctcagactcaagtgatgagagcaaccgtgaatatgaaagcgggtctgaagaagaacgtacaaagaagaagcgttcgcacagaagaagcatcacagacactcttcaatgtcagactctgaagacaacagtgatgaggatgagcggagatctg

SEQ ID NO: 20588 - DNA, 1559 bp, Zea mays
  Clone ID: MRT4577_118778C.1
taagataagatgttgggagttaaattaatttggaagtctgtgtctcttttgctgcgcccagattcataaccataatcatgtttaaacaagtgctgtgtgaagagccatatttctcacataagttttttaggatattgtgtatagttgtgatataattgtgatatctgtgagatcccttttgttaacatagttttatgagcttggaagcttagaagccatctagctttgaacatgattgattgatcactctccatagaaagttgacttgaacattaagtgaactgcgtgagtattatctgagaatactttgattacatttgatgcttaaactagctcaaagcgtctccaagtaatttgtcgttaggaattaattcactgcattttgttatgtctatacatggaagtttgttgtataaatcttttaatctatctgattagatgtacatctctactgatgtgctatataactttagatgttcaaaaaactaacagtgtttttctctcttctatgagatgcacttccttgcatcatttcatgtccctacaggttttgtattatctgatttttcgggatggatgccaaaaggttcctgcatctggtcgaggagaagaaaagaaggatcctcgagaagaaagaagccccactaaagtgggagcagaagctagaaacagcagctaaggccaaggttgatgcagaagcaaaggtgaagaagctaaattcaagaaagcacaggaggagaggagatttgtcctcagactctgatagtgactatggcagcgatgttgatcgaaaacacttgaagaggaagaaccgcagaaggaacaagaagcatgagcattctgactctgatgatgccaggagatgcaatcgtagatctagaaggagcaccgactcaagtgatgacagcgacagtgaatatgagaccaggtctgaagaagaacgtccaaggaagaagcgctcgcacagaagaaggcatcaccggcactcttcaaggtcagactctgaaaactacagcagtgatgaggaagaacggagatctgccaaggaccatactcagagccgcaggcggcaccatcggtcgtctgatgatgactcaggcaaggacaaggtcaagtcaagacatgggaagggtctgagatctcgtgacgaggatgcaagggcagatttcaacagccataagcgtctcaggagccaatccttggaggagtcatcagatgatagagatgctgatgaatctgagaagatgaggaatggcaaaaggtctcacaagaatggcggccaccgtcaccatcgacaccaccatgaatgacatagtaactctgcagaacctaatgacaggaggcaagtactgaaagatggccagagggcccttgaaggtgacagtgcatactgaagatatcccagcaaggtcgagttaattgtccttattaaggacaggaagatcatttttttcgttcctgatgttctcacataattcttgtcttgctgacaacatttctttgatttgtgaatgtactaaacatgttggctttgaaaatttggtgatacgtgatcgcct

SEQ ID NO: 20589 - DNA, 613 bp, Zea mays
  unsure (1)..(613): unsure at all n locations
  Clone ID: MRT4577_118779C.1
nttactgntgagtttaaaggttgaaaggaaaggngagattagtaaggaaacttgaggaagaaggtgctgttcgtcaagcatgaaagatcgcatgagtttactacaacagcaactatgtgatgctcagagttctgcccagttgcaggaaagttggcccgtgaattggaaaaggaattaaccaaagcgactgaagaatttacaattgaaatacaatcattaaaaggaaagatcagcggacttatttcagagaaggaatcaatatatgatgaactgaagtctactcaagaaaaggtgcagctggaaatgagccagagaaaaggccttgaagatcaaattctaaggttcaaacagtctgtgtctgatagttgtgctgaagagtctaaaacatcatgtagtatggttagatcaggatctggattaggcaacacagcttttgtgtccaaatcagaaaaattaagagaggctctatctggtcagagaggtaccatatcaaagatatttgaagaagttggtcttccaaacgtgcttgctctgttgaagtctgaagatctagatgtgcagatccatgctgtcaaggtggttgctaatcttgctgctgaagatgttaatcagg

SEQ ID NO: 20590 - DNA, 458 bp, Zea mays
  Clone ID: MRT4577_11877C.1
aaaacagaatgtccttttttttcccacaaagaaaaccatgacggttttcataatcacacaagggcagcacgttcattttctcataccattttgagtccaaaaaccggagggggggtgggggccgctttattttattttgtttgaaaacaaaaaaaggggggggaaaacccaatctccgtccaatatacccttttttttccaaacaagacgggggggaaatgaagctcatcccagtccaatggtttatttgttggcgtcggggttggcgcccaggttggcctcggcccccttgaagatggcggtgacggactccttggccttggcggtcttgtccttcacctccacccccggcggcagcttgttcgtggacttgacctttaccacacttccgccgccggccgggggctccaccttggtgtgcgacgtcgccgtttcgttggcgaccccgatgccccccc

SEQ ID NO: 20591 - DNA, 1503 bp, Zea mays
  Clone ID: MRT4577_118780C.1
cctcgaggccggccgggccgggttcattacgcttctctcagtctacgactaggcggcggcggcggccttcacgcacgagccttcgccgcctatacttgcgcttcgtcgagccggtgaattgtggtctaagaacaagagggaaggatctttctccagacttcgcaattttggacgacgaggttttgtgttatctggtttgtcgggatggatgccaaaaagttcctgcagctggtcgaagagaagaaaaggaggatcctcgagaagaaagaagccccactaaagtggcagcagaagcttgaagcagcagttaacgtcaaagctgatgcagaagcgaaggcgaaaaaactaaaatcaagaaagcataggaggagaggagattcttcctcggactctgacagtgactatgacagcgatgttgatcggaaacaccggaggaggaaggatcgtagaaggaacaagaagcatgagcattctgactctgatgatgccaggagacgcaagcataggtccagaaagggctcagactcaagtgatgagagcaaccgtgaatatgaaagcgggtctgaagaagaacgtacaaagaagaagcgttcgcacagaagaaagcatcacagacactcttcaatgtcagactctgaagacaacagtgatgaggatgagcggagatctgccaaggaccattctcagccccgcagacgccaccatcagtcttctgatgatggctcggacaaggtcaggttgagacatgggaagcgtctgagatcaagtgacgagaatgctcggccagattccaacagccataagcatctcaggagccaatccttggaggagtcatcagatgatagagatgatgatggaccagagaagataagaaatggcaaaaggtatcacaagaatcatcaccgtcaccaccaccatcatcgtcaccatcggcaccaccatgaaagacataataactcagcagaacctaatgacaggaggcaagtactgaaagatgaccagagggcccttgaaggtagcagtgcagactgaaggtatccaccagaggacggaaagattgattcttcattcgtgatgttcccagttatttgttgtgctgataacatttctttgatttgggctatgaaacgttagaagatactgtggccattctaccaattatgttggttttgagaatttgataatactgagttaacaatgaagcatgattatccaaaaaaaaaaaaaaaaaaaaaaaaaaaaaaaaaaaaaaaaaaaaaaaaaaaaaaaaaaaaaaaaaaaaaaaaaaaaaaaaaaaaaaaaaaaaaaaaaaaaaaaaaaaaaaaaaaaaaaaagggggggcccctttttaaaaaaaccaaatttttttccccgggttttcgaaataaaaattttttttttggggccccaaaaataaattaccggggcggcttttaaaaaacccgggaatgggaaaaaccctggggttccccaatttaaatgttttggaaaaaaacccctttt

SEQ ID NO: 20592 - DNA, 238 bp, Zea mays
  Clone ID: MRT4577_118781C.1
cacccccgggtgagctcggaattcggctcgagcggaatcaacggcgcggtttttctggagccgccgaagcaccccaagtcgtggggtttgttaaaaaggtgggcgtggcccagatgctccgtggaggcgcgatcatggacatggtgaccccggagcaggcccgcctagagagaaagccggggcctgcgccgtgatagcgctggaccgtgtccccaccaacatccccgctcagggaggc

SEQ ID NO: 20593 - DNA, 386 bp, Zea mays
  Clone ID: MRT4577_118782C.1
ttcttctgatgcggaacctaaagagcccaggcgggggtggttggtaccagaggcggctgagctgattgttcaacatcatgacctgcgccaattgcaccaccgagatctatcaatgggtcggcttcaacatcgccactcaaaccggggcaggttacatgtcacttgccagggcggcaggcataatgaccaactgagcgctcggcacgcacagccctctgaagaagctgactgacggcagggatgggaggcccaagtaccctccccggggggtgattgtaccttcgatcctgcgaagaggcgggggtagggggcctattgtgagttgatgattacagacagttgtgctgagctaatcaaggctgagtagcggacgaacttgtattccg

SEQ ID NO: 20594 - DNA, 2080 bp, Zea mays
  Clone ID: MRT4577_118783C.1
ccccccacccgctcgcggggccggccccgcttcctactaccctacgtgggactgccccccccgggcctgccatgtacactccggataccagttatgttagtgccggcgggtttctttctccgcttcctaagattcctctttcttccccaaccccaccctacgccttttgccacgccgcacggccgctccctcccttcatgcgccgccgtatctcaggtcagcatcgccaaccgcagctccacctcccgatcccagccccaatctaggaggaggaggaggaggagaaggccactttcaggattctgacgaagccctccctccctcggccgcatcgcatgctaccacgactgaccaccaccagcagcagcagcagcagcagcaggaggaggagggcaggatgttcaagcttcacccgccaccgctcctccgaccgcgtcggcgagcgcttcgacttcagattctccaacttccgcgccgtccaggtccctgcagtgtcagacaggctcttcctttccatagtttcagtcgacagcggaaggacaattgcaaagtccagcaaagtagcttctcggagtgggatatgccagtggcctgacacaatcttggaacccatatggttctccaaggacgaagtctccaaagaattcgaagattgccagtacaagattattgtttccttgggatcgacaaaatctggcattcttggggagatttttctaaatctgtctaattttctgaatatagtcgatccaaccgcaatctctttgccactgaagagatgcaacgccggaacagttttacagcttaaggtccaatgtcttggcacaaagtctaagctgagtggtgtcagatcactgagggacatggctccccgtctcgatgaccgtagtccaacgccaaccaatgatgagatggacaataagtcagattgctctgatggtatgttcaacaggagtgttcgttcttcatccgaaaatcatctggttggaacttatcaagatgaatctggaaacagggaaacaagtttctctgcaccagggtcccatcggagttctaattctggagatagtactgcggatagaacaaacttctctcctagagacaactctagtggaggactttatgtgggaaggcaggattctgctagttcctatgctagttatgttagtgctggtcgtggcgatgatgggcttagatccaataattcatcttttagttctcgggcttcaggcccaaatttgctgcaagggaatactccaaaaatattttcaaatggcctttctcaattatctatgggggcatctgactcatctaaagatcttcttgaagctgctgaagaaacaattgaggagctccgtgatgaggcaaaaatgtgggaacgccactctcgtaagttgaaggctgatctagagatgctaaaaaaggagtgttctgaaaaatcaaagcaacatgctgaactagcagttgagctgtctgctgcacaagctgaacgggattcatataggcatgaaatagaagaattaaagtcatccttacaagatgtaaacacacgacagacaattacaggaacacctaaacgttcagactggatagacctgcagaaggaacttgaaggtgaggtgaagtttcttaaagaatcgaatacagacttaaccatacaactaaacaggactcaagagtcaaatatagagcttctttctattcttcaggaactggaggaaaccattgaagaacagagagttgaaatatctaagatttcaaaggtcaagcagactgcttatcctgagaatgggctgttagtaaaaaaagacagagagtgggctaagaaactgtcaatgaaagaggatgaaatcacaattccgagggagaaatcggatcgtgctctcaacattggaaatgcagatggtgcagcttccaatgccatttatcttgaattggagaaagaaaatgcaattttaagggctacaatacaagagcttgagaaggactgctctgaactaacagatgaaaatttggagcttatatataagttgaaagacaatgggatgacaaaaggtcaagttcctcgtatttcagataa

SEQ ID NO: 20595 - DNA, 152 bp, Zea mays
  Clone ID: MRT4577_118784C.1
acgcgctctgtcctgcctatctcgcagtgtttggattcagcgtactacgtgtctggattcagcgtactacgtgtcctattttctgcttgccagcgtgtcctcttggctcgcttggcccgaattcccatcgcgtcatcgatcttgccaagtat

SEQ ID NO: 20596 - DNA, 776 bp, Zea mays
  unsure (1)..(776): unsure at all n locations
  Clone ID: MRT4577_118785C.1
gttgcacgaagagtgcgcagggacgnacagatttctgcattaagcatggtggtggcagccggtgcaagttccaagaatgcggcacgagcgcaaaatggggaacagatttctgctctatccacaggaaggctttgttgggaggcgacaatgccgccgtccctgaagctttgcctgccgcttcagaaaacgacgtcgtgccaagaagcccaagaaggcggcgaaactgtctgaggcctcccaagagaatgccacagcagcagcagctattgctggtaacagcactcaacatatgggcggtcttctcatagctatccctgttgctaaccgtgacatgttaaccaaagccgtggcagcgacggggcaagctgcaatagcctccgcacagatagtggcgccgctgtccatgaaatcgccgacgccatctggagcagcggcggctaccttgactgggagggaggcgggagcaagcagggagatgctgggtctgtagaaagatggtggcagtgcataattcgggaggcttggcgacaccccttgcccagatagttctctgattattgccttctttttagactgagaaaaacctcgaaactttaggagggttgtgcattttgacagactcgggccgtcgactgactctagtgatgttctgtgcctttctcgtttgtaaattgcaatgttctcgtgtattttctcttgtgaccatttggacagtaagcaataatattggtgttctaatctcagaccattatttgtgaaatatcggtgtagattgg

SEQ ID NO: 20597 - DNA, 1400 bp, Zea mays
  Clone ID: MRT4577_118786C.1
tgccaagctcggcctcgcccacgccgccgccagactgcaccatcgagccggcctgtccacctcgccggcctcccggtccatgctccggagaacgggtcccacggcggcggcgcggcgggctctctctcccccaacgacccgtcggacgtggccctgttcctgcacacctccggcacgacgagccggcccaagggcgtgccgctgaagcagcgcaacctggcggcgtcggtgcggaacatccggtccgtgtaccgcctcgccgagacggacgccacggtggtggtgctgccgctgttccacgtgcacgggctcctctgcgccctgctgagctcgctggcttcgggcgcgtccgtggcgctgccggcggcggggcggttctcggcgtccacgttctgggccgacatgcgggcgtcgggcgccacctggtacacggcggtgccgacgatccaccagatcatcctggaccggcacgcgtcgcggccggaggcgtacccggcgctccgattcatccgcagctgcagcgcgtcgctggcgccggcgatcctggagcggctggaggcggcgttcagcgcgccggtgctggaggcgtacgcgatgacggaggcgtcgcacctgatgacgtcaaacccgctgccggaggacgggccacggaagcccgggtcggtggggcgcgcggtggggcaggagctggcggtgctggacgaggaggggcggctcgtggcggcggggagccccggggaggtgtgcgtccgcggggacaacgtgacggcgggttacaaggggaacccggaggcgaacgaggcggcgttccggttcgggtggttccacacgggggacatcggcgtggtggacgaccaagggtacgtccggctggtggggcgcatcaaggagctcatcaaccgcggtggggagaagatctccccgatcgaggtggacgccgtgctgctgggtctccccggcgtggcgcaggcggtgtcgttcggggtgcctgacgacaagtacggagaggagatcaactgcgcgttgatcccgcgggacgggtcggcgctgcgggaggaggaggtgctggcgcactgtcggcggaacctggcgtccttcaaggtgcccaagaaggtgttcatcacggacgacctgcccaagacagccaccggaaagatccagcgccgcatcgtggcgcagcacttcgtgcagccgaccagtgcctgatcgttgatcctagtgcttgccaagtcatgggtcgacggattgggatttcgctacactagctagcattttgccgttgttcccgcattgcgaagtggagatagcctgaatgggtctccctgaataaacaacacatgcatcgtctctcaaaaaaaaaggaaaaagtgaacctctataaacaaacacatgcatcgtct

SEQ ID NO: 20598 - DNA, 831 bp, Zea mays
  unsure (1)..(831): unsure at all n locations
  Clone ID: MRT4577_118787C.1
gccggccggtccgggagctcccgcacgcgcgctccttcctcttccgcgctcgcctccatggccatcgcgccctcccctgcaggcagccgagcagccgagctccctacctggccgcgacctcgccgtgaagctctcacagcgctcctcctctatctcccatggcgcgcgcctacttccctcatggcgctcagccgtccctgctcgcccgaccgccctcacctctgcgcgcttatggcgcccagccgcccctcctctctctccctcatctccctcatgctcggatctcacccttcggccatggaaatcggcaaactcaccctgggttccactagtgctgaccctgctcttctctccctcatctctgcgacttggcgctcctctgcaggtcacgtccaccgctcccagtcgccgctgttgttctctggtgcccgccctggccttcatccccaacgccgacagcccctgccctcaaccatggcgctggccgtcgctgcccctgcttccctgctcggatttcgcccagccgagcccctccacgcgcccttcctgccgcagctcgtcccatctcccatggcgctcggccccagctcggaccgcgcccctgcgttcgacctcccctgccatggagctcgtccttgggccatcgtcttcatctttggacgtgcgctcctccggccaccggaccaccaccgcagcacacgtggtttagaagctctacgcagactcggcagtgcctgctcgtcgtcactgcggcgcgctcgctcctcgtcatcggngcttcggcgtgttcgcgtttgccgtcgagtcgtcgaacccgntctcccctgctcg

SEQ ID NO: 20599 - DNA, 253 bp, Zea mays
  Clone ID: MRT4577_118788C.1
gatcacaatcttccagcaccgcttgatttgcctcctctctatcttcagctcctgacgttcattctccatggtggccggcccttgaaccattttcaaactttgggccctttttcacacgttggtcttcttcatagacgagacaatatcaccaactccatatttgatcggatcaaacatgatcacacggatgctgtcaacgtatcatctcacatacttcacgtcaagaagcttaaggcgcgattgcctctcgact

SEQ ID NO: 20600 - DNA, 320 bp, Zea mays
  Clone ID: MRT4577_118789C.1
gcggaggttgtggctgccagacagcaccgtttgatataccgactgcgctgtatatgccgcctgcgttctatctgccggcgcagagcccgccgtagacatggcaataccgcattcaaccaccagaactaagcccgcgccagcagttccgatcctgcggccgcggtagcgtcagaaggccgttcctgggccagtgcgtaaagttgctgaggcaccagcgcagcccggaggtgacaccctacgactcgccacagtgccaggcgctgtgatagcagtgctgccaccagatcaagcaggtggagccgatgcacaggtaccaggcg

SEQ ID NO: 20601 - DNA, 148 bp, Zea mays
  Clone ID: MRT4577_11878C.1
ctcgagcctttcgagcggctcgagcggctcgagctcgagccgcttacggagccgtgcttcccatgccatcgacgtcatatatcgtaactaaaataaactacaatgatcgcaatgactcaccttttacacaaggaattgattaagaaaa

SEQ ID NO: 20602 - DNA, 322 bp, Zea mays
  Clone ID: MRT4577_118790C.1
acaaccaccaagggggggacttttaaaaggaaaaggcggacaaccccaccgcggacagggaaagggaaccccggtgccccaaagaaaacacaaaaaaaggaagggggaacccaaaaagggggaaacgacagcacccggcaacgggaaaccaaaaccaaagaaaaaaacaaacccaggggggctgggggaaacgaaaagccccaaagggaaccgacgaccaggcccacaggaagaaacggagggccaggttcccggcatcaaggaacctcacaaaggggaacccccccccccggaggggagcccacaaggggaaacacaaaac

SEQ ID NO: 20603 - DNA, 132 bp, Zea mays
  Clone ID: MRT4577_118791C.1
atgaaccgtttttttttcacctgcacgctctcacatctgggatgagtatcattaactacggcgagaacaaacgagctaaacctgaccagacctatttgatcacacatttcgaaaaccactccactaacccct

SEQ ID NO: 20604 - DNA, 269 bp, Zea mays
  Clone ID: MRT4577_118792C.1
gggaaaccccacaaatgcccttggtttttttaataaaaaaatggaatgggcccaaacgggaaaaacccgtaatcaaatttgggggaaacgggccgggaaaaaataaaacccttggggaaaaagggacaagggtcgccctgtgggggaaaaacctgggccttattacaaagttaagggtgggggaaacggtaacccacgccgagaaaaaaacccggcaaaaaaaattaaaactcctggtaattgcaaaaaggcggggggacccaaaattt

SEQ ID NO: 20605 - DNA, 535 bp, Zea mays
  Clone ID: MRT4577_118793C.1
ggggggggggttttttttttttttttttttttttgtttttttttttttttttttttttttttttttttttttttttttttttgttttttaagggaaatcggggtacgccactctcagggaaacaataggggggaccttaaaggggcaagggggggggggggggaaaactcttcaggggggggaggggcaaacatttggggggggaaacaaaggggtaggggaatttgggggaatgggggaacacccacatgggccccaatttaatgttaaaaaggcggggcacaggtggttaggccatttttgcaacgctttgggggggggggaacatgggaaccaaaggggggccttggggggggaggggccaccggtggcaaacgtaatccccggggccggcgggcgccttgggggccttcggcaccggccggggacgaatttggggcgggctttcccccgccagaaagtaaagggttaaggggctgcccagggggcaaatccagagggggggtggggaccaactgtgttccaacaagccccg

SEQ ID NO: 20606 - DNA, 374 bp, Zea mays
  Clone ID: MRT4577_118794C.1
gggggggcccaaaaaaaaaaaagatcccctaaagaaacaggggggggggcgggaaaaaaaaaaggggggaaacctgctttaaacccaaggaaggggggcaagggaacccttaaacgggccccaaaaaaaaaggggaaagcaaccccccaaacccccccaggggggatccgccccaaaccaaaaaggacttgcccaaaaagagggaacccaaaaaagccccaaaaccctaaaggggggggggaacccttaaaggaattcggccctctaaaaagaaaaaaaagaacttaaaccccttaaaggggatcccccacaattttcccgttttgggggcccccggaatccctaaaattgggcagggcaaatttttttggaaa

SEQ ID NO: 20607 - DNA, 305 bp, Zea mays
  Clone ID: MRT4577_118795C.1
ggccacctgtcagagtcccctcttggggactggaagacaatgttgtctgcatacagcctgctcgaaactttagtcggcctgatggcttagaggactctgaggatagcaaagaagatgagaatgtgcctactgctcctgatcctccaagtcaacatttacgtgggcatgggacaggcttttgctttgattccagctttgatgttcacaagaagtgtcccctctgtgagttaatgtttcctcctaactatgatcagagcaaatttgaagaacatgttgaaagtcactggaaggtgtgcccgatgtgc

SEQ ID NO: 20608 - DNA, 198 bp, Zea mays
  Clone ID: MRT4577_118796C.1
gaaaagtctgttcaccttttgcacttagatttattgaccgcgccatgcaatttgggtatcgtaactttagaacaggtgccgatacataacatcaatcatctcccctctgtatcttttctccaaaggctcttctactacatatggcatccatgatatcctccattattcttcaaaggcactctctagagcaccatgctt

SEQ ID NO: 20609 - DNA, 622 bp, Zea mays
  Clone ID: MRT4577_118797C.1
ccgttaaatcggccacacaacaagcttttatactggttacagtgtcctgggcttccaattgtagggaaagtataaaggaaactgcaagccccattgaccttttgtttaagtataaggggtaaataaaaggctaaaatcaaagagtattccagcagcacccacccttgatttccttgggcagggccccatttactaccaccaatcagcaaagtttttttgaagcaatgctgttcgaaagggcctttgtttctttgagctgaaaagcgtcattcccttggccttgggcaaccccgtttttgccgccaccgccttttcctttgaggggcccatttgaaggggttagccagcccaacaccttgaacccgttaggacctttgggaggcccaccagcataaataacggttttgtttgatgcctcatcggggctgaaaaacattataggcaaacccttctggcccatgactttgataaccgcctcacggacagccggggtatcaaaacccacttccacttgagtaacacaaaagggtttatttcctgaaaaagcagtttttgcagcatccattggggacttcacagccttttgaatattttgctcccccatttttttctttgccttcct

SEQ ID NO: 20610 - DNA, 1798 bp, Zea mays
  Clone ID: MRT4577_118798C.1
cccacgcgtccgcccgcgggcaaaagtcccctgtcccccgtacacaccccaccgcaaaatggcactcgcgccatcacccccagcgctgccgcccaacccggcgctccctttgccgtggtgggggcgggccggccgcggtgcgctcgtccgcgcccgcgcccgcgccgtccgcgcggcgctacggcccccgagccagtggtccgtcgggagctggcggggccgcccggcgcagcagcagcccgagtacccggacaaggcggacctggaagacgtgctgcggacggtgggaacgttcccgcccatcgtcttcgccggcgaggcgcgcaccctcgaggagcgcctcgcggaggccgccgtcggccgggccttcctcctccagggcggcgactgcgccgagagcttcaaggagttcaacgccaacaacatcagggacaccttccgcgtcctcctgcaaatgtccgttgtgctcatgttcggaggccagatgcctgtcgtcaaggtgggaagaatggcaggtcagtttgcgaagccaaggtcagatggttttgaggagcgggatggattgaagttgccaagctatagaggggacaatatcaatggggatgcattcaatagggagtcaaggttgccagatccacaccgcatgataagggcgtactcacagtctgcagcaacactgaatctgctgcgtgcattcgcaactggaggttatgctgcaatgcagagggtagcacaatggaaccttgatttcacagagaacagcgaacaaggtgataggtacatggagttggctcaccgagttgacgaagctttggggttcatgtcagctgctgggctccctttagatcaccctataatgacaacagcagaattttggacgtcacatgagtgtcttcttctaccttatgagcaagcgctcactcgtgaggattccaccacgggcctctattatgactgctctgcccacttcctatgggtcggagagcgcactcgccagcttgatggtgctcacgttgagttccttcgaggcattgccaaccctcttggtatcaaggttagtgacaagatggacccagcagaacttgtgcggttgattgatatattgaatcccgaaaacagggctgggagaataaccatcatcacaagaatgggacctgaaaacatgagggtgaaacttccacacctgatacgcgctgtccgtggggccggtcagatagtaacatgggttactgacccaatgcatgggaacactatgaaggccccttgcggactcaaaacccgctcgttcgataggattttgggtgaggtgcgtgcgttctttgatgtccacgaacaagaagggagccaccctggaggagtgcatctagagatgactggacaaaatgttacagagtgcatcggcgggtcacgtacggtgaccttcgatgatctggggtcacgctaccacacgcactgcgacccaaggctcaatgcctcacagtctctggagatggcatttatcatcgccgagcgccttaggaaaaggaggatggcctcgtcgcctttgtacacgaaccagctgggttccattccatcaatgggtctgtgaacaacactaggttcactgtcaaggactagtccttgggttttgtttcagctgctgtgtcaaactttgctggcatgcactggtaaactagatagcctgctgtactgctcattcccggcactgggtctgccctcaaagtataatagatactcatcactttttgaccactctatttatcttgttcattattcctggaatgttttcccgcccccc

SEQ ID NO: 20611 - DNA, 400 bp, Zea mays
  Clone ID: MRT4577_118799C.1
aaatactatagcgacaaccaattttggtacggagggagtacaatgcaaccgatgaaaagggaccagtcaatgctcaagctgtgtgcatgcgttgaccaagagctagcttgaatgtaataatgaagggcagagctaattaaaacaaatccaggtttgttttcgcttgtggaattgtgcgctgaactgattaattttattctgtcagattaataagcagctatctagttagctagaggcatggaggagcagcagcaggcagcttccttgactggaggaaggtcttgttcttgccgtccgcggatgcgaggtaggcgaggaaggtagcgaagtcggtgtccatgtaccgccgcgggttgccggcctcgtcgtccaccagctccggcgccggcccgatcactcg

SEQ ID NO: 20612 - DNA, 212 bp, Zea mays
  Clone ID: MRT4577_11879C.1
agcaatgggtaatgggtgacaagaaagtgccacagtgtgctcatgatgctctgtatcaggccctcaccgacctcaatctgcttgactataatcaggggcaggggaccaagcgggattgcgaacactgtcaaaataatcagaatcaacaggccgctgatatgtgcaaacatagccgggaccacaagtagcgagggcatttatatcttcatggg

SEQ ID NO: 20613 - DNA, 428 bp, Zea mays
  Clone ID: MRT4577_1187C.1
ggaaaacaaaaaaaaaaaaaaataaaaagccaggcccccctcataaaaaaaaaaagcaaaccccgtccttataaaaggggaaactcgaacaaaaatggggctaataaaaccacccgttagttttatgggaaaaaaaaaaaggcatatcccggggggggaaaggggggcaatcaaaacttgggggaaaacgggaaaaaaaggaacggaaaaaggcaacacccacccggctaaattggggggagcttaaaaaaaattttccgggagcttcctagaaaaactttcccgggacagggaattggcacatttttttcggggcgcagttgaagaaaatttcaggggagccaaaccctgaaaaaaaggccccagggacaaaaccattgaagggcccgctgggggccccaccgggaaagtaaaccctcccaaccggg

SEQ ID NO: 20614 - DNA, 573 bp, Zea mays
  Clone ID: MRT4577_118800C.1
gccgaagtggacaccttggtgcatggagcatccgaaagatgttgactgggatgcactgatcaatagcattttcagagaggctgagaatgtgccagagattgactggagcgagcccagagaggccgaatgaatggaggatcttattgagaataatgatgggcactggacaaacaggattaaaagctatgacacaagccgaaatgatcctacaaagaacacatgcattgtcgtgcctgtaaccatacttacattaacagcacatttctgcacaaaagcgtgctatacacgcaaaaaaacaccgacatattattccaaactcagtgaataccttcttgacagacctgataataatgagggaactagctgacaatttctgctattaccagcactaattataattcactgactggtgcatgggaatgggctaaaaagacattcatggatcacgctggtgataaaagagagcatatctgtgcgagggagcagcatatgacatgccaaaacatctgaccctctatggaatgcatctaaattggagatggtgcaccatgggaaaatgcatggatttatgcg

SEQ ID NO: 20615 - DNA, 718 bp, Zea mays
  Clone ID: MRT4577_118801C.1
gcgattgggactctcgaggccggccgggacccaacgaacaccacgaccaccgccgtcgccgcactttgcattccctcacgagtggcatctgacttgctcttccctcaattcacttctctcatacccgtgcgcttcatctcgcactcccgcccatcatggctaaccaaactcccgccgttgtcatggacaacggcacgggtttctccaagctaggtttcgccggtaacgattcaccctcattcgtcttcccgaccgcgatcgcgaccaaggggccaactggcggagctggtggttctggatcaggacgaccggctgtcgcgaacaagccttcatttcttaccggaggtgctggagctggaggccatctgagcggaaagcgaggaaccgaggatctcgacttctttatcggtgacgaagcgatagcagcttccggaggacctggatatggacttcactatcccattcgacatggtcaaatagagaactgggaccacatggaacgattctggtcaaactccatcttcaagtatctccgagtcgagcctgaagaccactacttcctccttaccgagcccccgctgaacccgcccgagaaccgagagaacaccgccgagatcttcttcgagtccttcaactgtgctgggatgtacattgccgttcaggctgttcttgctctggctgcttcttggacatcttcaagggccaggatcgctcgctg

SEQ ID NO: 20616 - DNA, 502 bp, Zea mays
  Clone ID: MRT4577_118802C.1
gacaaaaaaaaggggattgaaattgcaaactgggtttgggaaaaaataaatggcgagggtttgcaacagacaaatgctaaaaaacaacccaaggcattgggcagaaacaaagactgggaaagccgggggaggacaagggttagaaaaacaacggggggaatggcgtctatgtaaaccatgcaagcgtgggcacaaatattccctaaaagaatcaaaacggaggggggcacgaataaaccagggtcccatccaaattaggaagggggggctgctgattcaaaaaaaaacaaaccgggtggatcaagggaagaagaaccccggaggacaaggagcccgaccccccccctgaccaatggaagggggacgctccagaccgttgaaaggggggagcgtgggaaaaaaaaaggtacgggatcaattgagttcaaggggcaaggaccaagcgagggaaggggggccttccccattgaaaaaaccgggagccctcggaaaggcgccccac

SEQ ID NO: 20617 - DNA, 209 bp, Zea mays
  Clone ID: MRT4577_118803C.1
gtaagctcggaattcggctcgagactagacgtctgctcttcttttcctgtactgcccgactgaaccgggccatgcaccagtgtccaaacttctccccaaggcttaaggagcagggacgctccctagacgtccaactttggagaccaactgtgtcataccctgcctgggggtcaaaaacatagaaatttgtgcctttaggggcatacctt

SEQ ID NO: 20618 - DNA, 389 bp, Zea mays
  Clone ID: MRT4577_118804C.1
ataaaaacttctggcggggcttattatccaaacatatgagcttgctccaagctaattcctaaggccctttgcttttcgaagttcctgggggggcattgtcccccccccaaaaatccaggggctttcggccccccccttgatgggggccagtttgccctcgccctccgggacgggggggggggaaaatcccttttgcaccccccgggggcaccccggggggtcctttggggggccctccatttgcccttccgggcccgggggaatccccccccccatgaggttgctaagcgccagcccccggtagtcccccgggatgccccccagctcccggaaaaatttccttttaaactccggccacgggaggggcggcccaatgcccaaggtccggt

SEQ ID NO: 20619 - DNA, 346 bp, Zea mays
  Clone ID: MRT4577_118805C.1
gcatgggtggcgcgcgcgcaggagtacgtgaggagcgcgaggggcgtgcgggtgttcacctgcgtctggctgccggcggcggcctccgcgcccaccaaagcgctcgtcttcctctgccatggtacgtcgtcgtcgtcgtagaccacatccgcacaagcaccttgctctgctgtgcgttgctcaagctatatgcgtcgtcgtacgtacgtcccactcgatttcgatgcatgggttgatcgagttccttctgccaagtttgcgaactatagtatgcgtagcatatgcatatagagcatatcgcacaccaaagcataaattaaaaagagagcttcgagatttcctaacg

SEQ ID NO: 20620 - DNA, 1562 bp, Zea mays
  Clone ID: MRT4577_118806C.1
cctcgagccggcggggccagtctactagatcccatccacctgattggaataaccagcagcagcaaggtcagcagccgagggcgagtgggggagccgatgcaccgctgttgcccatgggtccgatggctgccacagcggcggcttcggagcccggcggcttgccgagaagctcgtcaacgtccagtgccgccttggccatgcacgcaaggcccaactcgatggcggagcgcgcgcggctggcacgaataccgaatccagagccggcgctcaagtgccctcgttgtgactccaccaacaccaagttctgctactacaacaactactccctctcccagccccgccacttctgcaatatgtgccgtcgctactggacgcgtggtggatctctccgcaacgtccccgtaggcggaggctgccgtcgcaacaagcgttcgtccaagtcctcatcctcctctgctgggtcttcctcctcaaagatgtctccctcaggaaggctactgggtggtccatcagctacaccgtccaccaccccaggcactaccggtgcgatcattactccgggtctcagctctttctctcaccacttgccgttcttgggctccatgcacccgtcagggcccaacctaggtctagctttctccgccggactgccgctagtcggcatgcagcacctggacacggtggatcagtttccggtggcaagcggcggcggcaccaccataggtgcatctctagagcagtggagagtgcgacagcagcagcagcagttcccattcatgactgggggaatactggatctgtcgcagccgccgacgtaccaattcggtttggaagctaaccgaggaggcagcggctcagctgcggtggcgttcaattcaggacagaccacgacgaccagtgctaccacgggaaggcaggaagggtcatcaaagaagatccgggattgtaaaggagaagaggtgagcttacagaagcagtacatggtacctctacgccacggatcaggatcacacggtgtctgggatgggagtgctggtggaactggcagcaacggtggtggtactggcaatggcggttcaagttggccaatgaacatgattcctggattccattcttcgtccactagcggttgcaatgacagtggcttgtcgtagtactctctagctaggggctggggcaatgtcctatcaagaaaaatattttggagatgcatggttgagtctgagcaaatgctagctatagctaggacgatggaggaacaggcgatgaccaatccacaggcatgttcatcatctgctattcttcatcggaattgtagaagcacactgctacctcatgatggtcacaggtaggagtttaaagtaaagctgctctttgtttaaacctttttctgtcatttggttttgaacttaaaggtgttctctgcattgtgtccatagcggtcgccacttttctacttttcacactattgttcacagggattaattaatcaaatttggtgcctggtatactatgtgataaggtatatttgacatggacgaaactgattaagttgtttcatc

SEQ ID NO: 20621 - DNA, 624 bp, Zea mays
  Clone ID: MRT4577_118807C.1
ggccgcttttttttttttttttttattttttttttttttttttttttttttttttttttttttttttttttttttttttttttttttttttttttggttttttttgggggggaaaaaaggaaaaggttttgggaaaaagttacccgggcacaaaaaggcccccaaaaaggggacccaacaagggggaacccccccatagggtcccccccacttcgttggaaaaattccgggggaaaaaatttttttccggggggggtttacccccgggggggaaaaaaaaacccggcctggaccaccaaaccttaactggggggttccatttaaggggggggggcaaagggggcgccccggggccccccccccgggggtggtcccccccgggggggcgccccaagaaacggccttcaaagggttgccccccaagggaaacccacccttaaaaccaaaggggcccccccgggtgcccccccgaaaagtggggaaaaaagggcccccctaaacgaaaccgggaacgccctggggggtaccttgcggcgcggcctggcccgaaaccgggtgctcactaaagggggcggacttttaaagcccaaacggaaaaaccaccggggggccaccggggggggg

SEQ ID NO: 20622 - DNA, 503 bp, Zea mays
  Clone ID: MRT4577_118808C.1
ttttctcatacgacacagcctgacgaaaccttctcaaattaccagaattagcggtttactgacttcatgtacaatacagaagtttagcatgtgtaaatatatcaagcaagcacaaaccacgccatggtgtaaaaactaaagctaaaaccttcagaatcggaagcgactcgtttgttgcatttagctagccacctcaactggcgcagaccctttgtcaatggaggctttcacagcatccaaaaccagctgcgtcttcctggtgatggccggccacttgccctcaggcttgcccccagcatcccggatgttctgcacaagcctcgcgaattcctggaccataagggcctcctgtggcaggtctgttgccacgacgtgcttgcttggcagaggatcccacccaacgtggagctcagcgaagttcgacttcgaagccacctggaactccgccgacttctcttcgtatgggatgacaaagtcagtgacatagacagttccgtttgtgc

SEQ ID NO: 20623 - DNA, 1595 bp, Zea mays
  Clone ID: MRT4577_118809C.1
ccggcgggcatccccacgcacacacgtcggtccaaacacgcgccgtccgctcgcggcttctccaaccaaagccgtgcagccaaatccgaagggtagcgtagcacggggacgacgccatgagccgcgcgctcctctcccacgtcctccaccgtccgccgcacttcgcgtacacctgcttaaggagtggcgttggtgcccgaggaggagtgctcgcttctggcatccacccactccgtcgtctcaattgcagcgcggttgaagccgttcccggccccaccgaggaggcgcctgctcctcaggcaaggaagaaaagagtagtttctggtgtacagccaacaggatccgttcaccttggaaattatctaggggcaattaagaattgggttgcacttcaggattcatatgagacattctttttcatcgtggatcttcatgcaattactttaccatatgaggctccactgctttctaaagcaacaagaagcactgctgcaatatatcttgcatgtggcgtcgacagctccaaggcttctatctttgtacagtctcatgtccgtgctcatgttgagttgatgtggctattgagttcttctactcctattggctggctgaatagaatgatccagttcaaagagaagtctcgcaaggcgggtgatgaaaatgttggggttgcacttttgacttatcctgttctaatggcttctgacattcttttgtaccagtccgatctggtacctgttggtgaagatcaaacacaacatttagaattaactcgtgaaatagctgagcgtgtaaataatctttatggtggaagaaagtggaagaaattgggagggagagggggtttgctatttaaggttcctgaagcccttattcctccagcaggggctcgtgttatgtccctaactgatggtctctccaagatgtccaagtctgctccttcagaccagtctcgtattaaccttcttgacccaaaagatgtgattgcaaataagatcaagcgctgcaaaactgactcattcccaggtatggagtttgacaacccagagaggccggaatgcagaaatcttctctctatataccagattatcactgggaagactaaggaggaagttgttagtgagtgccaacacatgaactggggtacattcaagactacactcacggaagctctaattgatcatttgcagcctattcaggttcgttatgaggagataatgtctgatccagcctacttggataatgtccttttagaaggagcagtaaaagctgctgagatagcggacatcaccctgaacaatgtttaccaagccatgggtttcttgcgtagataatgtatgggtcaaaacatttgttcgggagctcttacttttttttttttggctttgagcttcgagcatgcttcacattagggcgctactgtttttcacacgcagggccttcattttacgacttcaaccccctttgagtcgtctcatgatttccatatcatttgattcatgtgataattttctgtctgctgttccttcagaaaaaaaaaaggaaaaaaaaaaaaaacttctgctggggaaatgttctagtttctatgtttgagc

SEQ ID NO: 20624 - DNA, 444 bp, Zea mays
  Clone ID: MRT4577_11880C.1
gcgagcgagatcagttaggcgtcgaagcaggaggagccgcagccacacgccatcagggaccagctgcatttggtctcctgctgcctcaccaacccgccccatggctgctggcgcaacgtctacgacaccatatcctaggcccagaggctctacctcaacggatggtccgtgttccacaccatccacctggtgcgtgatggccaccaggacatggcactcggcgacctgctcaggaggaagtcgcaggacggcgtgcaggtgttgttgctcgtggggacgatcccacgtcctggagcactttagcatcaagatggtaccaggcatatggttcaccgggtggctccaaatgaaaggttacatgggcacaagggatgaaggtgactcagagatttttttagcgctcttcggtcctaatacggctttgcccacgatctgctaggaaaa

SEQ ID NO: 20625 - DNA, 330 bp, Zea mays
  Clone ID: MRT4577_118810C.1
atgtttgatccagcctacttgggtaatgtccttttaaaaggaccagtaacagctgctgagatagcagacatcaccctgaataatgtttaccaagccatgggtttcttgcgtagataatgtatgggtcaaaacatttgttcgggagctcttatcttttttttttttggctttgagcttcgagcatgcttcacattagggcgctactgtttttcacacgcggacctgctgcttgtgcagggccttcattttacgacttcaaccccctttgagtcgtctcatgatttccatatcatttgattcatgtgataattttctgtctgctgttccttc

SEQ ID NO: 20626 - DNA, 146 bp, Zea mays
  Clone ID: MRT4577_118811C.1
tctgaatgttagatgtgtagaaatagatattaactagtgtgaaagatgctgcaggacacataccccctgggtttacattcaaacgaacctcctgaactattaaacttgcaagtgttctatgaaaaaaattatatgaaaaaaacaaa

SEQ ID NO: 20627 - DNA, 575 bp, Zea mays
  Clone ID: MRT4577_118812C.1
aattcggcacgagggaaaaacgcctaggacgcccacaggcagtcgctctcgcgcgagctgctgtcccgactctgggcccctaccgggccgtcaacgtgcccaccgggcggaactgtactgacgataaccgcgagaccccccccacacagcgcacgtccctcctctgtcgacgcacactggccgcggtcgccagacattgatcggtcgagcaacgcacgctcctggtggctggctccgcccccgcgtaacgcactgcctcgacgtgtacccggtcgtacgtgcctagatctgtgtgcaccaactaaatagagccccgaggctgctttatgcagaacggaccagtgacatctgtacgacagtactgacacagggagttggcgcaattaggagtgatatgatgggtcagccttcggtttaggcactgtaactgtgaccacttgcaaataatgcgacacatcatataggagtgctaaaaaaaaccaggcacgtgcaccaagacactgccatcacagattgagctgtctgatactgccaatgatgatagcgactgcttaatgagcgtcaggcacattcta

SEQ ID NO: 20628 - DNA, 297 bp, Zea mays
  Clone ID: MRT4577_118813C.1
gaggaataatttggtgatgaatgggggcgaacgtgcttcaaggaaggccaaagcatgatgtggcccgaccattaatataaaagacactgctgcggaacgttacaaaatatactgtctcatctaggtagtttagttggactacctttagcacatacccaccttaaacaagaccgggcagactgagagccgtcctaatgaactcatgggttacatgtctgaggttggtccaataatgctgtgcatgctaacggacacgcatcatcgagttttacggaatatcacatttcatatgcgaaa

SEQ ID NO: 20629 - DNA, 368 bp, Zea mays
  Clone ID: MRT4577_118814C.1
ttattcttgtttttgtttcttttgttttcttttaaaaaatgcacctatctatatattctgggagagccacaacacttcttccaaaaaattcattttttaactttaacccataagcaatttaaaaaaggccccaccaatgaagggttgttggaaaaactctattgggtttgctaaaacaaggtgggccaagggccctaattgctgcaactgcaaaagggggccatctatcagcccactgtgcatgtagaacggcacccactggcgttgggtcaaaaaggcaacagggctcaaattagcttgctggctgaatggggggaactgttgctgatgcaaataagcagtagagttcaaaggtgccccttgggtga

SEQ ID NO: 20630 - DNA, 536 bp, Zea mays
  Clone ID: MRT4577_118815C.1
gattcctagtcgctacacctaacgagctacacgagcaccaagacgaggaggagtcgcgtcgcctcgatgcgcgtcgcttactcagggccgattcctcgtcctcctcatcaacgcagcgggcagcctcttccatcgactgaactcagcccgagatgggacaagatcatgtcagatcgcctctgtcgacaatgaccggctggagaacatcgaggacgtcgacgcgaagagcgtgcacctcttcgtactctttcaccatctcccacgagaacaccgagataaccgtgaactgcgacggggacttctctaccaggtatctggactacttgaacaagatccatgtgaatgactgccaagagccagactgtgtccgcgagattgctaccgacaaggatgaccgcaacaatgagatgttctacatcctatgtgctgcatactacggcgaggagaaaaattagactgtattgcacattgctgacaacaaggtcgaggaagactatagactgttttgcacttatatctcagcacatgaagctcat

SEQ ID NO: 20631 - DNA, 293 bp, Zea mays
  Clone ID: MRT4577_118816C.1
cacaagctatcctttatatctttttttctttttttgatggtcattgttttttctttttttctttcttgtccttcttgtatgtacagagttggttgctgcacgtgctctcccatctgagcttgccccctagcctaggaggccggatgagggatcattatgcagccctccataaagagtggaggaagcagccactgcaccgcaagagaggggggagactctatcagcctctcatggaaagacgatgctgatcacttagcctaagccctggggagtcagactaggccaaatgagga

SEQ ID NO: 20632 - DNA, 562 bp, Zea mays
  unsure (1)..(562): unsure at all n locations
  Clone ID: MRT4577_118817C.1
acttctatccctatcttattatgccgacgcctttctcggccaaatgatagaggcgcttcggacaggtagaaggactaattcagtctattggtgtggctatcgaaacttcttcgtctagtctagattggctgtacgggttacagttcttctttgttattggagtcgaggtagccaccaccgggaaaaggaaataggccttcattcgttttcttcctcgtagtcgtcccccggctaaggtatcatcagatatagaagaagtagagactggggggatatagctaaaaaggaatataactcgtccgagggcgtgggcgcaggtgcagtgccagtttcaagaaatgcgtatcgagataccagtatcgggctggtattggctcagggcccagctttacctaagaacaggccttttataatatccatagcgtatatgaccgtagttaccaagccctataacggaattcccaacaacggatgcctatacggctttgtgaaatctagntgtagtaaaggaaagtatagagatttgaaagcagctggatcccaagagcactcttattcctca

SEQ ID NO: 20633 - DNA, 332 bp, Zea mays
  Clone ID: MRT4577_118818C.1
cacgggcacaaccccgaacacaccacagggggggggggggacagagaacacgagcacacacccaaacaaagcaggacgcgaacagagaacggactgcagcagcaaaccaacgactgcaacaacacacagggccaccacgaccagcaagcaaaaaaggcaacaggagaaaaaccatgcgacggcgccacacagcagaatcgacccgaacgtgcgccaccacaccggaaaaaaaaactggcgccagatgaacaacatgtgaggcgccacaacacagagcagccccgggaagcgagtgaccccaaaggacccccctcgcggggcctgggacgcca

SEQ ID NO: 20634 - DNA, 174 bp, Zea mays
  Clone ID: MRT4577_118819C.1
gatgccaacaccttcttggcttctgggacctgtgttcttgctgagcaccctctccggtttgggttgggataacagagcaggagtggcagctgtcccctctccctggggatatgcaacccttagagattgccccagagccccactcccggccaggcgggagatggacccctccct

SEQ ID NO: 20635 - DNA, 250 bp, Zea mays
  Clone ID: MRT4577_11881C.1
ggggatgacgctcgacgaaaaaataccgttggccggattaacattgccttatcttggcgtccaatcttgtcgggggtatcaggctcggccccaaccttgatgccgcgacgagattctttcacctgcccctcccagtgggaatggggggcccgccgcgggccacaaagccgctgttattatatgggttcgctatccaggcctgacttttatcgtcgggggcctggaacactgttcatattcttgccacgcg

SEQ ID NO: 20636 - DNA, 291 bp, Zea mays
  Clone ID: MRT4577_118820C.1
agctatgacaaggtgtgcacccggacggaagcggggcattattattgagggcattgtcagggtgaatagtgcgtggtggggcagatttggacatgatgtagtgcacactgaaccttctacttatgaacacgcagctcaattcattgggaggcgacaaggtgcagaccatgctgatgagtcagctgagcaagggaacggtcatggatcgcaatggctcaaagatgctcagaagaactaccttggttacatatgaatttttgcagctgacacaataccactcctagttgagtc

SEQ ID NO: 20637 - DNA, 414 bp, Zea mays
  Clone ID: MRT4577_118821C.1
aacggttgaatgcacatgcacccagtcgactgtattttgacgacgactgatgatgtatgacacttattcggggatggagtaccagaatattgataatgaaggactacttgaaagagacgtgtctgcagcatgccaattgacttctggctttgacagacaagaatcatgggaatgtcatacagttgttacttagatgtgcaaaccattgggactgatgagactcgacatgtgccaaaaatcgacgaagtctgttaagagtgtccagatggaaaggctgctctggggcgcatccaaacttgaaccaattggatatggtatcaataagctgcaaatcatgatgaccatcgttgacgaccttgtctatgttgacactctcattgaggactatctgagcgctgaaccagagaacgagta

SEQ ID NO: 20638 - DNA, 108 bp, Zea mays
  Clone ID: MRT4577_118822C.1
acagtctctcctcctcacagaagcctggagctgggcatccaagaagaagcagcctcatgtgttttctggtgtcatcgtaggtggctacctatggcttttgggcttctc

SEQ ID NO: 20639 - DNA, 504 bp, Zea mays
  Clone ID: MRT4577_118823C.1
aaaaacccccgtacgggcccgtttttatttgatataaaaatttgtataccaaacagccgacaaattttgaaggggatgacccttcacaaaggggcttattggaaagttgaaataaaaaaacaaacgacaggttcacaaataaccaatcgttggacaacagtcgtttggccctttttttttcacgtccttgcttataattaaacaaaggacctccagggaaagcccattacgagcaggccccggccaacggcctccaaatttgttttccataaggatgcaaccggctttacccgcacaaaacccaattttggcaaccaaccccgagtcaacccagcgattaaaagggttttttccggggggggtttcacaacaccatttgcctccagcttcaccctggggggactcaaggacaaaacccaggacgagcccgatggcgacaaaacaccccctgagctgccctgttttgccttccattgaaacaaaccccctcgtgccaaattcctg

SEQ ID NO: 20640 - DNA, 619 bp, Zea mays
  Clone ID: MRT4577_118824C.1
tcgcggagctacctcagctgccgtgtcctgcacagccgccgcttccgcaccggttccgacggagcaaaggcgaaagcgagtagcaacaagcaaaagcccagatcgataatacgatggggcggtcgccgtgctgcgagaaggcgcacaccaacaggggcgcgtggaccaaggaggaggacgagcggctggtggcctacgtccgcgcgcacggcgaagggtgctggcgctcgctgcccagggcggcgggcctgctgcgctgcggcaagagctgccgcctgcgctggatcaactacctccgcccggacctcaagcgcggcaacttcaccgccgacgaggacgacctcatcgtcaagctgcacagcctcctcgggaacaagtggtcgctcatcgccgcgcggctcccggggcggacggacaacgagatcaagaactactggaacacgcacatccggcgcaagctgctgggcagcggcatcgaccccgtcacgcaccgccgcgtcgcggggggcgccgcgaccaccatctcgttccagcccagccccaacaccgccgtcgccgccgccgcagaaacagcagcgcaggcgccgatcaaggccgaggagacggcggccgtcaaggc

SEQ ID NO: 20641 - DNA, 667 bp, Zea mays
  Clone ID: MRT4577_118825C.1
gatgtttcgtcattagactcacttaccccaaaccctcaaccccagagctgctgaccgtccgcatcaccccatgtatccaagcaatcatgcgcaggcgcctcaccgaggagcccaaggactggaacaataaccatcccacacactgtcctggaaagacagtaaacccttgccgacgctcacatcaatctcttgttctaggactcgctatcatccctcggcacatgatttgactgatagggaaagtgtgtactacctacttacccttctttacagtgaagatgactccaagaagacctcccacatgatactgctatcattgctgtttccaaccaaatgcatatccttcaggaacacgctatctctcaattctccatgaagatactggctgctgaactgatatcaatgaaaaccacagtatatgtggaacacaatactcgcttgattattgctctccatgtgatgctgaccaaactgatggataacgcctattcatccaccattgaacagaatataagagacgtggtcatctgcagaacaagcaagatcctgctcagccctgataatggtgatatatcagagatgcatgatgcatactgcacatgcgcataatattggcaaatgtaaaaattatggtctccaattggatctaagaagacataaattgact

SEQ ID NO: 20642 - DNA, 256 bp, Zea mays
  Clone ID: MRT4577_118826C.1
gtggggggggggtttttaaaaaaaaattttttgtttttttttttacaaaaaatatcgagaaaaatttcaatcaataaattgattattatctagggaaacacatgttggtttaagggccccattggcgagtacatttaaaatataatttaaaggggtggggcgggaaccatagattactgcaaagcagggttcataaaaaaaaactagttgtatggcataaattggagtaactgatgcaggaagggaacaaccaatg

SEQ ID NO: 20643 - DNA, 1822 bp, Zea mays
  Clone ID: MRT4577_118827C.1
gtctgaaaaaatacttatatcgttcaatacaatcttccagctactactttgttctgaacctttcgccatcttcttggcaggtaagcagaagcctggctagctggcctctggtatgtggttggccaaggattacaggatttcaattagtaacaatcacgatttgttagcatacaaggtgcagcatttcaattagtaacaatcacgagttgcattacaatcttgatcctcggtgaggtctccccgagggctcgagcaggggaatggtgcatgcaaccaggctcagggcacatgtacacctggtggcgctatctcacgcatcaagggaggttgtggccgcggcggtgcaattgcagcactagttctgctagaagcccttgccgcacaccttgcacacgaagcggttcgtggacagcagtgtcctcggcgagagcgcaatcgcccggatctggagtcttggggaggttccgcttcttcttgaccggagccggaacagcagccaccattcggctcgagtcgcggagctacctcttctgccgtgtcctgcacagccgccgcttccgcaccggttccgacggagcaaaggcgaaagcgacgaagtagcaacaagcaaaagcccagatcgataatacgatggggcggtcgccgtgctgcgagaaggcgcacaccaacaggggcgcgtggaccaaggaggaggacgagcggctggtggcctacgtccgcgcgcacggcgaagggtgctggcgctcgctgcccagggcggcgggcctgctgcgctgcggcaagagctgccgcctgcgctggatcaactacctccgcccggacctcaagcgaggcaacttcaccgccgacgaggacgacctcatcgtcaagctgcacagcctcctcgggaacaaccaaaccaagcaagcaagcaagctgaagaacgtcctccggttgttgccttgcctctgcctgcaggtggtcgctcatcgccgcgcggctcccggggcggacggacaacgagatcaagaactactggaacacgcacatccggcgcaagctgctgggcagcggcatcgaccccgtcacgcaccgccgcgtcgcggggggcgccgtgaccaccatctggttccagcccgacggaatcgagcccgaacaccgccggcgccggcgccgaagcagcagcagtggtggcggcggccatgaccaagacccgctggtgaagtggcttttggaagaggagcctgccaccgtcaaggcgcccaggtgccccgacctcaacctggacctctgcatcagcccgccgtgccagcatgaggacgacggcgaggaggaggaggaggagctggacctcatcaagcccgccgtcgtcaagcgggaggcgctgcaggccggccacggccacggccacggcctctgcctcggctgcggcctgggcggacagaagggagcggccgggtgcagctgcagcaacggccaccacttcctggggctcaggaccagcgtgctcgacttcagaggcctggagatgaagtgaacgaaacgaagcccacacgtcctttcttctccttttgttgtcggttgtagtcttggcttgttggatttggatagagctagttggttactagttgttagttagaagatagtgcaggatgatcactagctactggctacctcgacacagtagctgctcccttctcttccattctatgtaaaaaagaaacaaaaatacttagggggtgtttggtttctagggactaatgtttagtccctacattttactccgggttgcttcccggattctttgtgttgtaatgtaactactactactacaagtagtagg

SEQ ID NO: 20644 - DNA, 649 bp, Zea mays
  Clone ID: MRT4577_118828C.1
ggtcgccaccaccatcgctcctcctccccgccgccaggggctaggacgaggcaggagacagaccgacagccggcgatgtcaccgccgacctgtcagacatggagacggggcccgagcaggaggcgccggcggaggtggatcccttggtggaatggtggctgctgttccggctccggtcaagaagaagcggaacctccccaagactccagatccgggcgattgcgctctcgccgaggacactgctgtccacgaaccgcttcgtgtgcaaggtgtgcggcaagggcttctagcagaactagtgctgcaattgcaccgccgcggccacaacctcccttgatgcgtgagatagcgccaccaggtgtacatgtgccctgagcctggttgcatgcaccattcccctgctcgagccctcggggagacctcaccgaggatcaagattgtaatgcaactcgtgattgttactaattgaaatgctgcaccttgtatgctaacaaatcgtgattgttactaattgaaatcctgtaatccttggccaaccacataccagaggccagctagccaggcttctgcttacctgccaagaagatggcgaaaggttcagaacaaagtagtagctggaagattgtattgaacgatataagtacttttt

SEQ ID NO: 20645 - DNA, 245 bp, Zea mays
  Clone ID: MRT4577_118829C.1
tacagtcctcgaatcaataaaacagtgcaagcagaatgctgaaatggcgtgccatacaatggccctctcctccacagtcttcgccggctaggcagcgtgacgtgtcagcggctctcgtcgtttaggcccgcgggactatgcgcaagacgggagaggaggagaaggcgaggtggaatctccagggcacacgtgagaggggctcctatcggctagtgtacctgggggcgctggccggcaagaacacc

SEQ ID NO: 20646 - DNA, 395 bp, Zea mays
  Clone ID: MRT4577_11882C.1
cccaaactgggggtgggggggggggcaaaaacccaaaattttttgggggcccccaaaaaaattcggattggggggaaaaaaagatggaccaaggaaatgggggggttgtaaaaattccggaaaacaaagggggcccaacaaatctaggtttcatccacaaagggggggggggctccccaaaaatttgggtttttttgggggtttaaggccttttgggggctttcatgggcccatgggggggctaaaaagcctaatttttgtcctaaggcaaagtttttgggtcggccggggctttaatttttttttgggggtttccttcagaaaagggggggttgggaaaagactcggggggaaggggggcttttgggttttaaaactcagccataaaagttttt

SEQ ID NO: 20647 - DNA, 924 bp, Zea mays
  Clone ID: MRT4577_118830C.1
ttgaggcttacatgaattgcatgtccttcccctgcggtgtggttggcacgatctctgagtacaagattgtgcttgatgagaagccatcagagagttttgtcaaatttgatgcactagatggctcgaccacttgcagctgcaagaagtttgaagctgttgggattcaatgctgtcatgtactgaaagtgctggatctcaagaatatcaaagaacttccagaacaatatattttgaagagatggaggaaagatgctcgttctgttcaaattggggaggaacctacctatgggtctggcagtgtcatgcgatcaacctcagaagctcgattcagtaacatgtgtcggttggctagcttgattgcttcaagagctgccaaatccgaggatgtgatgtcatacatcgaaagtcagtcaaatgctattcagaaacatctggatgatattctacacacaagctatcctgatatgggaaatcacactgttgcttcaagtagtcaagcaatttcctttgtaggcacccaacatcctgaccattccacaccagtagtggttgcacagacaacaaatggcctgatggggctttgacggcgcacatttgatcatactggcaacattgggctgcatgattgtcaggaattcctcgtcctccagaacttgtattcgtcagtggacaactgaacgggtcagtcggtctttgtaaatttagttgggcattagttgaagtccgtgtacagtatttatcttggccaagttgatgtagtttagttgaagtcagtgtacagtatttatcttggccaagttgatgtagttgtggtgctaattatattcagttttgatgtaccagtgccttctgtgcatcaaatggcatttttgtacattttagatttctggtccactcctggcaaataaggctaacccttttttc

SEQ ID NO: 20648 - DNA, 646 bp, Zea mays
  Clone ID: MRT4577_118831C.1
aagtaaaagaaggggggtcattaatagcatcaacataaacatctctacatctagacaaaaaagcaacgtgttcacaagtaaatgtagagggtttgcaagattttaattgctctatcttagcacttaaaattgcattctcatctctaagacagaaaatagaatcattgcaaacattcaaatctttagccttagaaattaaactagcattttcagttctaaggctagaaattgattcattcaatttatcaatcttagcatttaagctagcattatcatttctaagattggtaattgaatcatcacaaacattaagctccttagtcttagcaatcaaattagcattctcaattctaaggttggagatagtgtcatggcaagtgctaagctccctagtcaatttttcacattcctcacctccttaggaataggcattttaacccttacaaggcttctaatttccttaaatagggagtccttttggctatcccaaagttcatccttcttatgaatggcactaatcaattcattcaatttttctttttgttgcatgttgagattggcaaaaagagtaaacaaatcatcctcatcatcactagagctagcctcatcactagatgttgcatacttagtggaggatctagagtcg

SEQ ID NO: 20649 - DNA, 320 bp, Zea mays
  Clone ID: MRT4577_118832C.1
tgggcgcatgcgtccatccacgcttacttccacgcgtgcacccacgcgtggcgtttatttatcttggggtgtggggaacgtgtgcttcccacacatgcttttaatttttttaaaatctccatttgcgtaagctcagtctggagtttacaaatgctttgagtcctgcgctcgtatcctgcttttcttgtctaacagaaaacaaggcatttgctttgttgtcacatggtggcttacaaagtggtggggcaaacattatattctagttacactttgtttcttcttgtggagttctttgaacggccttttattgatataatatt

SEQ ID NO: 20650 - DNA, 218 bp, Zea mays
  Clone ID: MRT4577_118833C.1
cggaagcgtgggcgagagcgtgggcgagagcgtgggcgagagcgtgggcggacgcgtgggtgagaaactatagtcctctatccttctccgtcattgcttggtgtgacaccaagcaatgacgcgagagtgatccgagtgactatagtttcgttgacccacgcatccgcccacgcgggggggcgggcattcgcctacgcgttcgcccacgcgtccgctgg

SEQ ID NO: 20651 - DNA, 106 bp, Zea mays
  Clone ID: MRT4577_118834C.1
gagggcgtccggccagatatgggcttgtgaacttgaccaccttggacccaaaagaaccatacttatgggccaagcactacaccgcatgcaggaaccaactaaatgc

SEQ ID NO: 20652 - DNA, 144 bp, Zea mays
  unsure (1)..(144): unsure at all n locations
  Clone ID: MRT4577_118835C.1
tttttccatactgttttgttttaaggtacaggggagcccganccaaacaaaaaagccaaattccccccagatagttcaccgtacaaaatacatccccgagcaacccgattttacaccaagcctcacaaagacactagaccagta

SEQ ID NO: 20653 - DNA, 425 bp, Zea mays
  Clone ID: MRT4577_118836C.1
gcgcgcgcacgcgagcgtaagactccgcataccgctagagccacacccacctttctttttcctggtctcctgcgcccgatggctgcgttccctacatatgcgggtgggacaccttcaaacccaagaccgcaaatgataaccacatacatgatgataggaaagagatggggctgacgttcaccaagctgatcagacgactgttcgccaagaaggagatgcggatcctgatggagtgactgtgcgccaccggaaagaccaccatcctctacaagctgaagctcggttagatcgtcaccaccatgcccaccataagattaaatgtacaaactgtggagatcaaaaacatcatactgactgactgggatgttggtggccacgacaagatcatgccactgtggaggcattactttcagaacacccagggt

SEQ ID NO: 20654 - DNA, 425 bp, Zea mays
  Clone ID: MRT4577_118837C.1
aatcccgacacgccgcgccacctgaacaaagtcaccgaaacgcactgatagccgagaaagccgatgagacgcgccgaggagtcccagttgaagagccccacccatgatcagatcgtcctgcttagccccttgacggggccgatcgtcgcgttggccgacgtgcccgatccggtgttctccggcgggatgttcggcgacggcatcggcatcgacccgctcgcgggcaagctcgtcgcgccgtgcgcgggcatcgtgtcgcatctcgcgcgcacgggccacgcggtgacgatcacgacgccgcaaggcgcggaagtgctgctgcatatcggcatcgacaccgtcgagctgaacgggcagggcttcgccgcgcacgtcgaggccggcgcacgcgtcgaagcgggcgatctgctgatcgagttcgacca

SEQ ID NO: 20655 - DNA, 167 bp, Zea mays
  Clone ID: MRT4577_118838C.1
gcaattaacagggaaaatgcatagatgtgctagatcaaccgttccagctggcagcagggacaagtacattgcggctcttcactgaacatgatctagtctaactgcacggccgctaatggtaatatgtgcttaagacaggagatcactgtacgtcattttcggggact

SEQ ID NO: 20656 - DNA, 999 bp, Zea mays
  Clone ID: MRT4577_118839C.1
agaatagaaagaattttagaactctgatagtaaataaagacagatcgacattttagggttagggtttaataacctaatcctaaaaggttttaaaaactaatcaacagagataatagtggctcgggatccaacgatgcccgaccaagaaatagtcaagaaaaacagaaacgaggatcgggttagggttctttaaccctaaccgatttaaccccaaaaaccagatcagtcaaagtgcacagtacactgtttatttatgaccggatccacgagtaaataacagaatccactgaaaatcgagtcaacatagaccgaaatggctcgggatttctgaatccacggccaaggaaacagttagaaagagtacagaaacatagatcgggtagggtttacagacaccaactattttccccacaaatccggctcagatttaagtgcatagtgcatttctcgtgaagtttgaggaccggattactctagcgcacaaaaaaaaagatcacagaaaatgtgtgaaggcccagatccacgcataagaaaccccgtaaactcgatcccatattacagaatatgacatttcttacatgcattcaacacatagagggatcgaggctggggctagatccgggtgcacatgttctcaacagacggacaagaaaaccggatatagagaacatacaagaaaaagaagaacagagagagatcactcggtcagccagggaaccgctcggtcaggataaccacgtcgcggtcagccaggagcctccttgcggccggacgagcgcggcaaagaaaaaaaacagagaggaagaagcagcgcgcggtcggccaagaaccagagttccttggcggctgaagttctgcgcagctgatagaacgaaaacagaagacagagaagggaaaagggaggctcgccgtcggccaggcgccggtgcttcctggcggccggatgtgaatggcggctggggaggagaatagaaaagaagttagggtttcgccccgagg

SEQ ID NO: 20657 - DNA, 1068 bp, Zea mays
  Clone ID: MRT4577_11883C.1
gccggccggttcggaataggtagctcactgtactgtaccctagctagctagtcgcttccagtccagagcgtcccgagaccaatggcctgccacaccgtcatcccgcttcttctcttcctcccttccctcttggcagcggctgcggacgacgtcgcccctgctcctgctcctgcccctgcccctgccccggcggcaccacccgagcccaccaacaacaacctgaccagcatcctggaaaatggcgggcagtacaccactctgctccgcctcctgaacgccacccggataacggaacagatcagcagccaactcaagaactcgtacgacggcctgaccttcttcgcgcccaacgacaacgccttcgccaagctcaaggccgccggcacgctcaacgccctcgcagaccaagaccagatccagctgctgctctaccacgtcctgccccgctactacagcctcgccacgttccagacggccagcaacccgctgcacaccgaggcgtcgggccccgccggcatgtacagtgtcaacgtcaccgccagcaccacgaaccccctggtgaacctttccactggcgtcgtcgacgtgcccatcagcagcacgctgttcgctcgcttcccgttcgccgtctactccgtcgacagcgtgctgctgcccccgcagctattccacacggcttcttctgcgccggcaccaggacagtctgcagaggcgccggtgcctggaaaggcggcaccagggcacaaggggggcgtcccaaagagcggcgacgatgtggcagcgcagccgtccgctgcggtggatggggcacaagacaccagtgtcgccgcggatggtagagggagcgcggcgtggatgacgccggtggttgttttgggtggcatggccctactgctttgcgcgtgagcagtgtgtgcttcgttctgttttgttttccttggcatctctctgatttctctctcgtgggccggtttgtatgtactgcccttaaaaaatgtaattctgcatttatgataacgatgatacgatggttcacttgtgtaaaaaaaaaaaaaaaaaaggccccta

SEQ ID NO: 20658 - DNA, 818 bp, Zea mays
  unsure (1)..(818): unsure at all n locations
  Clone ID: MRT4577_118840C.1
aaaaaaagatagccattttagggttagggtctaataacctaatcttaaaaggttttaaaanctggatcaacagagatcatagtggctcgggatccaacgatccacaagaaatagtcaagaaaaacagaanncaggatcgggttagggttctttaaccctaaccgacgcttttttttttttttttttggtcaaagtgtacagtacactgtttatttatgaatccacgggaagagacacaaggtctcggccatgaaccgaaatggccaaggaaatcgagtcaacatagaacgaaatggctctggatttttgaatccacggccaatgaaacagtaagagaatacagaaacaacttttttccccacaaatccggctcagatttaagtgcataaagcatttctcgtgaagttttgaggaccggattactctagcgcacagaaaaaaagcatcacagaaaatgtgcaaaggcccggatccacgcataagaaaccccgcaaactcgaaaccatattacagaatatgacatttcttacatgcattcaacaaatagagggatcgaggctggggctagatccgggtgcacatgttctcaacagacggacaagaaaaccgaatatagagaacatacaaaggaaaagaatacagaagagcaagaacacgcagagaaatagagacaagcacagtcggccggagagggagagggagcagccagccgaactgagcgggcacagagggagctccacgcggtcggttcggcaccagccatgtgcggcggctaggacaggagttgtccattttaggttttcccggccggcctcgag

SEQ ID NO: 20659 - DNA, 649 bp, Zea mays
  unsure (1)..(649): unsure at all n locations
  Clone ID: MRT4577_118841C.1
aattcggcacgagggttggctgggccgtatcagacgagtctagcgtaccagtaaagagtatcctaattgttggtaatttattttttatagatacttcactgatacatatccactgtgtatccatgctgtattattggatatttagccaatacaggatatgcctttatcctggcatgtcggggtaatgtaactcaccattacaaaataagctgagacaagcatgcgtgacaaacttgttaattgtattgcttggataacagacttttgcggttactcagtttagagatgaattggtactatttgatgtgctcctctgaggtttaaccagtgaacctcttttgccttcaagatcaataaaagcaggtttgtcggaggtgtttggtttggtagtttggtctgaaaatgctatgtgttttcttgcccaaagcttgatgtttacagtctacctagcggtgtttgtatcaagccaactgatatgacgtgtttgaatgtcttttgtgctaatgatgaaattgcaaggatctaccatttattttcttctcatacgtgtcttatgtcctttaaagcccgggaataccattgttgcattgntcgtgcacttttaattggaaatatacctcgttttagctaatactgtgtactgttttga

SEQ ID NO: 20660 - DNA, 562 bp, Zea mays
  unsure (1)..(562): unsure at all n locations
  Clone ID: MRT4577_118842C.1
ggtaccgttcccngacccgcccttgcccaggatgttcttggcgctgaacccgtccgtggccgcctgcagctcccgcagcccgaactggcgcacgttccccagccgcgccgccgccgccaccacgccgccgccgccgccgtcctccaggtcgcagccggcccgctcgtggaggatgccgagaacggaggagggccgcccgcccgtgtgccggcgctttcgccgccagaggaagcaggacacggcgaagagcacaagggaggaggcgcccaggcttgtccctacgccgatcggcagccgcgcgccagcagcctttgacctgcccgctgccgccgcccctgtccctgtccctgcgcgcgcgcacacacacaaaagccaaacgctgatccccaggcgagagcagcagcagatgcacggttcaggccagaccgcgccaccagcgctacatacagcctactacaggtattcccggccgcaagcgacggcgcccccatgccgacagcaccgtgtgtccgtgtcccctcgaccgctaccccggcgaggcaagggcacaaaagcagcggcc

SEQ ID NO: 20661 - DNA, 327 bp, Zea mays
  Clone ID: MRT4577_118843C.1
acgcgtgcgaaaacgttggtccgagtcctccgatctcattcgccgtcttaccggcgatcccaaagagggtttggtttagggttcggatggcgtcgaagttgctacagctgcagggaaaggccgcccaggcctcgagtttcgtggctaaacacgggtgcgcttactacaagcagctcttggagaagaacaagcagtatatcgtggatccgccgactgcggagacgtgccaggagctgtcgaagaagttgttttaacactcggctttgcgaatattcctttgcgctattaggagttttggaaaagaggctcgacgggtgtggaagcata

SEQ ID NO: 20662 - DNA, 636 bp, Zea mays
  Clone ID: MRT4577_118844C.1
cctcgaggccggccgagagcgctctcctgtgtctaccagcccagccgcccgatatttctcaagacaatacacgacgtgccgtggatattctctctagaaccctctgatgatccctcaacgctggacagaactgagagcaccgcctgaatgacgcatcccctctactgtctccccgagggaccggcaaggcatcgatcttagacttcatcgattggatggtgccggaccgtgtccagatcatcaacggcagcagaatcacgatcttcttcttctccaatagtcgtgctggtatctgtgccacatacccacgctcgccagacgacagatcgcagctctgtctacgactatagacgtggcaccaggcttgtggtaatatgcgctcaccgtcggatcatgatcgcatgtaagcggctctgaccgaggagtactgcgagaaatgcagtggctatgactcgaggactcatgcatcagatgctgaattgcttgcgtgcgagactgcatcgaaaccgttggtgtgatagtaggatactgctctgtaactcgaatgtgtgacgctccttttaaccctccatgtaatagctactgaagtccgtaccagacttgatatgagaaaattttgagtctctatatactaac

SEQ ID NO: 20663 - DNA, 522 bp, Zea mays
  Clone ID: MRT4577_118845C.1
cgagcgggcgtattttatccactgataatgggtcactcttcaaaatgctgttcggaccgacattatggctaacgatgatgtgacctgtaactagagtacagatgaacactgcttttaatcgaccaccataaataagaaaaaacacacatgccgacatgacgaagagtaacaaaccttataaagtatgacggaactgtatatacagaacctagcttctagcaataactatactggcaactcatgcatttgatcacactaagtgaatgacacaggagtgtacatggcaaaccccattaagccgtcttcttcttcttagatttgagcataacaagggccacaaacacgctcaataaccaaaggagaaccacgccggccagtacccgcatcaaaatcccatactgttgaagcacgaagtgctggtgcacaaacggggcgattaacaacacctgggttgaccctggaattatggcactacacctatatgcgtaccaactctcactatagactgtgtaatgacaccca

SEQ ID NO: 20664 - DNA, 344 bp, Zea mays
  Clone ID: MRT4577_118846C.1
agcagaggaccggtattggacattatttgctctcgactagaacacaactaaatctgagggaggtgctatatgtgcaacgacagggtgttctaatccagctagcattggtgcgctttggtaatagggatcattattgatttcatgactttttgtaactgaagaccaactggttctaccggctgccgggcagagaaaattcagtaccttaacatactagcacacacgtgacacagggaggataatatagtttacgtcatgattatggatattacatgcatattacacatgtattcaaaccacacatttcacgagtttattgcaagacttgtattcatacgacacat

SEQ ID NO: 20665 - DNA, 264 bp, Zea mays
  Clone ID: MRT4577_118847C.1
gtctcacctcaagctaaggcagaagtgctgggacatgtgaatcaacggcggctctagctaccataaagaaagccgaagatcctgcactaccaccgtaaaaaaaactagagatttcatgcatagctatctaagtgtgctgaatcaagacagaaccgatacatggttcttggccaagaaccggcattatttaggatagcaatgcaatctttacgtattatacttgaaaacaacacatgaggctgtggaattaaaaaaaggaattca

SEQ ID NO: 20666 - DNA, 350 bp, Zea mays
  Clone ID: MRT4577_118848C.1
ggccgggccgggatcaactcagtaggaccttcatccaaccacaatccaccgcatcatcgcagcggcggcaactcgtcggagcaagcaaagcaaagcaaagctagcaccttccttctcacgacaagctaataccaagcccgatcgattgacatggccgagaggacgaacgcgatggcggcgccgcggccgctcctgcgccggatgctctcgttccgggagccgctcctggtcatcccgtacctgctcagcttcctgggcgccgcggcctcggcgctggcgcgcagccactcgtcgctgctgcactcgctcgccacggcgctgttctcggccgaacctgccgccgccaacgt

SEQ ID NO: 20667 - DNA, 210 bp, Zea mays
  Clone ID: MRT4577_118849C.1
ttttttttttttttttttttttttttttttttttttgaccaattgtcaggctgagcacgcggaggacctccacctgatccattaacccaacctcagatgaggttttcaagagagaagcacagaaaagagtccaggtggaaggatcacggagatgaatgttaagccaagcttaactattcctccttgtccaatagcttttggacacctttc

SEQ ID NO: 20668 - DNA, 307 bp, Zea mays
  Clone ID: MRT4577_11884C.1
cgaagacgcctgctcgccgccggctggaaaccgtcaagccactgcttgagaccttgggcctcctgcactagcagcttgcgcgccatgcagtaacggcgggcgtgtggtttattacaaagggcaaatgcaaatcgagttgctcaaactcaatactcctactagtaaaagtaatgatgagatagatttgatagatgggtactcgaatatgctacagtacaattaatgcatctcaggcgatcaagcagtaattaaaccgaaattaatttaagcatcccctctttgatcgaaaaacagaatatgatgatat

SEQ ID NO: 20669 - DNA, 1273 bp, Zea mays
  Clone ID: MRT4577_118850C.1
ggcaaggcactcactttgcttccattctttctgtaggggtgtcaactacaccacgcgtccgcggacgcgtgggtttttttttttgaacaataatatataatcatataacagtagtattttgcagtaggtgtcaaagccatacaaggccacaagcaaaacacacgcacacacgtctctctctctctatccataggaggacccagcttgggatcttgcagcagtagcagtaaaaatagcttacagacaactgccatggccatgtgctctttttcctgtcactgggccgccctagcatacaaatgtccgcgtcaggctgtagctgtactggtattacatgtgacctgtggctgtcgctgtggctggtaccagaactgtggattaacctcacatttggtaaacctagtggaggtggctgtagttgtaggaccttgtcacagtaaaaatctttgggctgacgttacctgctactattaaatactaagtacagatactatatatatactagaaactaggggattatttgtatatataatatatatatacttatatctggcgataatattgcatatgccgccgttttcttaatcaaggctaatggcatcttctcctcttgtggtttagtagaactatccactaaaaaggtagggactaaaagaacaaaagaaagtgggagctaacactatgctgacactcaactcctttttttttctcctatatatccaacatcacttttccttctccttgcttttagtatagtctgcttattgcgtttggggtggttttcgctcgtgctcattgtttttttttttatgtactgtgtcacagtaacatctttgtgctcatgttacctgcctgctactggtaaacattaagtacagatactatttatatatctctctctaaagactagggtgacactggattatttgtatatataatatatatatacttatatctggcaatactgcatatgctgccgttttcttaatcaaggctaatgcatcttcttctcttgtggtttagtagaactatcctctaaaaaaggtactagaacataagggagctaacactatgctgacactcgactccttttttttcccctatatattccaccatcgcttttcacgctgcacgcagcgctgggctcttagtcctcgtagtactgctgaccgtacgggttccggccgtatccgccgccataggaccagtgcccggcgggaccgcccccaccgccgtagtacccgccagtaggcgggccgatgtagcctcgtgc

SEQ ID NO: 20670 - DNA, 189 bp, Zea mays
  Clone ID: MRT4577_118851C.1
tatttttttttttttttttttagagggggggaaagcttttaactgaaagcctgaaaaacaactgcagggctagatcctatgaaaagcaacacacacatgtcgaagaagcaagcccacgatgtatataggaggaacatcctgaaaagggaagcctaaaccaatttaaaaccaaatcccctaagaaaatgc

SEQ ID NO: 20671 - DNA, 373 bp, Zea mays
  Clone ID: MRT4577_118852C.1
gaggaaacttaaatactgttcttacacgtgctcccaagtatatcacatcagcttctcgtatggtgaatgatggggctcgactgcttctgcccaatattagctgtgaaggttctgtttttgtcactgtctatgatgacgagccaaccagtgtagtgtcatatgctatgacatcacaagaatatgctgaacatgtcacacataaaatgaatgcaaatactagcttttcagattttactagcagtaatggacttgatggatctctgtcctcacatgaagagctttcaaattttagaggagctcacttcagattatccttcgatgatgatgcatctcctactgatagtacaaagttttctgtcacttgctattttgc

SEQ ID NO: 20672 - DNA, 193 bp, Zea mays
  Clone ID: MRT4577_118853C.1
gaggtcttcatcgatctcaacatccagatatggcactacgtcatgttcctccacagtattccaatgttccatcacatattactatagttcatagtgagacacagcaacctttgcgacgtcctgcgatatataatcaacagttgctatcacctttgcgccaattgtcaaggccgtcttttcctcatcagatgca

SEQ ID NO: 20673 - DNA, 240 bp, Zea mays
  unsure (1)..(240): unsure at all n locations
  Clone ID: MRT4577_118854C.1
aaacccgggccgaccgcacgcgtacgaaacaagtgantganaaagagagagagaggtgggaaatatgctgcgccacgccgccgcccggtctgtttccgggccgtcggttcccccaacccgcccccggcgcttgccactgcggaagttccccctgaagccctcgaagacttcaccttcctccaagccttaaaaaagttctccccaacattgaacccccaaggaacgcccttttccttatta

SEQ ID NO: 20674 - DNA, 271 bp, Zea mays
  Clone ID: MRT4577_118855C.1
cacaaaagcacagcactctgctctgctcggcttgccttgtcctgttgcttgccatatgggtgccaagatggtcctgcgtcgcttcgtagccctcgcggctctcgcctgcctcctccgtcctggcgcgtgcgtcgagctccaccgcaagctctccgggtggtccgacgactcgcgcacgacatggtactgggcatccaccggcgcttggagcgacggtggtgcatgcaggtaccagaacgccgtcgaccatccgaccatctgatccatgatc

SEQ ID NO: 20675 - DNA, 480 bp, Zea mays
  Clone ID: MRT4577_118856C.1
cggacgcgtgggcggacgcgtgggcggcccgctcgggagggggcaagctgctgtaccccggcggcagcttgaacccgatcagggtcgccgaagacctgggccttcgggagctaaggtgaaggagctcaagatcggtcgtctcggcatgtacttcatgtcgcgggttcttggtacaagccatcggtgaccagcgagggcccgctcgagaacctaagcgaccacctatgcgaccccgaaaacaacaacgcatgggcctacaccaccaactttgtacccgggacgatgaagaggactagaggcagcacatccgaccaccagggcacacgactagcggataatcataaggtgtaacgagatgacagcatgaaggcgcggcatctggagtccagaggtgtgactcgatcgatgtatgattactataccaggagcaaagactcataacgatgaggaagaactgttgtgatcgacacaaagaaacaa

SEQ ID NO: 20676 - DNA, 964 bp, Zea mays
  Clone ID: MRT4577_118857C.1
tgttcagatgtttgagagtgtatatcagcatgatctgctttgtatagcggtgcgtagatggtgtcgcattgggctcgaggccggcgtccgcgggcggggccccgcgcccccagacacgcaccgcacagccacacgcgtacacccgtacaccgtacgcagccatggcatcagtaggcttcggcacggtcgcgccggccgtggcatcatcgccggcggccaggacgacgagcatgggccgcccctctgcggcgcacgtccctgcggcgacgaccaagttcgtcgcggcggcggcgggtaagcgggtggaggagaagggcctgttcgacaccatcttcggcgcgctgtacaaggaggagcagctgctggagacggaccccgtcctgaacaaggtggggagcaagggcaaggccgccgccgccccggcgcccaagaaagccgctgaagagggcggcaacggcgggctcagcctcggcgggttcttctccaggcccaagaaagggtgaggatcgttttgcgctgctcttactttcttgtacgtaatccttggattggaatggacggctcgcatgttgtgtgtgtatatatatatggcacaaatgagagcagagcaccagcgtataactaattccttccttttcagttgatctcgccctgtgttctgcaagcacacaccccagccagcatcagtggttcactgctggctgttgatcatcatcatcatcactagtaaatgtagcagttgtgtgtctatgtataaatgtactgaagctcgtgtagcaccctggctcttggatgaaagcccattattgttaccagaaaaaaaaaaaaaaaaaacccgcggctcttaccagcagacccttgcgtttccttgtgcattattttcctcagcggatcttgccccgtgccaaatgctaactcaattaagaatgaaagaaacatcagtcgggaccggtaatattgacct

SEQ ID NO: 20677 - DNA, 469 bp, Zea mays
  Clone ID: MRT4577_118858C.1
attgatccgttccgggaccgggatccgggggataagacaaagggctaggcagatcggccggcgtggaactggagctggaatgcatgtgcgcggtcgggggcgcgccgcacgaggaggctgtcccgccgagggggcgccgcgccgtaggaactcgcgtgcgccaccgccaccgccggcccggagaggagggaggaggagatctcgcagtggcggctgcgcctgcgtttataagttttgccctgccagtcccaagctcaggtttagtacccgtatctaaacgtttaaactgtacgtctttttttgtgtgtgtagtctaggtgtagatcgaacaggcccaccacaggtgatatgtcagtggacggaagtatagtagtacgttcgggcgccaccatgctgcctctggttttgactattgatctgcttaatcagtaggtactcattacttcgatccagtatcgatcgcctccag

SEQ ID NO: 20678 - DNA, 1010 bp, Zea mays
  Clone ID: MRT4577_118859C.1
cattgggtacctcgaggccggccgggcttggccccgcgcccccagacacgcaccgcacagccacacgcgtacacccgtacaccgtacgcagccatggcatcagtaggcttcggcacggtcgcgccggccgtggcatcatcgccggcggccaggacgacgagcatgggccgcccctctgcggcgcacgtccctgcggcgacgaccaagttcgtcgcggcggcggcgggtaagcgggtggaggagaagggcctgttcgacaccatcttcggcgcgctgtacaaggaggagcagctgctggagacggaccccgtcctgaacaaggtggggagcaagggcaaggccgccgccgccccggcgcccaagaaagccgctgaagagggcggcaacggcgggctcagcctcggcgggttcttctccaggcccaagaaaggttgaacgtacgtacgttatgtagctccgactccgagtgaggatcgttttgcgctgctcttgctttcttgtacgtaatccttggattggattggaatggacggctcgcatgttgtatatatatatggcacaaacgagagcagagcagagcaccagcgtataactaattccttcctttcagttgatctcgccctgtgttctgttctgcaacaagcacacaccccagccagcatcagtggttcgctgctggctgttgatcatcatcatcatcactagtaaatgtagcagttgtgtgtctctgtactgaagctcgtgtagcaccatggctcttggatgagagcttattattgtacttgctcttaccagcagatccaaaaaagcgcccgggtttttttccaggcccaagaaaggttgatctcgccctgtgttttgcaagcacacaccccagccagcatcagtggttcactgctggccgttgatcatcatcatcatccctagtaaatgtagcagttgtgtgtctatgtataaatgtactgaagctcgtgtagcaccctggcttttggatgaaagcccattattgt

SEQ ID NO: 20679 - DNA, 505 bp, Zea mays
  Clone ID: MRT4577_11885C.1
gggcgaaccacccgtccggggagctacacaagacccacgcgcccgtcacgctctttggcctttcggcacaagggcagcataacacggatgcgggcacctattgtctgtctaatacgttacacccttatgcgtacagcaggttcgatccagacaatgtcgctcaccatctgtacagcttccctttgcctgccatttgcattcttcatcttgctggtggcgaattgcccaaagatgacctgtgtcataacctgatgatagtgggtttgaacgagactgatgaatctcaccttgttcttggtaacactatgcaaagcgcttgaacacactagtgcaggacaggacctcggtggaggacaaaattgctccacccgaatgtaatctgctgatgtaccagcttgccgtgaggtcgttgcataaatccatcaacgggttgattgaagatcatattttacacgttgtgggcacattgttgcacaagtacattgaactggattgatactacaat

SEQ ID NO: 20680 - DNA, 306 bp, Zea mays
  unsure (1)..(306): unsure at all n locations
  Clone ID: MRT4577_118860C.1
ttaaagaaggccgaagaacgaccggctctatcattataaaaagaagatcggatcaccacacaatgacccaaacacaaagcagggaacggatccaaaaaattttttttctagagggtggggcaaacngccacgcangaaaatagaaagacaaaaagaccaggaaccaggcagggggggagacaacatgttgcaggagcgcccggcatggggcaccgcgccactgacaccgggccccaccaccattaccaccccgacgcacactattatttacccccacgtcactcgcagcccgcaccggacacttcc

SEQ ID NO: 20681 - DNA, 462 bp, Zea mays
  unsure (1)..(462): unsure at all n locations
  Clone ID: MRT4577_118861C.1
caacaactcaacacgcaaacttcttttattttcttttcaacacccaacaaaacggcagtggtctttttaaaaaacggggggggtataattcacattttttgcgcaaaaaacaatatatttgacacctatattttttataaaagtcatatttttttctttgagaaatataaaaaaaatcctccagtaaaatttccctgctttatttatttaacaactctttctttanaaaattaacaactgggatactctttttttggccaagaaatttatttataantttttaaacactttccaattcatgaccattgtttttaagcaaaaaataacttattactacttttgtttgccattattaaaaaaaatactttttacttattgggggactaaaaagaaaaaccctcccttcccaccctcccccgattatttaaatccccacattctattgcaattacattttttgtt

SEQ ID NO: 20682 - DNA, 210 bp, Zea mays
  Clone ID: MRT4577_118862C.1
cgagagcgtacgctgacctttttgcatgcactgtacgtggacgtgcccattcccgtcgcgggcgaaccaacgcgacacctacacctcgctcgtccgtagccatcgttgctcttcgctcgcatgtcaccgttaacgcgcgtaattctgcactctaagctgatatgctgctatcgctaaccagctcaacacgctccacggatgaacgatagc

SEQ ID NO: 20683 - DNA, 321 bp, Zea mays
  Clone ID: MRT4577_118863C.1
gcacgaataatccttttgtttctcccctgatgagccgtctgacacaagacagccctcacgacgcaccagccttaactgacctactgggtccttacactagctaatagcactagcacagagacccgaccttggtaccagctggtgctggatatgctcaccttcacttcacctccacacctcgcctcgcttggcccccccacacacaacaaaagcacacacatgcatggttttctcgtttcgcccgcttcttattctgtttcaactttcaaaacatacagctctagcacggctgggctgtgccgccgtgccgtgctccggcgc

SEQ ID NO: 20684 - DNA, 584 bp, Zea mays
  unsure (1)..(584): unsure at all n locations
  Clone ID: MRT4577_118864C.1
agtgaaaccattgccttctcatttaaaaaacacctttgcagattgcaaggcttttttttccaagatatgcacgtacagtatttgcataaattttgaacgccgctccgctcaccaacatataatttgtgctactgctaacctcagttcttctgtacgatcagtttagctcttgcatgccccgcctcaatcctatactgctcgcctaccccgaagtgcgccatcaagaaccaaacgaccgtgagcagctcgccgccggtgctcagctgcttggcatggaagttgctttggcacttgttcgcggcatagcagagcatctccacccacaccacacggatgacgcgccaccgcttgtgcggctgcagctccagcagcgacttggccagccggcacgcgtcgaacagcacggatttgctccggtcacccttcacgtccctcggcgcgatctcggcgttcacgtcgagcaccatcctcgccgcagcgctcgcgctcgggcgcgccatctctgcccgcttgaagagttctntgcctcggcgcaggtgtcgccgaaccggatctgcccaatgccggcggtcagcatgaagggg

SEQ ID NO: 20685 - DNA, 571 bp, Zea mays
  Clone ID: MRT4577_118865C.1
tttttttttttttttttttctttttttttttttttttttttcctctaatcttggagtccattccattccatccatatgaaactgtcaaacaataatgaaataattaacgaatccagcaaacgaattaatagtgaaggtctccatggacggtacgtgcacaaatgaatgaatatttgtcgggggtctttcatgcaaagttgccgcggcgctccacgtggacgggtccgtgccttcccccgcgtatcgcgagcacgtagaagaactgcgtcactgttaggatgatggggaaggtctccatggtgcccagcttggcgtttcttcggtcgaaagagatttcctgacaagctaggcccctggttaggactgtgtgcgccctcgccgccgtcccccacgccgccgggggctgctggctttcgtagttccaaaagcggaggtggttgaagcccaccatgggggaggcgatcccgacgacccccgttatgagggaaaaaaggacgaaaaacccggtggcaaatttgccgatggggaaaaaaatagggtggaaatgcgcgggaagccgcatctccgggcc

SEQ ID NO: 20686 - DNA, 194 bp, Zea mays
  Clone ID: MRT4577_118866C.1
ataaattcatgagcactaaatgctgttgaccaagatcgagggaaggaggaagacagacgcgacagacagacagacagagagatggatcggatgagctcattagtgctgtgctgtgtggatgaacacaagctcttgaccatgggtacagtgtggtctagcgtagtggtcacgtccctcaatcacagcctactgag

SEQ ID NO: 20687 - DNA, 382 bp, Zea mays
  unsure (1)..(382): unsure at all n locations
  Clone ID: MRT4577_118867C.1
gatctccatgactcacctccccaaccgggggccggcggcncgcgagacnncatncccagcggccggcggcgaccnccacgnggngccanncgccggcaacgagcacccgccccccagganccaggnnggggcngcgagagcgccnanccanncaccaggannaannncgngccccggggcagccggcagggcaaggngaggcncaccaagaggnannccccccacacccagaaagagaggaccaaggncanncgcgaacccaggggacncanncnnacacgagggcccaaacnccgcaannnngnggaggggagaggggacaaggncgnanaccggagggangcnagccgggannncggcaggggcanggangccgaggaca

SEQ ID NO: 20688 - DNA, 661 bp, Zea mays
  Clone ID: MRT4577_118868C.1
gggtgaagcaataacaccggaagaagcagccagtacgctttgcgaccgcatccttctgcgtgtcgggtagtatctctcccctcacgactccatggcgcggcgacctaccggttccggcgggcgtgagcggatctccggcgccgcggcctgcttcttcttccgtgtggcctgcttcccccaacgtccgccgacgctctgctattcattctcccctgacgccgtgttccagctcttttttctgtcccaaaagccgatatctgcgccgtccgtcatgaccggctagtcgacgctccggcctcctgtaccccattcctgccaccagttagccaccggctagccattttgtgcctccaagaagcatgtcgtgtgcgagctcgtccaacggagttcatggttggcctagattcggccatgttcctctgactcggtgccgagattgccctcaactggagtcgttagtggtcttttgtgcttttatgattcttatcgttttgtttttcgttatctctactacttaagtcagtaaggatagattgtctgtcattccgtgttctaccatttttattttctgttttgccttttcattcctctctctccgtacagtttattctcatattctatcaccattctctgtcaagaaaaaaaaaaaaaaaaagcggcc

SEQ ID NO: 20689 - DNA, 645 bp, Zea mays
  unsure (1)..(645): unsure at all n locations
  Clone ID: MRT4577_118869C.1
ctgttttgttaccggtccgaaaactcccgggcagnanaaggggaanatgatatcaaaggcaaaatgtaactattgtaagaagctatattcttacatacaaggatcaacaacatctcatttgtcaaggcacatgagaatttgtgccgtgtatttgaagcatgtggcaaagcagcaggatcaatctcttctaaattttgctccatcaacagcaggtgaatctggatctggccttcctactatcacttctccaaaagattataaccatgagcaagtaaaaaaactaattgctaagatgataatagttcatgagtatccatttaggatggttgagcatacttggtttaacattgtcatgaggtatttgaatccttcatatgagtttattggtaggaagactataagagctgaatgtttaaagatctatgagtctgaaaaagaatcactagcaaaagtccttaaaggtgttgagtatatttccctaaccactgatttgtggacatccaatcaaacattatcctatatgtgtttggttgcacactacatagatagtgattggaagatgcaatgtcgtttcctgaattttttgaattggaccccccacacaaagggcctgttataggacaagcagtatatgaatgtgttgct

SEQ ID NO: 20690 - DNA, 245 bp, Zea mays
  Clone ID: MRT4577_11886C.1
gcgtgctgctgctgtgcagcccgtgcatggggcacctcatccccttcgcggagctcgcgcggcgcctcgtggccgaccacggcctctccaccacgctcctcttcgcctcggctacatccccgccctcggagcagaacctcgcggtggccgccgccgaccccgacgccgtcgacctcatcgcgctgacggcacagccgccagacacgctgtctgccgacacggtcgcgcgcgagcgcgcggagctt

SEQ ID NO: 20691 - DNA, 235 bp, Zea mays
  Clone ID: MRT4577_118870C.1
gggggttcggcgcgggggtggcttctctggtggtcttccgtgctctgtgtccggcttggtttcgcttgggtgcctcggtctcggccgcggctcgttgtttcggggggttggtgggttttctttcggggttgtgtgttgtgtgaggcctgctgtgtgtttcggggggttgggggcctcggttcgctttcggggctgggcgtgtctttcggcggcctcgcgggggtcttcctttctc

SEQ ID NO: 20692 - DNA, 301 bp, Zea mays
  Clone ID: MRT4577_118871C.1
aaatgggggtgaaggcctgaaaactgggtggaaccggccctaaaaccggttcaaccggccctgaaaccggttcaaccggtttggggactgggcctctgtcatcccggctctgaccggtctgccaggcagagctgtgcgaaaggtccctccagatctggggggaaaaccgggtcaaccggggtgtccccggactgggcgggtctgtgaacccggccagagtccccgactgccggtccttagggaacccgggatctcccgtgggaggaaacgggctgccccggggtctaaaaaccgggctcaa

SEQ ID NO: 20693 - DNA, 392 bp, Zea mays
  Clone ID: MRT4577_118872C.1
atcacaaaacccaattagccggagatggccgcaacatccgccgctgctgcagctgcttcttgcatcatgggtactcgggtggctcccggtatccatcccggttcaggtcggttcacagccgtgttcggtttcggaaagaagaaggcagctcccaaaaagagtgccaaaaagacggtgactacggaccggcctctttggtacccaggcgccatttctcctgactggcttgatggttccttggttggagattacggttttgatcccttcggtttaggcaaaccggccgagtatcttcaattcgatatcgattcactagaccagaatctggctaagaacttggccggagacctgatcggaacccgtacggaagctgccgacgccaaatcgacgcc

SEQ ID NO: 20694 - DNA, 249 bp, Zea mays
  Clone ID: MRT4577_118873C.1
gctgcgcggtgagctcatctcctcctctatcttctcttggcggcctaccctactcggtcgggcgcctgcgtgatctctctttctattgggacggattgaccacggatcgctgctccattgttgttgcgtttctggattcgcaggtcgttcggtgttgttagtcccgaccaccgccggccatggcatccaacggcatcgcccccagagatgtatgtgttgttggcgttgcacgcacccctttgggggggt

SEQ ID NO: 20695 - DNA, 520 bp, Zea mays
  Clone ID: MRT4577_118874C.1
ccgggtaaaaaaaaaaaaaattataaaaaaaaaaaaaaaaacaaaaaaaaaaaaaaaaaaaaaaaaaaaaagggggacaaaataaaaaaaattagtggggggcgcttgttttacgggtcctgccttccttttcccgcgttttgactgctttttttttgtctggggtcccctaattcccttccccgggccgccgggggggcccggtttttttgttttttgccctggctttccccgtttgccggggctggccgcccttcccccttgctgcgggtggggtcttgccggccgggcccgccctgtttgccttttggtgcggtttctgggccggaggggcaagtggccctgcccctgtgctggcccccagggcgcggggtttgtttcctttccccctagccgcccccttccccttgcccggcccctccctcccgttctttttctttctttccttccctttttcccccgttgggcggcttttcccggaatcctttggggcgggggttggtttctgggttccctttaa

SEQ ID NO: 20696 - DNA, 641 bp, Zea mays
  Clone ID: MRT4577_118875C.1
gcagcaaaatatcaagatgatcaatcagctgtacactacagaaccctctcaaactcatgtccttggccctccctagcttggacccactaatcatcatcaccatcacacccgtctcaataacgcaatcattcatagaacaatccaaacaaaaaatcaacacaaacaaattcaaaaggaaaaaaaaagaactaatgaactagccagaagtgttgctcctgcattcgctcggcttgctttgcttgcttcctgcacaaaagctagcgcaccattcctttttttttgtgcgtctatgattggatcccgcggttggtttcctccgtccaatcatcctaaccccagtccggcgacagctcagggcgatcctccagcgaacaagacacgccgaaattctttagcgctaccagaaaaatgcgatcatggtggcggaatccctgctccatcatcatcgtcaccccaagcttgtcgtcgcgggcttacagcttactgtgagctgttgttgccattgttctcttcagcgctgtcgtcaccatcttcgtctccgtcgtcgttaaccccgccgtcgccgccgtgctgctgctccccctcggtctgctgctgctcctcgctaccgccacggttgtacgcgttcagcgcggcgagca

SEQ ID NO: 20697 - DNA, 690 bp, Zea mays
  Clone ID: MRT4577_118876C.1
atggcggcccggcttggcctcagcccggacccgaggctgggccaggggtcgccaagccagccaccaggtcgccccctcggcgcctcgggcgtccgaggtggaagcggcgtcgaagccggctacggggcaaccttcggcagcgcctacggaggctggggcccaaggggtctccccgcaggcacgattgcccttgcctcggagtgggaacttgcggacgtgagcaccgctaagtcgctgttcatccgtcgcgagagcgacgtctgggattcgctgcggtcccagtgggtcgcgcttaccgaggccaatgagtgccttgcccaacggagcgccgaggtggcggaccttcggctgctctgtgatgagctaaagtcggaggcagcggcggcgcgggtagaggtggcgtcggcacgaatgaaggcttcgtcggcccgggagcaggtggcttccctggccgaggagatgcagcggcggcagctagagcttggccaggtcaccagcgagcgggaccaatcccggagccaagctgccgaggccggttcgacggctcttaacgagtctgtcaagaactgcaaggcgcttgcccaggcggctgagcagatggaggccgagcgcatgcccatgtccgaggctatctcggccttctgccgggcctttggcctcgatgacgtcccctcgggtagctccccctag

SEQ ID NO: 20698 - DNA, 733 bp, Zea mays
  unsure (1)..(733): unsure at all n locations
  Clone ID: MRT4577_118877C.1
ccctcctcgagttttttttttttttttttttttttaggaggcactcttgtcaaaacctactgaattgaacacggtccctaaaaaagaactactgaacacacacacaaaaaaagtaagaagaatcaaaagactagtatcttcccttgctataaactttggttatacttgcatacataactgcatcttcagtttttccttttctattttcctttagctacaccaaacaatacatcaacccatgttacacacaaaaaccaattttacaaacataaccaagagacgaagcttgataaaagagaggcaagacatgcgcagtcgtgcgcgtcatgtgttggttacagttcgacggattcgtaggtcgcggagtaatccggcatgcggtgcaggcaccggagcacgctctcggccacctgcttggtggcggcgtcacccttgtggaaggcgcccaccagcaggctcggcagcgcccgatcgctggtgacctccctcacgcaccgctcgctgccgtgagccaggaacctctccaccgcccagaaacacctccgagtgaccgtctcgcctgcggcagcgccgccgccccctctccgcccgtcgtcacggtgctgccgcagcgcgcgaagcacgtgccgcgccgcgtcgtgctccgcgagcacggccacgccgctcggcacgtccaccgcgtcgtccatggagcgtgcacagcgcaccgagcgcggnctccacacgcgcccgt

SEQ ID NO: 20699 - DNA, 1198 bp, Zea mays
  Clone ID: MRT4577_118878C.1
cccccacggaagaagccgctggtggtggtggcgacgactatgaccgcttgagcgagctgaaggcgttcgacgacagcaaggccggcgtcaagggcctcgtggacgctggcgtcacgaccatccctgccatcttccgcggccatctccttcaggaagggccgaagtcgcacgggaggaggtggtcgcccagttgaaggctgcagccgagacggtggggttcttccagctggtgaaccacggcgttcccagcgagctcctgtgcgagatgctgccgtcggtgaggcggttcaacgaggagccccacgaggtgaagcggccctactacacgcgggacgcacgtcgcaaggtgcggttcaactccaacttcgatctgttccagtcgccggcggccaactggcgcgacacgctcttctgcgaggcagcgccggagccgccgcgggcggaggagctgccggtcgccgtcaggcacgtgatgctggagtacggcggcgcggtgcgggaggtggcggcgcgcgtgctggggctgctctcggaggccctggggctgagccccgggcacctcgcagggatggggtgcgcggagggcctcagcctggtgtgcaactactacccgccgtgcccggaaccggacctcaccctgggctgcagcaggcactcggaccccagcttcctgaccgtgctgctgcaggactcgcatgcgcagggcggcctgcaggcgctcctcgcatccaggtggctggacgtgcctccggtggccggcgcgctcctggtgaacgtcggagaccttctccagctggtcagcaacgggcggttcaagagcgtggagcaccgggtggtggctaaccggagcagggacacggcgagagtgtcagtggcgtgcttctgcaacgcggacatcgcgagatccacgaggctgtatggacccatcgcggagctcatcgccgcggacgacagcgacggcgcgggaagggcgctgtacaggaacgtgacggtcccggagttcctagcgcactacgacaagaaaggcctcgacggtcgcccggcgctccaccgcttccagctgcttcaataattttacatcacatcagtcctgactctggtgatatcatgtcagtatgtcactgtgggctactccggtactctaatacagttatggatggatcagatcaatactaatctctggtaattttttttaagg

SEQ ID NO: 20700 - DNA, 1538 bp, Zea mays
  Clone ID: MRT4577_118879C.1
cacagcaattaatgctctttagtccggtttagtcattgaaaacaaacggaacactttagcgactaaactttagtcactaaaatttatagtctaatgactaaaggaaccaaacagaacaggtcattagtccgaggctccaagctgtgccgacaaagtgatgaatcacccaaacaaccacactgacatctcatcttgatccatccagctttgcctcgatcgccggccggtagccatgtcccccacggaagaagccgctggtggtggtggcgacgactatgaccgcttgagcgagctgaaggcgttcgacgacagcaaggccggcgtcaagggcctcgtggacgctggcgtcacgaccatccctgccatcttccgcggccatctccttcaggaagggccgaaggtatcgtcctctagcagtagcagcagtactagtcttagcattatcccggtcatcgacctctcggcggcggacgcagtcgcacgggaggaggtggtcgcccagttgaaggctgcagccgagacggtggggttcttccagctggtgaaccacggcgttcccagcgagctcctgtgcgagatgctggcgtcggtgaggcggttcaacgaggagccccacgaggtgaagcggccctactacacgcgggacgcacgtcgcaaggtgcggttcaactccaacttcgatctgttccagtcgccggcggccaactggcgcgacacgctcttctgcgaggcagcgccggagccgccgcgggcggaggagctgccggtcgccgtcaggcacgtgatgctggagtacggcggcgcggtgcgggaggtggcggcgcgcgtgctggggctgctctcggaggccctggggctgagccccgggcacctcgcagggatggggtgcgcggagggcctcagcctggtgtgcaactactacccgccgtgcccggaaccggacctcaccctgggctgcagcaggcactcggaccccagcttcctgaccgtgctgctgcaggactcgcatgcgcagggcggcctgcaggcgctcctcgcatccaggtggctggacgtgcctccggtggccggcgcgctcctggtgaacgtcggagaccttctccagctggtcagcaacgggcggttcaagagcgtggagcaccgggtggtggctaaccggagcagggacacggcgagagtgtcagtggcgtgcttctgcaacgcggacatcgcgagatccacgaggctgtatggacccatcgcggagctcatcgccgcggacgacagcgacggcgcgggaagggcgctgtacaggaacgtgacggtcccggagttcctagcgcactacgacaagaaaggcctcgacggtcgcccggcgctccaccgcttccagctgcttcaataattttacatcacatcagtcctgactctggtgatatcatgtcagtatgtcactgtgggctactccggtactctaatacagttatggatggatcagatcaatactaatctctggtaattttttttaaaaaaaaaaaaaaaaaaaaaaaaaaaaaaaa

SEQ ID NO: 20701 - DNA, 349 bp, Zea mays
  Clone ID: MRT4577_11887C.1
gattcttcggtgataaattcatttatgttccacctttgtgagttgctgtcgaagctaagccattgggtcgtgcacagacattctctatgcatgaatctaacttcgttccttgtctgctttttacagtgatatataccattgggatctaacttcatccttgtctgcttttacagggatataccatactgtagtttcccatctagcgtgtttctctgttatattttttactcactctcaaatgcttagttcattagtttaaatgggcaatagatttcgtgtcacaaaaaaaagaacccccaggaaatcgaaaaaaaaacctctaatcgggagacgggctttaaagaacttt

SEQ ID NO: 20702 - DNA, 1066 bp, Zea mays
  Clone ID: MRT4577_118880C.1
gtctccgcgcaccagatccaccacctcatgtccggcctcctcgtcgcgcgcctgctctactgcctctccgcggccgaggaccagcactacatccgcgtcacggggacgccgcacggctgggatgtggccttctacctcttccagctcgtgaaaggtgtcatcctcttcgcggtgatcgcgctggtcggcacggggtggtcgttcttgaagccggtgctgcaggaccgggagaagaaggtgctcatggccgtgatcccgctccaggtcaccgcgaacatcgccgccgcggtcattggggagaccgggcccttcatgcaggggtgggtgacatggaaccagatcttgctcttcgtggatgtcgtgtgctgctgcgcggtgctcttcccggtcgtgtggtctatccggtcgctcagggagacgtccaagaccgacggcaaggcggcacggaacctctccaagctcaccctgttcaggcagttctacgtcgtggtgatcgggtacctgtacctcactaggatcgtcgtgtacgcgctcaaggcagttgccagctacaagtaccggtgggcgagcatcttggcagaagagacggccaccctggcattctacctgttcatgttccacacgttcaggccggccgagaagagccactacttctgtctccatgacgacgacgacgacgacgagatggtgctccgagaagaggaactcgagctatgaacagatagatgcagcaatcagcagcagccccatgtctcgtttgaaccatgctgtatattctgcgtgtggtaatccgtcctcgtcatttcgttcggcacattttgactttgttgtgccaggaatcaacgtgacgctctgcggttttctacgtactgacgaccagcatgtgtagaaagaaagtggcacgcgccgttccttttccctgccccaccttgtcctatgtgtcttctgaaattccctgcgacgctttgctgcgtctgcgttattattgtctcacggtacgttgtggtcacacacacatgtacacacgctcgcgtgattaaagaaaaaaaaaaaaaaaaaagcggcc

SEQ ID NO: 20703 - DNA, 365 bp, Zea mays
  Clone ID: MRT4577_118881C.1
acattacttgctgttttttttttagcaggagaaacagattttcctttctttcattgattccttttaaacatataccgacactaagcttcaaaataggaagtgacatccgcttcaaacctctgaaacactaggtatttaaagaacgactccagaaccacacgctggcctaaagagaggaacaaacagacctaaaaaaaaaaaccccgggacagacagaacctacagaaaaatacacaatgctgttcttagttgccatgcagaaaaaacttgaggacccacgtaagatagcatcacaacctgcatatatacgcgcgccccctgtgtttccttaaaacatggagaacgtatcaaccatccatgtcaac

SEQ ID NO: 20704 - DNA, 333 bp, Zea mays
  Clone ID: MRT4577_118882C.1
ggcgtgatcatcgcccccatcctcgtgatgatcccgatgatcatttaccggaagcggctccgggtcaacctcgcactcctggcgctcttcaccgtctgcatcagcttcgccgaggggctaacctgtgtcactcgcaacgtacaagacatcctggacgcggtcacggtcgggccgtgtaaacccgtccacgcaaccttctacggcggtcgtgacggatcctacaccaccgcggtcgcgtgcggctacaaggacactcgcacgcacgggtactgtctgcatactgtggccgtgagcactgtgcttgtcggcgactgctcggcctgcgtagggtgc

SEQ ID NO: 20705 - DNA, 376 bp, Zea mays
  Clone ID: MRT4577_118883C.1
aaaaaaagacgcacgcccactcctccggctcttcttctccaccggcaccagtccaccacctcctgccaccgcgcggccccaaccaaccacaccgcagcgcagcaatggcgggcaacggcgccatcgtggagagcgacccgctgaactggggcgcggcggcggctgagctgagcgtcgacagctcctccaaggacgtattcgaatgggctggggagatccagccgtgcaagcctacaggctacaactagcgcttgcggggagcgctttacaacaaccaattgcccaattgcaacaacaatggttggcacatgtaaccctacaaaccatggcaacgcatcaacagcgacaacaggggtgtggcatggctgagccacct

SEQ ID NO: 20706 - DNA, 566 bp, Zea mays
  unsure (1)..(566): unsure at all n locations
  Clone ID: MRT4577_118884C.1
cacacacacacgagcgcgaagcggagcagaccacgacggagcgacacgaacaccgggccacgacgcaacagaagcagccgccgacgacgcacgccagcaggagcagcgacggaggcgcgaaacgcaaacgcgaagaaccagaagcacagagaccggaaccagaaccagacgcncgacaccagcggaaccccgaggaacgcaacgacccacaccgccaccgagccggacccgaacgcaagaacaagcaacagcaacaacgcgaccgcagcagcagcgacagagggacagcgaaggcagggagacaacaaaagaccagaggaagaggaagacaacagacaccacacgaccggaagcaaagaaagagagaacgcacgcccaacaaccaccgaaagaacgagagcaagccaccccacacccgaaacggaggaaaaaaacacggccgcccaagaacacacaaacagaaaagccgcacaaagaacgcgaagaaacccacaaaacggccacaagaaaacaacaagcaacccccccagcaaaccccacgcaacgccgcaaacagagaaagaaca

SEQ ID NO: 20707 - DNA, 215 bp, Zea mays
  Clone ID: MRT4577_118885C.1
cgctgctgcacctgtcgtgagccccctcctgactgaccgactgactgacggggactactcgccttttgcagcaagagatacagggactcgagcgcattcagcccgtctcgcgatgtggcaatgagtgaataataaaaaccctctcttgcccctgccgctctacgctttctctcgtctggaactggaactggaactcagacatcgtcactggacca

SEQ ID NO: 20708 - DNA, 286 bp, Zea mays
  unsure (1)..(286): unsure at all n locations
  Clone ID: MRT4577_118886C.1
aacttcactgctgtttccggtctttgatggaacttgtagatgaagagaactaggctgttgcactaatgaagtgtccttgctgcaaatttttgatgggggttnggcttgtttgaattttcacagggaatataatgaatggtggatgagtgnaagagatcaagtncttgnggatgatgatttgacattnaaaagagaatgttatgtaggaaggacattaacaaaagagatgtttttgtgataatagggttgatgtgtnttggaatgttttttattagggaattttatt

SEQ ID NO: 20709 - DNA, 893 bp, Zea mays
  Clone ID: MRT4577_118887C.1
aattcggcacgaggcacagtcacacagtccagaggcgtcagtccaccgcgccaaccccaacaagcaccaccagccactcgaggcaccgaatcgcgatggagcccgcgggcacgatcgtgttcgcctccgtcggcgtcaccaacttcggcttcgacgtgttctctgccaccgtccctgcgccgacgtccgcggaggccggcgtctccgcggaggacctcgacgagcggcgccacacggacggaatctccgtcaacttcaacgcccaattcgcggacgacgccggcgacgcggtcgcgttcgtgtccgagcgcaccggggcagcgagcctgttcctgtcccggccagggtccgaacccgacccgctcccggccgccgagggcagcctgttccacgaccgccccacggtgcgcggcggccgggtgtacttcgtctccgcgcacgagaagccggaccggccgttccggagctgggcggccgtgtacgcggcagagctaggcgcaggccgcgagcggaatccggagccgcagccgcagcggctcactccgcgcggcgtcgtggacatgagccccgccgtgtccgcctcgggcgacctcctcgccgtcgcgtcgtacggcgaccggccctgggcgttcgacttccgggcgctcgagacggaggtggccgtgttccgcgcgtccgacccgtcccgccgcgccgtcgtcgccgcgcggggcgggtggcccgcctggcacggcgacgccgcgcttttcttccaccgcgccgcggacgacggctggtggagcgtcttccgcgtgggcgtgtccccggacacgctccagcccacggggcccgagcgccgcgtcaccccgccggggctgcactgcttcacccccgccgcgcccgcccgcggcggg

SEQ ID NO: 20710 - DNA, 376 bp, Zea mays
  Clone ID: MRT4577_118888C.1
cccggatagcgttcagtttgtcttgagcaggtacctgatgggggggacagataacatatatgagaagtaaaaaacaagcgtacaacaccagaatctatcgcggaggcggctcgcatgaaacatataatgcaagccggtgttcaggaacggggtgacaatgcaaaagcggaagcaccacacaaactcaaagctgcacgaacaccgggaaggccaacaggggaggcgatctaatgcacaaaaacgccagacgatctaactcgacgccaagcgcagcagacaaaggacatgcgacctgctggcaaccgggaagaccaagaatgtccaaatgcagaatcactacttggcagaacaaggcttatgccaggatacatggcca

SEQ ID NO: 20711 - DNA, 262 bp, Zea mays
  Clone ID: MRT4577_118889C.1
ggtaccaaactcctggcattcttgaaccaaacaggggatggggtatgcaacgaaaccccgacaacgatccgcacaaacaaaaaaaaaaatcccgccaagggagggaaaaaaaaaatgaccacgaaacgaatatcatgcgccggaaaaagcacccagaaactgaacaaaattacgcaagcagcccgggtaaacgcgggcaaaactcccgggggtttttggggttccaaacagaaactggaaaggggcaggtccttccatgaaa

SEQ ID NO: 20712 - DNA, 309 bp, Zea mays
  Clone ID: MRT4577_11888C.1
ggggggcgccggccgggaaggcacaagacgcacgcagccggaaggggcagccataaccgcctgggctgtctggggggcaaaaccccggaggccggcaaaggccacaccttagaccaaaccaacgcaccgctgcagcatgacgcataaacacactgtcaccgcctccgggggaggagcgatgccgtcccgcgcaccaaacgcacaaaaggcacggcggccagcgcgctccgggggacaccgccccccgggctggaaagctccaacctatgccccatagccttcgaggaccgccccgtccagctggctccg

SEQ ID NO: 20713 - DNA, 238 bp, Zea mays
  unsure (1)..(238): unsure at all n locations
  Clone ID: MRT4577_118890C.1
ttgttcgctatcggtctctcgcctgtattaaccttggacggaggttaccggccgatttgggctggatttccaaacaacccgacttggtgacggggccttggggggcgacaggggccgggccggacggggcttttacccttccaagcggccctttccaaaaaacttgggcccgggccgttttttaagacgcctntccagactaccatttnggcggcnaggtttttttttttttttttcc

SEQ ID NO: 20714 - DNA, 1188 bp, Zea mays
  unsure (1)..(1188): unsure at all n locations
  Clone ID: MRT4577_118891C.1
ccacgcgtccgaccgtagataaaatataagcgccacggcccgagccgcctagtcgaaataaaggactatctcagcgatttccgaaccctccccacccccacacccacccgatccaaccgagtcccggcggcgatggcggcggcggcgacgaacgccgatgtggaggtggtcgacttcgacctcgatgacgacgacctcatggacgaggacgccgggccggatccagcaccggccccccgcctcccgcctccgctccaccatcgcgggcgacgacgcgccgcgtaggaccaagggccgcggcttccgcgaggaccctaactcctccgcgacccgcgactcgcgctttggcgcggggggacgcgccgacctcgactcgcttggcggccctggacccatccagtcaattgaaggatggattgtgttggtcacaggagttcacgaagaagctcaagaagatgaccttcaaaatgctttccaagaatttgggcaggtcaaaaacctgcatttgaatttggaccgccgtaccggatttgtcaaggggtacgctttgattgaatacgagaagtttgaagaagctcaggctgcaataaaagaactggatggagctgagctttataaacaaagaatgagtgttgattgggcatttagcagtggccctgctaaacgcagaaatactcggaaaaggtcaccaccaagagctcgttcaaggaccccacccaggagaaggcactgatgtttccccagcatgtcttgaactacttgctatgtgtgacagagagcaagaagtctggggattccaaatattaccttggtgtatgtggatcacctgatttcgatggtggttattaaattgcctgttgtttccttattgggattccaaatattagctttgaactctggtgtaagttgatgagacatggatgtgcacttagacgcttaccattatgtttggcatgccagttggagacgattgttggaggcgattgtatgggatcatgcttttggatttttgacgagtgatgagttgatgttggatttttatgtttctgtgtacctgtactatggtgtgttacctttcctcattctgtagtcgctcaagaaatgtttttgttgtcgctcaaaaaaaaaaaaaaaaaaaaaaaaaaaaaaaaaaaaaaaactcgngactagttctctctctcctcgtgc

SEQ ID NO: 20715 - DNA, 989 bp, Zea mays
  Clone ID: MRT4577_118892C.1
ggaccctccggggcctagctgttcccgaaatccccaaaagtcgcccttcccccaaccctatccaaccgaatccagcggcggcggcggcggcggcggctatggcggcggttatgaacgccgatgtggaggtggtcgacttcgacctagacgacgacgacctcatggacgaggatgccgggccggatccagcgccggcccccacctcgcgtctccgctccaccatcgcgggcgacgacgcgccgcgtaggaccaagggccgcggcttccgcgaggaccccaactcctctgcgccccgcgattcgcgctttggcgcggggggacgcgccgacctcgactcgctcggcggcccgggacccatccaatcaattgaaggatggattgtgttggtcactggagttcatgaagaagctcaagaagatgacctccaaaatgctttccaagaatttgggcaggtcaaaaacctgcatttgaatttggaccgtcgtaccggatttgtcaaggggtacgctttgattgaatatgagaagtttgaagaagctcaggctgcaataaaagaactggatggagctgagctttatgaacaaaaaatgagtgttgattgggcctttagcagtggccctgctaagcgcagatttactcggaaaagatcaccaccaagggctcgttcaaggaccccacccaggagaaggcactgatgtttccccagcaagtcatgaatttactatgcgtgatgtagtgaaagaagtctggggatttcaattctcaaatgttagcttggtgtatgtgtatccggctttgagttgatggacacacggagttacttagccgcttaccattacgtttggcatgccagttggagactattgtaagcgatgatttttttttggggtgtatttgacaagtggcggtgttggatttttatgttcgtgtgtgccttcactttgttatcgccattctgacgagtgatgctttgggttttgctctataga

SEQ ID NO: 20716 - DNA, 357 bp, Zea mays
  unsure (1)..(357): unsure at all n locations
  Clone ID: MRT4577_118893C.1
ggcgcgccgtggggggggggtgttttttctgggaagtagacttcttatttctgggtgggcacatacatcatccaaaaaatttattattgagattacaactaataagcaatctaaaagagggaccaccaatgaggtgttgttnntanaaggccgctcggggggggggagcgagttggacaaaggggaacaattgtggtanttgtaagaggggggcggggttagcgcgcaaactgcggggagaaaggcggcaactgtggctgtgtcaaaagagaagcacggtttgctgcggctagcgtggctaaatgggantantatttgcgtgggcgaataagcagcgggggtcagtgcgngcaatcg

SEQ ID NO: 20717 - DNA, 747 bp, Zea mays
  Clone ID: MRT4577_118894C.1
ccggccgggatccgaccagctactactagcgtttactactaactagtttgccggtcgagcccgggcgacgttagaatagatacgagcggcgtcgaccggcgccggcgagactccgcagccgcagccgccgcccgatctcggttttcgttcgtagcggtagcggaagatgagccaggaccaggagaacggaggcaccaacgggcagcacgccgccgacgtgatggaggtggagccgaagcgccgggcgccgcggctgaacgagcgcatcctgtcgtcgctgtcgcggaggtcctgaagctccggccgtcttcaacgtcgtaagtatctgacgaatcccattccccagacccctcaccccagcaagcaagcaagcaagcagccaaagttgttctcgatcgacatgtgtgaatatggagcgtgtctgacgatccttccggtgcgcgtcgtccgtccgttacgtacgtggtgccgacgagcaggtcgtggagatcaccaaggggagcaaggtgaagtacgagctggacaagaagacggggctcatcaaggtggaccggatcctctactcgtccgtcgtctaccctcacaactacggcttcgtgccccggacgctctgcgaggacaacgaccccttggacgtcctttgggctcatgcagggacccctgtctttcccggcgcctttctttcgcggcaggggcattcggcctcatgccctatgatagatcagggaggagaggggcgacaagatc

SEQ ID NO: 20718 - DNA, 921 bp, Zea mays
  unsure (1)..(921): unsure at all n locations
  Clone ID: MRT4577_118895C.1
attgggtacctcgaggccggccggacctccccctccccacaccagacaccacgcactggcctcgggcctccggagctcgctcccctgtcctgtcccctccggcctcctctgccctctctctctctatatatgcgcgcgggccgcggcaccggccgggatccgaccagctactactagcgtttactactaactagtttgccggtcgagcccgggcgacgttagaatagatacgagcggcgtcgaccggcgccggcgagactccgcagccgcagccgccgcccgatctcggttttcgttcgtagcggtagcggaagatgagccaggaccaggagaacggaggcaccaacgggcagcacgccgccgacgtgatggaggtggagccgaagcgccgggcgccgcggctgaacgagcgcatcctgtcgtcgctgtcgcggaggtccgtcgccgcgcacccctggcacgacctcgagatcggtcctgaagctccggccgtcttcaacgtcgtaagtatctgacgaatcccattccccagacccctcaccccagcaagcaagcaagcaagcagccaaagttgttctcgatcgacatgtgtgaatatggagcgtgtctgacgatccttccggtgcgcgtcgtccgtccgttacgtacgtggtgccgacgagcaggtcgtggagatcaccaaggggagcaaggtgaagtacgagctggacaagaagacggggctcatcaaggtggaccggatcctctactcgtccgtcgtctaccctcacaactacggcttcgtgccccggacgctctgcgaggacaacgaccccatggacgtcctcgtgctcatgcagggaacccgtccttcccggcgcctttcctcgcgccagggncatcggnctcatgcctatgatagatcagggagagaaggacgac

SEQ ID NO: 20719 - DNA, 1505 bp, Zea mays
  Clone ID: MRT4577_118896C.1
ccggccgggggcctccggcctccggcgctcgctcccctgtcctgtcccctccggcctcctctgccctctctctctatatatgcgcgcgggccgcggcaatgtttgccccatccgaccagctactactagcgtttactactaactagtttgccggtcgagcccgggcgacgttagaatagatacgagcggcgtcgaccggcgccggcgagactccgcagccgcagccgccgcccgatctcggttttcgttcgtagcggtagcggaagatgagccaggaccaggagaacggaggcaccaacgggcagcacgccgccgacgtgatggaggtggagccgaagcgccgggcgccgcggctgaacgagcgcatcctgtcgtcgctgtcgcggaggaccggagacgaagcacccctggcacgacctcgagatcggtcctgaagctccggccgtcttcaacgtcgtcgtggagatcaccaaggggagcaaggtgaagtacgagctggacaagaagacggggctcatcaaggtggaccggatcctctactcgtccgtcgtctaccctcacaactacggcttcgtgccccggacgctctgcgaggacaacgaccccatggacgtcctcgtgctcatgcaggaacccgtccttcccggcgccttcctccgcgccagggccattgggccttatgcctatgattgatcaggggggagaaggacgacaagatcatcgccgtctgcgccgacgaccccgagtaccgccactacaacgacatcagcgagctctcccctcaccgcctccaggagatccgccgcttctttgaagactgtacgcgcgcttgctctctctctctctctctctctctctctctctctctctctctctctctctctctacatctcgctgctcgctaagtttccgcgcggtccttgctgggatcggacgctcctcccttcaactgaccgtgtggttgttttgtttcctgctctggctaaattccagacaagaagaacgagaacaaggaggtggccgtcaacgacttcctgcccgccgccgctgcccgcgaagccatccagtactccatgtaaagtcgtcctgctcatttatctcgtgtatggacgacatgatgaaaacgaggtggaactctggcattcgtgttgacatggacgatcttgttgcttctgtacgtgcagggacctgtacggccagtacatcatgcagaccctgcggcggtagagcgttcctaccagatcccatgccagctgagctgacgcaagagcacagatcgacagaatccttgtggtctcgtctcatgcatggatagccagatcacatgagttgtcgacgaccatgcatctcttcttcccagcgatatatattttagcctgtatcttcccttatttatagtcttttgggtttggtggaatctgtccactgtgtggtttgatctatgtactcctttttctacatttttcacaaaacgaatcgatgagattaataatattgttactact

SEQ ID NO: 20720 - DNA, 117 bp, Zea mays
  unsure (1)..(117): unsure at all n locations
  Clone ID: MRT4577_118897C.1
cgttcccttcgcctccccattccgtaccgcgtcagatcgcnagactactccatggcggcgctcagactccgcaagaggcagcttgatctgattatgcggatgctgcacctcaacaag

SEQ ID NO: 20721 - DNA, 306 bp, Zea mays
  Clone ID: MRT4577_118898C.1
aaaaataggaagaagggaggtgcagggaaggtttctgtcacaaaaaggtcgaaaagagagggtgaagaacaaaagaaggcatcaccctccaaggataaagattgtgctgaaactaatgggaaaaggaagatgttgactggggataatgccctgatgtgccaccagtgccagaggaatgataaagggagggtggtctggtgtaattcatgcagaaataagcgcttctgtgtgccatgcattgaaagatggtatcctaacttgtcagaagacgaatttgctgcaaaatgcccatattgtcgcaagaac

SEQ ID NO: 20722 - DNA, 231 bp, Zea mays
  Clone ID: MRT4577_118899C.1
aaaaaaaaaaaaaaaaaaaaaaaaaaaaaaaaaaaaaaaaaaaaaaaaaaaaaaaaaaaaaaaaaaaaaaaaaaaaaaaaaaaaagaccattctctcttactaattcaaccatccttaacttcttatctctaccccctccttaatttaattcactacccaacctatttcaactaccccacatttataaccccttccccacctaataaaatcactttccctcacataaccct

SEQ ID NO: 20723 - DNA, 208 bp, Zea mays
  Clone ID: MRT4577_11889C.1
tctttctttacacataaatccaccaatacgggggcgtatattacccatacgagagtttaccatccattcaccatattcaagaactcactttattttcctatccatctcaaccattaatccttccttaacatatgtcccctatttcccaaatcaattttatcttaaactctttatctaattttttaatcaatctttctatcccatattt

SEQ ID NO: 20724 - DNA, 423 bp, Zea mays
  Clone ID: MRT4577_1188C.1
aattcggcacgagggagcgcgggacctagcacgagtagagggagaagttgagggggaggtcgtcgtcgccgccgccgccgccgccgccgccgccgccgccgccgccgccgccgccgccgccgtcgccgccgccgccgccgtcgccgacgcgaggtcaccgtcgtcgccgccgccgctgcgatggctcgcctgttccgtgagtctcgccgtgactcgtcccactcctcctcgtccaacggtttcctccctccggcggcggcttccagcccctcttccgtctccgcgatcccctcgccattcctggacctcggggtcgtcctctccgacgtagacctccgggaggccgactactaggtgctggtcgcggcctcccgcaccacggacgggaagcccctcatctatatcctctagtcctcgtcggtg

SEQ ID NO: 20725 - DNA, 321 bp, Zea mays
  unsure (1)..(321): unsure at all n locations
  Clone ID: MRT4577_118900C.1
aatantttttttttaaaagccaaacgctaagggggtgtttttgcacagggctgagcgtattaccgctacgggcataactaaccttacaagtgttatgccaaagggaaaacggcacctccagatgcatggctatatcccagtttattgagcccgcataaggtttataacttaagaatggggctcttgccccacagcagctcagaccatgctgacacagaaaatcagctcgagtagagataattggtcacccctctccacagattgagctgctaccatagcggtaaatgacttccgattcaacgatagacaaagacggggagg

SEQ ID NO: 20726 - DNA, 260 bp, Zea mays
  Clone ID: MRT4577_118901C.1
gacccacgcgtccgaaaaaaaaaaaaaaaataaaaaaaaaaagttcaaaaaattaaaaaaaaaaaaaaaataaccatggaactgaccatataactcaggtcaaactatcgcacgcatacctccgaatcccattctcctatatcttgcaacctaacttcaatcaacttgccatgctaacccaatatcaactactcataaacccctcacaattcccaacttaatcgaatctcgctgaataccccatttaccaattttccctt

SEQ ID NO: 20727 - DNA, 412 bp, Zea mays
  Clone ID: MRT4577_118902C.1
gatcagccaaacaggggagccacacatgacacccttctgacttataaacgctcacaattatccacccatgcagagaaatacccagcgaggacaggaatacaggagctcccccatctcgacgaacgcccatgcccagcaactttcggccgtaaacttcacactgttactaaccacacgttaacatctaccaaagtacggcgggggacccattcttgtggaccattcaattacacactcgttccaatcactatcaaacagaggtcttgttgtttacgcacgaaccagataattatgtcagacaccccactgtactaacgccaaacccagaggagagggctcccgttccaatcaaatgcctcatggagagaaagcaagaggctaccacatctttgggcgctaaattgacaagaac

SEQ ID NO: 20728 - DNA, 657 bp, Zea mays
  Clone ID: MRT4577_118903C.1
ctggacaaacccgggcaacggggggttggatctaaggggatcggggaaaaagggccactttgccattaacaaggccccggggggtttaaagccgtcggaaaaggattcacccccccccccgtgggaaagggagcttaaagggggccccccggggggcgtcggccggggggcctgacccaagggcacggcccctgggggcgcaaaccccctaacgggggtcggggcgggcgggaaacaaaggccccggttgctacctgggattctgactaaaaggggttcagtcataatccggcccacggaattttccccccacgggtttttaaaccaagcgcgaggaccaatgggggaaataaacggtccctctcgacctagggggaataactatggggggggggccataaggggggaaaaacaaacctgtctcacgagggtttaaacccagctaacgttccttatgggggggggaacaacccaccactgggggaattctgcttcccaaggatgggaagagccgccctcgaaggatcaaaaagcaacgtcgttataaaccctgggttgccacaagccagttatcccggggggaactttttggacccctttagcttaaactccgaaggtttaaaggacccaagggccccccttttcccgggggcggtt

SEQ ID NO: 20729 - DNA, 546 bp, Zea mays
  Clone ID: MRT4577_118904C.1
accctgttgccaccacaatattgttgtcgttgagcacatcatatgacaacagcggcattttttaacaaaagaggcgcccccccaaaaaaacccaccagataatgatgtcctcccgcatcatccggccgaggaggccccttcttgccaaaaaaaggaggggcgccccccttcttaccccccaagtaataaaaaaaacgacgaaagaagtggtgttatactagtggccccaggcggctactaattatacaactcctatgaagttattcaacaaaggactacaagaaagctcatcaggaggttcttttttccctgatgacgccaacaacgccgccttgttggcggtggctctgctgaacagacaacagcggcgggaagaacgttaataaatcaacgccccgcgctactaataagacgaggaatttttttactacccggacctcctccgccaccacctgatgacgactataaccacactactggccgtcgctactagaggatacctggttgccacccaggtcggagtaatgatggtaacagctgcctgcg

SEQ ID NO: 20730 - DNA, 303 bp, Zea mays
  Clone ID: MRT4577_118905C.1
cataggaagggggatttttcgaaaattaaaaattcaaaactcccccttccatccaccaaaatctattccctggctaacaccatatcccttaggggcacccttttttttgaacaaacaccatctgggcccccaaaagcacaggttgtgcccttacttcaaactttagatcaaatgcatacacagctccaccaacccccagaacaagacccatttttcaaccaggtatctttttacctccacaagccaccttcttttcctggggctaataaaacaacacgggctccatttgtacatgcccggcac

SEQ ID NO: 20731 - DNA, 261 bp, Zea mays
  Clone ID: MRT4577_118906C.1
gctacttttaggcctatgtggtaagtcctgcacacttgatcgaggattagaaacattcacagggtgaacactatattttagtgagtgcagaaattgccaattgtggtagctatactggtattttttctgttggatttggagcaagctataggaactgaatataagtaattgatcgtttttacctggttataagagatacctacgatgggattatatgatttctatagtgacaacaaatagtattttaagataattcttaag

SEQ ID NO: 20732 - DNA, 335 bp, Zea mays
  Clone ID: MRT4577_118907C.1
ggaattctagtagtgtgcaagttagctgttcaccggaattctggcccgcgccggctcgctctggacttccttttcgccgccgctggatgctggtatttgttgtttttttgctttgttccgcgataggattactagtggtgatttgtgtgtactctcttactctctagacaaacgcacacaacctgaagataccatgcacaaactggagataccatggtctctacataaacccttccagatggccaggatgccacatgctgtgttctgctttccgggccgaacaaatggcacttgttgctgctcacctactgctaaccaacgtgtctatctggttc

SEQ ID NO: 20733 - DNA, 255 bp, Zea mays
  Clone ID: MRT4577_118908C.1
attcggctcgaggcggaacgaaattttgaatagacggccgcggccgatgtttaagggatggtttcttacaagacaagcatggaaccagaaaggattgaacaaacggaggcgggtctcaaaacgaacaaatgtttgatctaaacagaagtaccagagaaaaactggggaagggacaggaagcccaaaaaacacccactgatcgcccaggaattttaaacaaacattgcaaatcatagaacaacaaactacaattta

SEQ ID NO: 20734 - DNA, 229 bp, Zea mays
  Clone ID: MRT4577_118909C.1
tccacccgcccttagttcccccccccccaccgagaatagatatgggggtacaccatcaaatgctgccgctccagacccaggccccggacacgttgaccgtggatcagctgttgcccctgcggctggaatggtagattttgccctgggtattgactccattgtatgcgccacgactcctggtgcttattgaggtgtgttatcacccaggcctaccgcgtgcgaggggttc

SEQ ID NO: 20735 - DNA, 349 bp, Zea mays
  Clone ID: MRT4577_11890C.1
ggagaattctattaagtctcccttcattttcgcttgagaaacaatccaagataattatggcgggtatgacattgcataacttcattagagatagtgctctacacgatagagattttgatgaagtaggagctaatagcctaagtcatgatgtacctgcaggtgagagtagtactagtacatctgatgagttagacatgagtgattttcaagatgcaattgctaatgcattagtgtcgtagttaacttagtgattgtaacagaacttatgatgtaatcaactccactaattattgtgtaaaaaaaaaatatagtataatgaagatagtataagcaatatatgaactaaaat

SEQ ID NO: 20736 - DNA, 279 bp, Zea mays
  unsure (1)..(279): unsure at all n locations
  Clone ID: MRT4577_118910C.1
cgcacgggcaagcacgcggccgtcgtcaagtccgagccggccccggcgccggagggcggcggcggcgacaaggcggccaaggaggaggaggagaataagaaggatgcatgcggtgcacgaggctaggaaagaaggactgctnggaggaggttgagaagaaggttggcggctagaagaacgaggagatgaaggacggcggcaacggatacggcgacaagaaggacgaggccggcgacaaggacaaggacccggccgccagcctgtacatgcaactacccg

SEQ ID NO: 20737 - DNA, 710 bp, Zea mays
  Clone ID: MRT4577_118911C.1
caaggttcagagtggatcaaagttaccggagcagagctgccgatttcgcaagcgcatggcgacccatgaatgcaggctggggtgtttatcaggatgcactggtggttatccttggtagcaaccagctgatgccagttcctccttgtttggtacctccctcatcctcaaaccaggtatttatacactagccgtaaccttacagacacaatgccaccaccaaccacgttcagcaatgaaacatacaccgtacattcattggattatagagaattggacactcttaacattcagcaaagctaatgagaagggtggttattactggcctacgggtttacatatggttttgttaattgttgctagcttctgattgggcaactaaaatgatggttttgagcctctgattggactcctctggacaaaacaccgccggaactgattctcccaaaaatctgaagacaattttgccgaggagtgcagtcttggattgcaatgttttgctactttgtggaatcatgcgactcaccaccaatgctgtagctagcattattagtaaagtggaaccttggccttttgaacaaaagatggaagcaggacacaatcattagaaaactgcacagtaatacacaaattccactatgaagggttgatagctgcaaattgttttgttataaactcattcctcacgcatatttcaagatacatatatctcc

SEQ ID NO: 20738 - DNA, 1106 bp, Zea mays
  unsure (1)..(1106): unsure at all n locations
  Clone ID: MRT4577_118912C.1
cgtttttgcggcggtgtgcacgtcgcggtggggcaggaccccctcccacccggccggcgagcaccagtgcatcgacgcgaacgtggagcccggggccggggcggcggcccgcgtccgcgtccgcgtggtggtggaggtggacttccggtcggagttcgaggtggcgcggcccaccaaggggggcctagccaggctgcangcgctgccgccgctgttcgtgggcagcccggagcggctgggccgtgtcgtgggcgtaattccgcacgagggcgcggcagagcctccgcaagcgcgggctccacttcccgccgtggcgcaagcgcgagtacatgcgcgccaagtggctgtccccgcacgcccgcagcagcagcagcgcggacaggacgccggcgcccgccacgccggtttccgccgccgccgccgccgccgccgccttctccggcgagttcgagctgcggttcgacgagaaggagaaaccaaaggtggcggactgcgacggcggcattcccggcggagaagacgacggggcgggcaagaaggtcacggtcgtggtgtcgccgacgccgacgccgtggcgggcggaagagcccggggcggctagcaagctgtgcccgcaggccaagcggaaggtggtgaccgggctggcgtccctgctgccgctcgcaagctgatcaacatcaaaccaagaggagagactccgtccggctccaaaaaagttttcccttttttttccctccagaagatttccattccccccgcgttcgtcgatccgtccgagggccggctccaggtgtttttagcggttttccggcgcctcggaacagagagtgaaaaaaaagagagagagagaaacgcctccctttttccgtcgaatttttttcctttgttttgttcctgcgaaagaacaaaattttcagttgtccgccgccgggggaacgggaggaatccgggcagatttgggttccctgtcctctgttcttgggagggagagaaattatgaagcatcactgctgctatgatctataaaagcgggttgagtactcgaaaaaaaaaaaaaaaacatgtcaggcctgtgacttcaattgaaagtaccataattactctgc

SEQ ID NO: 20739 - DNA, 242 bp, Zea mays
  unsure (1)..(242): unsure at all n locations
  Clone ID: MRT4577_118913C.1
ccagcgcacaaacactacgggcggtctttttaagaaggctggcggccccaatacacancccctcctacttcctcaacaacctaccaaccaacgaactcaccaccgaatactccaatggcacaacacttcaccactacaccataaacacatcattcctccactcatccatttatctataaccaccccccaacctattctacagctacccccaccatctcaatctatcaaaacttccacttaca

SEQ ID NO: 20740 - DNA, 426 bp, Zea mays
  unsure (1)..(426): unsure at all n locations
  Clone ID: MRT4577_118914C.1
ggttggaaccttgggctgatttagtgcttggataaagtaagtaaagtatggatggatggcatgggtctcgtatgtgggtgctgtgctgttcgggtttgttggatatacttttggtaacaacgaggttttttggttggtgttgtgcttctgttgttggtgttcgtgtgtcgtcgtcggttgtgattccttcggtggttggttcgccgatgatgcttctttcggtgttgcattcgtcgttgttgtcggtttcgctgtcgttgcgttcgttggtggcgattgtgttggtggngcttgggcatggtgtggtgttgggtgcggtggtgtcggtggaggtggttgcggtgcatgtgattctggagattgcgttatagtagctggctgatgagactctgtcgctgtcggttgcgtcgtggtggtgtgtgttgt

SEQ ID NO: 20741 - DNA, 282 bp, Zea mays
  Clone ID: MRT4577_118916C.1
gttagggggccaatggaacccccccgatcttattggttattccaaacaacccacactaacaggaaccatttcaagaaggcattattggttttacccagacgcaaacatcccaacccaacgtacgctgggcaatggggggggggaacacaaattggcgcccgtgaccccaaccaatttgaaaggcaaagtcttacccccgcccaagaatacccaggttaattacagggcaaatgcacattccataagaggggctaaaactcacttactttgggccttgggggg

SEQ ID NO: 20742 - DNA, 387 bp, Zea mays
  Clone ID: MRT4577_118917C.1
cccacgcgtccggcaaagtacagatccatttgatgttccaatggctgactcagtaagaggcaaccctaaggatattgaagatgaagtagctaaagaatgggaacacacaatgctgcaggatagcatgggcaaggagttgaatgaattaaatcgacaacttgagcgaaaagagtctgagatgaaaatgtatggatgtgatactgttccccttaatccgcccacgcgtccgcccacgaggccgcttgaagaagagaaaaaggcagtacagcaagagagggatagattgttggctgaagttgaaagcctaagtgctgatggccaaacacataaactccgagatgcacagctgcagaaactaaaatcccttgaagcccagattctagacct

SEQ ID NO: 20743 - DNA, 281 bp, Zea mays
  Clone ID: MRT4577_118918C.1
acttcattacagaacttcggttctagattcatgccgtgatggagcttcatttggaccataaggtctaagatgtcatgcaattgctggttaatcagcggatgccgatcaaacttcaactgcttcaacgattttcctgagatagatgagactaccaacttcgcgcatgcaaccatcgtcatgtacttgtcattggcgtatactgagttcagcttattatacctgtgaaagttctattactatcagtctgcattaaactcttcatttcattgaatccaaccgtg

SEQ ID NO: 20744 - DNA, 741 bp, Zea mays
  Clone ID: MRT4577_118919C.1
ccctcgaggccggccgggactcatgtcgccgatcacacttggacttgactggtgtatgcgcgccgccgccgccgtcgaaacagcacatcgctcgctcgatctcaaccatggggcaggtaggatgcagccccaggacgcgtcgaagctcttcaaccgctggaccttcgacgatgcccaggagaacgatatctcgctgaacgactacctggctgagactgcggcgaagcacgggacattcctgccgcactccgcggggagctactccaataagcggttccgcaaggcgcagagtgccatctgctagagcctcaccaactcgatcatgatgcacgcttgcaacaactgccaagaaggtcatgtccgtccgcatcatgaagacaccctgtagatgatccacctgctcactgacgaccatcccatccaggtgttcgtggacgccattatcaacagtgaaccacgtgaggatgccacccgcattgcctctgctgctgttgtgacaaggcaggctgcgaatatctcacccctgagaagggtgaaccaagcctatctacctcctcaccactggtgccagggagagcgctttcaggaacgatcagaaccattgctgaatgccttgcagacgagttgatcaacgctgcctgggtgtcttccaacagctacgccgtcaagaataaagaccagattgagcgtgttgccaaggccaaccgttgagtggagcttgtatcctgccgcacttgctct

SEQ ID NO: 20745 - DNA, 391 bp, Zea mays
  Clone ID: MRT4577_11891C.1
agaaggagccggggcgcacatttatatttctcgtgatgttgactttgatgaagaaggttttccttctacagaactgcaccctaatacatgtagaacttcatcataatgctaatgctaaactaagggccaaaatcaatttgttgccttcaactctttaccttcatctaactatgacaacaggggcaattgtaatacaactgatcctttgtgggctaatgatttatctactaatgctaatgttgctgagaaagcttttggagattctggtaatgacagacatgacgaacatggtgaaattcttggtcggcgtcaactgatgcagcaacaccttttgtgcaaggtcagtagccctatgaccatctattataaacaccctgaccagttgtacaga

SEQ ID NO: 20746 - DNA, 124 bp, Zea mays
  Clone ID: MRT4577_118920C.1
ttacctttccgacaagcctttcatcacctttttggaagcacacatcatttccggcggggccgtgttaattttttaatacgggaaggaccccttctctactggactcatgatcatttttgccacc

SEQ ID NO: 20747 - DNA, 405 bp, Zea mays
  Clone ID: MRT4577_118921C.1
acatgatgtcggactcatacgccacattcatccagaatgtacgtgcagctgtggccggcccgaagcggcgaagcctgacacggtgctagggcccaaatccaaggtaagtcggccggtgctggccaaagagacgtcgtctggcctgccgccgccgaagtggatccacgtcgttctcaacagcaagggcggcgctgcgcccacggtggccatccacagcgacaatgcctacatcgtcggcttcaccaacagcaagaggacgtggtaccagctcagcaagacgggcaccaaggacaagctcgtcgacgaaaaccccgtgatggcgggcttcgacgtcaactatagctcgctcatcggcggcggcgacaagctgcaaaccatcaagggataagggataaatagcggggg

SEQ ID NO: 20748 - DNA, 177 bp, Zea mays
  unsure (1)..(177): unsure at all n locations
  Clone ID: MRT4577_118922C.1
tacttttagtgctccagccttgtgacnatccgctagttcctccttattgtacacgntcactgtactctctgaaggactgcagataatagctcggtcctggcgcagatgggtccttgcctgcaattgactcgcatttatggaacaaccatgctgnacttctccttctgccactgcaag

SEQ ID NO: 20749 - DNA, 392 bp, Zea mays
  Clone ID: MRT4577_118923C.1
ctgacgcgtgggtgaacgcggcggggtgcctgttcgacaagcacgctcggacggagctggccttctggacgctcaagcacgacggggagcgcgagtacatgtacatacaggaacgcggagcgcggacatggtgccgaccgaggccgagctggactcagggcctggggcggtgcgccaggggggggcacatacaggccatctccgtaatctccgagccgcgcggctcggcgcacatataccgccatgcgcgcagccgaggccgcctgcgtgatttgatcctaacaatccaatgtgcgagttcctggcgggccgctgcccgacgccgcaggcgaggggatacttactactgggaatgaggccgactatataagaggacagtgacgacgaggggg

SEQ ID NO: 20750 - DNA, 275 bp, Zea mays
  Clone ID: MRT4577_118924C.1
aatcgacccacgcacccactcatacatcgagagtctatactatcccattaccctttccagctggatacatccatcacagctcctggcgaaattccatatatcgaggctcaccatctttcatatgatattaacctaaacttaaccttagatatccaacaaaccagaacaagattatcaacttcttcatagaccacatgccaagccatgccttcaaacaagatcaactaaatcacttctaacacagatattactatgattatccttacaaaattcta

SEQ ID NO: 20751 - DNA, 412 bp, Zea mays
  Clone ID: MRT4577_118925C.1
cccgacgtcgcgcgcgcggtcgtcgggcacggcggcgccggcccgctcgtcgagatctgccggacgggggactccgtctcccagcccgccgcggccggcgcgctcaggaacctctcggcggtgccggaggtgcgccaggcactggccgacgaaggagtcgtccgcgtcatggtcggcctgctggaccgcggcgccgtggtggcgggcgccaccaaggagcacgccgccgagtgcctgcagaacctcacgtccggcagcgacggcctgcgccgcgccgtcgtgtcggagggtgggctgcgcagcctgctggtctacctggacggcccggtgccgaaggagccggcggtgggcgcgctccggaaccctcgtgggcgcctgtattgcccgacagcctcggggcgctcggcgtgct

SEQ ID NO: 20752 - DNA, 489 bp, Zea mays
  Clone ID: MRT4577_118926C.1
cccacgcgtccgggaatggttaagggctatagcggtgttttccgacttggagaagccacatcaacctgggatgcagattcaccaattatccagagggaaccatgggaacacatcaaagatgaaaatattagaaaggcagcagcatcattcatgggttggcggtgaaaagatgtatgacaaagcaaggaagggtgaaacagtagagctttcaccaagacgtatatcgatataccaatttgatattgagcgcagtttggaagacagacagaatttgatatttcgagttacttgctcaaaaggaacatacattcggtccctatgtgcggacttgggtaaagcacttggaagctgtgctcatttaactgccttgcggagagactcgataggtgaatactcggtcaatgatgcttggaacttcgatgagcttgaagaacaaatcaccaaggggtatttatgagcatgccagtgagccgagctaggttatatgcg

SEQ ID NO: 20753 - DNA, 1891 bp, Zea mays
  Clone ID: MRT4577_118927C.1
cacgaatgcctcctcgagcgggagccatggcggcggcggcggcgagggcaagggcggcgctgctgccctcctccccctccccatcgccgctgttccgcctcccgcgccgcttcctttcactcaccgcgactcgctaccctctctactacgacctcatcgtgcatcgccccgcggaccccaatccccccaaatcctccgccgccggggccgaccggcagccgcagccagcccccgaagagcagacgctcgaccgcgcaaagcgccggtacctccgcaagcgccgcagccgcctactccccgaccctgacgccaccaccaccactaagccctcctccttgtcgtcggagttcgtcgagctcaggccggaggtggtggacttcccgcgcctgcacgcgcgcgaggaggcgctctacttccacgacaccttcgcaatgccgtgggagaaggacaagcactaccgcatgctctaccgcctcgagaagaagtacttcccccaccagtcgctcgacaacgcgttcgtctccgccgacgccgccccggcctccgacgccgacagggggctcgtattctttgacgacgagaagaaggaaaacgagggagaggagcgggcggtcagtgacaagggcgccaacaaaggggaggtgctggagaggaaggtggaggatttcttcaggtctctcaagaagggtcccggccaagtcgacaccaaagccaagagaccgggaacggagccgcagcagcaggtgaagcgcgaagtgcggagggaggaggagcggccgcagccgtacctcgtcactaggaccacggagctgccgccgaggtgggacggccctgctgggaccgtcgtgctcatcgacaagcccaaaggatgagatgtcaacgtgggcttcatggaagagtggcacggcgcttggtgttcatacacaacgtttggcctgctggagctctggacccaatggcaactggattgttgattgtttgtgtaggaaaagcaaccaaaatagttgacagctaccaaggaatggttaagggctatagcggtgttttccgacttggagaagccacatcaacctgggatgcagattcaccaattatccagagggaaccatgggaacacatcaaagatgaaaatattagaaaggcagcagcatcattcatgggtgagatatggcaagttcctccaatgttttctgccattaaggttggcggtgaaaagatgtatgacaaagcaaggaagggtgaaacagtagagctttcaccaagacgtatatcgatataccaatttgatattgagcgcagtttggaagacagacagaatttgatatttcgagttacttgctcaaaaggaacatacattcggtccctatgtgcggacttgggtaaagcacttggaagctgtgctcatttaactgccttgcggagagactcgataggtgaatactcggtcaatgatgcttggaacttcgatgagcttgaagaacaaatcaccaaggggtatttatgagcatgccagtgagccgagctaggttatatgcggcttgcaaccagtggcatccatgctgccatgtcagtcccaaagctgtcaacgtgggcttcagcgaagagttgcaaatccagttcagttcatcctcaaccttttgtcatatagaggaacacgaagctccgttagttgtatgtgtgttgtgggtttcaattgatctcagtattgaatcgattttggcagtattgatgtataccattgttggtcaggtcttttgattgccttgccatgtaattttgctgggagcatattaaatttataatctaaagactgtgttaaaagtagcgaaatttataatctaatgacgaacacaagctggcgttaagtccaaaaaaaaaaaaaaactcgtgc

SEQ ID NO: 20754 - DNA, 227 bp, Zea mays
  Clone ID: MRT4577_118928C.1
ctcatctccaccattgtttggagccccaacgcataccaagtcggtcgtcggggtataccgaacgggtcgacaaccctacatggggggaacatcaagcaccgagataatactcgtatgagatcaatcctcataccggggccgcaagatcgcgtgtgcagcgccaccaccgtcacaaacccggctcaggaccaggtcccgcaggatgagcatcatggatgatgcgacga

SEQ ID NO: 20755 - DNA, 390 bp, Zea mays
  unsure (1)..(390): unsure at all n locations
  Clone ID: MRT4577_118929C.1
gtgncttgagctggtatggnttgaatttgtgcatatagagattttttgggggcccaccagagtttttacccgactaagacgcccgggagcagattacctccgatttacagaagcaaaggccatttggggcaaaactactaaattttcgactggtttcccccactgggaaggttgacaatcctcctcactaaaattgggaatttcaggaaaaaggggggctgcctggagcctgaacataaaaaggggggttttttcgcttttgcgatcgcatctgacaaagctccctgaagatacaccccttatgcatttggccaaaattatacattactttttgccaaaatctgggctggaatgggcacttgattccagctttttcgcattatttagctt

SEQ ID NO: 20756 - DNA, 103 bp, Zea mays
  unsure (1)..(103): unsure at all n locations
  Clone ID: MRT4577_11892C.1
ctnctcccaaaccacaccgattccgatcccaatcccgtatccggcgaacgcgcgccgcggtcatgtgcagctgctgagagaaggagcgagcgcaacgacgcca

SEQ ID NO: 20757 - DNA, 220 bp, Zea mays
  Clone ID: MRT4577_118930C.1
gggtattgggggttccttttatttctttaaaaaaaacggggacggaccccccttctgtcttaagaacccaacctcgacaaggaaaacgttaaaggccctcaccgctcattaagggaataaggtgtagccatcctgttttaaaaataagatgaaggatttctctttgtggaagaaatatttgttaagaccgatatgactacccccaaacccctttgaaaaa

SEQ ID NO: 20758 - DNA, 243 bp, Zea mays
  Clone ID: MRT4577_118931C.1
gccgtctgaagtatgagatgaggtcttacaatgagatgggggtgattcagatgaaacaaatgggttaaaaccaccaacaacttaattaccttaaaaaccagattggtaaaaacaaaccaccaattaaaaccagtaaaaaaataattgggtgttgttacccaaaacttcctggggcttttggaaaaaatttttttttgttgggagtaaagcaaatgaaagccccttggggtcctggtaaaaatt

SEQ ID NO: 20759 - DNA, 648 bp, Zea mays
  unsure (1)..(648): unsure at all n locations
  Clone ID: MRT4577_118932C.1
agtttgtgttgcatgttgatgagagggcagtgcagagatcagaatttgatacattgataaaagagaaataaaagacttacaaaaggttgagagaggagaacgaattcgcgcacaagatcgaggaagagaaggcattgaagcagctgaggagaaccatggtgccacatgctcggccgctccccaagtttgacaggccattccgaccacagaaatcgacgaagcaggtgacaaggccgaagtcgccacagcttcaggtggatgagcgaggggcgaggaggcacgctttgatcagatgatcaccgccgttgtttatctatcttgtactacactgattgtcatgcgcggtcaagatcatatctcaatcttgccgtcgatctgttgttggttactagattctttcttctgctgaccagtgaccatatgtagagcaggccaggccctaataacagcaatctttgtcagcacaacgcagctgacacggtgtatgcccttgccctgtgtgtgtttgtgtgccagtgtgtgtgtgtatgtttgtgtaagtgtaatatgattacctcgatggtgagacttcttaatccgatgatggcttgatatnnnnnnnnnnnnnnnnnnnnnnnnnnnnnnnnnnnnnnntcgtgccgaattgcc

SEQ ID NO: 20760 - DNA, 336 bp, Zea mays
  Clone ID: MRT4577_118933C.1
atgacaaaccctgaccgaagggagcgggtttcgaatgattcatgggggaatgcgagaaggtctataaaatgcgattataccattaacctgtccgttgaccacaatttccaccactgaatagacagggattgtatattgatcaacacgttccctgtatcatcgcctatcgagacttgccgaaacatggcacgacgccctgcgtgcgggttcacgttcacaccactgagacatatatcgcggatcgtaccctgcctacagcacgcctattatcaaccgacccgcattgtgactcgctcctcgcgactgacactcgatctaggcacgtaaacgcccgtc

SEQ ID NO: 20761 - DNA, 290 bp, Zea mays
  Clone ID: MRT4577_118934C.1
cggaaacctcatgatggtcagccttgccctggcgggaagcagcttcctccatttattcgagtgctgaacaaataacattttcaaatgtgttcaatgaattaatgtattgttgcttatttcaaaataattagaaagatcacttagcagggctgaatccaaattccctatggaatatcaactaattaagttggaatcttaattaaatgattaatggaatagacttctaatagatgaaattagctatatttctctctattccatattcttttcgtggatttgtgtcattgacc

SEQ ID NO: 20762 - DNA, 280 bp, Zea mays
  Clone ID: MRT4577_118935C.1
acattaattggtgggttttttttaattaccccagggacccaaatataaagtccccctcatcaaaacccatggtttggagaaaaaatacttacttcgttaatgacaaaaggtttatactttattctcaatcactttttcaccctttaggttcaacaaacaatgggcttctttaattccttacaaaatatattccaaccgtttccactttaagggaagccttacaaatactttttttttatataatcaattgctgtttttattatttatgaaaaaaccgtat

SEQ ID NO: 20763 - DNA, 195 bp, Zea mays
  unsure (1)..(195): unsure at all n locations
  Clone ID: MRT4577_118936C.1
aaaaaccgggggggcaagcgtcccggacgcgtggacaggacacttgggctttctttgtttataggcagcacactcanctaggcagcatattttatcgagacgcgggagccatccccaccgtcagcgccgccgtgatgaccaccatctttgcccgcgccgtgatctccatgcccaatgctntatggctgcctgcgt

SEQ ID NO: 20764 - DNA, 423 bp, Zea mays
  Clone ID: MRT4577_118937C.1
cccaaaaaacatttcatgaattctactgtactaatacgggggacgaaaaccagttgcaaactcgtggtgcacatatacccaacacactagaaaataccctagcgtctgctgaacccaattaacctactgatggagcagaccacaggcagtggtctaccgatgtcagacaaacatgtacggcctcgacgataaacatggctctcttacagttgatggttaatgggttcttgcgggttcgctaaacggcttctcacaccctggctgaagcactaatcagtcggaccataggccatgtgcggttctatcggcgttttcacaatccgatcgaagagggagtgcagattgccgacatgatccaaagaatgcttccttcaaccataagaacaaacgtgttaaacactaacccagccaccagttgataac

SEQ ID NO: 20765 - DNA, 877 bp, Zea mays
  Clone ID: MRT4577_118938C.1
actcctaagggcgattgggttcctcgaggccggccgggagggaccgaggaggatagcattcttttcataaaacgacccgacccccgcgacgcccccgcggacaaagcagtcctcccaccgcacgcaacgcagcctcgacctcgacctcgccgtcgccatggtgagcaagcagacccgccgcctcctcgtccttgccgccgtcgccgtatgcctccacctccccgccgcctctgtcgccaccgacgtcgattactgcagtaaaaaggagtacccggtgaaggtgagcggggtgcagatcgtgcccgatccggtcgagcccggcaagcccgccactttcaagatctccgcttctactgataaaaccatcgagaaggggaagctggtgatcgacgtcaagtacttcttcttctacgtgcactcggagacgcgcgaaatctgcggagagatctcctgtccggcgaccggcgacttcgtgctgtcccacgagcagacgttgccagggttcactccaccggggtcgtacacgatctacatgaagatggtcggggacgacgacgaggagctcagctgcatctcgttcggcttcagcattgggttcgtcgcctccagctgaaacccgcctgagctgcgcgccagaagtcgcccaacatggatgtaattatgtaaaccaatgcattacggagacgctcagatttcttcaacctagagcacagatatttgtcgactctgaaatgaaatggcttgcgtgccgtcgttgttcgtcaaaaaaaaaaaaaaaagatgagccaagttagtctcagttacatctccagtgtttgaaatgacattacgataattataaaactaaaatttatcgcatagatgaagactaagacga

SEQ ID NO: 20766 - DNA, 286 bp, Zea mays
  Clone ID: MRT4577_118939C.1
tcgacccacgcatacactcacacgtcagccgctctttcactctttttttcatacaatctctcatcccaaaattctacgcacttgacactttaacataagcccattccatccaacaataccaattacaatcaataatctatcaatctctatattaacccatcatcctccttacatccataatacccacaccctttctaatacattgctaatattactaaactgcaactatcactctacaacaaccgatattatcattgtataaaaaaccttttaattctacatataa

SEQ ID NO: 20767 - DNA, 428 bp, Zea mays
  unsure (1)..(428): unsure at all n locations
  Clone ID: MRT4577_11893C.1
aaatgggaaaactggggggcaggggtaaccccaaaaatcgggttttttttgggggggggaaaaatatgggaaaaacacgtttggacgggccccggacatttttccatttggggggggagggggcccccaatcaaacatgcaaaaaaacaacaagggcttgcttattggggggtgcccgcttgtaacaagggggacggccgggggaacatggaaggacccatcgggtgggcccctggggaaaaatctaggggatcttgcacccccagttttcggggaggaaagcggggaatttgtacttggggggccccttttcccgggaaaaggggacccaatttttggaggggggggggcccttgggggggggggggtcnaaaggccaaaccccccaccaggggggggacttgccgaacaaaaaatgtttttttgga

SEQ ID NO: 20768 - DNA, 761 bp, Zea mays
  Clone ID: MRT4577_118940C.1
tttccggaccgaaaaccgccccgctcacaaagcagtcctcccaccgcacgcaacgcagcctcgacctcgacctcgccgtcgccatggcgagcaagcagacccgccgcctcttcgtccttgccgccgtcgccgtatgcttcctcctcctcctcctcccagcctcctctgtcgccaccgacgtcgattactgcagtaaaaaggagtacccggtgagggtgagcggggtgcagatcgtgcccgatccggtcgagcccggcaagcccgccactttcaagatctccgcttctactgataaaaccatcgagaaggggaagctggtgatcgacgtcaagtacttcttcttctacgtgcactcggagacgcgcgacatctgcggagagatctcctgtccggcgaccggcgacttcgtgctgtcccacgagcagacgttgccggggttcactccaccggggtcgtacacgatctacatgaagatggtcggggacgacgacgaggagctgagctgcatctcgttcggcttcagcattgggttcgtcgcctccagctgaaacgcgccagaagtcgcgcagcatggatgtaattatgtaaaccaatgcattacgaaggagacgctcagatttcttcaacctagagcgcagaagtttgtcgactctgaaatgaaatggcttgcgtggcgtcgttgttcgtcgaaaaaaaaaaaaaaaaaagcccctaggccccaagctcagctttgtccaaaaaaaaaaaaaaaaaggccccta

SEQ ID NO: 20769 - DNA, 689 bp, Zea mays
  Clone ID: MRT4577_118941C.1
ctcgaggccggccgggccgggacaaagcagtcctcccaccgcacgcaacgcagcctcgacctcgacctcgccgtcgccatggcgagcaagcagacccgccgcctcttcgtccttgccgccgtcgccgtatgcttcctcctcctcctcctcccagcctcctctgtcgccaccgacgtcgattactgcagtaaaaaggagtacccggtgagggtgagcggggtgcagatcgtgcccgatccggtcgagcccggcaagcccgccactttcaagatctccgcttctactgatcatgccttccatgatttttttttcttgttcagataaaaccatcgagaaggggaagctggtgatcgacgtcaagtacttcttcttctacgtgcactcggagacgcgcaacatctgcggagagatctcctgtccggcgaccggcgacttcgtgctgtcccacgagcagacgttgccggggttcactccaccggggtcgtacacgatctacatgaagatggtcggggacgacgacgaggagctgagctgcatctcgttcggcttcagcattgggttcgtcgcctccagctgaaacgcgccagaagtcgcgcagcatggatgtaattatgtaaaccaatgcattacgaaggagacgctcagatttcttcaacctaaaaaaaaaaaaaaaaaaggcccctagggcc

SEQ ID NO: 20770 - DNA, 765 bp, Zea mays
  Clone ID: MRT4577_118942C.1
cgggaacattcttttgtaaaacgaccccaccccgaaaatctccccgctcacaaagcagtcctcccaccgcacgcaacgcagcctcgacctcgacctcgccgtcgccatggcgagcaagcagacccgccgcctcttcgtccttgccgccgtcgccgtatgcttcctcctcctcctcctcccagcctcctctgtcgccaccgacgtcgattactgcagtaaaaaggagtacccggtgaaggtgagcggggtgcagatcgtgcccgatccggtcgagcccggcaagcccgccactttcaagatctccgcttctactgataaaaccatcgagaaggggaagctggtgatcgacgtcaagtacttcttcttctacgtgcactcggagacgcgcgacatctgcggagagatctcctgtccggcgaccggcgacttcgtgctgtcccacgagcagacgttgccagggttcactccaccggggtcgtacacgatctacatgaagatggtcggggacgacgacgaggagctcagctgcatctcgttcggcttcagcattgggttcgtcgcctccagctgaaacccgcctgagctgcgcgccagaagtcgcccaacatggatgtaattatgtaaaccaatgcattacggagacgctcagatttcttcaacctagagcacagatatttgtcgactctgaaatgaaatggcttgcgtgccgtcgttgttcgtcaaaaaaaaaaaaaaaaaaggaaaaaaaaaaaaaaaaaagcggcc

SEQ ID NO: 20771 - DNA, 199 bp, Zea mays
  Clone ID: MRT4577_118943C.1
aacctgggaaacacaaacgactgttagttcgggtgccatgtctaaggtatacaggactgagcatccgctcatataactcactatataaaccaaaccgtattgcataagactggcaacacacgcgatatgataaaacattctaactgttgaatggcttggaccctctcagcgctcactggatccgaacattaaactctga

SEQ ID NO: 20772 - DNA, 428 bp, Zea mays
  unsure (1)..(428): unsure at all n locations
  Clone ID: MRT4577_118944C.1
ttcggggaaccccaaagctcagcattgaagcctccattgaagaactcccggacccaatcgatacattatcactagaataatcgaaagattaatattcgacatgaagctccaagctgtcctcttgttgtcggtaatcctggccaccgttatagccttaccgagcccgggcccagctcccgccgcgacgtgcgatgccaacaagcgccaaacgtgtattcgaaagtcctgtgccgcggcggcgtggttgtggtttagaagcgggcgctaatttccgggcctgtgccacccgttgcgaagaggaggccggctgcctcggttaaatccatctcagcatcctagctcgtatcccgccgaaggacccaaccgtgngattctatcaaggaatgccggcacaccagatctataccgctctcaatcttaccccccca

SEQ ID NO: 20773 - DNA, 830 bp, Zea mays
  Clone ID: MRT4577_118945C.1
tcggccggggggactcctaaacggcgggaaaaaaaacaaagcagtcctcccaccgcacgcaacgcagcctcgacctcgacctcgacctcgccgtcgccatggcgagcaagcagacccgccgcctcctcgtccttgccgccgtcgccgtatgcctcctcctccccgccgcctctgtcgccaccgacgtcgattactgcagtaaaaaggagtacccggtgaaggtgagcggggtgcagatcgtgcccgatccggtcgagcccggcaagcccgccactttcaagatctccgcttctactgataaaaccatcgagaaggggaagctggtgatcgacgtcaagtacttcttcttctacgtgcactcggagacgcgcgacatctgcggagagatcacctgtccggcgaccggcgacttcgtgctgtcccacgagcagacgttgccagggttcactccaccggggtcgtacacgatctacatgaagatggtcggggacgacgacgaggagctcagctgcatctcgttcggcttcagcattgggttcgtcgcctccagctgaaacccgcctgagctcagcacgccagaagtcgcccagcatggatgcaattatgtaaaccactagaacataaaatttcgagaaagaatgcattacgaaggagacgctcagatttcttcaacctagagcgcagaagtttgtcgactctgaaatgaaatggcttgcgtgccaaaaaaaatcgtaaaaagcggccaaaaatgtaagctaaactttagtctcagttacatctccagtgtttgaatgacaattaccataattataaaacttaaatttaatcac

SEQ ID NO: 20774 - DNA, 214 bp, Zea mays
  Clone ID: MRT4577_118946C.1
gggcacaaaaaatgggcaaaataaatcatttcccacatttaaaagaatacatgatcatcactgatggtcgtttgaggcgaacagttcaatggacatctccctaactatagattggaccgcctgtgtagggcattttcttattgccgacggacttaaacctgggaaatatctattgggccttttttattgcccatgggttggctagggatatttt

SEQ ID NO: 20775 - DNA, 707 bp, Zea mays
  Clone ID: MRT4577_118947C.1
ctcgaagccggccgggcctcgacgtcccccgggacaggcagtcctcccaccgcacgcaacgcagcctcgacctcgacctcgccgtcgccatggtgagcaagcagacccgccgcctcctcgtccttgccgccgtcgccgtatgcctccacctccccgccgcctctgtcgccaccgacgtcgattactgcagtaaaaaggagtacccggtgaaggtgagcggggtgcagatcgtgcccgatccggtcgagcccggcaagcccgccactttcaagatctccgcttctactgataaaaccatcgagaaggggaagctggtgatcgacgtcaagtacttcttcttctacgtgcactcggagacgcgcgacatctgcggagagatctcctgtccggcgaccggcgacttcgtgctgtcccacgagcagacgttgccggggttcactccaccggggtcgtacacgatctacatgaagatggtcggggacgacgacgaggagctgagctgcatctcgttcggcttcagcattgggttcgtcgcctccagctgaaacgcgccagaagtcgcgcagcatggatgtaattatgtaaaccaatgcattacgaaggagacgctcagatttcttcaacctagagcgcagaagtttgtcgactctgaaaatgaatggcttgcgtggcgtcgttgttcgcaaaaaaaaaaaaaaaaagcggcc

SEQ ID NO: 20776 - DNA, 724 bp, Zea mays
  Clone ID: MRT4577_118948C.1
ccgaaatccccccggggacaaagcagtcctcccaccgcacgcaacgcaacgcagcctcgagtctcgacttcaccgacgccatggcgagcaagcagacccgccgcctcctcgtccttgccgccgtcgccgtatgcctcctcctcctcctccccgccgcctctgtcgccaccgacgtcgattactgcagtaaaaaggagtacccggtgaaggtgagcggggtgcagatcgtgcccgatccggtcgagcccggcaagcccgccactttcaagatctccgcttctactgataaaaccatcgagaaggggaagctggtgatcgacgtcaagtacttcttcttctacgtgcactcggagacgcgcgacatctgcggagagatctcctgtccggcgaccggcgacttcgtgctgtcccacgagcagacgttgccagggttcactccaccggggtcgtacacgatctacatgaagatggtcggggacgacgacgaggagctcagctgcatctcgttcggcttcagcattgggttcgtcgcctccagctgaaacccgcctgagctcagcacgccagaagtcgcccagcatggatgcaattatgtaaaccactagaacataaaatttcgagaaagaatgcattacgaaggagacgctcagatttcttcaaaaaaaaaaaaaaaaagtttgtcgactctgaaatgaaatggcttggcgttgcccgttgttgttcg

SEQ ID NO: 20777 - DNA, 698 bp, Zea mays
  unsure (1)..(698): unsure at all n locations
  Clone ID: MRT4577_118949C.1
cccacgcgtccgccccgaaaaatctccccgctcagaaagcagtcctcccaccgcacgcaacgcaacgcaacgcagcctcgacctcaccgacgccatggcgagcaagcagacccgccgcctcctcgtccttgccgccgtcgccgtatgcctcctcctccccgccgcctctgtcgccaccgacgtcgattactgcagtaaaaaggagtacccggtgaaggtgagcggggtgcagatcgtgcccgatcctgtcgagcccggcaagcccgccactttcaagatctccgcttctactgataaaaccatcgagaaggggaagctggtgatcgacgtcaagtacttcttcttctacgtgcactcggagacgcgcgacatctgcggagagatctcctgtccggcgaccggcgacttcgtgctgtcccacgagcagacgttgccagggttcactccaccggggtcgtacacgatctacatgaagatggtcggggacgacgacnaggagctgagctgcatctcgttcggcttcagcattgggttcgtcgcctccagctgaaacccgcctgagctgcgcgccagaagtcgcccagcatggatgccattatgtaaaccactagaacataanatttcgagaaagaatgcattacgaaggagacgctcagatttcttcaaccaaaaaaaaaaaaaaaaaggcccctagggcc

SEQ ID NO: 20778 - DNA, 627 bp, Zea mays
  unsure (1)..(627): unsure at all n locations
  Clone ID: MRT4577_11894C.1
cgctcttcgtctaccagccggcaccaagaacactccgccgtcggtcaagctcgtccactcgccccccgacttcaccttcttcgaccacgaggtcgcgttgctgcgccgccgcgactaggacatgttcttcatcgccgtgctccgcagggccttcgttgagcgggagtacaccgacgggcactttcatctccacctgtacagctccaagacaaagacatggagcaccaagctgatgcgccttgattcgccgccggattttgagttccattctcgcaacaaggggatcaccatcggaggggagcatggctctgttggttgggtcgaccttaggcgcggcattctcatatgtgaccttctcctccttgacagcaaccagagccttcgctacgtcccgctgccttcgccgctgtcgcccgagccactacagcgttatccgttgtctgttcggaacatcgttgtcctccaaggttacatcaagaatttcgagatgcacaataatgtcagaccgagctcatacactggaagctccccgatattagaaggttggattgctgcaacanaaaagataaaaatttcaagcattgggtctggtagtaactgggaggaggactgcactatcagatgctc

SEQ ID NO: 20779 - DNA, 727 bp, Zea mays
  unsure (1)..(727): unsure at all n locations
  Clone ID: MRT4577_118950C.1
gcatccctccagacagccgggccgctcacaaagcagtcctcccaccgcacgcaacgcaacgcagcctcgagtctcgacttcaccgacgccatggcgagcaagcagacccgccgcctcctcgtccttgccgccgtcgccgtatgcctcctcctcctcctccccgccgcctctgtcgccaccgacgtcgattactgcagtaaaaaggagtacccggtgaaggtgagcggggtgcagatcgtgcccgatccggtcgagcccggcaagcccgccactttcaagatctccgcttctactgataaaaccatcgagaaggggaagctggtgatcgacgtcaagtacttcttcttctacgtgcactcggagacgcgcgacatctgcggagagatctcctgtccggcgaccggcgacttcgtgctgtcccacgagcagacgttgccagggttcactccaccggggtcgtacacgatctacatgaagatggtcggngacgacgacgaggagctcagctgcatctcgttcggcttcagcattgggttcgtcgcctccagctgaaaaccgcctgagctcagcacgccagaagtcgcccagcatggggatgcattatgtaactagaacataaaattttcgagaagaatgcatttacgaagagacgctcagatttctttcacctagagcgcagaaagttgtcgactctgaaaatgaatggctttgctggccgttgntgntc

SEQ ID NO: 20780 - DNA, 417 bp, Zea mays
  Clone ID: MRT4577_118951C.1
ttttcccaacccgacctacacctacttacttcggcgccgagtttctccgccgacgagacgagaaggaagactgagtttttccacccaacaccccccctcccccctactcggatcaggaaaagattaccaaacttcaacccgacgagaggccccaaggccatcatcatcatccaccatcaacctacacacaacgtcgccaggccaggccaggtctctggaggagcattcaatccatcccgagtccccattattcatttcgaagaggcatacgtctcttccctcttactattcacagatttaaattcgattaccccagccctattgcagaatcacacactatctcttttttgtgggggggcctatctcgagcacctttttattataacgactcaacaacttcttgttctatcgaatcga

SEQ ID NO: 20781 - DNA, 214 bp, Zea mays
  unsure (1)..(214): unsure at all n locations
  Clone ID: MRT4577_118952C.1
ggaaggnccggaacgaccgaggcgacccacgcgtcccgacacaaacaagtactttactctactgcgcagcgcagaacaacccgctcgacaccgggagggcgctgctcgttgcccttgctctcctggctttcagatagcaacgccaactcataccatacaagcatggggttgcgatgcacagcaaccgcgtcatctactgtaaccggggcatgtg

SEQ ID NO: 20782 - DNA, 314 bp, Zea mays
  Clone ID: MRT4577_118953C.1
cggacgcgtgggccgacacctattttccaagccatttccaacggttcacactgatacaacagacggacgggagcttaaatctggacacctccgacattctagctttttaatgcacacacacttttgcacacgtgcacactagaacaacacatgcacatctgcaacagcctgcgcacgtccaaggaaacatctagaaaacgctacattagcgttacgctcaaacgtgcttcgacaacgccgtattatgcataaccatattgtatcaggacttgacacgctacctgcccgaccaggtcatgcatgcgccaaacacc

SEQ ID NO: 20783 - DNA, 414 bp, Zea mays
  Clone ID: MRT4577_118954C.1
atgcgagagaaacatggaccagacatcgactggatgatagctaacttcgacacggtggcagcttatgcggctggtggaggtgtgcgacatgggagacacacggtagcgaagtacctcagcaaagtcattactcagactccgctagtgaaccccgtgtcttcgcatgggttctggggcaggtccccacaaccaaatgatgcccccaccgatgttgtggggtgttggtccgtggtcgtctcaaattccaccacagatgctgccactgatgacttcgtagatgatgcctcagatgccaacgctgatgccaccgcaaatgacaccatcatagatgtcatggggatatcctcctatggggcaatcacaaatgccatgggcatatgctccatgtccgacatagccacctccatcacctag

SEQ ID NO: 20784 - DNA, 214 bp, Zea mays
  Clone ID: MRT4577_118955C.1
ttcccgctcgacccacttcttcctactcccttctatctctacctatctctatctagccttcctgtatctcttcagatatgacttctcttgcctccaccacggcggctacctctacagctcttctgctactactactactgtcactcacctattcatcaaacatctctatctctttatacacttatattcacatcatattaacacttttaattct

SEQ ID NO: 20785 - DNA, 1892 bp, Zea mays
  Clone ID: MRT4577_118956C.1
tcggcattccgctgagtgtgaccgggcacactattgtctaattcgagcccggcgggcagtgcgcttgcctctgctgcgtataaagtttcttccttccttggccgcttctgcgctcgcctcccttctcctcccccatcctctcccttgtggttctagatccactcctccccgtgctcactgctcatccgcgaacaggttgagcggggacgccgtggaggggcgagggggagccagattgagccatggcctcctcctgggttcttgccctggttcttgcgctgtcggcaggcgcaagcctggcgcgtggctcagagccgtggtggaacgagacacaggtgtacgccaccaccgccaactccggtggcggcaacggcgtcttcgtcggcctcacgctcatccagtcggcggcggccaagggagcggtgtgcttggatggaagcttaccaggttaccacctccacagagggtttggatcaggagcaaacagttggctcgtcaatctcgagggtggaggctggtgcaatgatcgcagcagctgtgtgttccgcaagggcagtcgtcgtggatcatcaaatcacatggagaggcaactccagtttacagggatattgagtaacaaacctgaagagaatcccgatttctacaactggaatagagtgaaggtccggtactgtgatggtggatctttcactggtgatggctctgatgcggctgcaggcctttatttccgaggtcagcgcatttggcaggccgctatggatgacctaatggcccaaggaatgcgttatgctaatcaggcccttctttctggatgctctgccggtggtgtttctaccatacttcactgtgatgaattccatggattgttcccatcgaataccagagtcaaatgcctagctgatgctggaatgtttcttgacactgttgatgtttctggccgtcgggaaatgagatcctttttcaatggcattgtgagattgcagggttctggaagaagcttgcctaggtcttgcacctcacacatggacaaaaccttcgtgctttttcccccagaatgtgttgccaaccatccgaaccccaacttttgttttgaacactgcctatgacgtgtggcagcttcaacaaagtgtggcccctagaacagctgatccccaaggtctttggtcaaagtgtaggacgaaccatgccttctgtaatagcaaccagctccagtttttgcaagggttcaggaaccagatgcttgatgccgtgaggggtttctctgcatcaaggcaaaatggtctgttcatcaactcatgttttgctcattgccagagcgagagacaggatacttggtacgcgaacaactcgccacgtcttggtaacaagaaaatcgctgacgctgttggggactggttcttcgagagggggaacgccaagtacacagactgcccatacccttgcgatggcacttgccatcaccttgtgttcaggggagaccactaagatcattcttcagcaccaacaaattcatcagatggtacaaggatcaaaccccaatgggtacagaatggaaaacaggatatagatacagataaggtgcaagtggtcggcttgcccatgtttgttcatcagtgagtcatatgattgatagtgcgaggacctcacccgcgaacgcgcggaggaggcctctgcattagattcacataccgtcatgatatcgattattttcattggaaaagcgtccatgattacgtaccagaacaattgagttacatactcatttcgtgtactgtattaataacactagaacgttacatattcatttgtcctgaagatcgtactacttggcaagaatactaaaaaaaaaaaaaaaaaagcggccccccgcagacccaacttttttcccctaa

SEQ ID NO: 20786 - DNA, 1505 bp, Zea mays
  Clone ID: MRT4577_118957C.1
cattgggtacctcgaggccggccgggattgcaccaacaccaggcaacggcacgccgcgttatgcgttacacgtcgcagctagcactagcactgtacactacagaaacctccattgccagccagctgcgcagtgcgcttgcctctgctgcgtataaagtttcttccttccttggccgcttctgcgctcgcctcccttctcctcccccatcctctcccttgtggttctagatccactcctccccgtgctcactgctcatccgcgaacaggttgagcggggacgccgtggaggggcgagggggagccagattgagccatggcctcctcctgggttcttgccctggttcttgcgctgtcggcaggcgcaagcctggcgcgtggctcagagccgtggtggaacgagacacaggtgtacgccaccaccgccaactccggtggcggcaacggcgtcttcgtcggcctcacgctcatccagtcggcggcggccaagggagcggtgtgcttggatggaagcttaccaggttaccacctccacagagggtttggatcaggagcaaacagttggctcgtcaatctcgagggtggaggctggtgcaatgatcgcagcagctgtgtgttccgcaagggcagtcgtcgtggatcatcaaatcacatggagaggcaactccagtttacagggatattgagtaacaaacctgaagagaatcccgatttctacaactggaatagagtgaaggtccggtactgtgatggtggatctttcactggtgatggctctgatgcggctgcaggcctttatttccgaggggagcgcatttggcaggccgctatggatgacctaatggcccaaggaatgcgttatgctaatcaggcccttctttctggatgctctgccggtggtgtttctaccatacttcactgtgatgaattccgtggactgttcccatcaaataccagagtcaaatgcttagctgatgctggaatgtttcttgacacgtatgctcacacaaataaatgaaaccttttcgatattttatcttaatcatagtcattatttgctaccatgatgaaattgcaatcactccaattgtatattggtgtgaattggccctttaatcatttgcagtgttgatgtttctggccgccgggaaatgagatcctttttcaatggtattgtgagattgcagggttctggaagaagcttgcctaggtcttgcacctcacacatggacaaaacctcgtgctttttcccccagaatgtgttgccaaccatccgaaccccaacttttgttttgaacactgcctatgacgtgtggcagcttcaacaaagtgtggcccctagaacagctgatccccaaggtctttggtcaaagtgtaggacgaaccatgccttctgtaatagcaaccagctccagtttttgcaagggttcaagaaccagatgcttgatgccgtgaggggtttctctgcatcaaggcaaaatggtctgttcatcaactcatgttttgc

SEQ ID NO: 20787 - DNA, 250 bp, Zea mays
  unsure (1)..(250): unsure at all n locations
  Clone ID: MRT4577_118958C.1
agttcagtttagcacatcttcctcgcaggggcggggctccatcttccgctccctcccccacctgcgatcggcacgcaggctcggcgtcgtcgtcagcggttcctcctcccgcctctcgccagtagcctcgcgccctcgccgactggcgaccctgccttgaaggggctggcaagatgatcggcggaggggaggggaancaatacaccaacgaacttgacaagcccctaaaccgaggcaggctggaggacaa

SEQ ID NO: 20788 - DNA, 275 bp, Zea mays
  Clone ID: MRT4577_118959C.1
cttctttttttttttttttatttttttggttttgggtttttttattattttttgtgtaaagcgtctagtttattttataggtggacaggaaagggaaaggaaaaaccagagcggggcccaaacacacacaaagggcttgagaaaacaagttggcactagcggggcaaaaacaaacggggccctaaggacagagccatgaggatgcgaaggcgccgtgccccgaccgggaagaatagaacaggacactttacaaggaaagaccacggggggagacc

SEQ ID NO: 20789 - DNA, 894 bp, Zea mays
  Clone ID: MRT4577_11895C.1
attcgcccctaagccagggaaccaccgcagagtacccgggaccgcgcacctccctttccccaactcgatctcgcacctagggtttcgtctcgtcgctctcgtcctccgcgaagatgccgaagaacaagggtaagggaggcaagaaccggaagcgaggaaagaacgaggctgacgacgacaagcgcgagctcgtcttcaaggaagacgggcaggagtacgcgcaggtgacccggatgctcggcaacgggcggtgcgaggccatctgcgtcgatggcacgcgccgcctctgccatatccggggtaagatgcacaagaaggtctggatcgcggctggggacatcgtcctcgtcggcctccgcgactaccaggacgacaaggccgacgttatcctcaagtacatgaacgacgaggcgcgcctgctcaaggcctacggggagcttcctgacacgctcaggctcaacgagggcgtcgacgtcgatgggcccgaggaaggcgaggagggcagcgactacatccagttcgaggacgaggacatcgacaagatctaagaaatctgttcctgcttacggctacctgtattgttacgtgacgcgttcttctgcttctgcttgcggctacctttattgttacgtgacgtgtactggtatgttgtggtatggtttagcctgggttatcttgtaaaaggatctgaagtggttaaataatcgtgggtaatttcgtttttaatctggtaaaaaaaaaaaaaaaaaaaaaaaaaaaaaaaaaaaaaaaaaaaaaaaaaaaaaaaaaaaaaaaaaaaaaaaaaaaaaaaaaaaaaaaaaaaaaaaaaagaaaaaaaaaaaacaataaactcaataaacgtgaccaaaagatctacaactataaaaaatgaga

SEQ ID NO: 20790 - DNA, 1619 bp, Zea mays
  unsure (1)..(1619): unsure at all n locations
  Clone ID: MRT4577_118960C.1
gccggccgggccgggaaaaaaactttccgtcagctgcaagaaaggagaaccaattctccctcgaaaaaaagtcccgtcgttttcctcacagttccttcggcctccgcttccactcccacccgccccgccgtcgcgatgcacaagacggctcaggcatggttcaccggcgggaccgccgcctcctccggcgccgctgccgagtcgcagccgtccctgctcgctgactggaactcgtacgccgccacccgctccgacgcctcctcctcctccccgctccccttcgacatcgaagccgccgtccgctccgccaacgacaccgtctccggcaccttaagctcggtgaccaagggcgtgcgggagctgccggggagcttccagagcgccaccagcagcttcccctccggaaaggctctcatgtacttcggcctcttcctcgccaccggcatcttcttcgtcttcatcgccttcgcgctcttcctccccgtcatggtgctcatgccacagaagttcgccatctccttcacgctcgggtgcgcgctcatcattgcctcgctcttcgcgcttaaggggccagccaaccagctcgcccacatgacttccaaggagaggctaccgttttcagttggatttattggatgcatggtcggtacaatttatgtttctatggtgcttcacagctatttcctctctgtgatcttctcagtccttcaggttctggcccttgcatattacaccatatcctacttccctggaggatctagtggactgaaattcatctcgtctggtctcttgtcctcggcaacaagctgttttggtcgatgaccttcctttgtcaattgtcatacatttatttgatcataccatgttatcgctttaagatttttgtatgtagctgctgatcatccctttgaggctttgtttggtactctagtattgactcatccacatgtgttgaggtggattgatgtgtaaattagtttaagttacacctcacaatccacctcaatacatgtggattttggtcaatactagagtacccaaactaggtctgatagagattccatggtgtttcctctcctgtttgtttgtctagacttggactggtgttgaatatatagattatagtgtggaaatgattcgtcgcccctgtatctcattgactctgtgtcccttgtggctgtagattgtgaaagaaatatgctatgaccaatttaaaggtaacgctgtgggatgatgttgagattattgcaattctagaattgcattataaattgtcacgataattctaccgagctcaattatgttttcaaatggttggcacttgcctctgattcaacggtcatttgagatatgtggcgtccgatagattcggctgaagactgggttgtgaggtctattaaggcatgtttggttttggaccctagttgtatagaatgacttcgttcgaggcttccaacttatgagaatgaaatgactttgttctgcatttgaaagatagaatgactttggtcccctgtgagccaaaaggtttgatagcccgtttggatgtagatattggagcactaaaatggaaatttgaatcacctttcctgnnnnnnnnnnnnnnnnaaaaatgaagg

SEQ ID NO: 20791 - DNA, 343 bp, Zea mays
  Clone ID: MRT4577_118961C.1
cttccagaacgatgctatcgcgatattaccgtatccaggaataggacaaccgtaaaggtcgctgatatgcaacagaaaagatacagtgcatcccttgggatactaatcactatcctttgcctagtaaagctaacagctggatgtggcattctattatatactgcaagaatcactacatctgcctggtattacaaatggtcatctatcctcttctgcgtcaaggactactcaggtcatagctactggtacgacctcccgaataactgagaaaactgctccaaggcctgttatcattatttcccctacctgaatgggctccactcccgctattagttctgggtca

SEQ ID NO: 20792 - DNA, 448 bp, Zea mays
  Clone ID: MRT4577_118962C.1
ggggcaaaaacacactggtcggacattaaccaaaccctacacacttttggggacataatgggtacgcccatatagatcgatctgggggaaccgaaaacattaggccggtccacgatcgggggttacacacacaactgggcccctataaacacaagggcgtacgttggtcgttcaaacccaaagggttgaccccacaaaagaagccggcaggggaagggaatttttttcacccgggggggaagggcgactttatgggcccaaacctgggctccttggccttaaacttggggggcacgtacaggttcatggaggcctcaaaacaaaacttgggtacccgggcttggggcggtcctccttgggggggcccaccagcgcgggccccgggaaaaagaccgggtcggcccccgggttgtaaaaggacccaacggacattcggttgccgtcgggg

SEQ ID NO: 20793 - DNA, 203 bp, Zea mays
  unsure (1)..(203): unsure at all n locations
  Clone ID: MRT4577_118963C.1
ccgggctttaaccctncccgctccccgccgtccgccgccgtccgcctcacgcgggggctccgccacagcgtaccggactcatcgatcaccttaatttaatatggcggacgtgagtgggctgggactctacctatccgctgtaccatcgaggacatccgctcaggggacgcttcgccgggcctactccttacgagggggggggg

SEQ ID NO: 20794 - DNA, 411 bp, Zea mays
  Clone ID: MRT4577_118964C.1
tcatgctttgaccgacgactccctttcgttacgatactgatactccacacacgaagtaccgcgaacgagcggtgaaagagcagaggagggtataacactaaatatggagagcggaggcagaaccttcagaagggcagggcattaggttgtggctcacgccaaagaagagcgacaacaccaagtactactagatccttagagtgcccaagtgagcgtgccaggacgatctcaagaaggtctaccgcaaggctgctatcaagaaccaccccgacaagggcggtgaccccgagaagttcaaggagctcgcacaagcctatgaggttttgagtgatccagagaaacgtgagatttatgatcagtatggtgaagatgcccttaaggaaggaatgggcgtcgccggaacccatgtcc

SEQ ID NO: 20795 - DNA, 294 bp, Zea mays
  unsure (1)..(294): unsure at all n locations
  Clone ID: MRT4577_118965C.1
gctcacccagcgggggggggggggcattcagctcatctttctgcatcggctcctccctgcgcaacactggcccctacaggccatggttacgccagttgttctttttctttctcctcacggtcagcccttttgttggggggggcgtactgcctcacggcccccccacgccccggctcaggcggggtaacccagtttgtcgtgccacgcgcagacgccctcatgccttgccgctgtgcgtcctcatccctgcgtggctcaggcgcgtgcgcgcttcgcnatcccggtcatagctgt

SEQ ID NO: 20796 - DNA, 261 bp, Zea mays
  Clone ID: MRT4577_118966C.1
cggacgcgtgggcagctctgagcaaggaactaatcatgtaagcatagtggtgtagtactatgatgatatgcaagaataatgtgtggtgttgcacttagttgctcatatttgctcgtcatattcggttcagcgttttgggtttcacaaaagggggggaaatggctattgttcttctcagtgtactgctgaggcagagttacttgtttgtatataatcacttactgcaaggataagattgtttaaagcacaacttttatgtgc

SEQ ID NO: 20797 - DNA, 527 bp, Zea mays
  Clone ID: MRT4577_118967C.1
gcgcttacgcggtcgggcatcgtacaagcggaggatgagttgtgccaagccaccatgggtgtcttacgtgactcgatgcacaagcgccatgccaccggtggaaagcagaagtcctggatgaagaagcgaaagtatgagcttggtggtgcggcagccaataccagggtgtgcagcattattacagtgaggagggtccgtataccttgaggtaatgagaaatggagcgtctcttcgcacttgctactggcaacgtactaatgggagaactagaagctgttacccgcacgacccgtctcctcgtcatcgttctacaatgcatgacacaatgagctttggaggacacccacctttctgatgagtgccgttgggccagctgatgctgctcccattcactcagtggtgacctcactcactctggtgttgacattggcaggaagaagaatacccctgctgctaagaatgataatgctcccggacaacaggttgaggcagcatctgatgaaagcaaaactatccccatgtcacga

SEQ ID NO: 20798 - DNA, 341 bp, Zea mays
  Clone ID: MRT4577_118968C.1
tgcttttctatcgagcaaagcgagtcaactgacggaaacgtggttgtccgtgcagggctgcggcagccctgaccctgatccgaaggaggaggaggaggcggcgtccattcaagatttacgcagtgcagacaccgcgctggctgtagccgctgttgtcggcgcgcttattcatgcactgctagactcacgtgtactcgaatcgcagcgtggagtgcaacatgttctttgtggactgttttgtcgtggctgcaggaggcaatgatctcgacctgggcttgttctgatcgggcacatacataattgctgttgtagccttcttatatccgactaaagataacacc

SEQ ID NO: 20799 - DNA, 1503 bp, Zea mays
  Clone ID: MRT4577_118969C.1
atgggcgggaccgaggaagggacttcacaggtggctgccccggctactaggaagagaaaattaggtactatagtggggggaaagggggtgtctgataattttgctgtggagttgatggggacatgtgcggcccctgggggaaggatgtcttcgcccgagctccgggagtcttcagcgcgaatgctggaggttaccgggagtcggtggccaaagaatcttccgatcgcctgggcagagggcgaagacatgtctatgtctcgtatagctcgtggattgaggattttcccttacggacggaatattgttgctgttgtgtcggcagtgatgaacaaggatcgccaggatgctgcgcagaagcgccgggcggtcatcaggctccccgatcctagtcgtgaagcgaagagagcgcgggggagcgcgaaggctgccgcccccgacggtagccagccaacgctggtcgcgaaaccggccgcacccggatccagcaaggtgccggagagcacgaaggcggccgacttcgccgaccgcgtggcgtcgggtgcccttactgcagatgtgtctgccgaaatcgagagacttcgggcgcagcacgcggacaccgtccgggagaagtcggctgcggagagcaagagccgcaggctggcggtgaaggtggccgccctggaggccgagaagacggacctccagcgccagctggtggaggaaaggagggaggccaaccaggccatcgctgaggcgcaggctgcgcaggtggaggccaaattggcgcgggcggagggaagtctcgccagccaacgcgccgaggaatgggaggtgcggttcaacgctctgtgcggccgcgtggagaaggccaaggcctctacgcactcggaagttgagcggacgcgcgcacagctcgtggactcgtaccacgagttgggtgcgcggactgctgacttcgaggcgcccgaccgagaggcgggccttcgcttcctcgagtggttgcaagaggaattgctggtactcccgaccatcgtggaaggtttcatgtcctttgcctccctcgtcacctgcgaaggggccatgaacgcgctgtctcgcgagggctgcagacactacgaggtcttcgaccaaacagacgagagctttgaacgcgagatctttaaggccgaagaccctattgtgaagcagtcagcgggggcactttttgataggatgtggggggcgcatggtcgggaggctgtcagggagcgatccgaccgggcgagagagcagatggagcgcgccgaggacgtcgaggacttcggaggtctagtcggcgcgccgcccgaggctgcggagggcaaaccggtgctgccctcggatgctggtgaaggcccatcggacgcactcgtgcctgctgttgccggcgaagaccctgtgtcggcccctgtgccgacggttgaaggcgctcaggaggtggtggtggagccggcagtcgaaggccctacggccgcggacgcgccctcgcaggtggctaagtag

SEQ ID NO: 20800 - DNA, 245 bp, Zea mays
  Clone ID: MRT4577_11896C.1
ctttcttttctcttttttttttttttttttttttttttttttttttttgttttttttgtaaaacttttaccaaggaatgcccatgcatcacttttttattaatacaactcctattacctaattcaataaataaataaaaaaaatttttaaaataacaaaaaggtggcaaatgcacccaggctttccttggataccactaaattaaggttgttaaataatactcccttggcgaacattttccattt

SEQ ID NO: 20801 - DNA, 1748 bp, Zea mays
  Clone ID: MRT4577_118970C.1
atgaacaaggatcgccaggatgctgcgcagaagcaccgagcggttatcaggctccccgatcctaggcgtgaggcgaagagagcgcggtggagcgcgaaggctgctgcccccggcggtagccagccgacgccggctacgaaaccggccgcgcccggatccagcaaggtgtcggagagcgcgaaggcggtcgtcgccggcggaaccaagtctaccccgggcgaagctgcgaaggttcgggagttgccttcgccagggaaacgtgttgccgacttcgacacgaatattagcatggatgactatttcgttgggtcaggcgaggggcaaatggttgttgtcccgcctgcggtggcaaccacagcgtcagccgcggtggttggggtgaagggtggcgctttttgcgcgagcggcgagatttcgtcggccgctgccgtcaaggacgaggcgggcaccatgtcccgccggctgagggaggcatcgcagcagctaagtcaaggaagtctcgccagccaacgcgccgaggagtgggaggtgaggttcaacgctctgcgcggccgcgtggacaaggccgaggcctctacgcgctcggaggttgagcggacgctcgcacagctcgtggattcgtaccgcgagctgggtgcgcggactgctgacttcgaggtgcccgaccgagaggcgggccttcgcttcctcgagtggttgcaagaggaattgctggtactcccgaccatcgtggagggtttcatgtcctatgcctccctcgtcacctgcgaaggggccatgaatgcgctgtctcacgagggctgcagacactatgaggtcttcgaccaatcagacgagagctttcaacgcgagatctttaaggccgaagaccctgttgtgaagcagtcagcgggggcactttttgataggatgtggggggcgcatggtcaggaggctgtcagggagcgatccgaccgagcgagagagcaggtaaaggttattttttatttttttggtgtggttatgtgtgtgggtatgtgtgattttgctgaatgagtgtgttgttgctgcagatggcgcatgccgaggacgtcgaaggacctggaggtctggctggcgcaccgccccgaggctgcggaggtcaatccggtgccgccctcggatgccggtgaaggctcctcggctgtacccgtgcctaatgtggccggtgaagaccctttttgtcagcccctgcgccgacgggcgaagatgccttgagggtggtggctgagccggcagccgaagaccccacggccacggccgggccttcgcaggtggctgaataggtgttgaggagtttgtaaattttgtctgtgtgttactgaacctcggttgctacgcaggttcaggggtttgggcttgcgcacgcaaccgctactgacaatgctaattttgtggcggcttcgaccgtggttgctgaagacgattctgatgattctgtgtctaagtgttttgagtctgatgattctgggagttcgattgtgtggacagaggagtcttcggatgaggacttggattattttgcagcattggatgtggctgcagcggagagttctctgcatgtgatgggtgctgaggatcttccgggtgcgagtgctaggtgtaggcggcgaagggcggtggcaaaacggagagtgggtgagttgtcgtgaagtgataggtgtcatcgtggtgaggtggagggtggtcgtcttcgtggggcgagactagcaaacgggaattgttggtcc

SEQ ID NO: 20802 - DNA, 528 bp, Zea mays
  Clone ID: MRT4577_118971C.1
cccggggcccatttcatttgctatcagcaatattaacgcttaagcagggccatgctacgcacttctcgccctccttgttcccgcgtcgctctgctcgcgatggcgtcccgcgttgcagtgctgctcgtggccggggcgggcgcactgttccccgcggcgtgagcgcaagatatggacctgggcgtgccgcccgcgccggcgcccgacacgggcgcggcaatgggggccgcggcgtcggtcctgggcgcggcttgctctgccgtcttcttcatcctcaacaacggtggcgctctgtgcaatatgcgctgccgtctacgaggtggctagctactggataagagtcaggcggagccctggtacgaacgttttcgccttagttagtactagaagaagcagtcatgggctgtgttgatagagtccatgtattcccctggcgggcgctgcgatcttgagctatagaatattctttttgtaccatacagcattgtttcgacgcataccttgtttttgaggccgtgtgttgtatga

SEQ ID NO: 20803 - DNA, 801 bp, Zea mays
  Clone ID: MRT4577_118972C.1
gttaacataccaccgaagaatcgaagccataatccctgatctgatggagaggctcacatctataatccagagcgtgtactcgcgtggaggaaggtacttctggatacacaacacagggccgctcggctgcctgccctacgcgctgctgcaccgccctgacctcgccatcccagcggacggcaccggctgctccgtcacctacaacaaggtcgcgcagctattcaacctcaggctcaaggagactgtggcgagcctccggaagacgcaccctgacgccgcgttcacctacgtcgacgtctacaccgccaagtacaagctcatcagccaggccaataagctcggcttcgacgaccctctgctgacatgctgcgggtacggcggcggccggtacaacttagacctgagcgtcggctgcggcgggaagaagcaggtgaacgggacgtcggtggtggtggggaagtcgtgcgaaaacccctccaagagggtgagctgggacggcgtgcacttcaccgaggctgccaacaagttcgtgttcgaccagatcgtcgccggcgcgctctcggacccgcccgtggcgctcaggcaggcgtgccatagcagagggcaatgaatcggccccgtgtcgctcgccgcgatggccacgctgcagctgcagctgcagctgtttctggctgtgtaactttgcaagtggtaatcgaaggagcaagcatgctcgaggacgaggtgcacggcttcactttgtaataagggacatgcaaatcagagatccaagagcaatgatttccatcaatagaaggatcg

SEQ ID NO: 20804 - DNA, 326 bp, Zea mays
  unsure (1)..(326): unsure at all n locations
  Clone ID: MRT4577_118973C.1
cgccggtgcacctgccaccgtctgtccatgtgacgtcggcagttcatgtgccggcgggaccatgccactaccctagtcaaccgctacggcctaagactcattctcagacacacccatgcccgtgccaacagccatattcaagaccgtgccagctgcatggaacctgcggcggtggcagcaccccgatcctgggccagtgcgttgagttgctgaggcattagtgcagacacgacggcgacgccctactgctctgcttaatgccagtcgatgctgcagcagtgtttgcagcagctcaagctggtggagccgcancacccgtccaggcg

SEQ ID NO: 20805 - DNA, 185 bp, Zea mays
  Clone ID: MRT4577_118974C.1
agcaaagttcagaaaggttcagagtcgtttagctatccttagtgagtctattatatattatgaatctgaagatgtttaaacctatgatataaaaatacaatctatattttttattctcctatatcatatgaagaaatggataattttatataaataacaagatcttttagctttaaaattattat

SEQ ID NO: 20806 - DNA, 1893 bp, Zea mays
  Clone ID: MRT4577_118975C.1
cgaagcttgtattcggctcggggctcgcgcgcgccacgttcgtaccacgggccacggcaccggagccgcgtgcgtgccggtccatatctgatgtctctgtctatccactgaccagtccccatccgcctccgaacccacgccccactgctacatcagtccaccgccaccgcgcaccgcgagtccgcgacagacatccgcgccccggcctcactctcactccccagtccccaccgtgccgccacaagcgacgcgacgcagccacgcagggagagggaaatggccacggccgcgactgccacggcggggagtagagcagccgtgctgctgctgctctcgctggcgctggcgctggcgctgcggccctccgacgccggcgcgggcggcgactggccacttcccggccgtgttcaacttcggcgactccaactcggacacgggcggcctgtcatcgctcttcggcgccgcaccgccgcccaacggcaggaccttcttcggcatgcccgccggccgctactgcgatggtcgcctcgtcatcgacttcatcgctgaaagcctggggctgactcacctcagtgcgtacctgaactcgatcggaagcaacttcacacagggagccaactttgcaacagctggttcatcgatcagaagacagaatacatcgctgttcctctctggcttcagccccatttccttggacgtgcagttctgggagtttgaacaattcatcaacagaagccaactcgtctacaacaacaaaggcggtatctacagggagatcctaccaagggcggagtacttctcccaggcactttacaccttcgacatcggtcaaaacgacatcacctcaagctactttgttaacaataccaccgaagaagtcgaagccataatccctgatctgatggagaggctcacatctataatccagagcgtgtactcgcgtggaggaaggtacttctggatacacaacacagggccgctcggctgcctgccctacgcgctgctgcaccgccctgatctcgccaccccagcggacggcaccggctgctccgtcacctacaacaaggtcccgcagctattcaacctcaggctcaaggagactgtggcgagcctccggaagacgcaccctgacgccgcgttcacctacgtcgacgtctacaccgccaagtacaagctcatcagccagcccaaaggtcgcgcagccattcaacctcaggctcaaggagactgtggcgagcctccggaagacgcaccctgacgccgcgttcacctacgtcgacgtctacaccgccaagtacaagctcatcagccaggccaagaagctcggcttcgacgaccctctgctgacctgctgcgggtacggcggcggccggtacaacttagacctgagcgtcggctgcggcgggaagaagcaggtgaacgggacgtcggtggtggtggggaagtcgtgcgaaaacccctccaagagggtgagctgggacggcgtgcacttcaccgaggctgccaacaagttcgtgttcgaccagatcgtcgccggcgcgctctcggacccgcccgtggcgctcaggcaggcgtgccatagcagagggcaatgaatcggccccgtgtcgctcgccgcgatggccacgctgcagctgcagctgcagctgtttctggctgtgtaactttgcaagtgtaaatcgaaggagcaagcatgctcgaggacgaggtgcacggcttcactttgtaataagggacatgcaaatcagagatccaagagcaatgatttccatcaatagaggatcgatgaccacgaaaaaaaaaaaaaaaatgtgaaggattgaaatatcgatcatcacaggcgccaatttgtaccgatacagagaatgagcaaacgaaatattttagacaggc

SEQ ID NO: 20807 - DNA, 331 bp, Zea mays
  Clone ID: MRT4577_118976C.1
gcgtgcgtatgctcggaattcggctcgagggctggggaggacttttgttttcgcggaggccacttgtttgatttgacggggggtatttaatacttaacaggtgctagaactacaaggagagctggcgcgttctgtaggcactcggcatggctcaagaccttagctgagaccacacccttcgcactgtatgaggacttgctcgtcaaggccacgtaccagtgataagtgagttacgtccacgcacctttatgatcgcgacacagggactggacgccactgggcaactgcgtggcatatggtcacgcggcatttgctaacatgtcggcgcatt

SEQ ID NO: 20808 - DNA, 227 bp, Zea mays
  Clone ID: MRT4577_118977C.1
acacacgtacgacatgactctatagactttggcttctaacaaggcaggatggcagcgtgctccgggaggactgtgacagtggcaagcgcccctcgaggccctaacggcctactgcggccacctcaagcgctccgagcagatcgacctcccgtctagctggcagacatgactgaaaactcgttcagttcaaggagcttactccgtatgatcctgactgctactacatc

SEQ ID NO: 20809 - DNA, 754 bp, Zea mays
  Clone ID: MRT4577_118978C.1
gaggctggccggggagcttgtctaaccgcattcgacacatcgtgtcttccctttccggtagtccagtgctttcttaattccatacttggcatacttgaccatcgaccgctcctatccctgcacgaccgtgagctgtaccatgccgtctgccgtgcgtcccatgggcactgccgctgtcgcccaacgctcgggcgttgtcaagttcaccaactgcttgctggccaagggtgctgaccttgtgtacgaagacctatgggtcagttctgtaacggggaagatactgaacggccaggagatattgtatggccatctcaccgctccggacgatatcatcgacctgggtggccgcatcctatcgccgggtctcatcgacgtgcaactcaatggagcctatggcttcgacttctccgtcataccggacgatggctccttagcatacactaaaggagtgcagcgggtgaaccgcaatctcgtgagagcaggtgttacatcgtacttgcccacgctgacctctcaacggcctgaggtctatcatgaggccctcccttacctcggtccctcaggctcgacacgggacccatctttgggctccgagtctctcggtgcccactgcgaaggtccgttcatgtcgcccactaagaatggcatccataagctcgatgtcctacagacccctacccgcggcttgtcatctctcgctgcctgctacggttcttccaacctcaatccggactctccttcgcccataaaactg

SEQ ID NO: 20810 - DNA, 454 bp, Zea mays
  Clone ID: MRT4577_118979C.1
ccaactttcgcgcccgaggtgcataactgggggggcgcacaggcacaggcttgccagcctacctacctacagagggccccatggcgagacaccgcctccagggctgggtcacctactatagcgttaacgcgcagagcgagggggcgctataaacagacactgagcacaccagccacaagggacggaccccacgtgcccattaaagcccgagcatggtggcgtgaccacacacacccatgatctacactggacaggagcgagcgcaaaacccaccagaagacatggagactcacaggtgcggatgctaggcgcaatgtgcactatccgggggcagtgcgagagccacactagccttcttgctaccctggagcgcagacctagaggggattactaactaggctgcccctgacgacgtgactaagctgtatgagacgttctacctacccttgactac

SEQ ID NO: 20811 - DNA, 1773 bp, Zea mays
  unsure (1)..(1773): unsure at all n locations
  Clone ID: MRT4577_11897C.1
ccggccggggcagttcgcacgatataaagataaaatcgccgccgcacccagctccgcaacgcgcacctccctttccccaactcgatctcgcacctagggtttcgtctcgtcgctctcgtcctccgcgaagatgccgaagaacaagggtaagggaggcaagaaccggaagcgaggaaagaacgaggctgacgacgacaagcgcgagctcgtcttcaaggaagacgggcaggagtacgcgcaggtgacccggatgctcggcaacgggcggtgcgaggccatctgcgtcgatggcacgcgccgcctctgccatatccggggtaagatgcacaagaaggtctggatcgcggctggggacatcgtcctcgtcggcctccgcgactaccaggacgacaaggccgacgttatcctcaagtacatgaacgacgaggcgcgcctgctcaaggcctacggggagcttcctgacacgctcaggctcaacgagggcgtcgacgtcgatgggcccgaggaaggcgaggagggcagcgactacatccagttcgaggacgaggacatcgacaagatctaagaaatctgttcctgcttacggctacctgtattgttacgtgacgcgttcttctgcttctgcttgcggctacctttattgttacgtgacgtgtactggtatgttgtggtatggtttagcctgggttatcttgtaaaaggatctgaagtggttaaataatcgtgggtaatttcgtttttaatctggtacatgctgttacaaggtgttctgtactaagctattattgttctgaattgtgttctcctgtcncnnnnncaataaggtagtgtggatgtcaattgtggtacatgtgcctgggtctagtgctacaaactgtggaccacccattccaagttgtgtagtgggtttcgggtgccttggcgaaagcctttgcatccaaacacctaaagtggcggacattgcgtgaggctggcttcacagagcagcgagtaccgcccgccaccagcggtggaaggataatgagccgctatgctataggccaattgaggcacatgtgccctctctggtagaccactatctttttcctatttttcttatctacttttgttcctatgtaaccattacgagtatcacaattgtgttctgcatcttggaataaattaatttgtaaaaaaaaaaaaaaaaaaaaaaaaaaaaaagcttgtacctgcccgggcggccgcccgggcaggtacatttatgtttctgcttcacgaatatgatattttttggacatttctaataatagcaagccttattcctattttggtattttggatttcaggacttttagccccggttagtgaaggaccagagaagctttctagttatgaatcgggtatagaacccatggggggggcttggttacaattccgaatacgctattacatgtttgcgctagtttttgttgtttttgatgtggaaacagtctttctctacccttgggcaatgagtttcgacgtattgggtgtatccgtttttatcgaagctttcatttttgtgcttatcctagttgttggtttagtttatgcatggcgaaaaggagccttggaatggtcttaactgaatattcagaaaaaaaaaaaaagaaggaaaagattccattgagacaattatgagtttgattgagtttccgttactcgaccaaacaagttccaattccgttatttcaactacaccaaacgatctttcaaattggtcaagactctcaagtttatggccccttctatatg

SEQ ID NO: 20812 - DNA, 605 bp, Zea mays
  Clone ID: MRT4577_118980C.1
cctcgatcagcagcaaccatctaccagcgtctcaccgagagagagcagcacaccggccgtagctacgagcagcagcagcggcgtaggtgatggcgacctccatgatctcctcgtgagctctcggcggaggagactcggggcctgccgcccctcggccgccgcgcctcctccttctacgtagtctgatccgagaagaagatcaagaccgacaagccctacgggattgacggcggactgaccgtagacgtctatgccaccggaaaaaacggctaggtgaacgacgggcacaagatcgtctaccatacgggcgcgaacgtctacggacacctccacatatacacctatgaagagtggtcgcccaccgattacgcctacggctttggaacatgtgatgtctcgatacgtgcagtcgcgctctgtgtaagcgtctaggtggctggactgcgccgacacaaagacggctaccactaccatatacgacactggatgagtggcctgcccgccactgtgtctgtaaggaaaatgtgcatggcgacatttaactaaccgagtatggtgattaatgatcaagataactcgtgcactgctaatcatcattacataat

SEQ ID NO: 20813 - DNA, 1109 bp, Zea mays
  unsure (1)..(1109): unsure at all n locations
  Clone ID: MRT4577_118981C.1
ggtcaagaattaccgggtccgccctcgcgtcggcccacgcgtccggtccgttctagaatctagacacggcaatgaagcccaggcctctcggttgcggttgcggttgcgtcccggcggcggtagggtgcgtcggctgggcatggaggccgactccgaggccgcgcgggggagggagggcagcaggggtgtcgcccaagtgctcgcactcggccggcggcggcgggagcggtacagtcggaggaccgccgccgcgaggtgctgtaccgcccggtggagctgcccgggacggggtacgggtcggagctggaggcgcggatcgagaaggtcatctacgcctgccgcttcatgaccttcttcggaatttgtggcttgctcctcggctctgtcccatgcttcctcaagggatgcgttttcgtgatggatgccttcgtcgagtactaccgggcacggcggagggaaggtcatcctcctgctggtggaagccattgagatgtttctcattgcaacggtcacgtttgtcttggggacgggcttgtacgagctcttcatcagtaacatggactccttttacgggtccaacctcttcggcctgttcagccttccggaacggcccaagtgggttgaaatcaagtcggtaaatgatctcaagacaaagctgggccatgtcattgtcatggttctgctggttggcatcttcgagaagagcaagagggtgaccatcacatcctgtgctgacctcttgtgctttgctggatcgattttcctgtcttcagtttgcctctacctgctttccaagctccataccaccaagggaggcagccaggcctgaaatgagagtgtttgtatgtaagtgatatgtcttgttctgttgctgtgcaacgcctgcctccggttctgttcgtgtagtaaataattaggcagtggggaggtaccgatttcccatgtactcatgttcatgtatggctagggagtttcagttaggcacaaccaaactacattgagtatcatcctgtatgtgtagctcgatgtaatgcaatcaataactgatattctctttgagtaaaaaaaaaaaaaaaagggcggccgccaccgcggtggagatnccagtc

SEQ ID NO: 20814 - DNA, 355 bp, Zea mays
  Clone ID: MRT4577_118982C.1
aattcccgggttgacaagctcacttttcgacgcccgcccttttttttttttttttggggaactttaaaaaaattaggggcatataacacacagaaacctaatatacacactaaacaacaaaaccccctcatcaccaaggaacccttccacctcacacctaaaaaccaccccaccatatcgggtaattccaatcttccaacttcccccttgcatcccataataaaaatatatctaacatctcataactccactctaacaccataaccccaccactctctaaaattcacacccccaatcttaccactcaaatccaacatacacaacacaacccaaactccctctcattgcatacaca

SEQ ID NO: 20815 - DNA, 670 bp, Zea mays
  unsure (1)..(670): unsure at all n locations
  Clone ID: MRT4577_118983C.1
aagcccaggcctcttggttgcggttgcgtcccggcggcggcggtggcggcggtagggtgcgtcggctgggcgtggaggccgagtccgaggccgcgagggggagggagggcagcaggggtgtcgcccaagtgctcgcactcggcggcggcggcggcggcgggaacggtacagtcggaggatcgccgccgcgaggtgctgtaccgcccggtggagctgcccgggacggggtacgggtcggagctggaggcgcggatcgagaaggtcatctacgcctgccgcttcatgaccttcttcggcatttgtggcttgctcctcggctctgtcccatgcttcctcaagggatgcgttttcgtgatggatgccttcgtcgagtactaccggcacggcggagggaaggtcatcctcctgctggtggaagccattgagatgtttctcattgcaacggtcacgtttgtcttggggacgggcttgtacgagctcttcatcagtaacatggactccttttacgggtccaacctcttcggcctgttcagccttccggaacggcccaagtgggttgaaatcaagtcggtgaatgatctcaagacaaagctgggccatgtcattgtcatggttctgctggttggtatcttcgagaagagcangagggtgaccatcacatcctgtattg

SEQ ID NO: 20816 - DNA, 3571 bp, Zea mays
  Clone ID: MRT4577_118984C.1
tcgcaagcagactctagaaatcaaacaaacagtggcaatgtgctaatcgcttctgcatttgggcacggctatcctgacccgaccctccagatttcccgccgccaacccacgctgatcgagtgcccggcaaactaattcggcacgaggccagaagtttgcacacacgcgctccccaaggccccaaatactccctgacgcccttaccctcacaagtcgcagccaggtctctctgtccgccgaagtcctccctcgtcgcgagagacgagtcgcgttcctgttcgccgcccccgccgcccatctcccaatccggactcaggagatcgactcctcctctcggttgaggttgaaggggaaggaactagaaggctactcaagggatggctgaggatgcttctcacggggccagcagctcgactgtgatacctgctgatggtccagagtctaccatcgagatcaacatcaagaccctggattcacaagtccacaaacttcgcgtggataagaatgcgcctgtttccgttctaaaagagaaggttgttgaagcgactggagttccattggatcagcagcgcttgatttttcgaggaagagtcttgaaggatgaccacctcctatcagaataccatttggaggatgggtatacattgcatctggttgctcggcgtgcagcagagggccagacttcttctggggcttctgaaggaaacacaaatgctaatgtaaacgttactggaaatggaggattgttggatgatatttccaggagtgttcgggatcttctgggttccttaggtgttgcaatgtctggtggtgtcactaacacggcattttcggttcctttgactagcacaccagaagggcccaataatgtgcctggaagaactcagccaatgaacccagcacaacctggattctcagttctaaatcatcaaatacaagtaacacaacttcatccgccaggagctattcctcgcaatatgattattccagattctttgacaactctttcggagtacatggatcgcattgacagagtactacagaataatggtgttccaccatccagagattcagaaagccagcaacaaccaacagtggatgatgctaatgccaacccaagatatccaagtgctgatgttttggcttcagttattgagagagcccaacaacttcttggtggcagtgcagcttctgctctttcacgcattgcacaacgtattcggcaagatggtgggactgcagatgcatctcttcgtcgtgagatccaaactgaatcggttcagctaggaatttcgatgcaacatttgggtgctatgttctttgagcttggtcggacgatgatgatgcttcgcacagggcaatctccttctgaggcttttgtaaattctgggcctgctgtttatataaactccacaggaccaaacccaatcatggttcagccatcttttcaaaacacccctccttttggtgtatctaatataccagttctgggtggaatttctggtgcttttggtattgttgatccttctcgacatatgaatatcccaagtaacggtgcatctgcaacaagtggttcagctgctggtactaccaccggttctgaaggagctatccacgggaaccgccaagatgcggcaagaactcaaggaggtaacccaccaggtttcctggctgcaacacgtggattgccaaccagaacagttgttgctgctgttccagcacggtcctcaggcgaggctccaaaccatatctttagtgttatcctacctgttcaagtgaggggtcaagttgtagtgcctaatcagtcctctcaaggttctcaaacagcagtgggcaatggagctcaaggaaattcaacatctgctattccacaagcttctgttggtggtgtttctggtgttcctcttatagcggcacaggtagccaatgcattggcaaatgcaccaagccaggtttctttatctacacaaagtgcagcagatcagggatttcacctgactacagacaacagagctgatgttctgagttcatcaacaccagccactacaccacagaatggtccctcaggtacttccggttccagtttgccatctcaagacaggaatactttaaatgttcccagtcttgatagtatacaacagcatccacaattgggagatacttgtgcagatacagctgacttatcaggagacgccacagccatcagtactcatgatgctccttcgaacccatcagttgacagttctgtgctgaagaacaaatcctcggatgaagtaggttcacagaccactgagccttctgcaagtggcagtgctgaaccattaggtcttggtggaggtctgattccaattccaaagaggcggagcaaagcagtaaagccatctgggagcacaactgatcctagtagggatttgtcctcagtcagccaaaaccaagatcctatttcagtagcccagcagtttctggaaggttttgcttcccgaaatactaatggtagcagaagcaacaccctctcctctggtcctccatcttctgtgccacaggctactgaagttcctccgagaagacagggtggtggacaacctgatattggcagcatgatatctggtatgctcaacaacccagttttcagcaacatgttgtcgaatgtggcaacacaggcagggggctctagtgctgatttgaagagcgtgatggaaggattacaaagccctgctattgtagatacgataagcaatatcgtgcagaatgtggatgagcaagacctgggggccatgtttggttcaggcagaggacaaggtggcatggatttgtcaaggatgttgcagcaaatgatgcccgttgtatcccaggctcttggtggtgcaggggggcgttctgctggtgcaaatggtggacagcataggtcgcggcctcagcgcattgacggtgaaggaaatgcaccagccagcagttctcagattgatctccatgaagctcgtcaaagcattgaacagcatgaatccccagagaatatcttccgcgctgtccttgaaactgctgctcaggcccatggtgaagataacagcattcagggcatggtcgaagaacttgccactgatcaagagcttgccgatgactacatgaaacttttgatggaacaagttcggcagaggatacagtcagagtcgcagtcggggagccagccttgaaggattgggcggcagggtcgtgtagccagccattcgctctgcgatatttatctatgggaaagaacagaaccaaagctgttgtctgggcgttttcatgattaggtgcccggtgtacatgtggcgttgtaattttccgagataatgtatctgcagcagcatatctcgtactctggttagaactgtttttttttacgaattttgctagaggtacatacaacgagttttaaaggtggtgacgtctgaatttcgtggaattgacaatgacatgtctgtatgattggtgtcgcaactctccagttcggaaatttgttagcacaggttgtccttgttcctggcatgtgtttcaccttttagccattaaataccattttggttcatgt

SEQ ID NO: 20817 - DNA, 175 bp, Zea mays
  Clone ID: MRT4577_118985C.1
acttaatcccgtgcgtattagttgcatgaacatgtttacttctattattaggtagctgttgcatgatgtaatcaacggtgtatgcgccatgacttgtgctgcgttcacaatgcggtgactaggtcctctgccatgaccggatgaaggaaaacggccctgcgctttaggcgggcgc

SEQ ID NO: 20818 - DNA, 255 bp, Zea mays
  Clone ID: MRT4577_118986C.1
attcggctcgagctaattcgagatggcgagttctttcactttttccttttgtacaaaaaatcggaggttgaattgaacatggtaaacgcagttcaacactttacatgccctaccttgaatagaagaacctcatcctgtgactcactacacctgattaataccacggacgagtacttccattgcgaaccttgctacggggaactgatcgctgctgatgacatactcgttctggaggaaatctgggatggcgatgac

SEQ ID NO: 20819 - DNA, 434 bp, Zea mays
  Clone ID: MRT4577_118987C.1
ctgggctccggaggcgagcgggacaccccgccatccccagccgctggcagctgaccctagcacccggccggaacggcggctaaacacaggcagccggcgtcgatgctagcttacgcgccgggtgcccgacctgatgtacacgcagccggcctgctggggaagacagctatctagtcgcgcgccggcgcctcgatgaagccgagggagaagcagccgctcgtcctgcccgcccaccacagcagggctcgccgaggcgcgcctgtcgcgcgcggggccctcggcagccgccggcagccggaggaccggcggcggcgtgtcctcccgcgccggctccgggcggcccgtgcggctgccgaggatcagctgcagcgccaccgaggaggccagcggcgccgtgccggccgtcaccgtggagaggctgcctacggcgacgg

SEQ ID NO: 20820 - DNA, 291 bp, Zea mays
  Clone ID: MRT4577_118988C.1
gccggccgggcctcgtgaagagtttctttgttacctcttcgggtgctgcagcaatccaagtttctgtttgttattgatgacacatcgcaaatctcccaggactagaatctctgttcgtgattccttttactatattctcaaaataattgtggattagtcatctgcatgacttcatttcaactgatgctgaaatattgtggtgcttggtggctggtaaattcctgtaattgagctgtttcaatggcataccagcttgttgttccgtaaaaaaaaaaaaaaaaaaggccccta

SEQ ID NO: 20821 - DNA, 541 bp, Zea mays
  Clone ID: MRT4577_118989C.1
cgggcactcccctctacttcctctccctcacttctcagcgctcttagatcgacaaccacagctgttcctcggggagaagatggcgcagcgccgcagccgcacagctcggcagcgggcgggcggcaacttctcccagcagtggaagaatgcgtcggcgcagataagctgcagcttcctgttcctctcccgctcactggtcgaagcagaggccctgggtgaagcgaatgtagtgcgcggcgacggcgcaggcgtaccggacgagcttgccgcaccaggcgaggcggaactgcaagagcacgtgcgcgacatcggtgcaagtccagagcgcggtgacagaacagaaaagcacctcaagaaacactttgccgtaggcgctgtcattttaaacttcaagtagttcagcacagaagcttgcatttctagaacctttgaacgtacaggttatttattagtgaccgtgagtgacaaacaagagaatatcagataatgtctggtgtatcttttttaaacacacacacaaaacaaagctcatggtctgaag

SEQ ID NO: 20822 - DNA, 639 bp, Zea mays
  Clone ID: MRT4577_11898C.1
acgtcctgatcttccgaggccgggcatgacccagaaaagtgtgtccggccaaatgggatcgagcgtgttgggttatgtggtgcacccctgcagggaagttaatctattcgaatagccgtgatcttcggtaacaggacgacttggagttgtaccttgaccttatgacaactagaaccggatacttaataaaatacacccttccaagtgccaaatataacccggtgatcgctctctaacaaggcgacgaggaggggatcgccgggtaggattatgctatgcgatgctacttggaggacttcagtctactctcttctacatgctgcaagacggaggctgccagaagagtagtcttcgacaggattagttatccccctcttattctggcattctgcagttcagtccaccgatatggccctttacacatatccccatgcatatgtagtgtagctccttgcttgcgagtactttggatgagtaatcacggttgctttgctccctcttttctccctttctatacccgattgctgcgaccagacgttggatcccaggagctagacgccaccgtcgacgacgactactactactcgggaggtgcctactactacgcgcagcccgctgatgacgactaggagtagttta

SEQ ID NO: 20823 - DNA, 415 bp, Zea mays
  Clone ID: MRT4577_118990C.1
tttgggattttttaccttttttttttttttttttttttttttttttttttttccaaaatcctttttcctcttattattatcccttcccatttaaagggttcattaaggtaattgctaacactgccacccatggggagggggaacactccgttactcatcgccgttaaacaagtaacctacctttacccttataggtagttaagaaggggctccattacattattactacagcccatattttcctaagaagtaaacacccccggcatctgctttaaaagggaaggtacctttttgcttaatttgcaaaccgaaaatctccttaacctgctgccctccctggccccccaaaatcccccaaagctccccctggagctgctgctacaaaaagacctgcaagaccacccctattttttcc

SEQ ID NO: 20824 - DNA, 339 bp, Zea mays
  Clone ID: MRT4577_118991C.1
ggcgtggggttttttttttaataaaatgaaaggagtgggtgacacaatcaaggaaacttgggatcgaggcacaaggattatttggcaaaatggggggacaattatatgacacatgagatgaacatggtgggccggtgtaaacaattacacagatacttacggggggggggggaggtaaggagtaatgcaaaacagatcgtagcgaagaatagcaaagagtacatgaataatgaaactgtactgaacagaaggcaaagactataacaaggactgatggtaaaggaccgggaacacacactgctcttggagggaatgatatttcacagtttaaacggcggc

SEQ ID NO: 20825 - DNA, 394 bp, Zea mays
  unsure (1)..(394): unsure at all n locations
  Clone ID: MRT4577_118992C.1
gncaggggacccaaccccaaaaaaatttttggttgaaaaatcacagagcctcccctgccagggtaaatagcaggcagtttggggggggtctaatacacacagtttttttgtagggtggagagcaatttattttttctcccacagcaccttgggagggaacatgattatggaggtaatgtttatatgggcggggtttggttctgcctttttttaaacctacgcttatggcgaaaaggagggggttttttttttttggattggggggggaggcccttttggacaaaatgttgttattaaaagatgggggggggcgtggataaaaaaaaagcagcaccgggggggggggggcccagaatgtggggttgaaatttgggatggacttttcttttggggg

SEQ ID NO: 20826 - DNA, 348 bp, Zea mays
  Clone ID: MRT4577_118993C.1
gaggggaaaaaaattttatggggcccctccccccccaggggggggggggggtttttctccttaaagaaaacacacgtggtttaccccccaaaagagcccctgtttaggaacgcgggcccaaagctgttgaaaaaatttaaacccccgggtttgggttcacgcggggggggtcgttatcttaggggacaccttgggggcccctgggggaaaaagaggtattctcttctttttggcccccgtgggggccccccccccaagtggaggccccggcgcccctctaacagaatttataggaggccttccaatgaaacaaaagagggggtccgataaaaaaccccccccgggggg

SEQ ID NO: 20827 - DNA, 294 bp, Zea mays
  Clone ID: MRT4577_118994C.1
accaggccggggaaggttattccaagttcgggaagctacaagccaaggttgttccaaaacttttgggaggaaaactttttttcaaaaagaaaaacccctggcagggaggaattaaaaaaaaagggggccccaaaatacccggggctacctaagggaaccaaatgccgataggggcctggtgaacccccaacaccggaagaaactttttaaatcttataaaaaacccgaggggcccctttaaagggaccaaacttatctacccggggatgggaaagtaaaggttttttttagggg

SEQ ID NO: 20828 - DNA, 164 bp, Zea mays
  Clone ID: MRT4577_118995C.1
ggggacgcgcaccgtagcggtgcaccaagcgcggaagggggagggggctacgcacagcgtgaacgggacaaaagccagcgacccagtgcccggtccaaaggtaaagaagataactcgaagggcgcgggcggcgggaatgcccgtccagctctaaaagaggagca

SEQ ID NO: 20829 - DNA, 175 bp, Zea mays
  Clone ID: MRT4577_118996C.1
gaaaaggttgaacattaacgaaacaaaaatgagggccttcagctctcctgaggagtacaatgacgccctatcaaccggaaaagttgccgtcattgttgatgaaataccatacctcaaagtgtttcttgcgaagtattgccacaactacactatggttgggccaacttacaaattt

SEQ ID NO: 20830 - DNA, 442 bp, Zea mays
  Clone ID: MRT4577_118997C.1
accacgtgtacggagctacatggactacgtgcacctcctgagtatgagagagcccccgcagcgtctctgtcgctacctattgactgagcgcgtcctgcaccgtgaggacgatgtactgatcctagcacacagctcttcctgccattcacggtgccatacatgtgctgccactaagtgaatacatagcagcacacgtacaaatgctacaacatgaagctaccgtacctgaggctgctgtttccgccgatcatacagtcgttgcacaacactgtgaagaacctacatgagaaggcacacctgccgttgctcgtatagcagaccacaactgacgccgctgacaatgatgacatcgacgccgatatgcagaaggcagggatctccatccatgcttgagagggcaataccacccatgaacacactgccatgttcatactgctgacct

SEQ ID NO: 20831 - DNA, 251 bp, Zea mays
  Clone ID: MRT4577_118998C.1
gttgtattaccggtaccggatcgcaattgccggggggacgccacgcgttcgcttcttcacgcgacggggtctgggcagtggggcgcctggccatgcgacctggtgcttcgggtcgccggctgtatcgctccgcgcctcatttacttgaaaaatcttggctggcgatggttatctcctcacggggccgcccctggggcttcaaatatcccgtcggggagcccctgtgctcgtggcatcgctcccttattggt

SEQ ID NO: 20832 - DNA, 598 bp, Zea mays
  unsure (1)..(598): unsure at all n locations
  Clone ID: MRT4577_118999C.1
gccggccgggctgcngaactgacctctagattacactcctctcggtcatcgcctatgaccgcctcccctcccctccgctcctctcctgttcttctatactctattcccacggacgagggtagcgcctgttcgacaaaagcataggcgaaatgcttgtccgtgcgcactcaagacaagccacaataccaagtactacaagatcgtcgggatgtgcactgcctcgaccctggactacctcatgaaggcctaacgcacggccactataacaaagcaccccgacgatgatgctgacccccataattcagagagactcgcactgcctatgacggttttgagtgatgcatataaacacgatatttatgatgacaatgatgaagatgcccttgaggaatatatgcatgtcgtccgtccccatgatgtatctcatttgacattttctcatcattctttggaccctcttttggacgatacagccagttgagcaagaagattgataacctgaggcttgaacaagatgtaaacctctcacataaaggctctgtgcaacatctttaccatggaatctcacgatagctctctctttcgcgcattggcatct

SEQ ID NO: 20833 - DNA, 472 bp, Zea mays
  unsure (1)..(472): unsure at all n locations
  Clone ID: MRT4577_11899C.1
ccgccctttttttttttttttttttttttttttttttttttttttttttttttttttttttttttttttttcggggcctaaaccaccgccacttgaccaccaccattattattagtccactttttttcgtccacctnttctcccaatcccattcccataggacaaatatttttttaaaaaaggggattaaaatcaaaggaggcgtattaatattaacaccgaaaaccttgtccgaaccccttccttctccccttctccgccctgcgactgcaagcctttgggttgggnccttccttcccgtnggatcaaaacctaacgaccttggccgcgcgcaccaccgggttctcccggggaatggcgtcccgggcggcgcccttgtaatcgtagctgcagncgtgccngtccaagtaccggtgcccgccgcaaagaaactcgccgaaagggcaccggaaccccgttagccccaccccct

SEQ ID NO: 20834 - DNA, 171 bp, Zea mays
  Clone ID: MRT4577_1189C.1
tcatgaacatggggcagcaactactcaaggcgcggatatggacagcaacggcttggccatgcagccatcccatcatgcatatcgggatgtggactatgactgctctgaaaagcacacaagcaccttctttgacgctggcgttcaacttctatatgatatatatggggagga

SEQ ID NO: 20835 - DNA, 1217 bp, Zea mays
  Clone ID: MRT4577_118C.1
gttcaaaaccagactccgagcgaatccccaatccgttcggcggcgagccgaccggcgatgcgtccgccggcgccgaaggtcccatccgccgcttcctcgtcctcccacagccagcgcgagccccgcccggagaaccctctcctcctcctcccctcctctcgcttcaccaagctctcactcggctgtcccctcctcgaccgcctcctctgcggcggcctccccgccgcctccgttaccgagatagccggcgagtctgcctctggaaagactcagctctgtcttcagctcgccctcctggcgcccctgtccccgctctccgcctcctccctcttcctccactccgacctcccattcccccttcaccgcctccgccgcctagcccccaaatcccgccccgatatcctcgaccacgtcctcgtcgccgccgcgcactcccccaccgaccttctgtccctcctcgcccgcgcccagcgactgctcgccaaccccggccgctccccgcaccgcctccccatccgcctcatcctcctcgactccatcgcttccctctttcgtggcgacttcgacgcctcccccgctgacctcaggcgccggtccgcgctcttcttccagatatcggcgaagctcaaggagctcgcttacaggcaccagtgtgtggtggtggtgaccaaccaggtggtggacgtggtggagggggacgccgggaacaccgtggcgtggtcgtcggggcgccgtctgagcccggcgctcgggatcgcctgggccaactgcgtcaacacgcgcctgttcctgacgcgggaggtggaagggaatggcaccagcgggagcgcaaggaggtggatgaaagtggcgtttgcgccgcacctgccagagcaatcgtgcgagtttgtgatacggagggacggcgtctttggcgtcgagccggagaggtaggcgctcctcttggtcttttgtcaggactttacagaggaagtgtgtgaccataacctgtttgatgaaatgtccccgttggtagttagatttcacacaccctgtaaaagattcaaaatattttactattttacttcaattgttaagaatggatgtgaagccatgcatgtaaattagacgtgtcacaacacaacggacaagtgattgaacctttctggggaaagagttattgtagaaatcatcatggctagttttgaagtctgaaatcagaacctaagttctgtctt

SEQ ID NO: 20836 - DNA, 697 bp, Zea mays
  Clone ID: MRT4577_119000C.1
tcgggatgtttcaatgacagaatataacatcctgaggaagttatttgcatatgccatcggcttcacatcaggatgtggcacagctgagaaagtaacttcctcaggatgtttcaatgacagaatataacaacattgtttagcaatttttatcagatgagtctgttgtttgtcagctcccaattcacatttcttgctaggtttaagtatatgctcccttgtacaacaaatcaaatgatgcaagggattcaactgtcgatttacttggatggtacatccatttttgtgcacgagttgtgattcttgtaactaagaaaaaaaaaaaaaaaaaaaaaaaaaaaaaaaaaaaaaaaaaaaaaaaaaaaaaaaaaaaaaaaaaaaaaaaaaaaaaaaaaaaaaaaaaaaaaaaaaaaaaaaaaaaaaaaaaaaaaaaaaaaaaaaaaaaaaaaaaaaaaaaaaaaaaaaaaaaaaaaaaaggggggccccgtttaaaaaaaaaaaaatttaaaaccgggggatccggaaaaaaaatattttttttttgggggacccaaaaaataaaatccggggcccgtgttttaaaaacccttaaaaaggaaaaaaccccggccccccccaaaataatacctttggaaaaaaaccctttttcccccggtgggttaaaaaaaaaaaggccccacccaattccctttccaaaaat

SEQ ID NO: 20837 - DNA, 664 bp, Zea mays
  unsure (1)..(664): unsure at all n locations
  Clone ID: MRT4577_119001C.1
ccggccgggatcgcagagaggttgtggagagcggagattgggggagatcgtgagcgccgccgcactcggagagagagggagagagaaaatagctgtgtcgcggcagggtgagaaacttgtggtcagctgtgttgctccatggtcggcgcgctgtggggcggatccaccgtgacccgtattgccgagcgcagagagaagccgtgggccaccaacgtcgcgtgtcatgttcgcctccagtccaatcctggcgtgcgcatcgggagcttcaacggcaccaatggggaaaaccaatcagtgcggctctctggtgcggaggtgttggcggtacggcgggatttccccatcggcatcctccatggtgggagtccgccgcggaagggaccctttgagctacatgcttcgcagtgaggacacgtgtcacctgaagatcatcctggtacctggaatctcaagtctcaggtcaagaacaggtaccacaggatgaggcgcatggaggatgctgtgatgagttcgtgagaggtctaggtcgtcgtctcccagtcaactttgggttgctggatcgtttcctcatatgatgtaattatttaattattttgtatagaactcctgttatatagtanagatgtgacattcgatccaaaaaaaaaaaaaaaaatttgcggcc

SEQ ID NO: 20838 - DNA, 726 bp, Zea mays
  unsure (1)..(726): unsure at all n locations
  Clone ID: MRT4577_119002C.1
tccccttctcgctttcgctttcgctcaacgctctgcgnagnagctagnnggtttcgtggcgccctactgcctacttcctggnntcttcctgccccgcctatggggcctgaggccctccactgtatcagnatctcttggtgctgtnnctcctcgnacgggcgcccaccacatnngtcttcgctttcttccaacgcccacgctgtctcctggcgctctgtgccgtcctcgnaagnnctgtcgnncgtctatttatctcgnncgtcccctgcctgcccgccccttcctgcatttcgtcaccctggccctgctttcgaactgtnnctcgcnctcttcctagactgtccttcactctcnnagtcagctgnnagtggcctnngttcctccttcctgcctttccgcgcttccnttcctgccttcgagnngaggcannagggcggnngttctggcttcccttccttcagnnaggggnctctgcctcctaaggctggggctagaaaaaagacgtagcannactttgactgccttgcctgcgaacatcaacnnggtcgccgccttcctgcctacgtcaacgncnttgagcgcctgccttcgnaggaatnnggaaggcctgaggcctggggacctgcctatctagaaaagctcgcctgagaactnntcatcaagaaaaaggccaaggnnaggcgggccgccgcggcgggaccctcagctgcctgaggtggacaagta

SEQ ID NO: 20839 - DNA, 566 bp, Zea mays
  unsure (1)..(566): unsure at all n locations
  Clone ID: MRT4577_119003C.1
gccggcctgcttggataggggnnnnaaaaaaaaaatatccaaaaaaaaaacgaaaaaaaaaaaaaaaaaaaaaaaaaaaaaaaaaaaaaaaaaaaaaaaaaaaaaaaaaaaaaaaaaaaaaccaccacaaaaagaaaaaaaacgaaaaccgccgggggaaaaaacgggggctgaaaattttggttggttaaattggggggaaaagcccattgccgcgggggcagggacttaaaaaaaaaaaaaaaaagaaatgggggtaataattttaaaaagagaccaaaaaaaagtggagaaaaacaaaatgcgcccctattccctaacaaaaaaaaaaaaaaaacatcgcccccgagggcggcaccatttaaaaatccatggacccccgcgcccgggagaaccccaaaaatagtttttccaaccacgacgaccgggagggggggcccaggccccaatccacccaaaaaggagtgccataaacgccgccctccgggaggggtttttaaaagggggaggtcggaaaaacccccgctttccccccgtttgagggacggggaagacgcccctttttt

SEQ ID NO: 20840 - DNA, 513 bp, Zea mays
  Clone ID: MRT4577_119004C.1
cagcatggttataacccaacggcagcaggcacgcctcctgtcctgctggaggtgcttatggtccggccgggcggggtgatgcttctatccagcgacaataatttcgcgagattccagatgatcccaggttccatggtggggccaaaggtcgtggtcgtgttaccctccccgtgctcaattccctggtcggaagggcggcgattccggtggccggcgattctagatttactttgaacattgaactcatgctatccgagcgtcaagcgagctcatatcacctgatgtcagtgtgcattaccgtgctatactcgaccgagaaacctaagcgctcataaaacttgttctacaattcaggtgcatcgaactactgtatggttttgcctctgttcataattgtagaggaacgaaacgatgagagaacactgacttttgcgttactgtgcacttcatgtaatatgatctcggaagcaataacatttcatcttcaaaaaaaaaaaaaaaaaaggggccctt

SEQ ID NO: 20841 - DNA, 425 bp, Zea mays
  Clone ID: MRT4577_119005C.1
cggacgcgtgggcttgctagcctcggcgaatttccctgcacgctccattgcgccatcgctggggccagccatggacgtgcgtccctcgagcttgtccagcgagtcgcgcccaggcacgtcaagctcctcctcgggtcgctgtcttcgagcccgacctcaagcgagctttttgcgattatgatacgcccaacgcgtgacttcgccagtctggtatgccgaatcgcgtcctcaccagaatggtactgacatcgtcgttcgccttctctgttttggtctccgtagcttcatcctcggattaaggcctagtaataactcgttgcggacacttgtgcccttgccgttgtgcctcgttctcctctcgagccttctaagcctgtagttcttaacgctgtcgccggcaccgccatgactccgccaccgaatcc

SEQ ID NO: 20842 - DNA, 401 bp, Zea mays
  Clone ID: MRT4577_119006C.1
gtcgcgggtaaggaagaccaacgttttgctttgcctctaaacgagctatgaagctgggggcgtgacagcaacagtgggcggcttcatgaaaacactgaacatagacgacatggccaagcaaaaaccggacaaaacgacagatctggagcctcatgtcttggaggcctacaaagcatctacttgtcaggccaaggctggtgcgatggattacatgccacctgaggttatcaagagaaactcgtatgacaggacatgcgatgttgacaacttggctaacagtgacttgcatagatacagcgtggatatccaagctgcggactagagcggctcctaggccatgcttgcggatagtcacgtacatcttgacgacggagataccacgatgctgaacgagctgtcta

SEQ ID NO: 20843 - DNA, 422 bp, Zea mays
  Clone ID: MRT4577_119007C.1
gcagcacatccaaccaagtcatccatcagctctgctcacgactcacaagcaagagctcagctcaattggagctcggtctctcgattcccaggaggaacggaaccaaattaagctccgttggttgcctgccagtagcgagtagtccggacacgggatgggcaacctcgtctcgcagtgcgtcgcgaacggtgccggcgcgcggcctctagtcgtcgagccggacggcagccggacgttggtggacaagaacaccggggtcgcagagctgatgatcgacgcgccggggcacgtggtggctcgcgccacggacgtggcgagagagcggcgggtgcgggcgatggcggccgacgagctcctgcgagctggcgtggtgtacctcctcgtgccggcccgccgggccggtgcccggctgggagaccgtg

SEQ ID NO: 20844 - DNA, 357 bp, Zea mays
  Clone ID: MRT4577_119008C.1
caagcggccaaccaaacacagctgcgcaacggatgggacagcccgaggcccgatctagcgccggcgacttggggtccgccagcgccccgccatgtcgtcctccaccgcgtcgtggtcgcgctacggtgccgtcccgacctccccgccttcgccgtcgcagctcatgccggaggacgacgccgcgggcggcgaggcggcgccctcgccctcggtctcggctacggcggcggaggccggggtcgccttcttctcccgcgcgcgggcgttcgcggtgactgtgcgggcgcgcgcgtggcgggaggcgctggacccgtcggcgttctcgtgagccgagagctgcggggaggcccgcgcgcg

SEQ ID NO: 20845 - DNA, 813 bp, Zea mays
  Clone ID: MRT4577_119009C.1
agaaaatatcagaatagcaatacatcatacaattgggtgcaagggttgtcatctcatgtggtttgcttttgatagtaccatagtccaacacatcatatagttaggtgcaaagggttggcatcaccatgcacgtctgtataataagtgatactaattatatgcagatattggtgaaaaccaatgttgggatgagttcagacccgacaagagatctatattactatgtattcatcgtttaccattatgccattgttgttgtctcatccagacattcaaccatcataattgtcattatcgcaatgcttagtttaggaatgagcactaacacaactgaaaaggtcttcgttcagcttgtgggttcagtgtgaaggtcaacccaaacatctccttgatgacctgccccttctccaggtgttctactagttttgcgacaagagcgacactttccctcacgtgttccatgtcagtctgtgtccagatgcgacgtgatagctgtagtcttcgttgtttggaattaagatcgatcccccatttgttgtaaaggctctctctttccaaaagattgagtctccttagcatttgcctgtacaacatgtctctttcatgccgaagatttctcaagcttgatgtagcagcagcattagcctcagatgcaacactgaaagaacttttaatgaaggataatcttctgtgctccacttccaagtaaatattgtcttctttgtgccccttaaagaggaggaagaaatatgttctgtgtactatagatacattgcattcatgccacaactcaatgatttccttctgtttttt

SEQ ID NO: 20846 - DNA, 464 bp, Zea mays
  Clone ID: MRT4577_11900C.1
ctctctaatgtagatttaatataacgttataatgagggggtacatgcatttcacacaacatttacaatcatactcaacctgcatatggatgcggaccaacaggctcgatgcatacaatacatacatgtctgccaacgacaaaagcacaaaccacgacacgcgaactagtggcgcggtaattaatcggttgattcgcacacacgcggctgctattctaccagtaataggttgtgcaaaatgcagtcgactttaccggccattacagggcctcgggtgaattgaataggctaattgctgtgctgactggcgacgcatgagcgatccaaccaaccatagcttggagtgccatgcaataagatgatcgatctgcaccacccatcatggttatggatgcgccagcccattctgtggtcctggaatccgtatgccctgccccgcatgatgatctggctgggcaccacccg

SEQ ID NO: 20847 - DNA, 202 bp, Zea mays
  Clone ID: MRT4577_119010C.1
gaaaaggtaccagatggggtttttttacaacaggggttcacagatatgtgccatatacggttatgctgattgcggcggacccactcttaccatcaagagctgcatactcaattgttcatactgacccggcatgtggctacgctctacgaaaacatggtcaccggcgacatatggacataacaatagtctggcgaggatgttt

SEQ ID NO: 20848 - DNA, 3063 bp, Zea mays
  Clone ID: MRT4577_119011C.1
cctgcttctagctcctcctccttccccagcgggtggccgcagcaatttgcaagcagaggaagaaagcttccgggcgtctcggcgcgaagaacagcgtcacgttctgacggaggagaacaggagaaggtctcgggtttcggccggctgcctgtatgagcgccaccatggcgtggtatccattaccgcagagcggaggcacaggcacgccgtcgggcggcggcgagctgttggacgaccagagcggcggctgggcgctctggagcttcggctcagctgacgacgaccacggcgctggcgtcgtgcgcgcggagacgcgcgggagttcagacgagcggacggaggagggccggcccgcgccgccgcagcagcagcaggcaacagacgacatcttcatgagccagttctcggacgaggaggtgaggaagatggacgacgccccgttcgaggcgctgggcatgttcccggactccatgcaccagctgctgtcctacgagaacatgctgagcggcggggcgctgagctgctgcggctcggaggacctgctgaacgccacgctgggcgtggacgccatggacacctgcggcttccctctcttcagccacgacctgcagagcgcggcgccggatctcacgctcacgctcacgcctgaggaccaggatggggcgagctttgctgcgacgaaaaggagcaggtcgtccgtcgcggtctcggatgaagggggcttcctcttccaagcgctggtgctccgggagctcgaggacgtcgtgttccagctgaccaagcggacgcgggtatgcttccgggacgcctttttcaggctggccgagagttcgagtgccaagtgcggcgctgcgaacgggacgcccccgccttcctttgcaactgcaattgaacgggagacgaacgccatcgacaggacggtggcggacctccccatgcgccccgctgtcgtcgcgactcaggggcggaggcgcagtccgcaacccccgaccggcacgacgacggcgtagaaagggccccgcgcgactgatccgtctttttttgccggctactcctacgattcgttcggccatgttgggcgcagaaaaaaatgtacatacttgcgtacgtactgctattgcatcttttatttttttttactagctcgcgagcatatatatgatgaagagaaccggctgtcgtttatgcatttttacggaacttcgatatagtgaagtccctgtccgatgcagctgaacactggccccgtttatacagtggtatttggaactggggtacagcatccatccactcctcccctgctccggctccggctccgccatgggcctttcaacagtgttactccccgggatgatctcaactcccctgctgttcaaacttcgtggcggtgaggtttttctgggaacctcgaggccggccggggcgcggtgtccaccactccctcctctcctctcctctcccgtcctatccatccggcacgcccagcatccatccactcctcccctgctccggctccggctccggctccgccatgggcctttcaacagtttactccccggccggaccgcgcctcgtgccggcccctctcggccgctgccgctctgcccagccccgccgcccgcgccgagccccgctcgccaccgtccggtgctccgtcgacgccaccaagcaggcgcaggatggcgtggcgacggcggtcgcgacggaggcgccggcgtcgcggaaggagtgcttcggggtcttctgcaccacctacgacctcaaggcggaggacaagaccaagtcgtggaagaagctagtgaatgttgctgtgtcaggcgcggccgggatgatatcaaatcacctgctgttcaaactcgcttctggtgaggttttcggacaagaccaaccaatagcacttaagctactcggctcagaaagatcgtttcaagccctcgaaggtgtagctatggaactggaggactcgctgtatccactgctgagggaagtcagcattggcatagatccttacgtagtctttcaagatgtagattgggcccttcttattggcgctaagccccgaggtcccggcatggagcgagctgcgctactggatatcaatggccaaatctttgctgaccaggggaaagcacttaatgcggtcgcctcgcggaacgcgaaagtcttagttgttggaaatccctgtaacactaatgcgctgatttgtttgaaaaatgccccaaacataccggcaaaaaactttcatgcattgacgaggttggatgaaaatagagcaaagtgccagctggcactaaaagcaggtgtattttatgacaaagtatcaaacgtgactatttgggggaaccattcgacgactcaggttcctgatttcttgaatgccaaaattgatggaagaccagtgaaagaagtcattaaggataccaagtggttagaggaagagttcaccctcacagttcaaaagcgtggaggtgtgctcatccaaaaatggggcagatcatcagctgcatcgaccgctgtttcgatagtggatgctattagatccctcgtaactcctaccccagaaggtgactggttttctacaggggtttatacgactggaaatccttatggcatagcagaggatatcgtgttcagcatgccatgcagatcgaagggtgatggtgattacgaactagctagtgatgtgttgatggacgattttctctgggaacggattaaaaagagcgaagctgaattgcttgctgagaagaaatgcgttgcccatcttacaggagaggggaatgcattctgtgatcttccggaagataccatgctaccaggagaagtgtagtttagttacagaagcaacagcagcggaatgcatttgccaatacattagctgagacttgaaacatctgcttgcgagatgcagcaactacttttatatatatatgtgtatattcaataattgtgccacacgaatttgactatgatgcaaacctcttacacaggtaagtcttttttttttccgtaaatacgagaaagactgcttcaaaaaaaaaaaaaaaaaaaaaaccaaaaaaa

SEQ ID NO: 20849 - DNA, 1716 bp, Zea mays
  Clone ID: MRT4577_119012C.1
atggcggtcacgggcctggtcatgtactcacgggctctcatctccatgctcttcctgggccgcctgggcgagctggcgctggccggcggctcgctggcgcttggcttcgccaacatcaccggctactccgtgctctcggggctggcgctcggcatggagcccatctgcggccaggccttcggcgcgcgccgcggcaagctgctggcgctggcgctgcaccgcaccgtgctgctgctcctcgccgtggcgctgcccatctcgctgctgtgggtcacctccacggggcacgtgctcaagctgctggggcaggacgagggcgtggcggacgcggcgcagacgttcgccgcgtacgcgtcggccgacctcgcggttctggccgtcctgcacccgctgcgcgtctacctccggtcgcagaacctgacgctgcccatcacggcgtgctccctcttctccgtgctgctgcacgggcccatcaactacctcctcgtggtgcgcctccgcatgggcgtcgccggggtggcgctcgccgtggcgctcaccgacctcaacctgctcctcgcgctcctctgcttcctcgccatctcgggcgcgcacagggactcctgggtgggccccaccctcgactgcctctgcggctggccggagctgctccgcctggcggtccccaccgccaccgcggtctgcctcgagtggtggtggtacgagctcatgatcgtgctgtcgggcctcctggccaacccgcgcgccaccgtggcgtccatgggcatcctcatccaggccacgtcgctcgtctacgtgttcccgtcctccttgggccagggcgcgtccacgcgcgtcagccaccagctcggcgcgggccgacccgcgggggcgcgccgcgccgccggcgccgccctctccatcggcgtcggcgtgggcctggttgccgccaccttcatggtgtccgtgcgcagccactggggacgcatgttcacgtcggacgcggacatcctccgcctcacgggcgtggcgctccccatcgcgggtctctgcgagctcggcaactgcccgcagacggccggctgcggcgtcctccgcggcagcgcccgcccgggcagcggcgcgcgcatcaacctcgcctccttctacctggtgggcatgccggtgggcgtggcgctggcattcggcgcccgcctgggcttcgccggcctatggctcggcctcctggcggcgcaggccgcgtgcgccgtctggatggcgcgcgcggtggccgccaccgactgggacgtggaggtcggacgcgccaaggagctgaccaaagcgaccgccagcaacaaccacagcgagtgcaacagcagcagcagcacctccgcgtctagtgatataaccactgtgatcgccactagcaacagcgccgccgggtgcaagaacaacggctacgtgccaatcagcgagcgctgcagcaacgacagcgagctggagaaactggaggagggcctcatgagcagcgacgacatccctagtgccagcgtcagcgggagcgcgtctgctggtgacaccggtgccgtggttagggagaaccgcggcagctgctgcaatgacagtggcgctgctggtacggcggcgacgacggagggaaaggagcagaggaggggcggatcggagcggggcccgctcatcagtgtgtcggacggggagcacgatggcgacggccgtggaggtggcggccaggtctaa

SEQ ID NO: 20850 - DNA, 499 bp, Zea mays
  Clone ID: MRT4577_119013C.1
ccctgactgaagctgaccaagcggacgcgggtatgcttccgggacgccttcttcaggctggccgagagttcgagtgccaagtgcggcgctgcgaacgggacgccgctttcctctgcaactgcaactgaacgggagacgaacgccatcgacaggacggtggcggacctcaccatgcgccccgctgtcctcgcgagccgctgccccgccgacggcgactcaggggcggaggcgcactccgcaaccaccgaccggcacgacgacggcgtagaaagggcaccgcgcgactgatccgtcttttttttgccggctactgctacgattcgttcggccatgttgggcgcagagagagagagagatgtacatatatatgatgaagagaaccggctgtcgtttatgcatttctacggaacttcgatatagtgaagtcactgtctgatgcagctgaacactggcaccgtttatacagtggtatttggaactggggtacacgactgttatt

SEQ ID NO: 20851 - DNA, 111 bp, Zea mays
  Clone ID: MRT4577_119014C.1
ctctctttttctgacacgcacacgacgacgcgtacgcggaattttacaagagatcgtgatggcgctccccgcccagagctcgtactcagatcgagggagttgaagaacagg

SEQ ID NO: 20852 - DNA, 376 bp, Zea mays
  Clone ID: MRT4577_119015C.1
gtcttcctttccacccatccctgtttctaactgctggtccttccccagcgggtggcggcagcaatatgcaagcagaggaagaaagcttccgggcgtctcggcgcgaagaacagcgtcacgttctgacggaggagaacaggagaaggtctcgggtttcggccggctgcctgtctgcgccttgatctcctccagatgagcgccaccatggcgtggtatccattaccgcagagcggaggcacaagcacgccgtcgggcggcggcgagctgttggacgaccagagcggcggctgggcgctctggagcttcggctcagctgacgacgaccaccgcgctggcgtggtgcgcgcggagacacacgggagttcagacgagcgga

SEQ ID NO: 20853 - DNA, 1340 bp, Zea mays
  Clone ID: MRT4577_119016C.1
ccggccgggccgggatcaaacacgtctcggtaccattcggctcgttggtcagtcgccgtcagcccaatacccaccatccccaccaacggccggccgccgcggcggagcggagcagagagcaaccatggcgtcgaagcagatggaggagatccagcggaagctatccctgctggagtacccgcgggcgaacgcccccgcgcaatccctcctcttcgccggcgtcgagcgctaccgcctcctcgagtggctcttcttccggctcctaggcgacagatcgcccttcacgcagcagaactggcaaggggatagcctggaccgcgacgaggagaacaacaggatccaacacctggcggagatagccaacttcttgggcatcacaccttcggcggacaccgaggcgattcagggtcgaggtagctatgaggagcgggtggaactgctccatcttattgttgacctagtggaagctagttgctacgctgacaatccagaatggagtgttgataagcaattggagaaggatgtgcaactagtagattcaattgctgagaaacaagcccaaattttttcagaggagtgcaagcttttccctgcggatgttcaaatacaatcaatttaccccttgcctgatattgctgaactagagttaaagctctcggagtataccaaaaagatgtctaatctgcagcaaatggttcaggagttagcatcgaagtatgattataatccaaatgaagactatgcggagacagagttgaagttgagggaatacttgcaatcatttttggaaacggttaaatccttcaacacaatatatactaaggaaatccatccttggacccacatgatggaagtgccacaattgcatggcttcggtccagctgctaatcgcctcttggaggcatataatacccttttaaagttcttgggaaatctgaggagcctccgagattcatacactgcaatggctgctggttcactgtcggcttctaatgagccttcatctgtgaccaagattatttcagactgcgaatctgcactcaccttcttgaatcacagcctttccatcctttcaacttccgtggcacgtgagcaggggggaacgctatgattttacagtatttggatagtaagatatagtcagtggacttatgtatgtaagcttctattaattcaattgtttgtttcctataaaaaatcagttgtttgcattttaatttcagctagtgcatgtactccctttgatccaaattataaattgttttgatattttccaaattatgtctagatacacaaaaaaaaaaaaaaaaaaaaaaaaaaaaaaaaaaaaaaaaaaaaaa

SEQ ID NO: 20854 - DNA, 1007 bp, Zea mays
  unsure (1)..(1007): unsure at all n locations
  Clone ID: MRT4577_119017C.1
ccggccgggcggaacttcgatatagtgaagtcactgtctgatgcagctgaacactggcaccgtttatacagtggtatttggaactggggtaaaaaaaaaaaaaaaaaatcaaaagaggaaaggcttgcggtggatacctaggcacgcggtgtccaccactccctcctctcctctcctctcccgtcctatccatccggcacgcccagcatccatccactcctcccctgctccggctccggctccggctccgccatgggcctttcaacagtttactccccggccggaccgcgcctcgtgccggcccctctcggccgctgccgctctgcccagccccgccgcccgcgccgagccccgctcgccaccgtccggtgctccgtcgacgccaccaagcaggcgcaggatggcgtggcgacggcggtcgcgacggaggcgccggcgtcgcggaaggagtgcttcggggtcttctgcaccacctacgacctcaaggcgtggagtactaacaatctgtcatccatgccgttgaatggattgggacacaggaggacaagaccaagtcgtggaagaagctagtgaatgttgctgtgtcaggcgcggccgggatgatatcaaatcacctgctgttcaaactcgcttctggtgaggttttcggacaagaccaaccaatagcacttaagctactcggctcagaaagatcgtttcaagccctcgaaggtgtagctatggaactggaggactcgctgtatccactgctgagggaagtcagcattggcatagatccttacgtggtcttccaagatgtagattgggcccttcttattggcgctaagccccgaggtcccggcatggagcgagctgcgctactggatatcaatggccaaatctttgctgaccagnggaaagcacttaatgcggtcgcctcgcggaacgcgaaagtcttagttgtcggaaatcccctgtacactaatgcgctgattttgttgaaaatgccccaacataccggcaaaaac

SEQ ID NO: 20855 - DNA, 836 bp, Zea mays
  unsure (1)..(836): unsure at all n locations
  Clone ID: MRT4577_119018C.1
gctaattgagcatcgcagagataggcgtcttcgtactcgcctacctccgcggctcaaacctttcccccttctcccaattccttccgccggccgccgctccacccgtacgacgacaccatgagggagtgcatttcgatccacatcggccaggccggtatccaggtcggaaacgcgtgctgggagctgtactgccttgagcatggcattcaggctgacggtcagatgcccggtgacaagaccattgggggaggtgatgatgctttcaacaccttcttcagtgagactggtgctgggaagcacgtgccccgtgctgtttttgttgaccttgaacccactgtcatcgatgaggtgagaactggcacctaccgccagctcttccaccctgagcagctcatcagtgggaaggaggatgcagccaacaactttgcccgtggtcactacaccattggcaaggagattgttgacctgtgccttgatcgcatcaggaagcttgccgacaactgcactggtctccagggcttcctcgtcttcaacgctgagccatcttccatgatggccaagtgcgacccacgccatggcaagtacatggcctgctgcctcatgtaccgtgggtgatgtggtccccaaggatgtgaatgctgctgtggccaccatcaagaccaaacgcaccatccnagttcgtggattggtgcccgactggcttcaagtgcggcatcaactacagccctcctagcgttgtgcctggtggcgacctgggccagtgcagcgtgccgtgtgcacgatctccactccacantggggtgtggagtggtctccgcatcgaccacaagtcgact

SEQ ID NO: 20856 - DNA, 279 bp, Zea mays
  unsure (1)..(279): unsure at all n locations
  Clone ID: MRT4577_119019C.1
tggagncgggggggggggggggnnccgccnncaacnccgncagggggggcggcaacccgggcgggcgggcgctgagctacgnagncaacgagctccncgncgagggccncgccaacaaccgngcannccagaggnncgcngngaagaccaacaggacncccgagggggggggggggggagcnaaggaagngagggaggagncancggaacaanngaaggaagcncgnggccagaaagagcacaccaagcagcgaaacgggggcccacagcgaagcagca

SEQ ID NO: 20857 - DNA, 313 bp, Zea mays
  Clone ID: MRT4577_11901C.1
cgacagcacggaattcggctcgagcacgagccgaaaacgtcacttgatgcaaaacctggggcgcaacatcggggagacacgagaaaaggcgagcccggaaacaccaaaagcccgaggaccccaacgcaaggacgcgaagacgcaaacagggaagacagagcacaccgaggggatccagaacaaaacggtgcggaaggggaccgacacgcaggacggcacaaacaccacaacagagggacgaaagccccgcacaggggcagcaatagaaagtcgagcatagagaaaagagaatgcccagaagcccagattccgg

SEQ ID NO: 20858 - DNA, 1803 bp, Zea mays
  Clone ID: MRT4577_119020C.1
gtactcgcctatctccgcgactcaaagcttcttccatttcctaccgccgccgctgcagctccaccccattccgtcgacaccatgagggagtgcatctcgatccacatcggccaagccggtatccaggtcggaaacgcgtgctgggagctttactgcctcgagcatggcattcaggctgatggtcagatgcccggtgacaagaccattgggggtggtgatgatgctttcaacaccttcttcagtgagactggtgctgggaaacacgtcccccatgctgtttttgttgaccttgagcccactgtcatcgatgaggtgaggactggcacctatcgccagctcttccatcctgagcagctcatcagtggcaaggaggatgcagccaacaacttcgctcgtggtcactacaccattggcaaggagattgttgacctgtgccttgaccgcatcaggaagcttgcagataattgcactggtctccagggcttcctcgtcttcaacgccgttggtggaggaacgggctctgggcttggttctctcctcctggagcgcctgtctgttgactatggcaagaagtccaagctcggtttcaccgtgtacccatccccccaggtgtccacatccgtggttgagccatacaacagtgtcctgtccacccactctctcctcgagcacactgatgttgctgtcctgctcgacaatgaggccatctatgacatctgccgccgctcccttgacattgagcgcccaacctacaccaacctcaacaggcttgtgtcccaggtcatctcatccctgactgcttccctgaggttcgatggtgctctgaacgttgatgtgaatgagttccagaccaacctggtgccctaccctaggatccacttcatgctttcgtcctacgctccagtcatttctgctgagaaggcctaccacgagcagctgtccgtggccgaaatcaccaacagcgccttcgagccatcctccatgatggccaagtgcgacccccgccatggcaagtacatggcatgctgcctcatgtaccgtggtgatgtggttcccaaggacgtgaacgctgctgtggccacaatcaagaccaagcgcaccatccagttcgtggactggtgcccgactggcttcaagtgcggaatcaactaccagcctcccagcgtcgtccccggcggtgacctggccaaggtgcagcgtgccgtgtgcatgatctccaactccaccagtgttgtggaggtcttctcccgcattgaccacaagttcgacctcatgtacgccaagcgcgccttcgtgcactggtacgtcggtgagggtatggaggagggcgagttctccgaggctcgtgaggatctggctgcgctcgagaaggactacgaggaggtcggtgctgagtttgacgagggtgaggacggcgacgagggtgacgagtactagacgctctactggcgcggcgtcgtcgggcttgtgtttctgtcggttcttatctatctgtcgttgtgtggtttacaacttacgttgtaagactttattcccccgctttgctactgggttattaagtttggcgttattgttttcttgatctctgagatgctttgctttcaccacctgtttttttgtcatctgtgtaattgagtcgacggacaatcattttcttgcttcgagcaggagagcagcacacgagttgcagacaaaaaaaaaaaaaaaaaaaaaaaaaaaaaaaaaaaaaaaaaaaaaaaataaaaaaaaaaaaaaaaaaaaaaaaaaaaaagggactttgggttgttaccactggttaagggg

SEQ ID NO: 20859 - DNA, 203 bp, Zea mays
  Clone ID: MRT4577_119021C.1
cggtccgcaatctatttccgactcgacgagcttatcttgtcggcggccgtcctctcttggccggggggctccataacatccgcttgggcgagaccactcatatccacatgtactcgacctgctctccataaccttcattatttccagcctaaatccatcaacacctaccataagcctaactctactatgttccctgtgttccc

SEQ ID NO: 20860 - DNA, 637 bp, Zea mays
  Clone ID: MRT4577_119022C.1
ggccgcttttttttttttttttttctttttttttttttaaacaataaccgccaaacttaataacccagtagcaaagcgggggaataaagtcttacaacgtaagttgtaaaccacacaacgacagatgttgggcgctcaatgtcaagggagcggcggcagatgtcatagatggcctcattgtcgagcaggacagcaacatcagtgtgctcgaggagagagtgggtggacaggacactgttgtatggctcaaccacggatgtggacacctggggggatgggtacacggtgaaaccgagcttggacttcttgccatagtcaacagacaggcgctccaggaggagagaaccaagcccagagcccgttcctccaccaacagcgttgaagacgaggaagccctggagaccagtgcaattatctgcaagcttcctgatgcggtcaaggcacaggtcaacaatctccttgccaatggtgtagtgaccacgagcgaagttgttggctgcatcctccttgccactgatgagctgctcaggatggaagagctggcgataggtgccagtcctcacctcatcgatgacagtgggctcaaggtcaacaaaaacagcacggggggacgtgcttcccagcgccagtctcactg

SEQ ID NO: 20861 - DNA, 306 bp, Zea mays
  Clone ID: MRT4577_119023C.1
cacgtttctgtaatcaaatgcttccagctcccaactctcctcgccactacgctatcggccaacaaggctattcatggaacctgacacataacattgcttggcggggagaagaatgatacaatctggcacgaggacacaactgccggtgtataccaacactatcagaagagcatgtataaaaccacctggccaatggttcatacatatacggacgaatctgtcgctcgccagatgacgcctaatgagatacaatactttgatccaaaagatttctcagaaggaattctgtataggataagaatgcct

SEQ ID NO: 20862 - DNA, 707 bp, Zea mays
  unsure (1)..(707): unsure at all n locations
  Clone ID: MRT4577_119024C.1
gaggtcaagaaaacaataacgccaaacttaataacccagtagcaaagcgggggaataaagtcttacaacgtaagttgtaaaccacacaacgacagatagataagaaccgacagaaacataacacgataggagccactcagggcagatcacaggatagcagtggcacacaagcccgacgacgccgcgccagtagagcgtcgaacttgtggtcaatgcgggagaagacctccacaacactggtgngagttggagatcatgcacacggcacgctgcaccttggccaggtcaccgccggggacgacgctgggaggctggtagttgattccgcacttgaagccagtcgggcaccagtccacgaactggatggtgcgcttggtcttgattgtggccacagcagcgttcacgtccttgggaaccacatcaccacggtacatgaggcagcatgccatgtacttngccatggcgggggtcgcacttggccatcatggaggatggctcgagggcgctgttggtgatttcggccacggacagctgctcgtggtaggccttctcagcagaaatgactggagcgtaggacgaaagcatgaagtggatcctcgggtagggcaccanggttggtctggaactcgttacatcaacgttcagagcaccatcgaacctcagggaagccgtcagggatgagatgacctgggagacaacctgttgag

SEQ ID NO: 20863 - DNA, 614 bp, Zea mays
  Clone ID: MRT4577_119025C.1
gccgggttaaaattccttgctgtccaaggtctgttctcagcatctttaggaactgaggttacatcatttgagttgcaagagaagttcaaatggccaaagaatcccatatccacatcgctacgtaaagaatgcatagaacgacttcaattcttgctggaagatgcacaaaaggatgcatctttacatgttcctaatgaggtcaaatccaatgacttaggctactaccttatgcgtttcattaacaccgtatgcaacatcccctcagtctccctcttcaggatcttgagtggccacgatgataacgcattcaagaaattgatggcagtagaatcaatgcttttccacgaggagagaaaaactggtcctggattggagtctactaaaatgcatgcaatgcgttatctccttatacaggtactgctacaaggtcttctccatccggatgagtattgggaggctgcagttgatgtgactatatgttgcaagaaatcctttcctgtcattgctcaaggtgataactcgagtgcacaagaatccgctgaacacgggtcacaggagtctgatgaggatgggtttgaggaatctgacgaggatgggtcataggatcccaatga

SEQ ID NO: 20864 - DNA, 656 bp, Zea mays
  unsure (1)..(656): unsure at all n locations
  Clone ID: MRT4577_119026C.1
tatttggccggaaccacttttattattggcttaaccggttggggaaaaaaaaggctcggtgggaatttcctaaattttctttggttattaaaattttttggaatggcttaaaaacccctgaactttggttgggtcaaaatggcactttattggttggaaccagggagttaaattttcctaaaggtttcttaaatgggttattttttattaaaaaattatgctggggtggaccgaaccttcttaactttaaaaaatggtttttaaagggttatttaaggtaaaatggtcttaaaaaaggacccaactggacccttttctttaattcccttttaaggcttctttcttaagtatgggttaaggctacctattcctagaccagccttatttggcatgggaagtacctatttattaaccataaattacctttttaccggaagcgccatggaaccaggggattccttaccgaaattacctttttaccggtaaacaccttccccaaggtttaggttttgacaccacttgaaaaaggctggcttaaaacttccaaaggttgaaggcctggtaaggtttttaataaaaaccggttttttttcatgaacttatttatnaaaccgtattggtttggttcaacttttttcttaacagcttttttgaaa

SEQ ID NO: 20865 - DNA, 814 bp, Zea mays
  Clone ID: MRT4577_119027C.1
cgtcttcgtactcgcctacctccgcggctcaaacctttcccccttctcccaattccctccgtcggccgccgctccatcccgtacgacgacaccatgagggagtgcatttcgatccacatcggccaggccggtatccaggtcggaaacgcgtgctgggagctgtactgccttgagcatggcattcaggctgacggtcagatgcccggtgacaagaccattgggggaggtgatgatgctttcaacaccttcttcagtgagactggtgctgggaagcacgtgccccgtgctgtttttgttgaccttgaacccactgtcatcgatgaggtgaggactggcacctaccgccagctcttccaccctgagcagctcatcagtgggaaggaggatgcagccaactccaccagtgttgtggaggtgttctcccgcatcgaccacaagttcgacctcatgtacgccaagcgtgccttcgtgcactggtacgtcggtgagggtatggaggaaggtgagttctctgaggcccgtgaggacctggcggcgctcgagaaggactacgaggaggtcggcgctgagttcgatgagggcgaggatggcgacgagggtgacgagtactagagaagtttgctgatgacgcagcatcaggccagtgtgctgcccttatcccgtgatctgccgtgagttgctcctgctatcgtgttatgtgtgtctgttctgaagtattgtgtggtttacaacacctgatgttgtaagagttgttaattcccctgcattgctaccgggttattgagaataattatggctgtttacgttgttgctt

SEQ ID NO: 20866 - DNA, 453 bp, Zea mays
  Clone ID: MRT4577_119028C.1
tgcggtacaggttccggtcttcagttacggccgaggcgggcgcgcaagtgaaagaattttagatcgactaccgtcagggagtgagttccaccccattccgtcttcaccatgatggagtgcatgtagatccacattggccacagccggtatccaggtgggaaacgcgtgctgggagctctactgcctcgagcatggcattcaggccgatggtcagatgcccggtgacaagaccattgggggtggtgatgatgctttcaacaccttcttcagtgagactggtgctgggaagcacgtccctcgtgctgtgtttgatgaccttgagaccaactgtcatagatgaggtgaggactggcacctaccgccagttcttacaccctgagcagtttatcagtggcaaggaagatgcagacaacatcttcgcgcgtggtcactacaccattggcaaggagattg

SEQ ID NO: 20867 - DNA, 720 bp, Zea mays
  Clone ID: MRT4577_119029C.1
accggtgttttcccttacactgtagaaccgcagcagactggcgtcctcggactcgcctatctcggtgactcaaagatttccccaattccccccacttgtcccatttctcaccaccgccgccggtccccccggtcaacaacaccatgagggagtgggtctcgatccacatcggccaggctggtatccagggcggaaacgcgtgctgggagctgtactgcctcgagcatggcattcagggtgatggccagatgcccggcgacaagaccattgggggaggtgatgatgctttcaacaccttcttcagtgagactggcgctgggaaccacgtcccccgcgctgtttttggtgaccttgagcccactgtcatcgatgaggtgaggactggcacctaccgccagctcttccatcctgagcagctcatcagtggcaaggaggatgcagccaacaacttcgctcggggtgactacaccattggcaaggagattgttgacctgtgccttgaccgcgatcaggaagctcgcagataattgcactggactccagggcttcctcggcgacaaacgctggtgggcggaggaaacggagtctgggcctaggctctctcccatcctgggagcacctgccgtggcgactatggcaagaacgcccaggcttcgggttcacccgggtaccccatcccccccaggttgtcccccatcgcgggggttgagcccactacaa

SEQ ID NO: 20868 - DNA, 573 bp, Zea mays
  Clone ID: MRT4577_11902C.1
ctagttctataacgcgaagggccgccctctttttttttttttttttttgggtaagtatatatactatttataactacatatataacatactaatccataaatgttgaattcctgcctttatcaatcatgaatactaatgaaattaataatcagcagcggtattctttcctagctagccctagcataatcagcagcgagggagcgaccacccatgcatgcatgctgctgcgtcatattctgtcgtgcagctgatgaaaagtctgtccgggctcaaacacggagctgtttgcagccatggacgacgacgatgcgtgatgatcgcccatcaccctcttgctgctggacgacgacgaagcgtgcagcatgtcaatgtgatcctcgtccacggaagaccgcctcttgagtgggctcagctgatgctgcgctactacggaggcggctgcagcaggctcgccgccgccgttaccgaagtcgtagtagaacccgcctgctgcgtccgtcgccgtcccgggctgcgccgtcgtctccggaagcggggtggcctcgaacagctcggacacggccgagtagtcg

SEQ ID NO: 20869 - DNA, 427 bp, Zea mays
  Clone ID: MRT4577_119030C.1
aagaaaacaataacgcctaatttaataacccaatagcaaagcgggggaataaagtcttacaacgtaagttgttaaccacacaacgactgatagataagaaccgtcagaaacataacacgataggagccactcagggcaaatcacaggatagcaggggcacacaagcccgacgacgccgtgccagtagagcgtttagtactcgttacccttgtcgccgtgcttaccctcgtaaaactcagcaccgacctccttgtagtccttttgaagcgccgccagatcctcacgagcctcggagaactcggcctccttcataccctaaccgacgtaccagttcacgaaggcgcgcttggcgtacatgaggtcgaacttgtggtcaatgcgggagaagacctccacaacactggtggagttggagattcatacacac

SEQ ID NO: 20870 - DNA, 499 bp, Zea mays
  Clone ID: MRT4577_119031C.1
ttttttttttttttttttttccgagggcggaaccgccagccctccaacgaccagtggggagcagcaaacggcgcaggccgagaagctctctcctgccggcagtgcagctgccgccgcgccgccaccctcctcgccagctttagccggcctctaggacgacgcgggagccgggattcgtcggctgggtaccaaggcctactacttgtaggctgtagccccgtagcacttgctagttgctactactagagagaatacagggggaggtggggtgggggtgctaggagttggagtagtaggacacgaggtggcagggggtgaggaatgcggatagggccggatgacgacaaggggagatagtatatagagagaaaaaaagggatggtggaggagagagaaagtgaggcgaggtttgttgttctgttcgtggcgctgctcttttttttctctctctctatacctcccctgctctcgctggctgttttgctttggccttgtcttt

SEQ ID NO: 20871 - DNA, 651 bp, Zea mays
  Clone ID: MRT4577_119032C.1
ctcactgagaaccgagagcaggcgtcttcgtactcgcctatctccgcgacccaaagcgttcccccttctcccattcttctctcatttctcaccaccgccgccgctaccccctttcgacaacaccatgagggagtgcatctcgatccacatcggccaggccggtatccaggtcggaaacgcgtgctgggagctggactggccttgagcctgggattcaggctggtggtcaaaagcccggggaccagaccattgggggagggggtgaagctttcaacaccctttttaaggagaccggcgccgggaaggaccgcccccgggccggttttggtggccctgggcccactggccttggtgaagggaggaccggcacctattggcaggtttttccttctgggcaggttattagggggaaggggggtgccggccacaaccttggttgggggcacttcccccttggcaaggggaatggtggcctgggccctggccggattaagaagcctggaaataattggactgggcttcaaggctttcttggcttcaacgctggtggtggaagaaccggccctgggcttggttctcttcttccggagcggccggctggtgactatggcaagaaggccaagctcggtttcaccggggtcccattccccc

SEQ ID NO: 20872 - DNA, 407 bp, Zea mays
  Clone ID: MRT4577_119033C.1
cgcctctccgcggcgttcctgatggcaaggctgtccagcggcgcgcccgaggaccagaagaaggcgacgtacgaggcccgcaagctctcgaagcggaacgtcttctaccgggcgtgcctcgtggaggcggacgccgtgccgtggctgctccacctgctctcttccacggacgcgtccgtgcaggacaactccgtggcgggcctcctgaacctgtccaagcacccggccgggcggcgggcgctggtggaggccggcgggctgggcctcgtggtggacgccgtgaacgtggccgccaaggtcgaggcgcggcagaacgcggcggacatcctgttctacctctcgtccaacctggagtactgcgaggagatcagccgcatgccggaggcggttccgacgctggtgcgcct

SEQ ID NO: 20873 - DNA, 346 bp, Zea mays
  Clone ID: MRT4577_119035C.1
cactctttccgcccactcgacatcgaactcaatagaacaacaagggcgcttcctcgacgataaccctcagagcttgaaaggcaagaactaccagctcttagagcgcgagaggaccgaccactctgtcctccgccacgtgatggccgacgatcgtgtcctatgcaggatccctcatactcaggtgactcactcatctgtatccacggtcatctagcactgtgatcaaggcgatgatgtacgctctcctcgccttggtgtgctcgtgtgtcatctcctagctggtgattgtgttctcgtgcaacagcaccgccgcctccgttgaggagttcacgacatagattgctga

SEQ ID NO: 20874 - DNA, 590 bp, Zea mays
  Clone ID: MRT4577_119036C.1
ggccggccggtgtaaaaattcaaaaaaaaaaaaaaaaaaagaaaaagaaaaaaaaaaaaaaaatgataaaaaaaaaagaaataaggacaagaaactgtacagaatcagacaacatgaaaaccaaaaccttgcacatggaaaacgtggacgacgcatcgatgatgagatggaccagctccacacggtacgagggatgcacaggactgataaggaggggtgaacggcgtgccttagccgaggctgcgcgtctgtcgaggactaaccgtcgtgtgcccaggagttccagcggcgcatggcctagtggacccgctgcgcgccgtccaagggcccttgggcgcgacgacaatagacccctggtatcttatcctgcgcccatcccccacatgctggttgaggtcgccgacaagtttagttccgatttcaaagaccctgcctgagcttagtaggatctgggccgaacggaaatctgattcggtcctattgggtaagaacctccactcttattgcatcaacatcatcaccatgacattatgaagatggacaatctagattttggaatagacaggctttctttttgaaacccaagggct

SEQ ID NO: 20875 - DNA, 192 bp, Zea mays
  Clone ID: MRT4577_119037C.1
ggggggagcgcaaaacaaaacctttaatacagatcttaaagccttattcggccaagtcatttaagcagtgcgggataattcctttttaccacacatttaatagactttacgttttatttctactaaaacacaaatttttaggttttacagcaatttttaagcaagatcttttaatttttgattttacacctt

SEQ ID NO: 20876 - DNA, 302 bp, Zea mays
  Clone ID: MRT4577_119038C.1
cacagtgctttccatggtgcaatggcgggggtacagcttcacttgttgggatgggtaacggaagaacttcctattttcctttcttccaggtgaccttcacaaaggaccagggttaagttacttaccagaagggggccaaggctttttgtcttcaacaacccacccaatttccttaattaaaaaggatttcaacaaaccaattaaggcgattaggttgccaaccaggccaccattgccaccggttgcaacttttccgttgggaaggtttttcaatcattcttcgtcgggtttttccaatgaaa

SEQ ID NO: 20877 - DNA, 267 bp, Zea mays
  Clone ID: MRT4577_119039C.1
atccaaggcgtgtcatctcatccaagttcgggacaccaccggcagcaaaccaatcaagaaggcagaagcctagctgtgtcgcgtgcccccacgtccagcggtcgagcaccaaccaccaccaccacctccgacgacgacgacgacgacatcgtcatgggcaacagcttgcggtgctgcctggcctgcatggtcccgtgcggcgccctcgacgtggtccgcatcgtgcacctcagcgggcacgtcgaggagttcagctgcccggtggcc

SEQ ID NO: 20878 - DNA, 450 bp, Zea mays
  unsure (1)..(450): unsure at all n locations
  Clone ID: MRT4577_11903C.1
ctgcnagtcctctcacagactgatgaaaatacaagatcttcaaacagcggtcgccttttgagctgcgtgcgtagatgataacaatgctgtaggagatttgtcttctgtctttttgctttgttgcacctggtatccgaactgtaagggatgttgtttgaggaggagaggcctcaggatcagaaggctcgggcaagggcacttaacaaatttgctgcagtcctctcacagactgatgaaaatacaagatcttcaaacagcggtcgccttttgagctgcgtgcgtagatgataacaatgctgtaggagatttgtcttctgtctttttgctttgttgcacctggtatccgaactgtaagggatgttgttaacttcaaggtggttacgtagcttgtatcttgtgtgctagcaggtgcaattttgcgggaaaatctccaatttgagagagcntant

SEQ ID NO: 20879 - DNA, 364 bp, Zea mays
  Clone ID: MRT4577_119040C.1
atgggaatgaatcctttatgaaaggtaaaatgtataaaaaagggcttaataaaaatataaagttttaatcatttaagggtatctgttaatttataggatgacttaactaatactactacttttaaaaattcctctataaaacaaattattctatggcatattttcactcaacccttataaccctattaaatttattaatggttgaaaacccttttttatttaaattcttcacaaacttttattttcttgaattttttttataaacacctttctttttatttctaacattttactttcaaaaaaatatttttttttacatacctatattaaattttttttctactctcttaaaatttttctccta

SEQ ID NO: 20880 - DNA, 692 bp, Zea mays
  Clone ID: MRT4577_119041C.1
cttaacatattttttaaacataagttatgatgtctttaaacaccttacaaaatatgaacattaaattcaacttgtaaaactaaaatgaaaaagataagtctttttttaataagatttgtttttttggtttcttcacatataagttgaacttaaagttatatcttatctaattcctaatatattaaaataatataaaatcataatatatttcctaggttaagttgtggcatcaactactaaccagaaaacttaaactaaaaaccaattcaaatagatagagggataaaatgaactaaacaacacttatactttagaagggcatatggacatcatacatatgcaaggggagtaatttaattttttttctttataaaactaatccctgctacattttttatcccaacatggattgcataattaaaaaaacaaatcgcacacatcctagtcctacctcacgcgaggatgagcggacaccctgtcctccactggtttcgtctcacgttttgtttacttccgctgagtagtgagctatgcttcagcttgcagtgttcaagcaacaaggtctgtcgtgttatcacctaggcatgccaagggatcttgtaatgcgacaaggaccgcacctccggagccgaacttggaaacatcacgttgagcctgtgcctcaagacgtcggccttggatggtgtctcgtt

SEQ ID NO: 20881 - DNA, 441 bp, Zea mays
  unsure (1)..(441): unsure at all n locations
  Clone ID: MRT4577_119042C.1
gggcttcctgctgctggccctcatctggcggttcgacttcgcgcccgtcatggtgctcggcatcgccgtgctcaacgacggcaccatcatgaccatctccaaggaccgggtgaagccgtccccggtgcccgacgcctggcgcctccaggagatctttgccaccggcgtcgtcctcggcacctaccaagctctcgccaccgtcctcttcttctgggccgtccgcgacaccgccttcttcacgaatacgttcggggtgcaccacatcggggacagcacggaggagctgatggcggccgtgtacctccaggtgagcatcatcagccaggcgctcatcttcgtgacccgcgctcggagctggttcttcgtggagcgccctggcctgctgctggtggccgtcttcctggccgngcagctggtggcgacgctgatcgccgtgtacgc

SEQ ID NO: 20882 - DNA, 190 bp, Zea mays
  unsure (1)..(190): unsure at all n locations
  Clone ID: MRT4577_119043C.1
agcatataaataagcggaggagaagaaacttacgaggattcccctagtaacggcgaaggaacgcgggagcagcccagcttgagaatcgggcggnnctcccctcctaattgtaatctgcagaggcctccttagcgacggaccggggccctgttttttggaaagggacacctgcgagggggtgagccccgtc

SEQ ID NO: 20883 - DNA, 506 bp, Zea mays
  Clone ID: MRT4577_119044C.1
aaaaaaaaaaaaaaaaaaaaaaaaaaaaaaaaaaaaaataaaaaaaaaaaaaaaaaaaaaaaaaaaaaaaaaatttatacatataaacataacctttttcttggggcaataacccccattttgggtgactcttgggggacctccctacccttgggtgggcgggtccacctttcttcttttagggccccctttttacttgttgtttggccggctgtttcccaccctgggggggggtttaaaccttggggttttcgaaaattcgtggctttgccaaactttcccgtttggcccgctttccctttttgggggggggccgaaatggggggggggccctccctttacgccttttttaagaaaagtgggcgcgccttgtaaaagggccttccccgtctcggttgctttggccccggggggtgttacttttaccttcaccagtaccttttttctctaatattttcctttttttctgttgtttttttaccccgcttcccggtttcccccaccgg

SEQ ID NO: 20884 - DNA, 252 bp, Zea mays
  Clone ID: MRT4577_119045C.1
ggacttttgtgatcttatctcaccttctactggggagcaatcttgatgagcagctgctgagcaagatatctctgatgttgacaaacatatatggccacagcgcaaggcggaagaacttggatctttcatgacaggtctctatctaccaacaagcgatatacatggtgtgatattagaatgcacaggtcagactgcccaacttggtctatatgctgttgcaaaagcattatcccacaagggggttgttaaaaa

SEQ ID NO: 20885 - DNA, 223 bp, Zea mays
  Clone ID: MRT4577_119046C.1
atgtaaccgttttaaaagcctcatccaacaattcaggtgttacacaaaaactacattttgccttaaaaaacaactaaaacattttttgtttataaaacgggctattggcttcacagggaaattatttttcacaggccattgtttggcacctttatcttttgaacataaagcccttttccattccaccttatacaacatcctttttgcaaccctttacaaaatt

SEQ ID NO: 20886 - DNA, 347 bp, Zea mays
  unsure (1)..(347): unsure at all n locations
  Clone ID: MRT4577_119047C.1
tntaaaaaaaaaaaaaaaaaaaaaaaaaaaaaaaaaaaaaaaaaaaaaaaaaaaaaaaaaaaaaaaaaaaaaaaaaaaaaaaaaaaaaaaaaaaaaaaaaaaaaaaaaaaaaaaaaaaagggcggggccgtctggtttttcccgagtcccacgtttccctttccttgcgcttgtcatagccttttctttttttttggccggcccttaaattccattgcccgtggcctttccttctccaccgtctgggaatggccttgccctttccccttcccaattttctttgcctttgcatcccctttcccctttgctgggttgttggtataaggggcccggccccgacccccttt

SEQ ID NO: 20887 - DNA, 325 bp, Zea mays
  Clone ID: MRT4577_119048C.1
gatctaacaagcaagcggccggagcagctggtctctctctctagctacgtataacagggagcagaagcttgtgcgagtggcaaacgcgcgcgcgatggcggctcggggaagaggcagtgcaggcagtagcagcagggcgccgtctgtcgctggtaccgcgctcctgtgtgtagctgtagccgtgctcctgctggcggccaccccggccgcggtggcggggacgacgtacctcgtcggtgacgccgctgggtggacgctcaaggttgactacggccggtgggtggcgggcaagaccttccacgccggcgacatcctcgtgttcaag

SEQ ID NO: 20888 - DNA, 615 bp, Zea mays
  Clone ID: MRT4577_119049C.1
ccggccggggagccaattagagaaaatgcagctcactcagttatccagcctaagagatccgagaggcaggagtcatggtcaccgacagcgccgccgggcaggccaccatcgttgcccgagccgtgatcgatcaggaccaatgctctagggctgcctgacctgacggcgaggagctagagcgtgcggtgcaactacctccatgatgccaagaacgcgcccccaggcagaaccaagggtgcacgacctgacgcagctcgccgcatggggcgcccagatcgcatctggggggcccgcactggtgctcgtggacgagcgcatgaccacgtaggccaccgtggctgagccgcggtctcaccaacaacctgctggggtggatcctcctgcgtggcttcggcctcatctggatcctcgacaccatctacacctctgggctccacgagggctgagcgtacgctgccctctgacgatagatccacgtcctctactgacgatgatgctgatggcaacatggatgctgtcatcactgtccattcagagatgggtatgtggctcatatatccgtcctctgctgttggcactgactgcgttacctgccttggaacactggatgtcctc

SEQ ID NO: 20889 - DNA, 724 bp, Zea mays
  Clone ID: MRT4577_11904C.1
atatacaaaatatgtcttatattgttataagaaaatgtttcataatacatttgtgatcctggccatacataatttttgttattttaatttagccgtttcgctactatatttcaaccatcattattatgcagacttcgatatataccacaatttgcattgtctcatcattgcagagtacgtgtcacacctgccggtagaagttccctcgtacatcgtcagtctcaggcacgcaccaccatacacgcttgatgacattgttggcatgagagtccaacaaataaaatacaacaactcgacagcgatgaccaggaaagaacgcaaaagaaaacacgagaagccaacacaatcccacagctaatctcgcctctctagttcccttcatgcagcctcctatatatccagctgcaggccacgccacttcgctcacttgtactccaggatcatgttgttctctggggccaagccaacgcaggccctcatgatgttctccagcatcgccctctactttgccagagcgttcaccaccggtgtgccgggcggaaccagtggtgccttggtgaggtagctaaggatggtggccaccgagtggaaggagtggaacttgtcttgcataatgagagacattagatgatggtgctgaagtgctgaagcgctgaatcacctagcatgcttcgggttattcacttggtgggctcttaccgtttcctcaggttttagctggtgc

SEQ ID NO: 20890 - DNA, 593 bp, Zea mays
  unsure (1)..(593): unsure at all n locations
  Clone ID: MRT4577_119050C.1
tcgagcggccgcccgggcaggtactccatctgttccaaattaaaaaaaaaaaaaaaaaaaaaaaaaaaaaaaaaaaaaaaaaaaaaaaaaaaaaaaaaaaaaaaaaaaaaaaaaaaaaaaaaaaaaaaaaaaaaaaaaaaaaaaaaaaaaaaaaaaaaaactaagggaaaggggggggggggataaataaaatttggggcgggtggggcatccttttagaggccccaattgggcctaaatggggcaatttaaaaataaactgggccgtgttttaaaaacttttaaaggggaaaaaccctggttttaccaaatttaatcgctttgaagaacatccccttttaaaaagctggggtaaaaaaaaaaagggccccacaaattgaatttcccaaaaattgcccacctttaatggggatgggacgccccctggaggggcccataaaacccgctgggtaaggtggttccccccagggtgaccgttaaacttcccagggccctagcccccaccccttgcgtttttttcctttcttttctcggaaggtttgnagtttttccccgccaagctccaaattgggggtttcttttaaggttccttt

SEQ ID NO: 20891 - DNA, 694 bp, Zea mays
  unsure (1)..(694): unsure at all n locations
  Clone ID: MRT4577_119051C.1
tgttccttaagtttcttgaggaaccaaactctactttctcaaagcagctagctggacttcacagaagcccatcaccacctcagacaaagcgtattactgtgttgaaaccaactaaatttgttgagagctattgcagaagggaaatcagaacacacagaataaatgaaggaaatgaacacgtgatgcggaggacacactggagatctcattcagcagaagataccttatcccagccaactaggatagtggtcctgaagcctagtcctggcaagcctagcagaacaatggccaggctaacagccgaagcagccccagctcatttcactgagcagataggtttttatggaggtttagaaggtcacaattacccatcagatggtctacatcggcgggatgagtctttattatcttctgtatactcaaatggctatggtggagatgaaagttctttcggcagatcagaagttgactacattgatgaagaagatagtaacctaagtgactcggagatcgttagcccagtactgccgctgcattcatgggatcacttcaaaagatacagcagtcctcactcaggttcaacttttagcagaacatctcggtcgcccgagtcatctgtgatcagggaagctaanaaacggctttcagaaagatgggcgtcagtagcatattatgagaccaaccaagaaaagct

SEQ ID NO: 20892 - DNA, 518 bp, Zea mays
  Clone ID: MRT4577_119052C.1
aacggccgccctgggtgtttttttttagtttaaataataattatatttatatatgatcaaataacttagcttaaatcattcgagaatgcaagctaaattgccattccgattgattctatacacagtttagattataaaagtactgacttaaatcaagtggagtgggggggggtggaagaaagcaaagccagcgttgatggggaagttgaagaagatcatgaatccaatctcgtaaccccagaacaaaaccatcaagttccacaaagccaacaaaccgaaaacgccgccaacgacgggggtaacctcctttttgggcactttaggccccttttcagagatgtagttcaaatagccccggggggcgaaaacactggccaaagcgtgggaaaaatgaattgtggggcccgcgggggaaaaaccccccccccaaaaaggccaaaaccaacccgggccccgggcaccccaaaggcccaatgccaacccttttccccgggggccccggggcaagggattttttg

SEQ ID NO: 20893 - DNA, 646 bp, Zea mays
  unsure (1)..(646): unsure at all n locations
  Clone ID: MRT4577_119053C.1
cgagcccaaactcaactaactcgaccggagcaattggtatctgagttgttcttatgatactgcaggagctgatagttaccatttactcgtatttgttttgaagcaattagcaattggtagtgtaagaaaggtgaaaatcgattggattctgtgagaaacatctaggcttcattaaatcctgctgcttgttagggtttctggaaatcaagttttgtcaaacgctggtgattgtaacatgtccagatgtgcctcagctgttgcttcggtggttagaataaatcctctattgttcttgttgcataacatcataattccccannnttgtgcaggaggcaaagcgtttggctcagtcccatggcaatttgcttaatggagatgtcaaagtgaaagctgagcattgactgaagggtacgactacagagggcaagtttactatctctgtttagtttggggatggctttgttaacgtgaaacgtgcatatctttctagcgcactttcccttcatgtgattgatccgtgaatctgtacatactatcgtagcatgtgtggcccaatgtattcaacttaactaataacttcaaaaagatatccggagccaaaaaaaaaaaaaaaaaaaaaaaaaaaaaaaagggcggccctcgcgat

SEQ ID NO: 20894 - DNA, 1471 bp, Zea mays
  Clone ID: MRT4577_119054C.1
acgcacgtacgggcagtcgcccaggccccagctagctagggcaccgcgcacgcggcacgccccggcccccgctctatttatgccgctagctagcgacaccgaccaggtcactggggggggtcattcccttgtcactagctagatcgactgactggagaggagctatcctcgtctactacctctgggcgagctgcgtgtcctgtcgtccttctcgctcctgtggtcgccgcgcgcggcgctgcgatggggcggtcgccgtgctgcgagaaggaggccgggctgaagaaggggccgtggacggccgaggaggaccagaaactgctggccttcatcgagcagcacggacacggctgctggcgctcgctgccggccaaggccggtctgcggcggtgcggcaagagctgccggctccggtggaccaactacctgcggccggacatcaagcggggcaagttcacgctgcaggaggagcagaccatcatccagctccacgctctcctcggcaacaggtggtcgtcgatcgcgacgcacctgcccaagcgcacggacaacgagatcaagaactactggaacacgcacctcaagaagcggctcgccaagatgggcatcgaccccgtcacgcacaaggcccgcgccgacgtcgtggggggctcctctggcgccggcaacaactctggagcgcgctacagggcagccgcgcacctcagccacacggcgcagtgggagagcgcgcgcctcgaggccgaggcgcgtctggcgcgcgaggccaggctgcgtgcccttgcctcgccgccgccgccgccagggccagggccgggacccgcgtttagcgggctcgagtcgccgacatcgactctgagcttctccgagagcgtgctgttcgccagtgcggcgcacgacacccacgccctgacgtcacgcgcttacgcagaggcgttcggggcggagcagcaacagcgcttcgctgacactgccgccgccgccgacgccgcgccaggcttccttgcaggcgtccttctcggctgctccgtcgccggcgcggagaaggggttcgcggcctcgtcgacggacgccagcgtctgtgagcagcagcaggaggaagaggacaagggctactggagcagcatattgaacatggtcaactcctccatgtcgtcgtccacgtcctcgctgacttccgatgctgtcacggaccccgccgccgcgtacttgccgccggcgacggcggcggccgagttctgagtgattgtcgtgcaataataacgaacctgtgctaatgttaccttgtcatgtgtgttgcttactagtaagtgcgttttttggtgctagttagtttatttacgtgctaatggggtgtcgtccacgtgtgcttgtgctttatgatgtgcaataaacatgtacgtactgattttgtttgcgcgggcgtgtcgtcgatcacctatgtggcccccataacgcccaacactataac

SEQ ID NO: 20895 - DNA, 448 bp, Zea mays
  Clone ID: MRT4577_119055C.1
atcagctggagaggagaaaaaacgccagggcgggaaaggcccctgccggggcccacaccccacacatgggccaccaaacacccgtccgaaggaccaggcgcccccaccgtcaggtgctgcccatgatctacatagacgggcaggcaaacccccggggcttggttcgccccccatgcatgctccttttgggccgggggagcagcccccggccgcaagtagatcggtcgagcagcagcccgatcagccgaagaaggggggcttgttcttcccctcgccggggggggcggactcctcctcctccccggggtcctccggcgcgtctttggcctcctttttggcgtggggctcctggaacgcgaagccccccgtgcccagggcggtcaccggcggcacgcccttctgggacttgtgccgctgcgcgtgctccgggtcctttttcgccccgggc

SEQ ID NO: 20896 - DNA, 2804 bp, Zea mays
  Clone ID: MRT4577_119056C.1
accggccggacctgcccggcgtgcccgaacagcgcctcaccgcgccgcacgcctgcgtcggtcgccgaccccagtcaccggtccacgcccgcctccccctttctcctccgccctttcttgtgaccgccgccgcgggccctagcccgccgttccctctccggcgccccgctcccgcacccgcaccggatcagtccgggccgcgtggtcgcccccacctaccgcctcgggtccactcgctcgcggttgcgtgtcccgcggggtggcccctcgggcctcggcagctccggtttcgaatggggctctcgtcggccgccactggcgacggggtgcagctctgcgtgttcgacctccagagggggcagcaggagggccaggagctcgacaagatcctctacttctaccccgccgactgccccatcctgctccagctctctgtcatcggcctctgcgaggggatcgtcactttcactaggttgccttcgctctcactcatttttattgtgcagttggtcgcaatttgaaggtcttgatctgctcgtgctcctcgccaacaacagcagcagcatcttctgcgtttaggaaaagaattgcacccagctttctagagggctacaacagcatctaagcttatagcatcacttcagtatttcaaatccgtagattgctcgagtatgcaagtttgggtgaatcgattttgttgcatgtgatccagcttaggttttttcaagcaagaacaattctggacttgattagtttttttggcagcgggccaatggcgttggttcctatcttctcctgtttggaaagaagatacaatttccaacctaccgtgacagcctaaaggagaggggaacagtccaaatgcttacggtatcacgagaagtggcacttgacgttcagtcactcgccacagtacttggatcatgtcttggaaatgttacctgccaatcacttgtactatttgaagacctcttggtgtcaacgacactgcccccagatgtttctttatacctttatacatatgctgttctgagggttactccgcgcgcttcatattccaatgcatatttcttggtactatttgctgttagtaattgctataacatctagttcatcaaatggaacaactgcaggagaaagtcctctcctacttgaagaaattgtcaaagggaaaggatggctttgttgctgctgatttcacagctacagaagctcgttaccaagccgaaacggatatttggatggttctggttgtggaaaaaaacaaggaaaatgaattgacttggcgttgtggtgcactacaagggattcttaaagaggctcattctctctttgcaatgtttcatggaccaatccgaactttgcttcacaaacaacccagtgcagagcttgctcgtggtcacctccgcacatttcttacagattatttgagcgattttaatgttggaaagaagttacaatttccaacctaccgtgacagcctaaaggagaggggaacagtccaaatgcttacggtatcacgagaagtggcacttgacgttcagtcactcgccacagtacttggatcatgtcttggaaatgttacctgccaatcacttgtactatttgaagacctcttggtgtcaacgacactgcccccggatgatactttaaacctatatacatatgctgttctgaggttaactccgcgtgctttatattccaatgcaagttcttggtcctatttgcggaaaggaacttctgttagtgctggccaaacatcaagttcatcaaatggaacaactgcaggagaaaggcctctcctacgtgagaaattgtcaaagggaaaggatggctttgttgctgctgatttcacagctacagaagctcgttgtgctgtaccctcgactccaatactttggttccagcaggcagatgagtgcatgcacctatgcatttatcagcacaaaagtctcactatcttactgctggttcctgctccctcagtgataaatggagaagagggcattactcatgtgaagaaggcgatccttgaaaatgcatcacagaagattgtcactgttgagcagaaattgacacggggatggggaggagaaaatgcgtatcatgttagtggatatcgttatttgcttgttgatccggagagaagagtatcaagagcctccccacctgggaaagtcaccaccctagcaaaggattctctacttgccctcaacatgctaagacaagaagtagatctagagaagtcaagatacaagagaggcgacccttgtcatgataaggatttcgaagtatgtatcagaacaaaaaacaatgcgtgggttattgctaaaatcagtcaaggaagggagctttacatggctctagagaagggtggtgaaacgcttctatatgcatccacagctgtagagaaattcagcaacaggtactgtgagggagcattctctacagattagaagcaccagagggagatcttagcttttccatacattacctattatgtacatcctgtttttttcccagctgtatcgttgccccctattgttgagagactcggaccactctttgcgaagggaataaggagttcgtatcagttgtacagctgctctgctgtcgtgtgctatctgcaaaagaatagcctagtctgggaataacgcagagcgggatagagtttgtttgttcacttatgcccttccttaacgcagagcattgtgcgtgttttcattttgctgtaacagccggcgatttacctgcagactgggaaagtaacttagcgtttaatttggtattctgaaaaaaaaaaa

SEQ ID NO: 20897 - DNA, 928 bp, Zea mays
  unsure (1)..(928): unsure at all n locations
  Clone ID: MRT4577_119057C.1
ccggccgggccgggaccaagcccaaaagaaaattctgtacggaactggacccctagaacaaccaccaaactcgcctccgtccctccctccccgcccacactccaccacccgcgctccgccgcccgccccgccgccgcctcctacttcgcctcggccgcctcggatccggaacgagcgccggccatggcgctcgccttcgatgagttcgggcgccccttcatcatcctgcgggagcaggagaagaagacgcgcctgcgggggctcgacgcgcagaaggccaacatcggcgcgggcaaggccgtcgcgcggatcctccgcacctcgctcggccccaagggcgcggacaagatgctccagtcccccgacggcgacgtcatcatcacaaatgatggggcgaccatcctggagcagatggatgttgacaaccagatcgcaaagctgatggtggagctgtcccgtagtcaagactacgaaatcggggatggtaccaccggggtggtagtcatggcaggggctcttctcgagcaggctgagaagcttctggagcgtggtattcaccccattagggtggctgaaggctatgagatggcgtcaaaggtagcttttgaccacctagaacatatctccgaaaagtttgagttcagtgcagacaacattgaacccctggtccagacctgcatgacaactctatcctcaaagattgcagatttggagaggaaggatgttaacttggatctaattaaaatagaaggcaaggttggtgggaagctggaggacactgaacttgtatatggaattattgntgacaaagatatgagccatccacanatgccaaagagaattgaggatgctaagattgccatcttgacatgcccatttgagcctncgaagccaaagacaaagcataaggttgacattgacactgtcg

SEQ ID NO: 20898 - DNA, 2245 bp, Zea mays
  Clone ID: MRT4577_119058C.1
cattgggtacctcgagggccggccgggccgggaaaataaaaaaaaaaaaaaaaaaaaaaaaaaaaaaaaaaaaaaaaaaaagaacaaccattgcactcctctccctccccccggcccacactccaccacccgcgccccgccgcccgccccgccgccgcctcctacttcgcctcggccgcctcggatccggaccgagcgccggccatggcgctcgccttcgacgagttcgggcgccccttcatcatcctgcgggagcaggagaagaagacgcgcctgcgggggctcgacgcgcagaaggccaacatcggcgcgggcaaggccgtcgcgcggatcctccgcacctcgctcggccccaagggcgcggacaagatgctccagtcccccgacggcgacgtcatcatcacaaatgatggggcgaccatcctggagcagatggatgttgacaaccagatcgcaaagctgatggtggagctgtcccgtagtcaagactacgaaatcggggatggtaccaccggtgtggtagtcatggcaggggcgctccttgagcaggccgagaagcttttagaacgtggtattcaccccattagggttgctgaaggctatgagatggcgtcaaaggtagcttttgatcacctagaacgaatctccgaaaagtttgagttcagtgcagacaacattgagcccctggttcagacatgcatgacaactctatcctcaaagattgttaaccgttgcaagcgggcattggcagagattgctgtcaaagcagtacttgcggttgcagatttggagaggaaggatgttaacttggatttaattaaagtagaaggcaaggttggtgggaagctggaggacaccgagcttgtatatggaattattgttgacaaagatatgagccatccacaaatgccaaagagaattgaggatgctaagattgccatcctgacatgcccatttgagccaccgaagcctaagaccaagcataaggttgacattgatactgtcgagaaattccagacactgcgtgagcaagagcagaaatacttcgatgaaatggttcagaagtgcaaagatgctggtgcaaccctggttatttgtcagtggggttttgatggtgaagccaatcatttgttgatgcatagaaagctgccagctgtcagatgggttggtggtgttgaattggaattgattgccattgcaacaggaggacgaattgttccgagattccaagagttgagtcctgaaaagcttgggaaggctggattagtcagagagaaatcattcggaacaacaaaggacaggatgctttacattgagcagtgtgccaattccagagctgtaactatcttcattcgtggtggaaacaaaatgatgattgaggagaccaagcgcagtcttcatgatgctctttgtgtggcaaggaatctgatccggaacaactcaatcgtgtacggcggtggctcagcagagatatcttgctcaattgctgtcgaaactgctgcagatcggcacccgtggagttgagcagtacgctatcaggtcattcgctgatgcattagatgctgttccactagccttggctgaaaacagtggtttgtcgccaattgataccttgaccgcggtaaaagctcagcaagttaaggagagcaacccccactgcggcatagactgcaacgatgtaggcaccaacgacatgaaagagcagaacgtctttgagaccctgattggcaagcagcagcagatcctgctggccactcaggtggtgaagatgatcctgaagatcgacgacgtcatctcaccgtccgagtactgatgaagcctgaaggaaggaggaaaaaaaaagagaggaacaggtggctatgctggatgagagtttagtaggcagcattgctgatgtgttgattggtttactccttgttcaggcgtgctccttgtatcttatgagctgcctagcacctttttgtgtgagggattgtttgtattgcacgatattgcatcgaggaatacgtatggacgtgttgtcaagaccctaggcaattctcttcagggctgtgagatggttggggtactgataccttttttttgtattgttttcatttcaccacttagctgaagctgtcctttttgttttatgaatgctgcaatagtttggcgccctcactctgtttggtctgaacaaggtaaccttttgtatttcccctcttgacgcgctaagtttctcccgaaaaaaaaaaaaaaaaaaggg

SEQ ID NO: 20899 - DNA, 371 bp, Zea mays
  Clone ID: MRT4577_119059C.1
ggccgcttttttttttttttttttttttttttttttttttttttttttttttttttttttttttttttttttttttttttttttttttttgggggggaccccatcccttggttattcaggggggaaaaacaagaacagctttggatttattcaccccgggcagggatttctttgcaaacatataagaggggcccattttggcccccaaaaaaaattctggaggtgggggtctactttgggggccccaaatcaaacccaaattgggcattttttgggggccctgcccaaggggaacagttgtctgaaaaaatttttttttttgggcccagttcgttaacccaaggacttttcaaccaatttaatttgccttt

SEQ ID NO: 20900 - DNA, 398 bp, Zea mays
  Clone ID: MRT4577_11905C.1
ggccagccggcctatttatataatcaatggatgagaaataaagtcggcaagaattagaagggagaaaccctcctcttgctcgaccgtgggcagaagcccccggccgacgttcttgcccgtcgaatcgtcgatacccctctccaatccctcaccgatctagcgaccataacactaatacttgtttattgatgatttgaaatgtgagctagaacgtgctagaacctgatgggattgtatgttttacttcagtctgcacttactgttaacaatttcgttcatagaataccaatggccctggttttgacttttgagctatacatgtaatacatgatttaggatgttagcgtattctcttgctggaatgcatatgttaaagagtatagatgtgtatgagcata

SEQ ID NO: 20901 - DNA, 1057 bp, Zea mays
  Clone ID: MRT4577_119060C.1
aaacttaattaaatttataaaaaagacaccgaattgtttgcaggttcaagcagcctcgcacggtcacacacacactttgcacgcttgtctcacgtgttgaggagccaaccggctgtccggccatgtcgtcgccggctgcaggcacggcagcggagccgcacgtcgtggaggactgcctcggcttcgtgcagctgctgagcgacggcacagtgaggcggtccacggactactccatgctccgtcccatcggccgcgtgccgtcggacacggacctgcccgtgcagtggaaggacgtggtgtacgaggacacgcgcggcctccggctccgcatgtaccggcccactggcgccgcagccggggagacgaagctgccggtgctggtgtacttccacggcggcggcttctgcctgctcagcttcgaggtggccagcttccatgccggcgcgctccggctcgccgccgagctcccggcgctcgtgctgtccgcggactaccgcctggcgccggagcaccgcctccccgccgcgctggacgacgccgagtccgccttcgcctggctccgcgcccaggccgcgccgccctccgccgtgggcgcggagtcggacccgtggctcgccgagtcggccgacttcgcccgcgtgttcgtcgccggcgactcggccggcggcaacatctcgcaccacgtcgccgtgcgtcacgctagctccggtggagggctctccctagccccgctccgactcgccgggtgcgtcatgctctggccatacttcggcggcgaggagccgatgccgtccgaggcggcgttcccggccgaccagcccatggacacggcgctgttcgaccagatgtggcgcctggcgctgccggcgggcgcgaccaaggaccacccgttcgcgaacccgttcgcggcggggagcgtcccgctccgcgacctcggcgcggccttcccgccgctgctcgtcgtggaccccgaccaggacccgctgcacgaccgcgtggtcgactacgtcgccaggctcaaggcggccgggaaggccgtcgagctcgtcgtgttcgc

SEQ ID NO: 20902 - DNA, 446 bp, Zea mays
  Clone ID: MRT4577_119061C.1
gtttgatatggttacctacgactgagctatggtgtaatacaagtaaccacacatccttaaagtgtaaagcattcaaagtcttatcatgcggtggaacgttatatagacttgtcgccggtactgggtccggaccataagtcaaaggaactggatttagaccaggagtgcctaaattcgtggacatgctaaagactatgtgtctaacgcttagactaagcataagctctacggtgatatgaacgggtcctttagagtaatcgaagcatgagacgaccactgctcaaggagattccaatggaggactatggggaagatgatcatgctatacaaatggagagttggtagcgcaagctctagaaaaaaaggcaacacggtcgttgctgagatcaaggggcaatggtgtacattgctgggtagtatgactacatggaaagacaattatgatc

SEQ ID NO: 20903 - DNA, 239 bp, Zea mays
  Clone ID: MRT4577_119062C.1
ggccagctctggtatcagggaaatctttttcttgcccttcaaccctgctgatacgaggactgctttgacgtacattgataccgatggcaactggcactgcttcagcaagggctctcctgaacagatctttgacctgtgccactgcaaggatgatctgaggcccatggtgcactctaccatgcgctagtataccaagcctggtagtccttcgcttactgctgccagaccggaattaccta

SEQ ID NO: 20904 - DNA, 426 bp, Zea mays
  Clone ID: MRT4577_119063C.1
caagatctccgaagatgctggctgagtcaatggcactaagaaaagatggtgggaacatcccctgctggacagtcatactcggaagaaatccgtccaggttgtgcgtgtgttgctgtgccaagagtactcttgcgagaagatgtaacagaaccgaaaactggcatcaagttccccactctacttaaagacaattccaatctgactacagaggtacactgcccccagttgacacatgcatctgatggttaaattggcaggtccttgttggaatgggtttcagaagcatgcgaataatgagggttaaagatctgaatctttatgcctttggattatatatacaacctgattctgtttgcaaaaagctgggtccaaagtatgcttgtattccagatgctgagttgaatgatcacccagatttctatgaag

SEQ ID NO: 20905 - DNA, 522 bp, Zea mays
  Clone ID: MRT4577_119064C.1
gcagcggcccatgcatggaatttattgtgtgctactgtttataaaatactcgaatagtcctgcacatgcataatatttccaacttagacaggagaccgtacagggtgcactttctggcaaacaaaacaatagatggttccgctgcctggagctctgagttgtattccagggcatgagggaagcaggccaccaaagtaaagggaaataccaaactacagtggcaatcaatacaggtcaataattgtgaaaaattagcacatggttccatttagtttaaccaagcagttctgtaactatcaaaagaaaatgttcaacatgcaatcttgacttttatgcttccactaacatctgaatgaatgaacagaaccattgcttctatgctgcattgcttaatcaaaaacacttccagaacatttttaaatttcctttgcatcaaaacataaaaatgatagaaagccagcagcaaatcaccctggtggctatttaagcaacttgagtactcacaataaactaaaatttctc

SEQ ID NO: 20906 - DNA, 266 bp, Zea mays
  Clone ID: MRT4577_119065C.1
agccgcccacgcatctcgattcgagcagcattatctatcagcagcagaagcggctctcagagctggtgactagagcaaccttcgttccgttcctcgatcgccatggacaaggtgctggccttctcgatcctgagcgcgtcgccggccgacctctgcttcacgggcgccttcttctgcggtagctgggcgcggctgtcgtggctgatgggcgcggactaccagcgtgctcctcggcgttagcatcagtatcggctttgaggaggatg

SEQ ID NO: 20907 - DNA, 507 bp, Zea mays
  Clone ID: MRT4577_119066C.1
gccggccgtttaataaaaaagggcgccgccgcttccgcttccgctacgacgctcgcctcacgaaaaacggcgctacctccaccatggccccgagtaaggagaaagatctgacgtcatcggcgaatccgatccgtgcgcaggcggggaacataagacgaagaatagggccaaggtttacgctcccatgaaggaccccgacgatgagcactaccatcagcgcgcctacgaggaccaggtctctgaggggccctgttgccatatcaacgcatccatgctatctgagcgccgccatcctaccggatactgtgaacgcacaaggtggtgaaggatatgaagggaaaccccttcatagggatgctgtatacgccttccacctccagacctactccaggggtggcaactcttgaggctccgggtcgaccgtagcgcacggaacccactgttgcgagttgatgaggctattatatcgagcgtatacctcccgggggtccccttctctttctgggg

SEQ ID NO: 20908 - DNA, 182 bp, Zea mays
  Clone ID: MRT4577_119067C.1
caacaaacaaaagatataatacacatttaacactataaagaaaaacaaagaaagatgggcaaaaagggcgtgtctatctcaaggaatcaagcttacttacgattacactcgaccaaatagattttatatatttacaccaaatttgaaatcactgacctaattttaataatgctatgcaagga

SEQ ID NO: 20909 - DNA, 259 bp, Zea mays
  Clone ID: MRT4577_119068C.1
tgtttatattctgaaaaaggagcacaatttcatttgttgaaaaatgaacccatccttagacaggattaataaaagatcggccgggacgaggatgaacatcaaaggaaatactttgcccctacgcatagtacaaagtacactacaaaacattgtggaacaattgcgttgtgcttataaacttctcatcttaatttctgtatcggtagacggtagtattttcccaatttagtgatggtgtatttgaacatatcggagacct

SEQ ID NO: 20910 - DNA, 284 bp, Zea mays
  Clone ID: MRT4577_119069C.1
gcggaagagcacgagacgcccctatgcatactttactctgacgattaaaagttgctggaggggtcttttctctctcctctacgagccctaaacatggatgatgcgcaagttattgagtcaaagcatggaaccaacaaactagcttctgcatttactgctcatgacgaagctgtgcaagacagggatcaccaattattgacataagccgtgcaagtagcataccgaggcttctattgccgatactgacgtccatttggagcacctgacgttcgcaatgataaagt

SEQ ID NO: 20911 - DNA, 629 bp, Zea mays
  unsure (1)..(629): unsure at all n locations
  Clone ID: MRT4577_11906C.1
tgggaccctcgaggccggccgggagagatatgaaaaggcgaatccaaggtaaccgccaccaccaaatcagctaaccgcacaatcccgccagtgatggcgtccacggacggccacacgcagacaggctcgctcattccgtcaccgnaggctgcctgtcctcatttctccacccgaccggcgagcgcagacaacgccatcttcggcatcactttcagccgaccttctccgcctcagaggaggcgctggtggagcgcgcggcgcgtcgagaggacgagctcgcacacccggccgcgggtatgaagacagcacgcaaaggggtacatgatggaggaccatgtgctggtacaagagccacccctcgttccgggagagctccgagaacacggacctcatcgacaagatcacactgccaccgcggcgtggcatcccgaccgacggcgtcatcctgatctcggagatactcacgcccctgacggtcatcgtagtgacgtgcgagatctcggactccaaggtgcccgtagaacaatcgaccaaacggcccagagattaggcgatgacaactcggcccgcatcgaacttgatatgctccagattcgtcgcatagtcactaaagatatctggtgaataga

SEQ ID NO: 20912 - DNA, 904 bp, Zea mays
  unsure (1)..(904): unsure at all n locations
  Clone ID: MRT4577_119070C.1
ccttgcctctgctgccgcnncncngccactgaaaccctagcgttgatccagttccgtcgatctccgttgctgtcggcgaccactcgctgcacccgccgacgccgtcagatctggatgccccgacctcgctaccacatctccccttctgacctggccgagtgggctagggcaagctcccaagtcaatgtggcggggatggcttcgatgtcggtgacgacagtggtggaggggctaaggcggcagtggtagaggggctaaggcggcgatgagctcaccggctccgacctgtctgtgctgccaagttcctccaccgccacctccacactacggaccctgccactaccgtccctagagatttcaccttccgtgaccgcttcctcctccgtggcccaactgacgcactcattgtgcgcctgtgccagaccgccttgtcctcaccaggtcgttcgagttcgctcccctcctcctagatcctgatcctggtttactatcctcctcctgtctcgctcaagtagtgccttgggctcttgaatatggtattcagctcgttgccctcaactacaggaagctcaaccgacagcaacgctcttacaccacagtgaatgttcctctggtttccctgttttatttcttgggaagttcttccttctgtttcttggtttgatgtcacaatcaggttccctcattaattcaccgaatagaaatgggtttcagttatttcccggagcttcatcacaaggcggacgacaaggtctgtctctctaatgtatacagtgaggtcagagaattgatataagacaaaaggcagacgaggtgagtccttaatgcacaaagttttttccctgatggtgaaaacaattaagtttgaagtttctgtaaatataattcgggtgatatgtagcgg

SEQ ID NO: 20913 - DNA, 550 bp, Zea mays
  Clone ID: MRT4577_119071C.1
gaaaaagttcttctagaattcgatagttaacaccacgagcaccttcaatcccttccatggtaaatgttttaccagtaccagtttgcccataagcaaagatgcaaacattaaatccgtccaacacagaaattgcatatggcgcagttttctcaaaaaccttttcttggtcttcttcagggctgaagacagaatcaaatttgtatatttttctggacgatacatgacccctaacaatgagctctccatcttttgcagagtcaaaatcaatggctgacgaagctccttctgctatttcttctgcattaagtggtcggcaccgacaaaaaactcttatattgccctttagctctataagcttgttgtataagtctttccgctcctttgcctcctcattgaacttctctttgaggtctttaaactcacattccagacttacatatcgactcacatattgttgaattgctgcaaacatttgtgaagcatctaacacacattttctgtactctactgattcttgtcttagattctggtgctctgactttaataccat

SEQ ID NO: 20914 - DNA, 427 bp, Zea mays
  Clone ID: MRT4577_119072C.1
aaaaaaaaaaaaaaaataaacaaaaaaaataaaatggcagccgacgtactaaatagaccgaggaagaacacataaattgggcagaatgaaagagtctctagagttactttacttgcattgacgatggcctacattgtacatacgggttctctattgtaattaccctgcggggatatttataatgctggtaagggaatacactttgcagatctggtgtgataaccatgtctttactatcacgtactgctggatcaacttgctgctaatactgcgataatgcatccatctgtaaaaagtactaaaagtccaagagggaacggcctatacgatcctcgggtgaattatgctctgcaggttggtatatgactacaaatgctacagcttcactttgtaattaacaacgttctctactatactcctcaaactc

SEQ ID NO: 20915 - DNA, 136 bp, Zea mays
  Clone ID: MRT4577_119073C.1
ctgtaacagggtgaagttatatttcaggcaatcatgatagtaaaggcaactgcgaacaacagatgaaccacaggcatgaagaaaaactaagtcctccgacagctacggaacacacactgaaccacagggagggcca

SEQ ID NO: 20916 - DNA, 230 bp, Zea mays
  Clone ID: MRT4577_119074C.1
ggctggggctgcgtctcaggtcctgactgtgatgacgcaagctcccaggactcttctcttcgcgtgagctagctagagcggcatcgcgaggaagaaggatgtcgcgctgcggaagcaactgcgtatgcggcagcggatgcaagtgcggcagcggctgcggcaggtgcaagatgtacccggacatggttgatcaggtgaccaccacgaccaccaccgagactctcatcatg

SEQ ID NO: 20917 - DNA, 403 bp, Zea mays
  Clone ID: MRT4577_119075C.1
atattttttttttttcgtttcagcattactataccttctagaaatatgcgacgccattggtatagatttgcacactatacacacatttcttgtagcaaaccggcgacttattcctttgctttacatatggggcactgcactgtactattactggcgaaaccaagacgagaaaaatctttgtttatcgcgggataatgcgattacgcacacgatcctgttttgagtccaacccacccaatgtcacactcccataaatcgtgagaaaccgtccagtgggggttgaccttaacataaagcgcctacgggcgctaacaaactggaaggacatttgtgcacactaaaactttcatttccccacccaatgtgcgacaaacaaatgagacctcagagctcggtataattc

SEQ ID NO: 20918 - DNA, 148 bp, Zea mays
  unsure (1)..(148): unsure at all n locations
  Clone ID: MRT4577_119076C.1
ctgtggtctgtctcccgctaccccattcnnngccctactannctgattcanntgatgatttggnngagaatctcctctnnatccatctnnctctctnnatctatatanntgtaatnnaatgcagnnntaagaacgaccacccacatta

SEQ ID NO: 20919 - DNA, 324 bp, Zea mays
  Clone ID: MRT4577_119077C.1
tggagcagtggtaacaacgcagagtacttttttttttttttttttttttttttttttgggttttttttttttttttttttttttttttttttttttttttttgttcccccgggcaaatgggcccacattaataagggtttaacacccaaaataggggcaaaaccattacaaacccgaaggagacaccggcggtttttttttttatgggacgaacccactataaaataaaacggccggggcggaaaaaaacaggccgggagcaaaaagctcggcgtaattctttcctagatcggctaacggggacggagggcagcacacaaaggg

SEQ ID NO: 20920 - DNA, 647 bp, Zea mays
  Clone ID: MRT4577_119078C.1
ccggccgggggcgctgcctcttatcccgccggccgccgctgcctcacgttagctcctcccccatcgtatccggacctccgcgccgcccccacgcctccctgacttggtggatctgtccaccattcaccggaaacagttggtcgctgcctaggtacccacctaccccctaggcgaggtggtaccccgtcgcccagcgcataagcgcgcccaggcgagcacggaatagctccttttcgaatacactcgggcgaagcttagatctgatctcaacgaacctgcagcttgctgcagccactcctcgccggcgatggatttcatgaaggttttcgatcagactgtgcgtgagataaagagggaggtcaatctgaaggtactcaaggtccccgagatcgagcagaaggtcggatctcgcttggctcagatcttagcactatctctctgtaaaaaaatccccctttatgtgatggagtcgtagttctttgattggttcatgtggtgggtgagagagcaatcatttcacgatatcctgtagtttggatgtattttctgtatgacttaattattttatttctacagtaaaaatggaaacgagtttacattgccaaattatgatattatcaattcagtaaaatttatgttgaattttg

SEQ ID NO: 20921 - DNA, 389 bp, Zea mays
  Clone ID: MRT4577_119079C.1
gacacggcctacttactgctctatgtggatgacattgtactcactgcctcctctgctggatttctcaagtacatcattgaagctctccaacgtgaatttgccatgatggacatgggtcagctacatcactttctgggaatttctgtgacacactctgcagatggcctgttcctttctcagcggcagtacagtcaggatattttggagcgcaccgggatgagtgcgtgcaagccgtgcagcacgcctgttgatctacactccaaactatctgctgatggaccacatgttgctgacgctacacagtatcgcaacctaactggcgccctgcagtatctgaccttcacccaaccagacatcgcttttgcagttcagcaaatatgcctctacat

SEQ ID NO: 20922 - DNA, 682 bp, Zea mays
  Clone ID: MRT4577_11907C.1
ctctcctcatatctcttcctaccctatctcttctctatgcgctcttttcttctatctgcgccgcaagcgcttgctagcgatctgatgtctcgtcctcgtgtcctggcaacgtggtctcgacatggcctcagagatcgagactctctgcttccagcgggagatcatcctcctggtatcgctcatcagcaacaccctctctactcgcatgaaggagatcttactatatcagtccgtttcaaactcctccgatgtgttggagaagatcaggtccgagagattgacggactggaccaagctgtatggccagccgcagctgttcatcgcatcgtactttattatgcccacaatactctgacgatcagtgacagtggaattggtatgaccaagtaagaccttgcgaacaaccttggtaccattgcacgatctgtccataacagtctctgcaggcaatgactgctgggtgacgaagatgcacatgcacatggtccgccatgagcaccaccactacgcttattacctcggtgatgtcagcgatgacgcgatgaagaagaacgacgaggacgatcattgagtaccgtcagatcggtgcgtcgtcgtacttcatagtaatatgtgattcccgagataacaatcgatgctgatcaatcaagaggattgatcaccgctaggatgatcagttata

SEQ ID NO: 20923 - DNA, 796 bp, Zea mays
  Clone ID: MRT4577_119080C.1
gagtaaagcctgccgctcgcccgcgctctggacgtcgcctcctcccccatcggctgtcgccgcccccgccggcgttacctccttacccgccgccgcccccacgcgtccttgccttggcggatctgcctgcctccaccgcctggcgctgccccttatcccgcctgccgcctgccgccgctgcctcacgttagctcctcccccatcgtctccggatctccgcgccgcccccacgcctccctgacttggtggatctgtccaccattcaccggaaacagttggtcgccgcctaggtacccacctaccccctaggcgaggcggtaccccgtcgcccagcgcataagtgcccagccactcctcgccggcgatggatttcatgaaggttttcgatcagactgtgcgtgagataaagagggaggtcaatctgaaggtactcaaggtccccgagatcgagcagaaggtacttgatgcaacaagtgatgaaccgtggggcccccatggaagtgctctttcagaacttgcacacgctaccaagaagttcgctgagtgccagatggtaatgaatgtcctatggactaggttgtctgagagaggcgcgaattggcgtcatgtgtataaggcattaactattatcgagtactttatagccaatggttctgagagggcagttgatgacattcttgatcatcattctaagatctcggttctttcgagttttgagtatgttgagcctaatggtaaagacgctggaataaatggtgaggaaaaagtagaaaccattgggggcatcataaatgac

SEQ ID NO: 20924 - DNA, 728 bp, Zea mays
  Clone ID: MRT4577_119081C.1
gcagctcccaagatcgacgcatctgatttcggtgcatttgtatctagcaccgaggaagcagccaaggaccctctcgtctttcttcgggtagcaaccttggaaggacaggccaagcacccgcggcagcctccaaggctaacgcaaagaaagacaattttcaggtcaagtccggcatatgggcagactcgctgagccggggattgattgatctgaacataactgcaccgaagaaggtgaacctagctgatattggcatcgtcggtggccttggcgatgggtccgatgagaaggcactgccctcttggaccatgggcgccggatccggcctaggaatgtctggtattccaccgtcaacacaacaagctggtggcatcgagagcttggccaactacaacaagcatcatttcggcttcaacatgcaactacacatcacacccccttgtgttccagctcgatgataggtggtaggtatgttggccatgcagtttgtgtaaattctgtggcctgccttctctacttcatacagtactctacgcagcgatttgcagtgcttgagtttatattcaataataagagaacctatgccctttatgtctcaaaaaaaaaaaaaaaaaaaaaaaaaaaaaaaaaaaaaaaaaaaaaaaaaaaaaaaaaaaaaaaaaaaaaaaaaaaaaaaaaaaaaaaaaatatagggacacacaaaatgcaagtcactggcacgagctcca

SEQ ID NO: 20925 - DNA, 377 bp, Zea mays
  Clone ID: MRT4577_119082C.1
aaaaaaaaaacaaaaagctacatcaaactaattttttgatctatgggggccggttaccctgcgctcttgttcctttatgggggtgttatgtgtgctgcgtgaaattgtcatgccattaccagtccccagagatacatggccgtcagcttacaatgccaaccctgatccgactgggaagtaaactagctaacattaggtgcgctaaatgcgcggtctactttccattatttatttcggcctaacggcctgttttaaagaacaaaacccggcgcgaccagaggcgttaagaatacggccaactcttgcgctgagtcgttaactgattcgctgggttttccctttcctctgtgacgaacgggttcacttcactcataggc

SEQ ID NO: 20926 - DNA, 2391 bp, Zea mays
  Clone ID: MRT4577_119083C.1
gcaaattctctgtatcctctattcctctccggaactcctctctgctcacgagtaaagcctgccgctcgcccgcgctctggacgtcgcctcctcccccatcggctgtcgccgcccccgccggcgttacctccttacccgccgccgcccccacgcgtccttgccttggcggatctgcctgcctccaccgcctggcgctgccccttatcccgcctgccgcctgccgccgctgcctcacgttagctcctcccccatcgtctccggatctccgcgccgcccccacgcctccctgacttggtggatctgtccaccattcaccggaaacagttggtcgccgcctaggtacccacctaccccctaggcgaggcggtaccccgtcgcccagcgcataagtgcgcccaggcgagcacggaatagctccttttcgaatacactcgggcgaagcttagatctgatctcaacgaacctgcagcttgctgcagccactcctcgccggcgatggatttcatgaaggttttcgatcagactgtgcgtgagataaagagggaggtcaatctgaaggtactcaaggtccccgagatcgagcagaaggtacttgatgcaacaagtgatgaaccgtggggcccccatggaagtgctctttcagaacttgcacacgctaccaagaagttcgctgagtgccagatggtaatgaatgtcctatggactaggttgtctgagagaggcgcgaattggcgtcatgtgtataaggcattaactattatcgagtactttatagccaatggttctgagagggcagttgatgacattcttgatcattattctaagatctcggttctttcaagttttgagtatgttgagcctaatggtaaagacgctggaataaatgtgaggaaaaaagtagaaaccattgtgggcatcataaatgacaaggagaaaataaaggccgtgagagataaagcagccagtaatcgtgataagtacattggactatcatccacaggcataacatataaatcaagctcagcctcatttggtagcaactacagttcaggcgaacgttatgggagtttcagtggtacaaaggaagctgactcatacggtgatagttacagggacaaagaatctgttaaaacttccacaagcaatagcggcagtcggaaatttggcagcaagctgaggaaggatgcgaagcctgataggaggaatgaggattatagttcacccagctctttgagacccccatctaatacaaataacactgagacgactttgatgacttcgatcggcgcccatttactttcttcgagtgccaggaaaaacacctttggcagctcccaatcgacgcatctgatttcggtgcatttgtatctagcaccgaggaagcagccaaggaccctctcgatctttcttcgggtagcaaccttggaaagacaggccaagcacccgcggcagcctccaagcctagcgcaaagaaagacaattttcaggtcaagtccggcatatgggcagactcgctgagccggggattgattgatctgaacataactgcaccgaagaaggtgaacctagctgatattggcatcgtcggtggccttggcgatgggtccgatgagaaggccctgccctcttggaccatgggcgccggatccggcctaggaatgtctggtattccaccgtcaacacaacaagctggtggcatcgagagcttggccaactacaacaagcatcatttcggcttcaaataggcctcgatctttcatactggaaaatacccgtcatctgcggtttcctcctctgtcggcctgcttcttacacgtgctgccctattgatttaatcacttttttgtttttggttttggtgatcacattacatggtgtcgaccaatcttggccccgtcttgtcacacgtgtatgttatttgtcgggtttgtgggtaagcatgcaactacatacacatcacaccccctgtgttccagctcgatgataggtggtatgttggccatgcagtttgtgtaaattccgtggcctgccttttctacttgatacagtactctacgcagcgatttgcagtgcttgagtttatattcaataataagagaacctatgccctttatgtctaaaaaaaaaaaaaaaaaaggcccctagatctcgcttggctcagattttagccctatctctctgtaaaaaaattcccctttatgtgatggagtcgtagttctttgattggttcatgtggtgggtgagagagcaatcatttcccgatatcctgtagtttggatgtattttttgtatgacttaattattttatttcaacagtttgaatggacccgagtttacattgcccaattatgatattatcaattcagtaaaatttatgttgaattttggatc

SEQ ID NO: 20927 - DNA, 132 bp, Zea mays
  Clone ID: MRT4577_119084C.1
cagcactagctggtggattaagttggttcgttgttgctgtcgcgatctgcaaatggcgaaagagtgtgctgtgtttcgtgcccgtctgttttgtatcgaactttgagcgaatgtttcagtttgctgcatcag

SEQ ID NO: 20928 - DNA, 278 bp, Zea mays
  Clone ID: MRT4577_119085C.1
gtttctgacaccccccacaaaaagctgagctgtgtcaagcattttgtgcggggtgaccatgacaccagcgcaatctggagggccatggcgaggaatgagcaatacctggcattcgcggtagtcctggcggccttgcaactctttctgcggctagcccgggtgaacgtcaccatcctgttcctgccaatgctgtcccaggccgtgagtttcaggagcaacccaacgctgatcggcaacgttctgctcgttatggtgaccccctccggaattctttgatc

SEQ ID NO: 20929 - DNA, 306 bp, Zea mays
  unsure (1)..(306): unsure at all n locations
  Clone ID: MRT4577_119086C.1
ccactagcgacgtcagctcggattcgctcgagctcttcgcagccactggctgacagaaactcattgaagtggacgatgaacgcaaacttcgtactttctatgagaagcgtatggccacagaagttagctgctgacgctctggagtcagaatggaatggttatgtggtccgcatcagtggtgggcacgacaaacaaggtttctccatgaagcagggtgtcttgacgcattgccgtatccgcctgctactgagtaaggggcattcctgttacagancaaggagaactgcagacaacagagatatcagt

SEQ ID NO: 20930 - DNA, 492 bp, Zea mays
  Clone ID: MRT4577_119087C.1
cggagttcctcaaggctgagatcagagcttcttctggggttgaccagtacacaccgccggcattgctgggaagtgccaccacttggcaccggcctcggagcgtggaggagtactataagctggtagattctgagttgtttgaccaaagtaaaacaaaggtggttgtggggaacacagcttcaggcgtttacagagaaacagaggtgtatgataggtacatcgacctcagatgcatcccggagctgaattcggttagtaaggaagccaatggtgttcaaattggagctgcagtaacgatttctcaggcaattgagattttaagagtagaagctggtggctgcaatgatgtaatcttctgtaagattgctgatcatatggaaaaggtggcgtctccatttgtccggaacactgcaagtttgggtggaaatttggtgatggcacagagggaccagtttgcctctgacatcgcaacgatccttcttgctgctgggt

SEQ ID NO: 20931 - DNA, 128 bp, Zea mays
  unsure (1)..(128): unsure at all n locations
  Clone ID: MRT4577_119088C.1
cgtcaaccgcggacttctgngccatcgcgaangctgannncctcggtaacaaagnactcnnaggccttgccgnaccgaaggcctgctaanggtgttncntccgcttgttatgnaaattgtncccangg

SEQ ID NO: 20932 - DNA, 192 bp, Zea mays
  Clone ID: MRT4577_119089C.1
attggcggctcaaccaaaacctctttgatctaatcgggattagtgacgcattttggtcctttaaatttgctgacctttggctcacgccatggattttgactagcacaggggcccacatgaattggcttttatcaaaccagccaaccttaggatggccggtgtgtgttgcgtcctctagaaacaaagaaattt

SEQ ID NO: 20933 - DNA, 413 bp, Zea mays
  Clone ID: MRT4577_11908C.1
agttgagaaccaagtaatgagtttgacaagaagaacacagcggacagcagcagtgccctcgaacatgcgaacactgccattgaatttgaaggtacaagcacaagtgagagatatcgaagaaaacctatatggaacaagataatggaaaattgcatgagccatgtgctgaggatgccaatgccctaacggagagtgggtcatcaattaatgggcgcacaaattctggattttctcatggatcttctcacgctgtcttacatgaagatcaatcctcaactggcaagactgccgacccctcattctttgctggcctcttcaacaacggattcaaggacctttctttatttaaccagcccatggatagtgttaaggtttcaatcactgcccatccaatctctgcaagcactcttaag

SEQ ID NO: 20934 - DNA, 504 bp, Zea mays
  Clone ID: MRT4577_119090C.1
cattgggtacctcgaggccggccgggaacgagagggcctggatgtgcctgagacagtacagaagctcggcgtctcgcatggcggaagtggaactgcgagcctcgtctcccgcgcacaaggagcagctctcgccgcgcgtcgggaacatctcccctcgcgatgccgctgctcatgtcgtcgagatactaacaagtttgtcgacgtctaggacggagccctccccatcacccgttgacgactgctggggctctggctagttggggcggctacttgctcgttccgcgacattcctgtccagaccttccgcccacctggagtccctcgaggcagtccataatgtttacactagagcgtgacttgccaaggagactggtacctcgactacatgagggtcgccgactccgccactgctccgttgagatggcgcactgatctcgtggcctcatcccgaggcaacgttactctggcctgcactgaatatgggctcatcgatatccggtgtac

SEQ ID NO: 20935 - DNA, 351 bp, Zea mays
  Clone ID: MRT4577_119091C.1
gggcaaccggttttataaaaactactttagggtgacctaccagttcatcattagtaagttcaacactggccgggtgcccatttaaaaccccaaaaacgcccttagcgaaaaccggaacccaaaagggcccagcctacatccatgtctgtccaagtgggatgaagcaattaaataccgccccccccgaccggattacagcttttactttcgatccatgcctaaggggtcgcattaaacgttccaaccctttttatacaaaaccagtttagtcccccccctttttatttctttgccacaaaaaaaaagggaatttccatcaaattgttcataataaaacaaaccttgccccaa

SEQ ID NO: 20936 - DNA, 605 bp, Zea mays
  Clone ID: MRT4577_119092C.1
aatatgaatgttctagctgggaggagtttacatttttagcctttgaatatccatcaggcaatgaaatatatactccttagctacaagtgtcaccgaaacgacagttcctcaagtgtcaacgatacaagtttgacatgtggcttaaaacaagcctacaaaactgagtgagtttgatggcaagactcattgcaaaatcaactttccgcgcttcttactatttggtctatatatttggttctccctctgtatctctcctccgtctccctcgttttccctcagcagagagttttaagaggatctctgcttctccctgatcctcccttaaacccgtgtctttttcgtctttggggcttgtccatacccataggagccctggaaagtttgacaatggcttcttttgatttagggtcaattagatagtcaggaacataacgcatgtgtgcatcagttcatgaatttccctgttgtttatcaacttatcacgcttgagcaaatcaatgtcccttggattcgcttcaaaatgagacttcaattttgatatacacttcacaatttgtgttacttcccaggcagaagattagattccatagtttttttcttccttc

SEQ ID NO: 20937 - DNA, 1434 bp, Zea mays
  Clone ID: MRT4577_119093C.1
cccaccctcccttgtatttccagctcggccaaagctgtatataacttgcctacagccagctgagctccccatcgatcctgtcctgtccagcaagggagacctggactggaggaggaggacctacctacccggcctccagctctctcgtctcttcctcctcctcctcgaagctccgatccgatcccccaatgtctgacagcagtccagctcccggcgcctactactccggccctcccgccgcgccgccgcccgagtctaagcccgttgacggcggccaggtcaacgccgatgttcctggctactactcctccgtccctgctgcgaaatctggcgccggcggccagggcagctccgctgctcctaaggaatcgggcttcttcgccagctgttgtgggtgcttctctggcggcgaaaccgcgagatagatagattcagtgttggaccgaggaccatggatggatggatggaacatgcatgcccagtgattgtttgcgccgatgaaagttcaatttgtccggatttattttctctgaaatagtatatgttttttttctccatcggtgagccggtgatcttgtcaatttgtacaataatcattatatgcaaccaactgtgctttaatttgcctcaggtttggggggaaaaggcctcgcgggtcgcaaaccgctctctgttgatttgggatttgggaggcgctcgagttttcaggtaaaccatagtttagtgacccatggctcgtactaagcaaactgctcgcaagtccactggagggaaggctcctaggaagcaacttgccaccaaggctgcccgtaagtctgcacccacaactgggggagtaaagaagcctcatcgttaccgccctggaactgttgctcttcgtgaaatccgcaagtatcagaagagcactgacctgctcataaggaagcttccgttccaaaggcttgtcagggagattgcccaggatttcaagactgatcttcgtttccagagccatgcggtgcttgcgctgcaggaggctgcggaggcgtacctggtgggtctattcgaggacactaatctgtgcgccatccatgccaagcgcgtgaccatcatgcccaaggacattcagctggctaggaggatccgtggtgaaagggcctagattctctgtttactgctactgggagtggctccgtagtatggtttgcatctgttcgatgcttgctttttgtggaagttacatttgtgggtgttcgaattcgtaatattcatccgtagtggacgagtggtaggaagttctgcaatctgactatgttttaaaatttataattgttgtcaattagtgttggtgttggtttcgcccatcaacggatcaaccttattggttatctgaacgacgaattgatatgttaactcgtgaacttcgttatatttaggcagaaaaaaaactcgtgc

SEQ ID NO: 20938 - DNA, 770 bp, Zea mays
  unsure (1)..(770): unsure at all n locations
  Clone ID: MRT4577_119094C.1
ggccgcttttttttttttttttttaaaagtttcccattaaaaactagaggaaatgtaactttgtacgtgcgggtggcatcacctcagccagacccatgagaagcagattttgtttacataaccggcaaacgaatttaatatgaatgttctagctgggaggagtttacatttttagcctttgaatatccatcaggcaatgaaatatatactccttagctacaagtgtcaccgaaacaacagttcctcaagtgtcaacgatacaagtttgacatgtggcttaaaacaagcctacaaaactgagtgagtttgatggcaagactcattgcaaaatcaactttccgcgcttcttactatttgttctatatatctggttctccctctgtatctctcctccgtctccctcgttttccctgaaattttgaagccactgaatggataaacgcacctcagcagagagttttaagaggatctctgcttctccctgatcctcccttaaacccgtgtctttttcgtctttggggcttgtccatacccataggagccctggaaagtttgacaatggcttcttttgatttagggtcaattagatagtcaggaacataacgcatgtgtgcatcagttcatgaatttccctgttgtttatcaacttatcacgcttgagcaaatcaatgtcccttggattcgcttcaaaatgagacttcaattttgatatacacttcacaantttgtgttacttcccaggcagaagatttagattccatagttttttt

SEQ ID NO: 20939 - DNA, 541 bp, Zea mays
  Clone ID: MRT4577_119095C.1
cggacgcgtgggaaaatacatttcttttaacctttaaaaaaaaaaaaaaagggcgtttcgctcgcgatctagaactagttgttttcgcagcgtgctggcgcgaactgcaggatcagttaagattctaactagatattgtgtcagggaattatatagtagctattcactaagaagtacatttgcagtacacaatgagaagaagcaacgcagtacataatgagaagaagcaacgaatatgaactgcagcatcagttagatgacagagggatggcccaaacactaccaagcactttaactagttgttgctgatgcatcgagctatctcatcatcgagccatgcactttgcctgttttagtgttttgtatgcgtattgattatgctgctcaatggttacctcctgtttcgcttcagaatccatgtttagaactgacaggccctgcgcgtgctgtcatgatgtatggtcgtgtgatatttgaggcttcattgtatgtgaaaggtgctactagatctgatgacaaagaattgagccttctagctatt

SEQ ID NO: 20940 - DNA, 916 bp, Zea mays
  Clone ID: MRT4577_119096C.1
gccggccgggtttcgagatagcagctacgtcgtcctccattaatattggcagcaagctagctaggatcatcagcatctgagcttatatattactacatcgatcggtttgccatggcggggatgacagtcggcaataagctggcgctggctgcggtgctgctgtgcgcggcggcggccatggccacggcgcagcaggcctccggcgtgcgcgccacctacaacttctacaacccgcagcagaacaactgggacctcaacgccgtgagcgcgtactgcgcgacgtgggacgccagcaagccgctgtcgtggcgcatgaagtacggctggacggccttctgcgggcccgccggccccaccggccaggccgcgtgcgggcagtgtcttctggtgactaacacggcgacgggggcgtccatcacggtgaggatcgtggaccagtgcagcaacggcggcctggacctggactacgacacggcgttcaagcccatcgacaccaacggacagggcttccaggccggccacctcacagtcaactaccagttcgtcaactgcggcgacaactgataatataatagattcttcgctcctgcatatatatatatatatagcagcatcgatctctcgtctatccgatccgcacgtatattatatactcatacgagtatatattaattcttccgagaattatatggatgtggtcccacacataccaagccaataaaactatatttgtccagtgaaataaactgaattacccaaatactcgactatactcgtgtctcgtcatgtctcacgaaatacaaaatacgtaagggtaaatatactattgtgaatatacgattgatgtgttcatatgtgtcaagttgtaataaatgattgggaggactaaggaaatgatcaggctttccttgaaccc

SEQ ID NO: 20941 - DNA, 478 bp, Zea mays
  Clone ID: MRT4577_119097C.1
atgtaggagttaacatgaaaaaaaatgcaagtgagaaaggtaaatcacagctggtggcattgttaggaacctgaaaacttgcacacaatattaagggtgcgggctaatagagaaaggcacacaaaccaggggggcggggtgtacaggtgcataaaatgtacaggactgtggggtggctacaaatcctgggcaaagagatccatggaaacaaaaacgaggacattgggcgggggtcacaagcaagaacgcaaggatagcgaccaatatattcctattaaccttggaaagaacaaagaacagggtgaggaaaagcatgcgacaaggagacatctcactgatgagagtgcgagtgaccaaattcaggatcataaggacagacggatggtatctggccatgctatgaaggcgtgaacattaagggcataaggcctggagctatagggggaggcactaacgaggaataacaggctccagcatg

SEQ ID NO: 20942 - DNA, 284 bp, Zea mays
  unsure (1)..(284): unsure at all n locations
  Clone ID: MRT4577_119098C.1
ccataggagaaggggtcctcgccaaggacaacattcgctaaccggaggtctacaagcgaaggggtctacgacccaacgggcgacgacaacttgtcagcaaaacccgaggccttcgccatctcatcgactgaaggaccatccggccgggcgcaaccggagggagcgaaaatgcgaaggctgttggagcggaggctacgtgttgaccccaaacacctctagtgcaccagaagacaccccaagggcccacccgtcagcgtagtngtgagtgtgttgtctggtatacg

SEQ ID NO: 20943 - DNA, 305 bp, Zea mays
  Clone ID: MRT4577_119099C.1
caaagttcaggtcttcctccccatcacgcgcagcacccaatcagtcgccgctctgcctcttcatcctgacgtggccacggcgagcatctgccccgccgtccgcggctgctggacgccgcccactgtagctcgccggcgtcgtgcttcctcaccatgactgcgtccctgccgcagtgccggcaagctcgcctctgtgctcaggttctcctccagccgctcccccctccatggacgctactctttcctctccgtgaaactctgtcgtgctcagtgttgtccaagtcaccgtcgtttgcctcggttcg

SEQ ID NO: 20944 - DNA, 1017 bp, Zea mays
  Clone ID: MRT4577_11909C.1
aattcggcacgaggctggctcctggatcagcgatgccctccttcctcgtagtagccttcttcgtcctcctctgcctcggcctcaacaaccttctggcgctcggtgacgccggcggcggcaacgactactccttcgtctactctggcttcggcggcgcgaccggtgccagcctcgtccttgacggcacggccacggtcacccgggaaggcgtcctcaagctgacgaacgacgagcaggccaacctgaaaggccacgcgttccacccgactccagtccagttcagggactcctcctcgcccaataatggcacgaattcggcgcgaggcttctccgccaccttcgtcttcgccatcatctccgcctccacctactggagcagcgacggcatggccttcgtcgtctccccggggaaggacctctcgggcgcgtcgtccgcgcagtacctgggcttgctcaacagcacgagcgacggccccggcgccgccgccagcaaccacgtgctcgccgtggagctcgacacggtgatgaacgtggagttccaggacatcgacaacaaccacgtcggcgtcgatgtcaacaccctctcctccgtccactctcgcgccgctgccttctacgacgacgacacggaaggaggaggaggaggtgcgtggaagaacttgacgctcagcagcggcgacgccatgcaggtctggatagactacgacggggaggccaagcagctcaacgtgacgctggctcccatcgccacgagaggggtgaagccatcgcggccgctgctctccaacgtcaccgacctctccgccgtgctcgctgcccaagcgtcgtacgtcggcttctccgccgcgacggggcccatcccttcccagcactgcgtgctcgcctggagcttcgcggtggacggcccggctccgcccatcgacttcagcaaggtcccgcagctgcccgacgacaccgccggccgccgcgaggctctggtcagggagttggagatcgcgctgccggtggcggcgttcg

SEQ ID NO: 20945 - DNA, 731 bp, Zea mays
  Clone ID: MRT4577_1190C.1
ttttttttttttttttgcccccaaccctgccccgatcctttcaaaatccatagcaatattacattagcaatccaagggcccccacaaacatgcaagcaccaccactagcttattgaattagtataatccatgggctcacacatacatggccacccattgcagaacacaagtctaccaaaaaactatttacatccatttgtctcaaaatacacataataagcatatatatcagtcccggaactgacagcaaacatcaatacgagactcggttttcacaatttagagatggttttcacaatgattgcttttccacatttccatcatcttctcatggacggtggccaaacggatctcgtatcctagctggatagcatgcaacgattcagtagttcccaaacaactgctttgcagaaataatgcagtaattgtctccattagaggttgcaacagatgctctgagtaaaccttgaatgtgcacagatgaaggagaaggtaagtcactttgttatcactgaatcatcgatcttgctacactcaacaacagactattctactaaacatctgctcattggacctaaatctacactgttgctgcatggcttggctttgatcgcaactgcaagaattaaatagcaggcacacatccttgctcggtatcctcgctcgacaatgctagacttgttactggaagcccctgcgcgaggaagggaagccaaagctcgtgactcatg

SEQ ID NO: 20946 - DNA, 136 bp, Zea mays
  unsure (1)..(136): unsure at all n locations
  Clone ID: MRT4577_119100C.1
tctcggacgcgtgggcttatctcttctgcctgttctctcacctttcacaaaatctctctgtctcacgcctttcccgcgcgccctttttccacgcacgggcggnttcgtcggcggtcgcgcgcgcccgaccgtgccc

SEQ ID NO: 20947 - DNA, 318 bp, Zea mays
  Clone ID: MRT4577_119101C.1
aattcggcacgaggctcggctctcgcttgtgcgtcctgcctctttgtgcggcggacggcggctcctggctcctagtctcggggatccaccggtgctccctgctccctgctcctggcgaggtgcacgacgaactgcggaggtccggtgctccctggtacctgctctctgcaactcagggtccctgggaggcgggcgcctgtctctccgtgcgcggggcacaacaaactccagtgctgcctgctgcctgctgccggggcggtgcacggcgatctgcagaaagacagcgctccctgctgtgaaggtctgaaggaggctgtg

SEQ ID NO: 20948 - DNA, 337 bp, Zea mays
  Clone ID: MRT4577_119102C.1
ttttcggagtcgaattaccgctttcaaccaagatgaccgagggccacgctgaaacaaggagaaccggactgatcctttagaacaggtatcataactcgtgcaaagcagatggcgctctaatcaaacggagggcaaccacggggtacaggactggcaccctatttatttgaattactggaggtagaagacaccgggggaggacaaggtccatatatttgatcacatttctttcacgggtccaagactttaccgaattatacactgctcttctcactgaaggcctgatgtttaagagctccgggctggtgaatgcgcgctccacgaccactataggacc

SEQ ID NO: 20949 - DNA, 281 bp, Zea mays
  unsure (1)..(281): unsure at all n locations
  Clone ID: MRT4577_119103C.1
tccttattcccggtcgaccgcgcgtctcttaactaatgcacattcccggagaatattggtgaagcaataacttgatattgggttctaaaccaaagaaagaantggttataaaatcatctgccacatacnanccaaaaaagaacaatgaaataaaggtttttgaaaattcaaattaaatttcaacggatctttcttaatatatctcacaaatttcagtattttctttcaaaaaaaagggatacttttccatccccttatcttgaggtcccctaatcaatttt

SEQ ID NO: 20950 - DNA, 762 bp, Zea mays
  Clone ID: MRT4577_119104C.1
acttctattgtgattcccagtaggagggcaaaaatgggtagaatccatataagtccgtagatttctttaaataattccgatttcgaaaaagaattgatagtttctacctctaccctatctattatcatttcaacgatcaacttcccccataatgatatctatactacctaatattgtcatgatatcagccaatttcatttttttaactagctgaggaagaatttgcaaattaataaaacccggtggacgaattttccatctccaggggaaaagactatcatctcctaccagataaattcctaattcgccttttggagcttctactcttacataaagctcttgctttgataattcaaaattgggcgaaggttttttaccaagaaatcgatattcaaaatcattccattcgggattctttgctttcttaaagcgtcgggcttctaaattctcataaggtcctccaggaattttctctacagcctgttgaataatttttatggattccctcatttcaccgactcgtactaaatagcgagctaacgaatctccttctttttgccattggactttccaatcgaattgattgtaagactcataaggatcaattttacgaagatcccattgtattccagaagctcgtaacattggtcccgataagccccaatttacagcttcttctccgctaataaaaccgactccttcaactcgttctaaaaaaatgggattctgtgtaataagttcttgatattcaacaactccttg

SEQ ID NO: 20951 - DNA, 1981 bp, Zea mays
  Clone ID: MRT4577_119105C.1
atgccattttgccgtatacgtacagcatacaggttccgtcgtcccgcaccgcacagccgctcaaaaaccctagttctcgccgccacctccgccgctcggcgcccgccgccagtccaccacttgcccacctcgtcgcgacgtcgcgcagatatcttcaccgcccgtcgcagcaggttcagctgctggcacgggacatttgaaccggcactacaaagcttgtttagcaaagctaggaaagactcaaggaggaggtacgcaaacccatcttaactttgctgctgatggtacaataagtacatgggtttacaacccacaggtagcacgtgatgaaatagccaaatttattgtttgtgaagatttaccgattatgttgggcgagagccaaaattttaaaaacttgattcaacgtgctttttgcccacaatatcagcctgtcactagaaaaactacaaaatctgatttgattgcaatatacaaaaataaacttgctgctcttaaagagtcttttaaaaaggttcagttctcatttgctttaacatcagacatttggacatcatcacaccaaaaaacatgttatgtttctgttgttgcccactacttggacgattcttatgctttaaacaagcgagtcatcggttttagaatgatggatgagtcacacactggagatgcaattgccaaccatatacttgaggtagttcgtgattttgagatagatggtaagattctctctataacccttgacaatgcttccgcaaacacaactgctattgatattctcacccctcggttgcagtcatatatacaaggttatattatccaccataggtgtgtgtgccacattataaatttggttgttcaagctggtataacagttgcaaataagtacttgaataatatccgtgctgctattcgtttcataacaagcacacctcaaatgatttctagatttgctgagtattgtaaagctcaggatatgagaccaagaaaatttggtcttgatatgaagatcagatggaattcaacctaccatatgcttaagagtttagaaggttatgaacaattaattactgtctttgtgaatgccaatggaggtaaagtttctaaaatactttgaacaaatatcacatgtatactgttttgcaactatttttgatccacgcaagaaactggatggtttgcaaattgcattggagggaataggtgatgcattggacatggatttttcagatgcttttaatcatgcaaaagatgacttgtttcgtgtctttggttactattacaaaaaatatggtgaaagtgagatagactcacctgctgttgagtttggtgcagaaatttcagatacctctcttacagctcacttatggaagagagcgaaggggaaagaaaatgtcgcctcatctcaaaggtggaatcctaatgctgaattaaatcactatctgtccactaactttgtaggtactgatcgcgcactaaggggtgagaaggtaaagttacttgagtggtggagggaccacaagtatagttttcctgtcttgtctcagtttgctagagatatacttgttattcctgtctcaactgtttcctctgaagctacctttagcatagttgggagaataattgaggaacgaaggtcttctctagcacctaagacggtggaggcaatcacttgccttaaagattggaacagagccgaagagcggaagcaacatcaacttgaggatcctgagattgaatttgctgctgcagatttggacattgattagacaataatgtttagttgctactgcagattgaatttgctactatgaactttatgtggttgtaatatttagactttatttggacattgctggtctgtactcttttccttatagaggggccctgtaatggggtataaggtttttaatgagacaggccgaggaatatatttttgtttccctcaaaaaaaaaaaaaaaaaaaaaaaaaaaaactcaa

SEQ ID NO: 20952 - DNA, 796 bp, Zea mays
  unsure (1)..(796): unsure at all n locations
  Clone ID: MRT4577_119106C.1
cggacgcgtgggtgctggagtaggattttttattcattgcctgcttggaactaataacctgttcgctttaaggggttcttcaatcgaatcttatatagtgcttatattttggttgagtggtttatcttttttccgccgggttctaatcctccttggataatgaacagatggagagggtttgtgagaacaacttcgtcccgttcatccggtcaggggagtggtctgatattggaggtcgcgattacatggaagatgcccatgtgtgcatctctgatctggcgaagaattttggctctaactcagcggatgatgaagtcatatccttctatggggtgttcgatggccataacggcaaagacgcagcccattatgtccgtgataacttgccacgggtcattgtagaggatgctgattttcctcttgagcttgaaaaggtagtgaagaggtcatttgtgcagactgatagtaagtttgcagagaaattctctcatcacaagggactctgttctggaacgacggcacttacagcaatgatttttggaaggtcccttctggtggccaatgccggtgactgcagagcggtgctatcgcggcgtggcaccgccattgaaatgtccagggaccacaggccctgctgcatgaacgagagaaagcgcgtggagtcactgngtggctacgtggacgacggctacctaaacggccagctggccgtcaccagagcgctgggcgactggcacctggagggcatgaaagggacgggccgggcaggaaggggagggggaggngggaaggcccc

SEQ ID NO: 20953 - DNA, 872 bp, Zea mays
  Clone ID: MRT4577_119107C.1
gcttcagcatcctatggtgaacttgcagctgcagggatggaaagagcttcacatacaacagtagtatcaacattgctatagcagtggccatagatggtgggttgattacatcggttcttcactggtgggctaggggttatctagagatgacaaggccctcaagttggctttccagcactggatcgaagcgatgagtacaaacgggcagtggggattgactccaactgacaaagttaaaagcaaagatgaagcttcaccttaaagagacaggtgacgactctttcagttcatggaatcagcatggcacaaagaagttttcggcctgtcattgtcaatatcattttgagacccagcttcttcagatgctatcaatgagctaagatcagcaactgcacatgccttaccctcagcaactccaggagataccgcactctcttctgaaggaactgtatttgcattgtgaactggagttgatttaacctccatcatatcgacccctttgacatcaacatcctgcaccacaggtaccttaggagaaacaatgagctcccctggttcttttatcatatcaaatgtatcacagatatcggcacttccagaacctttgatgtcccactagaaggtgacagattttttgtatgtgtcacccctgtgggagaactttcaagagtagttacaacctcagtattcacagatttaagttcgccttccaatgaatcaatctggagttcagtcttttcaatctccttggagatgttttccttcagttggagcagcttacatgtactggtggggccatttgaatccccagaacaagaatcattatgttgcataagtttaacaagaatgtttgtatcgccattaataggatc

SEQ ID NO: 20954 - DNA, 192 bp, Zea mays
  Clone ID: MRT4577_119108C.1
gcaagaaagaggcgggttacattaaatagcaacgatactgagactagcccacagcctcgcgcgcgccccaagggcatacacatcaaaacacgcgcgctccattaccaagcatgttccttgccatggtggatcagctacaactcccaaagatgtttaaatggcctaaatgggccatcgaacccctacaaggtg

SEQ ID NO: 20955 - DNA, 401 bp, Zea mays
  Clone ID: MRT4577_119109C.1
tctcgggtcgacgcatacgtccgagatgatgcgccacacgcgtcgagcactcttaactcatgggacacgatcgccatggccgccacatcgaccgccgccgccgtactgtgccgaccgtcagtggccgggctccgccaggcgccgactcccgaacggacgcgcgtgtcgatccgcgcggcacctgcaccggcacggcggtccgtggcggcacacgcggagctcagcacggcactagcaatcatccagagacaaggcgtgtcgctcttcctgtgccgatgcgtcgcacttcaacatccagtcggagaacatggcgaagcaggtgcccgcgcacaacggcaggacacacgtcgagtccgatgacgagcgcgccaaggagttcgccgcactgcacaagtccaacg

SEQ ID NO: 20956 - DNA, 2100 bp, Zea mays
  Clone ID: MRT4577_11910C.1
tgggaccctcgaggccggccggggttccaatttattaaaatcgtcgtgaaatatccacagcgaaaactaaaaacattcctccgcgacggctccaggctgcgaagtctcccaccaacgcgcgccgatccggaccgaaggcctcctgcagtcctgctctccgtctccctcgcggcctcgccccgtggatctccgctccggccgacgggcgcgatggcggagccggagcgggagcagcgcccgctgctagaggtagagcaatccgtcacgtccataccggaagatcatgaagccacatgttggggctgtgggctccggcttgtttttgcgggttactcgcctatctataagtgtggctggtgtggagccatcacgcaaagtaaccagaccacaaggaaacctgatagtgtatggttttcccactggaggcgcgtgcgggacagattctttgtcaccgtgctcatcctcttcatgctctttgtgatatgtggtggggtctgggcggtatatcctattgttttcaaaatcagcaacttctgtggcatctttcactgcatggtaacagctgtgttagctgtatttaccatcacaagctactgcttggcctcttctaaatctgcaggcgcgccaacaaatgtacgttggggcagctatcccttggttgggaaaagggatcttgagaactatactttttgtacatactgtaataaaccaaagccccccagagcacatcactgccgatcttgtaaaatgtgtgtggtggacatggatcatcactgcccatttattggcaactgtgtgggagcttcaaatcatcaagtgtttgtcatttttcttatttctgtggtcattagttgttcttatgctgctgggatgaccatatatgcaagctaccagatatggccctctgttgattttccaaacctagcatcatctcgccattcaatgagcttttggaaaatatggctggagattattactacggtcgcaggctctgccttcttcttgtcagcaagaggtctagttctggtatatctagcattcgctagtttatcagtcaatgctggtataggtgtactactgtgccagcagcttagttatatctacgaaggaaacacatatctcaaccatctaagttcaccgaatgcgttgcatggagagaggggtttgcataatattattagattttttgggtgcccttatccaatttccagagttctgttgcgatactcgaatgctggcaagttgcaggataattcagggtcaaaacttctctagaggtttcagtgatacactcttactgttccagcaactgaggcagtgtatggaattagttgttccgagtcaagatggttctgttacctggaatcatgatttgtgaacctcagttgaccatcaacagattagtttgagtaactgaagttgttcagggacgcaacactcatgacagtccatgttctggactctggagaggagttgttcatgtcactcacattgatttggtagaacagctctggcagatgctgaagtaccatgtggcctgcgcattcattgcctgcagacaatcataaggtgctgatggcattgcaataaattgcagtatctgaaatcccgcaccatgcatcatcactgcctttttcgatagggctgaagatggaagcttcacgcttttggttgctgcagaagaaacggacatcaggattaaatctgacagcggctttgagtggtgctaggatgtttggaaaaatgtgtgcctccttgatgctaatacacggacatgtatataggaaaatgatacacccagcctagtgaggttaaccgagagccaacaaattagggttatctggagcctaacagttcattaagtacaacaaaactcggggagagatccgatcgccccaaaattctagtccgatggggaagggtggttctcccttttagggctagtttgggaacctactttttcgaaaggattttcatttttctaagaaaaaatagttcatttttccatgagcaaaaaaaaagaaaaaaaagcggccaaactaggccttaagatggttttttcctcacaagttatgcaaggtgatataattctaaggctac

SEQ ID NO: 20957 - DNA, 389 bp, Zea mays
  Clone ID: MRT4577_119110C.1
cactatgtggtgggggcgggcgcccccctcctctgccgccgccggaaaggaactcgctgctgaccttcttcgccgctaccctaagcgggaagcatcacatgaaggacactaggaaggccgaaaaggcggaccagcgccagcgccagcagctgcagcagcggcagccggccgacgcggaggacccagtcgcggccaccacggccaggtccccgagcaggagatccagtcaaacgccatcggcggccgctcgtggtcccatgtgggcgacctcgagacttcgctgcgggccgctccgcgcttatccgtggagccacgcaggccatccgtacgggcagcaacaagatagctttcgtcgtgctgcgccaaattttgagcaccgtgcagtgcgt

SEQ ID NO: 20958 - DNA, 447 bp, Zea mays
  Clone ID: MRT4577_119111C.1
acagaaccaaacaaaaaggcgaaaacaggggctaggcacgacagggaagtttacaaacaaagcacaatcaagcgacaaacgatttggcataaaagggcccacagcaacgggacaggaatcacaaagggcaggggaatttttttaaggaaggacacacagcagcatcttaacaggggtgggtcagttcaaaaaaggctaaacggggggaacaaaaaaaaaaaaaaggggggactacaaacaccaaaatgccccctgacaaaaaaaaaacttagcgcttaggactgcccccgccctttttttttttttttttttttaaaccacaagcaaaaccattatttggtccgttaaaaccggggcaaaaaaatggaacgccggacaaaatttaaatttgaaaaccggagacaacacaaccctcggggacaaaaaaaagtgggcccccttcacttc

SEQ ID NO: 20959 - DNA, 250 bp, Zea mays
  Clone ID: MRT4577_119112C.1
ccagggtattgggggggggggactattactcctagatgaccaggggggggacgcagtgatcttcccaaagaccaagaactacgctgtgctgaagcactagatatggggcaccagctacatagtgcatgccaacttgctcgccaagccgccccacattaaatactttggggggggggggcgtataatggtgaccacccacgcctcgtccactgggggaggagaggctccagaagaatcgtgaacacctaca

SEQ ID NO: 20960 - DNA, 307 bp, Zea mays
  unsure (1)..(307): unsure at all n locations
  Clone ID: MRT4577_119113C.1
gggggggggggggttaaaaaaaatttagaaagtctttctttttctggggagcccaaacttattcaaaaaattctttttgaagtttactctaagcatctaaaaagggccccccccaaattggtttttggttgaacgggggggggggtgtcaaaacaaggtggttgaatggcagccattgaagcaattgtaaaagggtgcccgcgttaggggcaccgtgccggttgaacggcaacaactgttgttgtgttcagaaggcgacagggcctcacatcanctagctggcttaatggggggggctggtgctgtt

SEQ ID NO: 20961 - DNA, 304 bp, Zea mays
  Clone ID: MRT4577_119114C.1
acctaaacacaacaaccgtttttgaccttagaaaacgctgtcccccaccatgggatgcacgttggccggggggggggcagtttcccaaaagaagaaaggggaacggcacaaacgcacgcacacatacgggtgggtcaatacaaccaaaaattaacaaccaaaaacgatcggcgggccccgatctggacatacacgggtacagggtttattttttttttccacggatttcctcccctccctccttttttccttgggggtttttacttgaccttgatgggcaggggtttgccctcccacttcttgg

SEQ ID NO: 20962 - DNA, 361 bp, Zea mays
  unsure (1)..(361): unsure at all n locations
  Clone ID: MRT4577_119115C.1
ctacctttttttgttttttttttttttttttttgtgtttgacccattgccttgtggtcctttttaacttctagtcgtgtnnnnnaaataccggtgcttttaagataaatggatattgaaaaaaactggctccactcaacaattaactcaaaccaagatgtttataatacacttagttccgaacaacatttctgtattaggcttgaagggataaactggcttcccagcacaaacttgacgagctgagccgttgccgttgccctgactaagaaactgaactgtatatcttgctggaagccacaatgtcggaactttagacgtactcattgatgggctttcgcgggagggggggcttaattaga

SEQ ID NO: 20963 - DNA, 278 bp, Zea mays
  Clone ID: MRT4577_119116C.1
taccagcactgtctaagctagtgataattggaaacgatttaagtatctagcacattggattggttataaagctaggaatgttcacacagtaggatattatcagtatactgattggaatctatattgccaggaaaagctattcattatgcgttgtgaagtcagatagttaaaaagggtagatagaagtattcgaagtatagttccattttctgagcctaataagacatctgtttacacgggcactgagaactggagttatagagatccagttagaaaca

SEQ ID NO: 20964 - DNA, 650 bp, Zea mays
  Clone ID: MRT4577_119117C.1
cattgggtacctcgaggccggccgggacacatattcccgggacgacccacgtccgcccacgcgtccgcgacagacaaaatcagtcaagatggtcaacgttcccaagacccgccgtacctactgcaagggcaaggagtgcaagaagcacacccagcacaaggtcacccagtacaaggctggaaaggcttctctgttcgctcagggtaagcgtcgttacgaccgtaagcagtccggttacggaggtcagaccaagcccgtcttccacaagagggcgaagaccaccaagaaggttgtgctccgtcttgagtgcactgcctgcaagaccaaggcacagctcgcccttaagcgatgcaagcacttcgagcttggcggtgacaagaagaccaagggtgccgcccttgtcttctaagcgtgtctcctctttctctctcttttgctgggccctcggcgtagtcttcaggcggacaggatgggtggctttccccaatcgactcatgctatgcatcaacgcaacaaaatgaaagcggagtgatacggaggatctggggatgagaggttgccagtcacgaattgaacggatttgtaacctacatatgcatcaaatgaagctcgattgaagggaccgcaaaaaaaaaaaaaaaaaagcggcc

SEQ ID NO: 20965 - DNA, 834 bp, Zea mays
  unsure (1)..(834): unsure at all n locations
  Clone ID: MRT4577_119118C.1
ccggccgggacactttgtgtccaccaggacgtgccatcttcatcccctcactcagtccgtaacatcatgaggccatcactcttggtccttgcggtcattggcgctcaggcctgccagcgtgaacgtgctttccaccatcattcccaccctcacgttaaacggcaggcatcctttccccccaccttgaccccacatgaggagatcttgctcaattctttcgacgccctctccatatctgaatggtcatactactatactcatggcgcccacttggctggccagaacaaatccatggcacaatggacggcagataggtggtccgactacggtttcacttcacgcttggacgaatattacgtattcttgaactatcccgtgtcaaactccttgaagctcacttataataatgggagcacgtacactcctagtctaaaagaagctgtgcttgaagaggacccaaccaccagctacctaaacagtgtgcccgtatttcacggctactcctttactggcaatgcgtctgcagaatacatctatgtcggtagaggccagcaagtcgacttcgatcgtctgattgagcttggtgtcgaactcgagggtaagatcgcattggccaagtatggtgggccttttcgaggtctcaaggtcaagaatgctcaggaccacggcatgattggagccgtcatcttcaccgatcctggtgacgatggcaacatgaccgaagcanagggtgtcgctccttaccctcatggcggtgctagaaaccctaccaccgtccagcgtggatcggtccaattcttgagtacatacccagnagacccaaccacgcctggc

SEQ ID NO: 20966 - DNA, 458 bp, Zea mays
  Clone ID: MRT4577_119119C.1
ccggccggatgcgggcactccgacaccgagtcgagcttcggctccgtttagggagagtactataggcacttgaaggaggaatgggagtacaatgactactgggacctcttggtatgccgtgccatcgccgacgacgtcttcgcaccctacataaagcgcaaagcctggaaggacctcaagaacgagctcagtcacatatatttgggatgaggtcactgcccggtttcccgtcggcaacctgtcgtaggcatttgacttacagcatcagacaaagaacgaccagaggacgctctgaggattgcagcgctcataagattcatcactacctcattcgctgagctcagtaccgcgcgtggcgcgagcgagataagttcattcggaggacacaatcacactactgactaattctgtactgcatgcgtgagagatctgatggctcacaatacatgagtacctct

SEQ ID NO: 20967 - DNA, 365 bp, Zea mays
  Clone ID: MRT4577_11911C.1
ccattttggaggtgaggcgggggtgggtttgaatgctccaaggatttcatgactctggtttccacgccgagaagccactcctcgtgctgccctcctgcctcctcgccccgttcgtctccgccgtccccatgccaagaagcctgcgcctggggagccaccagcagcacccgccggctctgaagctcagttcctctcagatactgccaattagctgtttccgtcaggtcttccgcctgctgcagtgtttccccctcttgatttggcacaattgttagcgaatatacagaggttaatcaatcaattaactaatcaattcagcgatggtggatggaaaaaatttaatttttataatttttctaatttta

SEQ ID NO: 20968 - DNA, 428 bp, Zea mays
  Clone ID: MRT4577_119120C.1
gatcgatggaaaagcccattccgggcccctgtcaatggtcggggaacctcctggccaaaaagtcaaggtagtttggatcgcactgaccgaagagtctggtctgctctgggagcttttgactccggtttgaatcgaaggcaaaggaggcgcaaccaaaagcaggacattttggacatggcggtccagcaaagatcacgctcctctgaatgcagggtggtagtagaaatgtaccaaaggaaggggaaaaaaaggagcaaaggttttgaaggttgacaaagctgagacgggacgggacgaccaaactaaaggcagctcgacgatgacggtgacgaggcgatgctgctgacatcaggcatgcgaagtagctatagccgcgtagttggctttgttctgtaatttcccgaccattttccatttgtaaaagagag

SEQ ID NO: 20969 - DNA, 602 bp, Zea mays
  unsure (1)..(602): unsure at all n locations
  Clone ID: MRT4577_119121C.1
acctactccgtgggcgcgaaaccctaactggcgcccgcatccctctctattccatggcggagcaggatggcgacgcggggcagattccacccgactccgttccggtggttggtgtaggggatcaaaatactaatcagcatcaaccatttttttcgatgtgccaaccacttcgcactgttagctactcgaattcgtgggatgggacttgtgttgctgctgccaatgaaaatgaccacactggcatatctggtacattggacagggaagacgattcatgttcacgacattcaatcaataaggaagtcagtttggtgcaaggtgttatgaaaatggaacaatcaatggatggagttgatgtgccgcatggaggagcaagtgagcagccagagccccttggcacacagcagcctgattcatttgatgaagtagacttatgggatgtccaagataataagcaagcgttgccccttaacagcaaccaatgcaattttaatattggtgaaacttgtgatgctgaagatatgcattntcctttgtctgctttctatagaaggcaacccanatgtgtgggagctggtcttagcaatatggggaacacatgc

SEQ ID NO: 20970 - DNA, 346 bp, Zea mays
  unsure (1)..(346): unsure at all n locations
  Clone ID: MRT4577_119122C.1
ttatcgcttatcatccgcgcctctacatttcttctctctctgctcctgcggctccgcctccgcctgatccatccangacagggatcgccctgtcggactcggnggagcaccacttcgaatcgaaggcccgcgctggggcgtccaagacctacccgcagcaggctggcgccgtccgtncgaacggcttcatcgtcctcaagaaccgtgggggcgcggttgtggcggtttctccctccccgactggcccgcatggtcccgccctctgcccctttgccgccctcgacctcttccctgggccaaagcttgtcgactctgtcgcttcctccccccccctgcgcccctccgc

SEQ ID NO: 20971 - DNA, 385 bp, Zea mays
  Clone ID: MRT4577_119123C.1
ggggaaaaagaccatggggcagggcaaaacagttttggaaatgctggcccctgcccaaacagggatttttgctgctcaggccggggggcaaattaataatccaaaccttaggccgacgtacgagtccggatttttgctggtcggactaaacagttttgtcgtcagggccccccaaaacaaacaaaccaaccaaccaaccctggatgtgtttttgaaatgagatgagatgggttattcagtacaacgggatcgatgcgcttccttaaccgaggggggctttactggatgcaagacgggttagtcattagcggtctcctccgatcaggggtttagcaaaaactacccgagcagcagggcatgtgcctccaggaatgcgaattaattt

SEQ ID NO: 20972 - DNA, 326 bp, Zea mays
  Clone ID: MRT4577_119124C.1
gtcctatatcattagctaccgttctacaagatccgatcttacgaccgcatccatgcgacagcagacgtcttttataccggggcctaaattcaataaactgaccaaccaccaacaacttcctgacactaataaccctgacgcatacccaactgaattgccttgagcacatccctctttccccaacttgcgacataacaagacatgcgccgaccaagcgccctatcgaaaaatagtccagcctcaatggagaatcgaacacgccctgtagctgcgcattatgctcgaccggtatggtgcgcacacccagactgacagctacacctgct

SEQ ID NO: 20973 - DNA, 218 bp, Zea mays
  Clone ID: MRT4577_119125C.1
ctttacctatttttccaagcggtcaaaggcgaatcactctcgagcggcggcggtgacaagaacgagacgcgcgcgctagctgaatcaagagcagggcccagggaggagagtggagagccgcccacgagcagcaatgccttactgcgatgcgggcacgtacgcagacagctacaagtgggagggcgtgagactcttataccgacgctacagcagaagat

SEQ ID NO: 20974 - DNA, 206 bp, Zea mays
  Clone ID: MRT4577_119126C.1
ttcccgtcgccacgcgtccgattaccgacttaatgaacgctgactcacctctgtcctatactggaaccagagcacggttacgtggacacggagcgcgacaaagacgatcgtgagcaccctcggtgagacgggtctcactgagatacctgggtcagaacgcgcaaaagtacacggggcgatggttctgtccactgacctcaccgaat

SEQ ID NO: 20975 - DNA, 287 bp, Zea mays
  Clone ID: MRT4577_119127C.1
aagaattggcgtggttattcgttagagttgagttgttattcctgagcgtacaagttccatagaatgtcataaacgctagaaaaaaaaacgaaagaatatggctcgcctgaaaggtgtatgcccgctacaccaatgagaacacatgtgatcagtggacccaaatatgttaaaccgtgtttggaagtcaggtacatgacagcaagaataatcgcatcgtaccatgtcacatatcagctcgccttgagaaacgacaaggaacttaatatgctgtttcgagctgtcaccat

SEQ ID NO: 20976 - DNA, 1702 bp, Zea mays
  Clone ID: MRT4577_119128C.1
cggttgagcgagaagccgagaagcaggtgtgccgcggaagccttcttctccagttctaataacgcttggccctctccttaaccttaagcagcagccccccgtggcccgggccaggaccaaccaacagacccgccgcgcgcccgcctacacccgtgacgcctcgccgagaaccacgcgcgatccgcccggtcgacgaggggcatctcgctatctcgtcctcctgggcgcttgggagaacggcaaccgccagccggccgagccaaggccaagccatggtggagtccagtggccaccggagcaccgtccccgcggccgtcggcttcttcagggtcccgggcctcttcgtgaggctgagcggcaagggcggagcgagcaatgccgtggacccggaggactcggtctggagcccgacctccccgctggacctgaagcacgtcatcaggtgcagcccgccgagggcctgcctcggcctcgccgacgccctcaccgccgacgggaccggttccctgcactcagggggcaggagctcgttcgtcgactccatcaagccgttcctcgagcgggcgctgcccaaggcggcgtgcgggaaggaggctgctgctgctgcctcctcgtcggccggcgtcgtcgccgcaaccctgggcaaacaggcgagcgagtacgccgactgcgaggagtacacttgcgtcatctcgcgcggggccgacccgaggaccacgcacatcctcgccggcgagacggtggaggtgcgcaggggcgacgtaggtggtggctgcaggaaggtggttttcatcatcgagccgttggcattgagcgaccggcagccgcgcgcgtcttcgtcttcgtcgccggcggcacccgctagagtcgtcgcgtccggccgttgctgctgctgcatgaagaggctgctggaggaccgggacatcttcatctacctgggcgagaaggccttctgcagcgacgagtgcaggaacgggttcatcgaggaggcggcggaggaggagctcatgattctggatcctgctcgaaatctttgatcaagatttgttagctgccgtggcaaaagtagagagtgtaatatttgcccgcaatattttgcttctgccttcaacttggggactacttggctgggagagtgagtgggggaaggacaaaggaaattgcctctcgttcaagtttttcggtaaggagaggtcgtgtccccggtttggccaaccagtgcaacggccgagccagccaatttccgtggtttgttgagctccattttggctactgtcagattagtctcttcgccatcaatatattactactgttttgtttaaaaaaaaaaaaaagggcggccgccacccagaaggagctgttctgggctcccgcgccgcttaccaccaagtcctgggcggacgtcgaggacgactactactactacttcgccaccaccgcgtcgccgcgccccatctggggcactgccggtgagcccgccaaggaagaggacgacgtcgatgatgttgtgcgtgccgcccttcaggaggtactgaagacactttttgagatcatgctctttgaggatgttggtaatcagtgtaggctgcgtcgaccaatattgagcctgataatgaccagcgaacaggtgccttcacttattattttattttaataataagttaataacacttatctttctactttaaaaaaaaaaaaaaaa

SEQ ID NO: 20977 - DNA, 112 bp, Zea mays
  Clone ID: MRT4577_119129C.1
gaagcattcacatgcaaccacccaatcttaataagaaacaaaattcattctcccttataactgcacaacccttaatcatttttttaggagagagcgccgagaaccaaggagg

SEQ ID NO: 20978 - DNA, 372 bp, Zea mays
  Clone ID: MRT4577_11912C.1
caggaagcaatcatggtgctctctgcagatgacaaaaccaacatcaagaactgctgggggaagattggtggccatggtggtgaatatggcgaggaggccctacagaggatgttcgctgccttccccaccaccaagacctacttctctcacattgatgtaagccccggctctgcccaggtcaaggctcacggcaagaaggttgctgatgccttggccaaagctgcagaccacgtcgaagacctgcctggtgccctgtccactctgagcgacctgcatgcccacaaactgcgtgtggatcctgtcaacttcaagttcctgagccactgcctgctggtgaccttggctagccaccaccctggagatttcacaccc

SEQ ID NO: 20979 - DNA, 276 bp, Zea mays
  Clone ID: MRT4577_119130C.1
ttgagtcgtactacacgacgcagtaatatgtatcactttgggatcttcatagatactataacaatggcgaacctaacgattcttttggcttaatggccggctatgttcaggatgagggctaaagttgctttgcgataaaaaagtgttgaatttggatagccagaagattcatttctcgtacaggagacctttacccctccagagtattcccattcacatgacaatcccggttctggtctaaaacggtacactcgtatttgaatctcgatacattgt

SEQ ID NO: 20980 - DNA, 406 bp, Zea mays
  Clone ID: MRT4577_119131C.1
cagtcgaggacgcgttcaaaaaccgtatcgtctcgcctgtactttttctttctcctcttcccgcatcccggggtggcgaccatgttccagcgttccagagtaaccaatcgaatcccgtgtctggttcgcgcgatgtcacaggatcatttcaacccccagcaccagcaagcggatgagagggaggttatggtggagcagcaacagccgaggagggcccctaagctgaggtacctggacattgcataaggcatggttgctcagtccgcgttgtgcctcgctgggctctactgcctatacaaggaccacgccggcccgctctcacccagcgttgacgccgtggagtctgacgtctagggcgtcaacatccctgtctactaccgctaacaacggctgcctttcgacattc

SEQ ID NO: 20981 - DNA, 376 bp, Zea mays
  Clone ID: MRT4577_119132C.1
ccaactcgtccggccacgcgtcatggcatcgacaaggacactctggatcatgtggccgcgtatactctgcagcctccttcagcgcgggatctgctcctccatggccaggatcatgttctcctccagcagacagtcggaggtggaggccactcactgtatcaacccaaggcagcaggggcccaaccagtcggacctgtccgtctccaaagcacggtctctgcataagacctgcttacaaacctgaggcagctaaccggattctgtcaatgcggcttatgacccacagacgatgcacgccaaggccaactccctgacgcagctcagcatgtatacctcagatagataaggcacctatgccaaggatgcaatgtcagtc

SEQ ID NO: 20982 - DNA, 996 bp, Zea mays
  Clone ID: MRT4577_119133C.1
tgtcatcgggtggacgtccgggaaggacgtgcccgtgtactatgactattctcacgttcatgcccgccggcacaggcgacaagaggctatggatcgcgctgcacccttccgtgtcgatgaagccggagttctacgacgcggtcctcaacggtctcgagatattcaagatgagcgacagctccggcaacctcgctggtccgaaccccgacccgtccaggatgctggaggaggcagagatgggcgtgacgcaggggcagttcaaagccaagcaaagcaacctccaggccatggtgatcggcggcgcggcgggtggcgcggcggcctttgggatagtagcggccatatgcgtcgtggcttaccactcgaagaagaggcgggcgctgggtaacagcgtgtcgcattcatcgggatggctgcccgtctacggtggcaactcgcacacaaacgccagcaagtcgtccggcggcaagagcgcggcgctcaacccgaacatcacggccatgtgccggcacttctcgttccaggagatcaaggcggcgaccaagaacttcgacgagtcgctggtgatcggcgtgggcgggttcggcaaggtgtacaggggcatcgtctacggggacaccaaggtggcgatcaagcggagcaacccgtcgtccgagcagggcgtgctggagttccagaccgagatcgagatcccgcgtccgcttcgccacaagcacctcgtgtcgctcatcggctgctgcgaggacgacggcgagatggtcctcgtgtacgactacatggcgcacggcacgctgcgggagcacctgtacaagagcgggaagccggcgctgacgtggcggcagcgccttgagatcaccatcggcgccgcgcggggcctgcactacctgcacaccggcgccaagtacaccattattcaccgggacgtgaagacgaccaagatactggtggacgagaactgagtggctaaggtttgcgactttgacttgtccaagaccg

SEQ ID NO: 20983 - DNA, 637 bp, Zea mays
  Clone ID: MRT4577_119134C.1
cgttcgtaaaaaaaaaaaaaaaaaaaaaaaaaaaaggggggggggggggaaaaaaaaaaaaaaaaaaaaaaaaaaaaaaaaaaaaaaaaaaaaaaaaaaaaaaaaaaaaaaaaaaaggggtggcgggtttttagggttccagttttccatccttcgttcctgccgccttgcctcctttttttttagtggtcctcctgtggggggtaccctggccccttcgctttccaatttgcctggttgggaaattccctggtccttcccctttttccatccttttgcggcccttcccccttttcccctttttggcgtttttccaaaggggcccgggccctgcccctttcccttttttcccctttttgaatgctttttgggacgcgccctttcccggttctttttccttttggggtggggtttttgccccctccttgcccgtttccctttccatttccctggcccctggccctttttctttttccttttcttttttcgctcttgccccgggttttcccctttacccttttatttggggtctcccttttggtttccggtttgggtttttgcggctcccggcccccaaaaccctgattagggttttggggccctttttggccctttgccccttttcccccggtttttc

SEQ ID NO: 20984 - DNA, 458 bp, Zea mays
  unsure (1)..(458): unsure at all n locations
  Clone ID: MRT4577_119135C.1
cccagcggccganncacaaacacaccaagcgaagcacatgagcaatatcccaacaacaacggcnaccaagggancagggccnccnngcgcancgggcgccgncngcgagcgcaacaaangcgnncannannccacaaggcgcacncgcnccaaagggcaaaaaaacacgaggccacccaccaggnaccccaaggggcnncgaacacccaacngagcaagccganaggcgacaacaagcaaacgcggcgagcgnncgacaacaaccaagngcccagcggcaacaacaanccgaggcacaacaaacaanacaaaccancgcaacgcaacagcaacaacaangccgaccagcacggagccaccaagccagggngaacccagccgccaacnngcaacagcagnngcaggcancaaacccacnngccccggcaaaacgaggngcaaaccagccacaacaacag

SEQ ID NO: 20985 - DNA, 193 bp, Zea mays
  unsure (1)..(193): unsure at all n locations
  Clone ID: MRT4577_119136C.1
ccgtccgtacattggtgtcggtcaaaaagaagctggatatatattatanntatagtgtcacaaccagctacattttgtcgggtggaggcttttaaagatggccttcgtgatcactacngctgctcnntttttaggacccgtggaacctnngccatcggctgtcactcgatgaaataatacgatnnntaaccac

SEQ ID NO: 20986 - DNA, 1834 bp, Zea mays
  Clone ID: MRT4577_119137C.1
cattgggaacctcgaggccggccgggtccagttctcctgcactctgctccccatattttatcccttcggagttcggtcggatcagacgcttgtgaatcctggtcatcattcatggagaagaaggcagctactacagaggaaccccttctcgcgccgcggtccgagcacacggtcgcggcggaggccaagcggctgctgagcctggcggggccgctggtggccagctgcatcctgcagaacgtggtccagctggtttccgtgatgttcgtgggccacctcggcgagctgcccctcgccggcgcgtccctggccagctcgctcgccaacgtcaccggcttcagcctcctcgtgggcatggcgagcgcgctggacacgctgtgcgggcaggccttcggagcgaggcagtacggcctgctcggcctctacaagcagcgggccatgctggtgctcgcgctcgcctgcgtcccgatcgccgcggtctgggccaacgccgggcggatcctcatcctcctcggccaggaccgcgacatcgccgcggaggccggcgcctactcccggtggctcatactgtccctggtcccctacgtcccgctcgcgtgccacgtccggttcctgcagacgcagagcatcgtcgtgccggtgatggccagctccggcgccaccgcgctgggccacgtgctggtgtgctgggcgctggtgttcaaggccggcatggggagcaaaggcgccgcgctgagcggtgccatctcctactccgtcaacctggccatgctggctctctacgtcaggctctccagcgcgtgcaagaggacgtggaccggattctccacggaggccttccgagaccttctccggttcaccgagctcgccgtcccgtcggcgatgatggtctgcttggagtggtggtcctttgaactgcttgtgcttctctctggtctgctgcccaatccgaagcttgaaacctcagtactgtcaatatgtctaaacactggcgccttgctgttcatggtgccgtatggtctttgcacagccataagcacacgtgtttcgaatgagcttggtgccggcgagcctcaagcagcgaggctagcagctcgagtggtgatgtgcatcgccctgtctgcaggcttgctgctcggctctaccatgattctcctgcgcagcttctggggctacatgtacagcaacgaacctgaagtcgtcacgtacattgctaggatgatgccggtcctggcgatttcgtttttcacggatgggctccacagttgtctatcaggagtgctgactgggtgcggtcggcagaagattggcgcgcgcgtcaatctcggtgcgtactacttggccggcattcccatggccgtgctgcttgcatttgtgcttcacctgaatggaatgggcctgtggcttggcatcgtttgtggcagcctcaccaagcttgtgctgctcatgtggatcacactgcggataaactgggagaaagaggcaaccaacgcaaaagaaacggtgttcagttcatctcttcccgtagcattatagagctgtatcctatatatgtgcagctggacgtaacaacaccacaacatgaaaaggctctattgctgcatgctgctacactaccttcccaattgagagacaatatgagttctatgcgttctctaatacgttacttagtatacatattttgttattaaatatccatatcgtcagggatattatatgatattgattatctctattcatcatagaggatccgttagttaaacattgtagcttgtcaaaatcattattactccctccgttttaaaacgaagagggagtataacttaatatcttt

SEQ ID NO: 20987 - DNA, 368 bp, Zea mays
  Clone ID: MRT4577_119138C.1
gacacgatatcctagcccggcgagagggggcacaccggtcagggtgcgctttccctttccttcacacacgcaaaagcgagaactccgtgccgcgagactcccgcaactgaggcgaggggtcgcgcggcgccctcggatcccccacgcgtgaggtggctgttgtcagaacgcgctgcatacatcagggcgcattgcgctgtcctctcggacccgtagtgggcccgaacgctgcggttcgaccgtgagtaaggccacaccaagtgcattgctgacgagaacaaggttagcgccatgggcggcggcaaggaccacattggtcgacccgacccaagatgaccggaagcaacactgcccgaattgcaccgcat

SEQ ID NO: 20988 - DNA, 2057 bp, Zea mays
  Clone ID: MRT4577_119139C.1
tcccaccgaatgacccgacccgcagagaaaatccacggtcagcgaagggttcttctcaccgggcgaggctctcatggcggcggctgaccccgagacggcggcggcgctgcggggggaggtcgccgcgctgcggatgcgcgtacaggagctggaggcagagaatcagaggctggcaaggattgcttcgacctgtacctgcggattcaaggagggcagtgttggatccattactgcacatcataatgtgaaatttcatcaaaatagcactatggagaaagatttgagctctccatttgatcacacagtaatatccaatgcaaatgaaatgcagtgcaacagaaatgcagatgacaatggtttacctgaggattcaagcaagcatactaaaagaacaggtcgcaaggtgggcattttaagtcactgcccaaagcgactagttgctctcaaagtcatgtatttcggccagagattctatggtttttcttctgaaggtaacattgaaccaacagttgagtctgagatatttaaagcactggaaagagcaaaactgatggttgccaataggaaagaatcatgctactcgaggtgtggaagaactgacaaaggagtttctgctactggacaggtgatttctttatatctgcgatcgaacataaaggatgttgggggggacatgttagatgaaagatccgaaattgattatgtgaaggtattgaatagaattcttccaagagatatacgtgtactgggttggtgtcctgttccagcagattttcatgcaagattcacctgtttgagccgggaatataaatacttattttggaaaggggacctggatatattggaaatgcagaaagctgcatccaaattcattggagaacacgactttaggaatttttgtaagatggatgcagcaaatgtgagtaactacaggcggcacattacagaatttactatttctgcatgtgacagaaggtccaacaatgatgagctgtgttccatgacgatcaagggtagcgcttttctgtggcaccaagttcgctgcatggtagctgtgttatttctaataggtcaaggccttgagtcaccatccgtagttgattcactattggatattatgaaaacatctaggaaacctcaatataaaatggcgccagagcttccattgattttgcaatcttgtctatttgataaagccaactttatgtgttcagcagatgccagccggtctctgactgagcacttaaatgatgaatatcgtcaccatatgctccaagctgaaatatttcacatagcgtcatcctgtttaccttttccagaaccaaattcatcagaaacgcctcagaagaagaggaaccatattcctctcctgtcacgagagacagagccttcttacgaggagcgcatatcgaaagtcaaagcgaagctggctgataatctcaagtagagccaccgttttcaattgttacaccaatacttggaagagaacttatggaactgtagaaggtttcttccaaaagcctatatgaggcaatccctctttatgccggtcttcgccttcttaagcttggcaggtttatgacgtgcgctttttttatggcaaaattggatctgttaacatgtggagatggaaattacccggaaacatgagcttagcgtggattttaccattttgaggtgttagaaaagcgtgctgcctattttagactagatatacagactaaaacatatggagccccacatttcgggtattgtcaagttgtgcgtttcactttcaaaatagtgtaagggccttgtgttttttttcttcttctgaatttgttgtaaaatagtctagcatcccttgcaaagagggggtaatgttgttgtcacatgatggtgtgtaccaaagtgtagtaaagcatcccttgcaaagagggggtggtagtgtcctgtatgtttttttaagcaaatgtgacaaactatataagaaatgaatatttcatgtgagttatgtaaaaaaaaaaaaaaaaaaaaaaaaaaaaaaactcgagactagttctccctcgtgccgaatt

SEQ ID NO: 20989 - DNA, 1683 bp, Zea mays
  Clone ID: MRT4577_11913C.1
agcagtggtaacaacgcagagtactttttttttttttttttttttttttttttttggaactgatgcgacgacggggctgtaactgtgtgcaagtaatagtccatccatcaatgtaacactcatttgcttctttttggagctgagcatccttgtgatgtttcctttttggaaaacctggcaattcatcgtctgacagtgcatctgctattagttgctcttgggaagaccattgactttttataccagaaaataaaatccggttcttctgttttgtagtttcattttcgttcgtactgatctggcgacaagggattccatagtactcacaacaacaacatgttccaagatcatttgtctgttggtgtgcacccttttgttcatcagttgtttcatttctagggacgttttgtcttgccaacacttgctggtatgagaaggtgagttacgatacattctgtattacaagagcttgtgcatgtaacagcttttctaagtcaactatcgagggtgatgttgtgggttgatgtcatatggttatcgggagtctgctcttatggcattggcagatatatgatatgtccttcatccttgcagtagtagcaagcacctcttgctttgagttctttgcgagtcaactttgcttgaccaaaaggtgatgagggatgattgagtgtctgtatctcatatagctgagtctggcttgattcttctgtttgagtatccaagtgttttcggggcttttgcttgtggttgaggtggactactcatgtatccaaacattttcctattccttttgtcgttcttcactatattgatagaagtttctgtgcattttggttcatatcccatgtctggagactgagataacttaatctcggaggtgttcggtagtgaactcttctcagaacaattacgaaggtaatgatcttcacgtccacatagatagcaagcttttcttgaagttattttttgactttttccatgcttccatttttgtttcttggacctgatgcgacgacgagactgaaactgtgtgcaggtgatagtccatccatcaatgtaacactcatttgcttctttttggagctgagcatccttgtgatgtttcctttttggaaaacctagcaattcatcgtctgacagtgcatctgctattagttgttcttgggaagaccattgactttttataccagaaaataaaatccggttcttctgttttgtagtttcactttcgtttgtactgatctggcgacaaggaattccatagtactcacaacaacaacatgttccaagatcatttgtctgttggtgtgcatccttttgttcatcagttgtttcatttctagtgacgtttcgacttgccaacacttgctggtatgaggaggtgagttgagatgctttctgtattatcagagcttgtgtgtgtaacaacttttctaagtcaactatcaagggtgatgttgtggttgatgtcgcatggttatcggtggtatgctcatatgctataatttctgctaaatcaacttgttggagtctagctaacacttgagaggttgcttgcagaaacagtgcatgtgccttcttgaactgttccatctgagacttagcttgaggagttgccaagacaatgtattctttgcacttattgacatcacttgtagttggcattccaaggtttgacat

SEQ ID NO: 20990 - DNA, 250 bp, Zea mays
  Clone ID: MRT4577_119140C.1
ctcacgcgtccgcggacgcgtgggcaaacttcagcgatcagtatgatatgcagtatgtgtcattcatgggtactaaccaccatgcacagccagtgttactaggttgtggcctgcttgctggtagatctcttggggcttatgtgtggctttttggtacatggttaagatgtatgaatgccaaaccaccacattcaataattacaaactactgtcatgatgtagcgatactatcaaaaaggttttccctaac

SEQ ID NO: 20991 - DNA, 1334 bp, Zea mays
  unsure (1)..(1334): unsure at all n locations
  Clone ID: MRT4577_119141C.1
ggccggggtggcaatcgccaacactattatatgcatattcatatatatatatgtgtggaaatcaagtgcgatgcatcatccactcaaggttcaaaaaagtttagattaattcgtttgcatatgtaggattgtatcttgatgttgatacctttccttaaagcaagtcaataccctgcatatcatgtaccgtagggcagtgtttcaaaggtgtcgcctaggtggccaggcgtacccagcttgccttgtgaaatagtgatgccttgtcgcctaggcgtccaggtgaacccaacactcgtcttgtttggatgcctagtcgccttttaaacactgccatggggctcttgctattgatgctttacctaactttattcttctataggagggcagtgttggatccattactgcacatcataatgtgaaatttcatcaaaatagcactatggagaaagatttgagctctccatttgatcacacagtaatatccaatgcaaatgaaatgcagtgcaacagaaatgcagatgacaatggtttacctgaggattcaagcaagcatactaaaagaacaggtcgcaaggtgggcattttaagtcactgcccaaagcgactagttgctctcaaagtcatgtatttcggccagagattctatggtttttcttctgaaggtaacattgaaccaacagttgagtctgagatatttaaagcactgggagagagcggaactgatggttgccaataggaaagaatcatgctactcgaggtgtggaagaactgacaaaggagtttctgctactggacaggtgatttctttatatctgcgatcgaacataaaggatgttgggggggacatgttagatgaaagagggggtacgcttctgcgttgtatccccttagtagtgttgtagacaccaaggaatgcagtgatatgagtaatgatatgatttgtttcttaaatgactcgctatctagctaagggaaaacctcgatcttcccctatcaaatgcattttgtttgcttcacttgaatgattatctgtcatagtaagattgtttttgtccccagaaattgattatgtgaaggtattgaatagaattcttccaagagatatacgtgtactgggttggtgtcctgttccagcagattttcatgcaagattcacctgtttgagccgggaatataaatacttattttggaaaggggacctggatatattggaaatgcagaaagctgcatccaaattcattggagaacacgactttaggaatttttgtaagatggatgcagcaaatgtccaacaatgatgagctgtgttccatgacgatcaanggtagcgcttt

SEQ ID NO: 20992 - DNA, 359 bp, Zea mays
  unsure (1)..(359): unsure at all n locations
  Clone ID: MRT4577_119142C.1
aggatctgctgaagaacaggaaagggcgggtggcgagacctggtctggcgcagtaaaggaagcgcagctgctgctcgccctgatcgaagtcaaggtcgtgtcgcgggtgctccgggtggggaagctgagcagggagcagctgccgagacgcgaggagaagctgaacaaggtgggccagacggagaaccggctgcgccgcgacgggtacccgatcctcttgccctgatgaccgacgcaacatgtcangccgcgccagagaggtgccttgccattcactttgtttaccttctgagataagtacatgccttcaagcctaattgatgatgcacataccaaaccaaaagtcgggctacacattt

SEQ ID NO: 20993 - DNA, 597 bp, Zea mays
  Clone ID: MRT4577_119143C.1
actttatccagaagatccattcgagaaagctcaaactaaattatggattgaacgcttcagtgcgattgcaagcgcattctatcgcttagtttatgaagaaaattcagacgatgttaacgcagaattgttgaacacattctacaaagaacttggtaactatgagacagaattgattaaacgtggaacaaaatactttgctggaacaaaaccgggaattttcgattatgcagtttggccgtggtttgaaagattcggcattcttaagtcaattgttggagaaaagtcaaccttgatgatagattcccgacattggccaaatgggctcatgttactcgtgaagatttggcagttcaaaaacatttgttgtcaacatacactcatacacaattttcgcttggtcgtcgtgctggcactccacattatgatcttttagtcgaagattcctaaaaccatttctccagcgtccagaatatacaatcgtctatcatcacaagtgctttgtaaatggaaaattttttggaaattgcttacagcttttgatggttaacaaaaaatggttctttagttattttttacattggcccattttttaaccct

SEQ ID NO: 20994 - DNA, 206 bp, Zea mays
  Clone ID: MRT4577_119144C.1
tgcttccttgacacgactgccacctcccctgggcggggccccctagaggaccgccggcgaggacacccacacagggcggcctgatcctaagccaggaagcaaccacccacagcgaggctaccgaccaagcccaaaagggaccacccctgcgcatctacaagacaggcgctttccaaaatgcgaggaccatgaacatctgctccaag

SEQ ID NO: 20995 - DNA, 425 bp, Zea mays
  Clone ID: MRT4577_119145C.1
caaaccaaaagttgtttgttgtgggtccaacccattggggaggatcccgggggggttctgcttaattgcccgcccgcttcctttaataccggaaaatttggcctcagttggggcttgtcccaatgggtcgccttttttttaactggccacataacccaggtttttttttccatccttggaagcatccgcagttgacccagtcccgggttccatgacaaactgttggtgggtaaaattctcacaaacatggatttccactggttgtggggtcaaaaattcgcattccctcccggggggcggggctgaacccttgatattttcccctcgattttcgtcccccttcagaaagcaataaagggccattgcgggggcttccattttgggcccctcatcaaaatttttgaaatcttcctttgttttttatt

SEQ ID NO: 20996 - DNA, 395 bp, Zea mays
  Clone ID: MRT4577_119146C.1
caacaagcatcatataatgtggaatacagtttcaacaatttatcaacaatggcggccaaggaggttgggcatccttatgctccttgctctttctccatgtgttgctaacgcaaccatttttcctcaatactcacaagctcctatagctgcccttctttctccatacctttcattaatgaccacttcagtatgttaaaacccatcccttctaccctacatgctcctacaagcaatggcaacaagcaactaacctttatcacccctgttttttcaacaattgtcagccctttatttggtgcagtcatcggctcaaaccatcacggcacaaacagctgcatatactcgttctaccattgaatagccaattatcttttggcaaacctttttccctactc

SEQ ID NO: 20997 - DNA, 2094 bp, Zea mays
  Clone ID: MRT4577_119147C.1
cattgggtacctcgagggcggccggggacgacaacctccacctcgccttcaactcctccacgctcccgtcctctccacctctcgctcccacctcccccgccgtcaccaccaccaccacagcctctcccccgcaacgcgttccttcccggtgcatgaaaccctaaacctataccccactcccctccccgagccatcctctccccccgcggcgatggccaaggcgctgctctactcctccctcctccccgggctgccccgcgctgtcgggagcagccggagcgctgccgcgaggctgctgctgctcccgcctctccggctgcggcgcggccggcgcgccgcctccgcgtgcgcggtgagggcgggcctgcacgggctcgactccgtcggcgggccccacctccaggccgcgctggagcgcgccgaggcggcgctctacacgctcgccgacgcagcggtagccgcggcggacgccgccgcgggcgcgggggacgacgccggccaagctgcggcggcggtccagaagaacggcggctggttcggcttcatctccgaggccctcgaggtcgttctcaaggtgctcaaggatggtctctcagcagttcatgtgccgtactcctacggatttgccatcattcttcttactatcattgttaaggctgcgacattgcctttaaccaaaaagcaggtggaatcaactatggcaatgcagaatttacagccgcagcttaaagcaatccagcagagatatgcgggcaaccaggaaaggatacagctagagactgctcggttatacaggcaagctggtgtcaaccctttagcaggatgttttccaacattggcaacaatacctgtatggattggtctttaccaggcactttcaaatgtagcaaatgaggggctattgacagaaggatttttctggattccatcactgggtggtcctacaacaattgcagctcggcaaagtggtgctggaatttcgtggctcttcccatttgtggatggccatcctccgctaggctggtatgacacgatatgctaccttgtattgcctgtgctacttgttgcttctcaatatgtctctatggagatcatgaagccacctcagagtgatgacccgtcacagaagaacacactcctcgttttgaaatttcttccatttatgattggctatttctctttgtcagtgccatcaggattgtctatttattggttcacaaacaatgtcctcagcacagcacagcaggtttggttgcggaaaatgggaggagccaagcctgtagtgagtgagggggataggaggataattacagcaggacgagcaaaacgctctaatgctcaaccagctggagaaaggtttaggcagctaaaagaagaggagagcatgagaaaagtcaacaaagcactcgctgcaggagactcaaatgcatcgtcatcaacgtatgacatggaggatgaagagtcggatgacgagaccacagaagagggagggcccgtggaggaagcatccagtactggcagtgacaagaagcctccaagttactcagggaagaagggcaaaagatccaagaggaagcgcatggtgcagtgatcgtcacagctcaatcggatgcgattttcgccacaactggttgattcagttgaccagttaggtgccgcagtggatcacggagacagttttggcggtctgctggagccctatatttggggtgcagacaaaatgaacagcttccggggtcacaggtatttgctgctaagcttatgcaaatggaggtagctgagtatatatgctaggcctgagggtgagtgatggaccggagaacaggagtcgggtacgcgtgcaagcagagagacagggtctgtagaagtagataaggtgtaatctctcgtcaagctgggttccagaatctggattgtcctcaccattcgtatgcattgcattgtatttgctttcctcttgtaacctaatgaaccactgttttggagggtatgatcgcgcaagctgacaaccatccagtcgtatacaaatgagttcgaattcgtcttgtcagaactcgttaagagaatgaacttgcgcgagattttttgcatcgc

SEQ ID NO: 20998 - DNA, 289 bp, Zea mays
  Clone ID: MRT4577_119148C.1
attattattatatacattagccagaagaaatgtatttttcccataagtttaggaagaacataataataataagcgatgctttacattttttactttattccctaatgaaatagggcagttccgcatatgaaatgaccacctagatctacaggaaactgtaagccaaatcaggattagctgttttatttttttacaaaaaactgaaaaattttcataacatggtgctattttattcaccaaaggaaacaagctcgcttactaatacctactgatcaaaacaaaattatta

SEQ ID NO: 20999 - DNA, 113 bp, Zea mays
  Clone ID: MRT4577_119149C.1
ctgggaagaagataagcgacaaaggggggcaactaggaacacacaacatgcaaagatgcacgctatcatggaccatataaacgcagaccttgaccaacagaaacagacagcac

SEQ ID NO: 21000 - DNA, 447 bp, Zea mays
  Clone ID: MRT4577_11914C.1
caaaacattggactaggagctcaacgcttttaaaaaacagggttcttattaggtttgaaaacatgggataaccctttggacttgggaccacttaccaaaaaaaatgttctcattaggacacacattttggggcaagacaatccatgaaaatgctttaaactacaaggcttttgccctttttcctttggagctttttcatgtaaaactcaaactttttaccctcaagggtgtacccattaacttggccacactttccagggggggaaaaaattcattccaacaaccgtccactggcaaattgctccttaatgtgtgggtcaagggtacctcccttcttgcgctttttaagcttcctcgggacatgggtgctctttttcgtttcctcaactgctgcctcaaccttttgtccctcagcattattcttctttgcagcaggggttttctttt

SEQ ID NO: 21001 - DNA, 296 bp, Zea mays
  unsure (1)..(296): unsure at all n locations
  Clone ID: MRT4577_119150C.1
ggcacgaggcggccctctggacacctcgcttccgctcccggctcccctccggccacccagacatcgtccgttcgctcgccaagagacaggaccggagaccatggcggaccagctcaccgactttttgatcgccgagtgcaaggaggccttcagcctcttcgacaaggacggcgacggttgcatcacaaccaaggagctcggaactgtcatgcgatcactgggncagaacccaaccgaggctgagctccaggacatgaacaacgaggcccaagcggacggcaacagcaccatcgact

SEQ ID NO: 21002 - DNA, 350 bp, Zea mays
  Clone ID: MRT4577_119151C.1
gctagcttaattcttcgtcttcatatcaccggtccaacaatacaacgcagaaagaaaaggaaaaaaaaaatccatggcgttaattagggcttttggttaccagcaggccagcctgcaccgcacccctataaaaaccaaggtatgcagcctgcatacagaagacacaacacacacaccagttttgatctatacgacgacgctttagaagcagcagtagcaccttgatcacttactctcttcgagccagcaagctcttgctgcattattgcaagaggaacaacgaaggagaagagctagggggaccaagctactgcgggagggagaagggtgtgtgccggcccgccgtcaag

SEQ ID NO: 21003 - DNA, 302 bp, Zea mays
  Clone ID: MRT4577_119152C.1
ttgatttttcttgatttggttgtgtttaattgattgtgttgttggccaaaagaagatcaagtcttaagccttggcccgcggtactattttgtcagacattgtccttgaggaagtcagagaactcttggtttggaattgggaggaagccggtttccttccagaggtctggggtaaggaatccgaaggtgttgatgagggcgttgaacgtagccttgacgaattttccaggggtcttggatgaaccaccagtttgagttttaacatttttaataccggcgaattggaggaacttctttgggaca

SEQ ID NO: 21004 - DNA, 310 bp, Zea mays
  Clone ID: MRT4577_119153C.1
gcaaaccgagaaaatggcggctcggcgtggtctagagtgggacggggaccagcagggagcggtgctgccaacgccggggcccctctgcgcgcccgtcgtctgccttctcagctccggcggagacctagaccccggcgccttcgcaggcttcctcgtgggatactgaaaacgttggatcacaaaccatggcacgaaggctcgtcttagcattgatggatcttctgcaaacacattcgctgctcttgctggtgtccaaagcttcattatgtgcttgctaagaacactgcgttggaaagatgacatgaacaat

SEQ ID NO: 21005 - DNA, 1608 bp, Zea mays
  Clone ID: MRT4577_119154C.1
ctttccgagacaggcacgcacgacacgcgctcgcacgcagagcaactgcttcgatctctccgtgtccgtcctctactctctagctaaccgcggtcggcccggggaggtggcgatgggcagcgaggacatgctcgtcgagatccacccccgcgagctccgctttctcgttgaggtgaagaagcagagttcatgttgtatccatcttgttaataagtcagatcaatatatcgcattcaaggttaaaacaacttctccaaaaaaatattgtgttcgaccaaatataggagttattcttccattggcatcacgtgattttacagttactatgcaagcgctaaagaatgttccacctgatttgcaaacaaaagacaagtttcttgtgcagaccacagttgttccatttggtacagctgacgaggacatcgttcctgcttttttctccaaagaaactgatcaatatattgaggagaagaagttgaaagttgtcactgtcagcgtatcagagcctcaagtagagaagctcatcaatggagttccccatgccaaggaaacagctggagttactgtggcagagcagacactagatagtgtgaatgaagcacctaatgtggtgaatgaagttcgtcattctctgaaagcaagctttccgtctttaagtggaactcctgctactttcaatgaaaactcctcatctgtaaacgaatgccctactatcctgcaagaatttctagtcccatccaaacaagcttcatttgcattgtcagaatctgcttccaatttgcaagaatcctctgttgcctctatagaaactctgttttcttcaacagaagcaagtgtagacctgaaagaatctccaccgctggaatatactcctgctccaagtgaagttccatcattaagtgataaagaatctaccaatgctgataatgtttatatacctcaggtaaccaaagattttcaaaatttacagatgaaacttaacaatcttgaagtaaaacttgatgaggctaaaactttgattgtaaaattgagggaagcaaacagaactaccatcctagagcgggataaattgcagaaagagatggtattcttgaaaagggcggaagctgctgcaaggagtcagtccatcggttttcccctgcttttcgtcatctacgtggcagttgttggcattttgctcggttaccttctacacctatgaggatggtgaattttagaagaagcacctgcgccattgctgatctctcttggagtcgctgagttcctgaacctgggttactttgtcagagtgaacctactgtcacgtcatgattgtcacattagtcagatgaacttgcatacatcttaggaccgggggtgataattactggagtatatagaaatagagcagcttaattttttacttggtataagaatagagtagtggttgatatatgctttgatcgagaaggccctgtaaccaggagatcatatccttgatacttctcctttcatgacaaggaacctccccttgtccttgtcacaatacgaacagaaactataaagaaaaaaaaaaaaggacgagggccgtccgcgctatccgagcccacgcacgcgtgcgtgtgcagt

SEQ ID NO: 21006 - DNA, 166 bp, Zea mays
  Clone ID: MRT4577_119155C.1
aaaataagtcctaaaaaaacaaaaaagaaaaaaaaaaaaaagaaaagaaggaaaataaaacatgatcaataaattaaaggggcggctcttcaatgggctgtatgcctgcattcatttcttccggtccttgtcagtgtggccgttctgttgggtacatccttgtagg

SEQ ID NO: 21007 - DNA, 319 bp, Zea mays
  unsure (1)..(319): unsure at all n locations
  Clone ID: MRT4577_119156C.1
agggatgcgcgcccgagtggcgcccggtggcgtccctgctcctccgccccttcgggcccaacgctctcctccccggcgctgtgcccctcgtcctcgccgcgcccacgcaccgccctcgggcgctcgcgcggnggccctccgcctcgcccagggngccctggacgcgcgcctgaggcaggccgcggaggcggcggcgcgggcggcgcncgcgccgtncngcnggngggccgcgggggncgcggcggcngccgggcgcgggggggnctttgccggcggcttgcctggngtcccgcggccttcnnncccgcgctgggtcccg

SEQ ID NO: 21008 - DNA, 470 bp, Zea mays
  Clone ID: MRT4577_119157C.1
gccggccgggtccgaaaagggaccccctttccgcccgtttgcttgtcgagttgctccaccccggcccccgcgcacgcgcctcccgtgccgccccggcgccgccgcgtccgagcagcagatttttgcgtgggggattcctgttcttccccatcaattgcttgctgcgccagtatcccagcactaattgccttcagctgggtgacatggtgaaaactccgagatctcctgttaccacagcaggaggcaatgacaaagcttcaaagtgtggttgtgatattgacaatggtgaggctgggccatcattggtggtggtggagcaacaagcactagccactttgtagaaaacatgtggtcactagcatggtcatttgacttaatcattaactagacaatacactgacgaatgaaccagtgtaacatttaaatggaagtttattatcacacaaaaaaaaaaaaaaaaaaggccccta

SEQ ID NO: 21009 - DNA, 158 bp, Zea mays
  unsure (1)..(158): unsure at all n locations
  Clone ID: MRT4577_119158C.1
agcaactctctcgagtcnattccgagagcagcgagccagtgactcgatctgagcntnctacaatggcggcaacttctaatgccttcttcttcttgttctgttaagccttttgttcctttgccaaccggccggccgccgtcaactacggttcggggaaa

SEQ ID NO: 21010 - DNA, 337 bp, Zea mays
  Clone ID: MRT4577_119159C.1
aattcggcacgaggaagaattagaagggagaaaccctcctcttgctcggccgtgggcagaggcccccggctgacgttcctgcccatcgatacccctctctaatccctcaccgatctagcaatcataacaattatggttagctattacccagatacagcattttgtaattaagtccctgcagtacttgaataattatcattatacctcctagtttttagcagaacacatcatcattaaattttgtatgtatcatgcttacttcaaaagcttaacgatccattcctctatcctgtatgctctaaattttttgtgaactacacagaacttatcaccaacg

SEQ ID NO: 21011 - DNA, 591 bp, Zea mays
  Clone ID: MRT4577_11915C.1
ggccggccgggccgggggatctcctccccctgtctctatctcgcttcctggctgatctcgaaccccttcctcctctccatctgccattccatccggcgcctgcgccgcctgcgcaggatgattgtgtagaaactctatatcatgcctggcgctgtacgcaccgacatgaatgacaatatgcgcttgaaaaataaagcaggtctcaagaccacgaccacatgatgacaaggcgcattcatagctcctctgacttagagatcgttttcaccgccattcctgatatccatgaggacagcatcttctaggacgatcgttgttatccagcttcacaaccctattagcgggagcttccattcctgcaaatacatgacgtagttactgctatactccagacatcaagtctgatggagcttctgacatcagatatcatgcaactgggtcctgataacctggacatgcttaagagtgtgcctgagattttcctgactttggtaactggtgctgaagcaactgctcaggatgatgacgacgtcccggagcttgtcctacgagatacatttgacgatcgctgcaccacaaggagcctcaact

SEQ ID NO: 21012 - DNA, 1838 bp, Zea mays
  Clone ID: MRT4577_119160C.1
ttgggtacctcgagtccggccgggaacttctcgaattgatcctggtcaccatatccgcggtaaggtagtttctaaaaagactttttcatcccctcgccgcccgccgcccgccgcgattcacccccgccaggccgccacgcccgcagcccgccgacgcaaagccgcgcgcgaggcctctcccctgcgtacgcggcgatgaagatcgtccaccgcgacctcgttcgcaacgggcctggctccgtcaagttggtgccggaggaggaggacgacttgtggcacgcgtacaacctcattgccattggtgacagcctccaggccgtcaccgtacggaaagtgctgagagaggtggcatctggaggacgtgatgccgagcgtgtgaagcttaagttagaaattgtagtcgagtctgtagactatgacaaggagggatctgttttacgtgtgcgtggaaaaaatatcactgagaatgaccatgtgaagattggccagttccacacgttagagcttgagctgaagagaccttttgttctacgaaaggaaatttgggattggttagcacttgagaccattcagcaagcatgtgatcctgctgcaagtgctgatctagcagttattctcatgcaagaaggacttgcccacctattcctcattggcaaaagcataacagcaacccgggcacgtattgaaacatcaattcctaggaagcatggccctgcaattgctggctacgagacggccctcaagaagttctttgagtatgttttgcaagcatttctgaaacacattgattttgaagttgtccagtgtactgtaattgcaagcccaggttttacgaaggaccagttccgcgattatttgtttcttgaagctgcacggcgagatttaagagtaataattgagaacaagcaacgccttgttctggcgcatgcaacatcaggttacaagcatagtttaaaggaagttttggacacaccaggtgtgatggcactgataaaagatacaaaagcagcacaggaggtccgagctctgcaggatttcttcaatatgcttactaatgagtcagctcgtgcttgttatggaccgaagcatgttgagtttgcactgcaacagtttgctatccagactcttttaataactgatactttgtttcggaacgctgacattgctacgaggcaaaggtacgtgaagttggttgaagatgtcaagaaaaatagtggcacagtacacatattttcctcgatgcatgtctcgggcgaacagttggcgcaactgacaggaatagcggctatacttcgttttccccttcctgaactagaggacatggagctgtgatgaaaccaacctttttgcttctcgataacattctttttggttgtgatctgttagcatactacctgtatcatgtgtaacgttatggagctatttgatattgtataggcaaccctggaaaggaattctggtattttttaaggtatatcctattcgttgtaaatggttcatcgtgcgttgtttgccagttctttttctcgttaagggttagtttagaaaccctaatttctcaagggtttttcattttcccaagagaatttagttcattttctcatgggaaattggaaatctcatggaaaaatagggttgccaaactagacctaagtcttgttgttatttttcacatcctaaactatctgcatgtaaagttaccactgagcgttggagctccagacatcagaactaattttcgtgggccttcttgttagttcgtgcctcttttactttattgtatttctttgatgacaaaggcatcatctactgactttatatggaatcacctttaatat

SEQ ID NO: 21013 - DNA, 311 bp, Zea mays
  unsure (1)..(311): unsure at all n locations
  Clone ID: MRT4577_119161C.1
aaaagatgaaatttagatgatattactatngacagccttatactggcacacgtcttagtacggtccacgtcgttttttttatttattctacacaaagcgtatacctgcggtcggccctgtccatgaatcatgaacggggggggggggggcagcaattgatagaatgggcaagcttcttttcctttttactacgataggctgcggctaagcagcccttggaacgacctgaagaggtccatgttttctgcacctaagatctcggccgccttcctcagggtttcctatcgagattgcctatgggcgttgggctc

SEQ ID NO: 21014 - DNA, 847 bp, Zea mays
  Clone ID: MRT4577_119162C.1
ggccgcttttttttttttttttttcgcacgaaccaaaagttttttaggctttcctgtacaaacttgtttggcacgaagcacgatgagccatacatagatatacctgaaacccttagcagatattcgattccaagataccctgccatccttgtaaagcaagacggcctactaactaggtcacccggccgtatcggtctttaattgatagaaaaagtctacatgctcctcataatggcgccttggaaggagtacctggaaggcgcgggtactttttttggagtggcacgttctttgacgtatagaacagctgttcgttgaccatgaggtcccattgattcaacattacataactcaagcattgaagcacccaatttctttattgcaccttctgcatttctgacttcttcatggggatcatgtccttttgcagctataaacaaaccaccaatgcgaaccaatgggatgcagtactccgctagaactttcagttcagcaacggctcttgcagctactatatcataactttctctgaaatcaagactttggccaactttctcagctcggtcacacaccacatccacatttgacaagttcatggcttcaacagcatgctccaagaacgtgcaccgcttccgcatcgactccaacagcgtaaacttccagcctctacagcagctccagtggcaaatggcggggagtcccatgacgagatcccactgcacgaaccaggttccaagtgccggagatgaaatctgggctgttcttctgtcgattagccaagtggaggagggtgtcgacagagctggcacactggggcttccccggcccggccggcctcgaggtaccc

SEQ ID NO: 21015 - DNA, 588 bp, Zea mays
  unsure (1)..(588): unsure at all n locations
  Clone ID: MRT4577_119163C.1
aaaaaaagggcctattttttatttggataaagaagaggggttctttttttttacaattaaatcaccccccgcacacaaaaacgggtactaaaagggttgttcaaccaaacctttgctacaagagcacaaacaaccccaatttccacaggaccaaaaaaggcccgggtcctgaccaaccagaacacacacaggttatgtttttataccataccccccatgaccagaggacacgggaaacccttggggcaggagcagaggaaacccaaatggaaaaagggagctgggaacaggtcaaaaacttttggaaaaaactaaagccaggtggggggggaaaaaccaaaggccttttccatatttttccagttgggagggggggcaaaggccccaacataagggttgggggccggccttttcccgagtcccacccccccgtnaaacaaaaaaggcaaaaaattgcccccatgcccccggcctttatgggccgaggccgccacaaagggaggagcccccaccgggggcaaaaaaaaactgcccatgcttgtctcggggcctggaaaaggaaagccatctccctcaaaaagggggggg

SEQ ID NO: 21016 - DNA, 373 bp, Zea mays
  Clone ID: MRT4577_119164C.1
ggacagcacgggctgttagacaaggaatgccggcatgggtttctcggagaagagcgatctgacatgtatggattgctcaacccaagagcatacaattcttaagcatcagaatgactattacctaacagaggacgattcttaaccgattctgatagacctttacgacaaccatgctggtgtggacattttaaagagcacacctggatttcagaaagatatactgacactagtcatatataaaaaattctattgctagaatcgaatcgggagtggacatcttacacttatggagctgtaaccaggtaatataaccaacacactcatgcatgctgatgtttaaaaggacactcataaaggcttcagatacttctca

SEQ ID NO: 21017 - DNA, 556 bp, Zea mays
  unsure (1)..(556): unsure at all n locations
  Clone ID: MRT4577_119165C.1
aattcggcacgagggacatgcgatgctcgaagatcgaactcctagctcattgagcgctggcagactcaaccatagcggactcacaccgtagctgccatatagcacacgcttgctatggtccatggtccatcgtgtaccgctagcacattcagccgtctgataccatataaatctatagcaggagctgacactgacttggatcacagactaggaataggcagcacatgtctgaccgacacacaccttgaacacgaggatcctatcgcatcgttgaaatggatcgggggggacagttacgccgatgctgaccctgttcttcgtctgggatactgtcgagcacctccagggcttacctatcggtgaggagcgcacaaacgttgtcctacgatcaccaaggcctcctacaacaccactagatcctttcggaagatgtgtcgaagctttgtgcacagaggacagagtgggtgataggtcttctanatccggtttttgcgactgggtgttgggatcccttaatcggtggttctcatccgggctcccgggcgacttcctcccc

SEQ ID NO: 21018 - DNA, 333 bp, Zea mays
  Clone ID: MRT4577_119166C.1
atgggggcgttggaaacacgcttggatcctgacaacagctgcccaattttacagacgaaaaaaagggagagtaggaataggaaaaatcaaaactcccgcattccaaacacgccctgaaatgatgacaaactgagaactgactgctttatttattcgccacaggtggattactcagcgagaacattcctaatgtacatggcaacttgtgggcttagcgcgcgtccccttgcacctcatgtggctcgccatgttcctggacgccaccgagccccccgtcttcctgggggtcgccgtcctcgccatgcccgagtcccccctgtggcttgacatgcc

SEQ ID NO: 21019 - DNA, 155 bp, Zea mays
  Clone ID: MRT4577_119167C.1
gcgcaggctctccttattttcttcacgcatgcgatttctctctggagcttatctcctgccgctcaagccgtggattttttcagtcgttggtcttatcttcttcacgtaaacaaaatcttccacacattctctctgtgttcttatcccagcgatgc

SEQ ID NO: 21020 - DNA, 388 bp, Zea mays
  unsure (1)..(388): unsure at all n locations
  Clone ID: MRT4577_119168C.1
aaacacccgagcaaccagggctgagtttgataggtggtatgaagcagtgcaggagagatacgaactttataaaacacaaacgaccgcggccccgagcacccggcgatccacgcaaccatgtcgagcaggaagaccagcgagcccaaggaggagaacattacccttggacccactgtccgtgaacgagagtttgtctttggcgtcgctcacgtgggggcgtccttcaatgacaccttcattcatgtcactcactcgtccgcgagggaaactttggttcggttcactggcggcatgcaggctcaggccgntcgcgatgagtcgtccccttctgctgctatgctcgctgcctcagacgtcgcacagcgtcgcgcggagctcggtctcaccg

SEQ ID NO: 21021 - DNA, 395 bp, Zea mays
  Clone ID: MRT4577_119169C.1
gcacgcgtccgctgacgcgtgtgtcttcccacgtgtccttggacgcctgggcggacgcgtgggcggacgcgtgcacgacgctgacgacctgcgcgcgaccgaacgaccctccgtcgccaccatgacgctgatcgacggggaggacttccagcatatcctgcgtaagctgaacaccaacgtacgataggaagcagaagatcatgttcgacatgacctcaatgaagggtgtcgggcgccgcttctgcaacatcgcctgcaagaaggccgacatcgacatgaacaagagggccggcgagctgacacctgatgagctggagcgcctgatgacagacgaggccaaccctaggcagatcaaggtgccggactggttcctcaacatgaagaaagcatacaag

SEQ ID NO: 21022 - DNA, 403 bp, Zea mays
  Clone ID: MRT4577_11916C.1
gaggacttctccggctgcacgacacctactggcgggactgacggcacgttccggtcggatctacaccagctcctcctatgaatactgactacctccagcatcaccaactatcttctcctacgccaaaagctgcaggaacagcaacaggccattgagctccagagccgacacctcatgggtcttcagcttctcgaccttaatgctcagcgctgatgctgcagcagcatcgccactgccgacaccaattgtctataccttccaatccagcctacctgtgagcaccaccgcagtctagtcgccatcgacgtcagagtcctggcagcagctgctaaagctgaggagcggatttgctctggatgtgaaggtcaactgtggtgataaagatgaatctgctcgcgaggcg

SEQ ID NO: 21023 - DNA, 647 bp, Zea mays
  Clone ID: MRT4577_119170C.1
ccggccgggactcatccaatacatccataaagacccccagcgacccatatgcctagcagatggtctccgatctctacatactcagagacaaaacccatgagtcagggaacgaggcacatctcagcatagctactcatactccacggcgcacagaagtgagatgccgaagggcacggcaacctgcatcgacgtcatcctcgccaacatcctggcgccggtcggtgacttcttcgacgacggatgtagcgtagagttctggatctgtgttatcctcaccttcctcggctaactccccggtgtcatctacgacgactgctccatcaccaagtagccggccggagcagatgaaccacggtgccctgccagaggcaagaagatagatgggactgcgtcgagagcgataacatgctatgaaagcgcaggcagccctcgtgtgggcacgcgctgcgcgcgtgtcttgatgatgtgattccttccttctttgtgagctgatgctgctcctgctgcagtactagtgatgtatgccgcccttttaatttcttgattagtttgctcggctgaagaaatcaggacgcgtgcctgttgtcgctcctcagatccatgtacgtgtacaagcggtactcactgcagcagctgccccttgtctc

SEQ ID NO: 21024 - DNA, 370 bp, Zea mays
  Clone ID: MRT4577_119171C.1
ggggaaagggaaaaacgccttccgctcgatatccattattgggtggtgaaaaacgtgatcaaacagcctttacaaaagcagcaccaaaaatatttcctggcaccggctattagaccacctctttaagcttatggacaggtattgggaaaaacttcatgacacaagggaaaaagtgcctgggtgggggagcctaataccgcggcctacttgggattggcaatccaactggcccccccccccgtgatttccacccccggggggaaccccttaggggaagcatcctcgtgcgccgcataagccaacggaaatggcccgacctttccagcttgatcccccgggcggactccctcttgcaagggaacaaggaaca

SEQ ID NO: 21025 - DNA, 1314 bp, Zea mays
  Clone ID: MRT4577_119172C.1
atggcccaatggcaagacgtgtccaggtccatggacgtccaggagcttgaagccgtcgacgactgttttggcgctatcaccgcggcaaggtgtttcctgccgtacaagggagaagaaacatcaaaaggattcgccatcttccaagtctccaagatagagcactcaccatcttccaggattcaccatcttctaggattcaccatcaaggtttcatcccctgctgctgatagagacaaccacatattcaatttgaaatctgtccggccaagggaaaccagtgtctgcacaagttcacagatggacagatcttggatcaattctaggcttttcagcaacaagtatctagccggggtggatgagttcatgaagtttgttgaagagcgatttcctgatgccgaggagatcctatgcccatgtcgacagtgcttgaatcaactttctaaacataaatcagaagtagaggatcacttatatattaatgggatggcgagcacatacacaacatggatacatcatggagagccactatggataaatgaaaatgctgaccatctagatgaacaacctagtttgaatgaggatgctagtatgaatgagtatgaacaagataaccctgatgatagattaccagatatggtgcatgagttattcacatctgaagaaggtacagggaagtccatgtttgcagttgtgttagatgagatgaagcagacacttcacccaggttcaccattcacaaaattttcttttgtggttcggttacttcatatcaagtcattttatcggatcagcaatgtggcattcaatgcaattttgaagttattatcattatcattcccacaatgtagccttccagcatcttataatgaagcaaagaaacttattcgtgtattaggactcggatatgagtcaatccatgattatgcaaaaaaagatgaatgcccagtgtgtgaagaatctagatggaaagatggtgaaggtaaaaataagagtcctcaaaaggaggcacaatggcataagttgaagaggaaagttgtggaaaatgagctcaaccatccagcggatggtaaggcatggaaggacttcgataagcaacacggttggtttgcagaagatcctaggaatatcaggcttggtcttgcaacagatggtttcaatccatttgggaaaatgagctcctcttatagtatgtggcctgtttttgttatcccttacaactttcctccatgggtatgtgtcgagcaatcaaacttcatgatgtgtctactcatccctggcaaagaatgcccaggaaaggattttgatgtcttttag

SEQ ID NO: 21026 - DNA, 3077 bp, Zea mays
  Clone ID: MRT4577_119173C.1
gaggaaaccctaaccctaggatagggctgaaataatagccatgagttgggcctgacccattacagaggggcaagagagtaaatgtacccaaaccctaatacagttccaacacaatcatacataaagagtacatagtgtattgcgcatccgcggtctgaaactaaaacacccgtgtgctggcaaccattggggtaccacggaaccagcgtgccactaaactatgtctttcgctgtatcccaactcatccaacttttcaggtacctacaacaccctggtgttgttaggcgataacaatatttttctaggatgacaagcacaagctccaaacagatagacaaaactagcttaagtcaaatatgaaaaaatggccagaacatgccatagcattaacacaaactttcgaggcgtttgcagtttgatctaattgtccaacttggtgcaagagggtattttcatagcatccatttgggtttaatcactccatgagagtttcaggccacaaagttcaatgaaggatgataggtctggctgacattaccatgccatctccacgtgatcccagttttccttcaaccaggtccatgcaatttctcgtccttctaagctaatgccaccaaggatgtaaaatgaatcttgattccgcacttcatcagtaaacataaagttcaatgcctccaaaacaatatcctgatccggtgatgaagacagggagcctaagacacgtgatttctcctgtggttcagatgcttctctgtagattttaaggagagcatcaaaaccggatctgcttgaggtgctaacagttcgcatcacggcaagatatgcagcctttctagtatctggtggaagaagggaagttttgccgtcttcaaagaagatgtggaaacgccgaactccttcatttatagtttcattatgtccaagtctgaccagcgcagtcaagagcagtgatctaagcattacatcaagatgactctcaccatccttggggtcccagcctaactttatgacagctgggagaagaaggttgatcaaaagctgtttgatatctttgttcaagtcaggagtagcgtcaactgttattttagaaatgcttaaacatacagaggttacatgtgaaagtacagtgtaatcagactcatcattataagcattcagcagtcgcaacaatgacgtcagtgtttgcttgcaagcaacagagagcgcatatgaatcttccacgataccaatcttatccattaatgagagcttctttgctttgattgcatttacaagtccagctgcaagttcatcatcatacttcactctataaaatccagtttgatcaatattcaatttgatccaaatgatttgattcttctccccatcagcactttgagagtcagaaaactctttaatatttatcttatccattttatctttcaataagaactttttctgtgcatcatatgagccacagcatgctgttacaggaacaatccacattccaggaccagacgatccatcagatagaaactgtgcctgttcaagttccaaatcatgtccattgatttttgcataaataacaggatatccttgttgcttagtccatgtagtcatcaaatccttaacaggctccccagattcctcctcaagaacaacccataggtcttcagtcttagcattcgagtaggcatatttctttatatatgaagccaaagctttctgaaaacactctgcaccaaggtaactttgtagcatacgaataacagatgcacccttgtcatagcttatggaatcaaaaattgcatcaatttcactagcatggtttacctcaacctcgataggatgagactctgcaagtgcatccaatctgaggccagaggtcgtctcatcaagaaattgtgtccagttattccattcaggaaataaagattctactgctaaatagcttacccaggaagcaaaaccctcatttagccacaagtgagtccaccattccatagtcacaagattgccaaaccattggtgcgccaactcatgtgcaacagttattgctacctgttgcttgttggatgctgatgatagtagctcatcatacagcaaagctgtatctcggtaagtaactaacccatagttctccatggccccagcagaaaaatccgggatagcaatcatgtccaacttaggtaatggataaggagtggcaaaataatctttgtataaatccagcgactttacagcaacatctagtgcaaactttccttgattagtcttgccaacttgagtataaacacgaactttagttccctctgatgttgaactctctatgtaatcaaagatgccaacaactatagccacaagataggttgacataagtggagattcctcataataaacagtcttggtaagtccactgacagtctccttagccactggcatgttggacaatgctaccaggtcagatggaacttctagtgttagcttgaacttggccttaaatgcaggatcatcccaacatggaaagcacctccgtgcatcagcggcttcaaactgtgtaactgccatatttcttgactctccattgtacacatatttgctcctgtaaaatcccctcatctgatcgttgagcgtgccggtgaagtccatggtgagcacgccctctccgaagggcagctcccggtcgaagctgatgaccatgatctcatcctcatcgaactgagccacatctgtcggcgccaaaccctggaaacggatggaggcgcgatcgacatccagctcggcagcgttgaggacgaggaagcgggtgggcgcggacacgacaacggcgatggccgcggcgcccgtgaaggtgcacgcggcgaggtccgggcggaggcggaggtcgtagcggagcggggccgcgaagtgcgggaggcgcgcatgcccccggaattggtccggcgaggccgccattgcagctggtgcggagggagggcgaccgaggagcggcggcgtgcggcggtggaggtggacttgtgtgacgaggaaagtgcggaaacggcgacggtagggagcagaccactgtgactcgatttttaccggaatggacacaact

SEQ ID NO: 21027 - DNA, 1368 bp, Zea mays
  unsure (1)..(1368): unsure at all n locations
  Clone ID: MRT4577_119174C.1
tcaggcacaaaatggcattgttgaacagtgttgagactgccaggggccaacagtgtcgaggccggctgcagcgagtccctgacctgctaggcctaggctagccacaccaggctgaaaacactctgcaccaaggtaactttgtagcatacgaataacagatgcacccttgtcatagcttatggaatcaaaaattgcatcaatttcactagcatggtttacctcaacctcgataggatgagactctgcaagtgcatccaatctgaggccagaggtcgtctcatcaagaaattgtgtccagttattccattcaggaaataaagattctactgctaaatagcttacctgttgcttgttggatgctgatgatagtagctcatcatacagcaaagctgtatctcggtaagtaactaacccatagttctccatggccccagcagaaaaatccgggatagcaatcatgtccaacttaggtaatggataaggagtggcaaaataatctttgtataaatccagcgactttacagcaacatctagtgcaaactttccttgattagtcttgccaacttgagtataaacacgaactttagttccctctgatgttgaactctctatgtaatcaaagatgccaacaactatagccacaagataggttgacataagtggagattcctcataataaatagtcttggtaagtccactgacagtctccttagccactggcatgttggacaatgctaccaggtcagatggaacttctagtgttagcttgaacttggccttaaatgcaggatcatcccnaacatggaaagcacctccgtgcatcagcggcttcaaactgtgtaactgccatatttcttgactctccattgtacacatatttgctcctgtaaaatcccctcatctgatcgttgagcgtgccggtgaagtccatggtgagcacgccctctccgaagggcagctcccggtcgaagctgatgaccatgatctcatcctcatcgaactgagccacatctgtcggcgccaaatcctggaaacggatggaggcgcgatcgacatccagctcggcagcgttgaggacgaggaagcgggtgggcgcggacacgacaacggcgatggccgcggcgcccgtgaaggtgcacgcggcgaggtccgggcggaggcggaggtcgtagcggagcggggccgcgaagtgcgggaggcgcgcatgcccccggaattggtccggcgaggccgccattgcagctggcgcggagggagggcgacctcgaggtcgcggtcgcggatgcggaggagcggcggcgtgcggcggtggaggtggacttgtgtgacgaggaaagtgcggaaacggcgacggcctcgtgccgaatt

SEQ ID NO: 21028 - DNA, 604 bp, Zea mays
  Clone ID: MRT4577_119175C.1
gtctgaatgttacacaatccttgcgcccgcagatatataaagacaaatacagccttgatttcaatggactctctatgaaattgtcaaagtgatcactgagtaatatgcaccggtggacttcccactagtactgaacacctaagctgagctcgttcgcttggctttaatccgtaccgacttctactaattctacagtatttttgtatctatggatttcactttgacaacagtctaaaacattgcgttatcacagatcaatgaagacacgcaggccgtcatgagctagctgcaccggtattctttccctgcatgaccatcttgctaacagctggttttctctgtgatgttcaaactcgtggttcatcccaatcagcagagctcgtttagggcgtatcctcttgacagcgtcaagggctcaaggctctggctcagagtcaaatggcaactgcgaccgtctcccgccccatgcaacctgtttgtttctagtatgagtagatctagctgcccttgtcccgtggcggtaccagacttcgaaatcgcgtgctcagttctaggtagaattcttgagacatcagacaagtatgcaactctcgctttcctcccg

SEQ ID NO: 21029 - DNA, 647 bp, Zea mays
  Clone ID: MRT4577_119176C.1
ctaaagcctgacccttacccctacactcgcgctgccgccgcccacgccgatacgcccagcactctcgcttcattgccgagaatacaatatgacgaatcgccccagtaaggccggagctgttggaaatcatgtaaccagctatgcgcgctacatggcgtaagcgaatcaagaagcatggggggatctcagcatctcaagcccttcagccaggtctgagggaagtgtgctgaaaataggaaagcatctggaattagctggggcaagcactgaggcaaggcgaaggatggcggcgccaacaccatgaacactgctagggcggccaccgttaatagcacgacccgccgtctgagctaacatactgaagcatgacctagctctgatcacatcgatggttcctgctgtctactcttgccacacatgatagtggagaaggcctgcggtagtggaaagagaggaacccatgacgtggctgctggtgccgagcacatcgctgcttatctgggcatgatgatctacattccgaaacgggagggcaagaagaaggctcacaaggccaagacgaactactacgaggctgctcgctctctctttagatggatgcgcgccggccttaggcggctgtcaggagacgaataggcccactagtg

SEQ ID NO: 21030 - DNA, 2144 bp, Zea mays
  Clone ID: MRT4577_119177C.1
ggggtaaaaaatctgtatatcccagatgcaaacatactcttttacagccactcacatacaccacttgaaggtccataaaaacatatcaaaatttacaacttaatccaatagtaatttgtttttcttctatttagggtttgttcgcttttctctcaatccatgtggattgaatgggattgggtgggtttaaatctcaaacaagttaaaatccttcatattttttcacaatctcatctaatccacatggacaggaataaccgaaaaagcccttatatggaccacgaggtggtggatgttagaggctatgagggttcatttgaagacaaggggatcaattcctgttagcaacaacggaacattccctccacagtatatacagtacctaaaaatgccaacctacccttctccagatttattaatttcctgatgtcaagaatttttaccttaaaaactaccaccaaatttttgtagccaaaattcaaaaacaagggtttttttcacatcaatgtaccgattacctttttgggggcatttttttgtaaaacaatgtgtaaaaaaattccactttcggcatactttggatgaactaaaagggtttgttcttgtttgggtcctcaagcaacggggaacccaaataatcatggtgcagacttgaagacagtatttggaataattttgcaatatgataactcatcagtaaacataaagttcaatgcctccaaaacaatatcctgatccggtgatgaagacagggagcctaagacacgtgatttctcctgtggttcagatgcttctctgtagattttaaggagagcatcaaaaccggatctgcttgaggtgctaacagttcgcatcacggcaagatatgcagcctttctagtatctggtggaagaagggaagttttgccgtcttcaaagaagatgtggaaacgccgaactccttcatttatagtttcattatgtccaagtctgaccagcgcagtcaagagcagtgatctaagcattacatcaagatgactctcaccatccttggggtcccagcctaactttatgacagctgggagaagaaggttgatcaaaagctgtttgatatctttgttcaagtcaggagtagcgtcaactgttattttagaaatgcttaaacatacagaggttacatgtgaaagtacagtgtaatcagactcatcattataagcattcagcagtcgcaacaatgacgtcagtgtttgcttgcaagcaacagagagcgcatatgaatcttccacgataccaatcttatccattaatgagagcttctttgctttgattgcatttacaagtccagctgcaagttcatcatcatacttcactctataaaatccagtttgatcaatattcaatttgatccaaatgatttgattcttctccccatcagcactttgagagtcagaaaactctttaatatttatcttatccattttatctttcaataagaactttttctgtgcatcatatgagccacagcatgctgttacaggaacaatccacattccaggaccagacgatccatcagatagaaactgtgcctgttcaagttccaaatcatgtccattgatttttgcataaataacaggatatccttgttgcttagtccatgtagtcatcaaatccttaacaggctccccagattcctcctcaagaacaacccataggtcttcagtcttagcattcgagtaggcatatttctttatatatgaagccaaagctttgcggtgcttctccatccgattgtgcgcccctctgtttggctgcatcaacgtgagcgaagccacagtgctcctccgtctggtgtccaccgacacatacgaccgcacgtgggcacgatgctcctccatccgaccatgtgcctcctctgtttgactgcatccacacttgtcaacgtgagcgacgccctttcttccagttccctctctgtgacacctacccgcggggtcgtcttccccgcgccgccaggccgcgcgcccgcgcgtggagccgccgccgcgccaagtgtccgacccgcgccctgcctccccggtcgcgccccttggcgtccgcgccatgcacgccgcgccccattcaaggccgtcgtccccttctctctcccttcccccattcctctccat

SEQ ID NO: 21031 - DNA, 417 bp, Zea mays
  Clone ID: MRT4577_119178C.1
cacaaccacgcctctgaacgctgccttcctccacgcccctcggccggcggcggccagcagcccctctgaccacccgcagctggacctgagcctgtccatcagcattgggccaccgacgccacatgcggcagagcaagcagctggacgaggccgcacggcgacggccgctgagcagagcaagagggcggcggacgtgcaggcgctcgagatcacctgccacgcctgcatgcagcgcttccacccttagtaataataataatactatatatataatcagcatcagcacgccatgcatgcatgttattggcttaattatttttgttatatatagagctaccgtgactatatagtactcctgtactactagctagtattaattacattagttagctgtgttaagaactttgtttatgagta

SEQ ID NO: 21032 - DNA, 203 bp, Zea mays
  Clone ID: MRT4577_119179C.1
gccgcggcgacgccttcccctcactccttcctccgtcccatgctccgtcgctgacacgttcgtccgacttaacgttacgatggccgccgccgcctccgccatcaccgccgcctccgcgccttgtgcttccccacaccttcttatcccaccggtcgtcgccgccgaaggtactagtcgagacctcctcattccgccggctctct

SEQ ID NO: 21033 - DNA, 378 bp, Zea mays
  unsure (1)..(378): unsure at all n locations
  Clone ID: MRT4577_11917C.1
cggactctcctctctccacccgtgtcttctaccagaggtaagccgccgccgcctccgcctgcgtgcccgctcccgcccgcgcccgccgcgctcgccggtgcccccgccccggccaaggtttgtgtcgctactcgctagactagaattccgcgcgcggacctttgccggccgagccgttctgcggcatatcggcggggacaaccatgcgaatttccttggcgtcgacgttgacgccacatggctgccgtggtgtctgggaactggtctgcgatgagcgtccgcgcagcgcggaacttgaagaggaacagcagcagtgtgtaccatatgatgcactgnagggcaggcgcgagcacgtggccagccccgcgaggacgacca

SEQ ID NO: 21034 - DNA, 928 bp, Zea mays
  Clone ID: MRT4577_119180C.1
gactcctatagggcgattgggtacctcgagccggcgggagctagcccagaaccgaaagatcaccactgcactgcccctctgcagtgctctctcactctcactcgcctcttctcagcggccatggagccccagcacggcgagaaggaactccagcttctcctcctccccacaaccacgcctctgaacgctgccttcctccacgcccctcggccggcggcggccagcagcccctctgaccacccgcagctggacctgagcctgtccatcagcattgggccaccgacgccacatgcggcagagcaagcaggacgaggccgcacggcgacggccgctgagcagagcaagagggcggcggacgtgcaggcgctgaagcagcaggcggcggagcaggcccggatggcgtcggcggagcgggcgtacgcggagcgcgtgaaggagctggcgcggcgggagctggagctggcggagcgcgagttcgcgcgggcgcgggccatctgggagcgcgcccgcggcgaggtggagaaggtggggcgcgtcaaggccatggccgcgcgccggatcgccgctggcgcctccgccgccgcgctcgagatcacctgccacgcctgcatgcagcgcttccacccttagtaataatatataatactatatataatcagcatcagcacgccatgcatgcatgttattggcttaattattttgttatatagagctaccgtgcatgactatatagtattcctgtactactagctagcccctaatcacattcgttagctgtgttaagaactttgtttatgagttaatgcaggcttgcgatcgcatcaccataggtaaagggaaaagacagatcgatgttcttctcttgctttcttgcagaatacacaccgcatcgtttgagccagcctaaaaagagaaggaaagggaatct

SEQ ID NO: 21035 - DNA, 621 bp, Zea mays
  Clone ID: MRT4577_119181C.1
acatgaaaacgtggtttgtattcgatacgttcgtatagcgttgtcctcatctttagaaacattgtcttttgcttggtcttcagttgagttgcccttatgttggttccatccttgactgacatcctccagcttattgtctggaggcattgtagccttttcccagctatttggtccttccatatctactgctttgaccttgcttccccaagggtctgtgtcagctccagttcccatgtccataaccctgcaagcctctccccagttgtcactcttttcactctccttattgacaaccgctctgtcccaggagctgccagcagcatcagatccaccaactccagcttgtttgtcccatgcattgccactagaaccttccttttgtgtggcactagtgttccaaacttcaacagctgatgatattgctttcttaccccatggatcagaatcgccatcagcagaaaacactttcttaccccatggatcagaatcaccagcagcagaaggtactgtttccttacttcatggattgcaatcaccgtcagcagcagataccgcttccttaccccacggatcagaatcaccgtctgttttcttaccccatggatcagaatcatcttcagc

SEQ ID NO: 21036 - DNA, 805 bp, Zea mays
  unsure (1)..(805): unsure at all n locations
  Clone ID: MRT4577_119182C.1
aaaaacccccaggacgcccggatgcactgcacacgtaacgctttaaaagtcngggttctagggagacttctggctctactacacagcctacttctgaggagccactgttggtctagtatacagcaacaacctgggccagatcgcgcaggcactgcaccagcaatcgcagctcaccatgttactcgctgtgtactcatcctgctccttcttcggccgacttctctctgcgctccccaacttgcctcacaggatggtatcacttgctcggacagggtggcttgctgctgcattggtgcccatgccaatggccttcttcctgatgtggaaacaacaggacgtaggcgctctggtagcaggaacagcgatggttggcctgagctcaggattcatcttcgccgcagcagtgtcagtgacctccgagctctttggaccaaacagcatcggtgtgaaccacaacatcctgatcaccaacatcccgctggggtcactcctctatgggcagatcgccgccatggtgtacgacgcgaatggacaaaggatgacactgatggataatcgcactggcatcattgacaccatgattgtgtgcatgggggtgaagtgctactcgaccaccttcctcgtgtggggttgcatcacattgctggggttagtgtcgagcgtagttctgttcataagaacaaaaccggcttatgctgctgctggtcggtcgagttgtaagcaccttcaccaagtttccagttaacggggggaacttcttggtcaaaaaaaaaaaaaaagggcggcccgcgactagtgagctcgt

SEQ ID NO: 21037 - DNA, 276 bp, Zea mays
  Clone ID: MRT4577_119183C.1
ggccgtctcgcacgttcctttccccaactccccagcgcctctccgcgccgcgatccagatccaggttgttcagcatgggtctggtgaaggcaggcgtcgacatggaggagggaaccctagagatcggcatggagtaccggactgtatctgtgtggcccaactctggttatcttggataaagtacagggcccaaagtaccaagacctgtcaacatccgacttggagctggcaccatcgccgtggtcaagtccttgaagttgatggagaaaagctgtt

SEQ ID NO: 21038 - DNA, 183 bp, Zea mays
  Clone ID: MRT4577_119184C.1
gcggcgcttgccctagctcaagggatgaggcgtactcgatgctcatgccttgatctttcagccaaagaggcgttaacacaagcaagcgcatgatgaacgccaagatgtccacaagcttgctggtctcagaactgtaactgttctacatgaacactctggtaggagcccacctgccattgatgg

SEQ ID NO: 21039 - DNA, 460 bp, Zea mays
  Clone ID: MRT4577_119185C.1
aaaaagaaaaatttttgcccccataataatgccgggttcccccagataatttacctgtggagaacataacaggggggaattttccttttttaaaaactaatttttaaccaaaacatttgccgcccagccacatttggggggcgggcccccaacagcaaccgtcccccctggggatcaaagtccccgggggtgatccctgtccataaaaacctgtcccggaaaaaaaaagggtctgatccaacgggaaccaccctggtggtggtggtgctcctttaacccccccccttttcccccaaagttgatagggcgacaagggccctccctgccccggtaacatggctgttagcgtcaaaacttggtacaaataatttactctgggagccaattactagggctgcccgctttttcttggcccccccactttctgatgctggaccctcatgggtatggccctttgggg

SEQ ID NO: 21040 - DNA, 393 bp, Zea mays
  Clone ID: MRT4577_119186C.1
gggggggggaatttttcaaatttatttataccacctaaagggggaggggggcccagcccaaaaactactggggggggctgggggggaagttccacgacacaattcccaaattacgactgggttaggaaccccctaaaaaacggttattcaccattattaccaggttaaagaaatttttatggttaaaaatccactcgaaaccgggcttttcctgaacacctttaaaaaaagtcccaaccatgggcggccttggaaaccaaacccttaaaaaagcctttaccagggggggtgccatttgacacccggaaagggcactcggggccattaaaaattttgcgccctgggcttgcaggttaaaaaagggggggcttatttaaaaacccattggttttg

SEQ ID NO: 21041 - DNA, 660 bp, Zea mays
  unsure (1)..(660): unsure at all n locations
  Clone ID: MRT4577_119187C.1
gtttccctacgaggnnccggccgggagaanaccggaaacncggagaagccaaacaccatcaacgccatgttcgtgcgtggggcttgtgctggggggagggggactacctggccggttctcggcgccaccgcggggcgcgtgtcaccgtggtcggtctcttcatgacacccgtcgatggctcgtcttagacacactgcacggaagtcggtcattcctttcttgccttctcatctcccggagcgtccgcttcgtcgtccagtgactggtcagtctagccatttggacaggctgcaccaccgcctgcatgaggagcaggagcgtcgacgacaggagttggagcagcagggctcttcttcctcgcctcagtaggaggtagagtctatgaggagctgttcccctgtgcccccgctggaggcgccccctgcaccaccacttggcgtcccggccgctggagtagctgctggaggagacctcgatgacggaggtgacgacagtagctcgagccacaacactgaccatttagaggagcaggagccggagggatgggttgctcgacccatcacttgtgacaccgctcgcgggtgtcactttcatgatgcgcttgacaccttgttgcatcaggcacttgaccgcaaaaaaaaaaaaaaaaaatttgcggcc

SEQ ID NO: 21042 - DNA, 217 bp, Zea mays
  Clone ID: MRT4577_119188C.1
attaacttatattgttatacatgttgttataatactttattttcattatagaactgatctacattacattttatctattgaacggtcataaaaaaaaaaaaaaaattgatgggggcacaaaataaaaatggaaaccgcacccccaactggtaaaacaaaagggtgtgcagcaccccttctactgccgaaaagacggccccctaactccgcagggggg

SEQ ID NO: 21043 - DNA, 362 bp, Zea mays
  Clone ID: MRT4577_119189C.1
attatattcttgcttagcaacaaacattggtccacgcatcattttttatatatatacatggtaacagacagttggcacgacagccagtccacgtggcttggcagggtaactgctgagacgcacaccctccacatactagatggtgcatccgcaccgcagagcacgcagatcttagggagaaacctaacacgaaaagttcaccataagcaatctgtgagacgcagcatggctgcaccgacgtggcacaggcgattcattatttacgaatatatagttagagagctcacggacgttacttgtgctgagatcgactggcatagagctcaattacagcaggtttgatacttacctcattttatgga

SEQ ID NO: 21044 - DNA, 729 bp, Zea mays
  Clone ID: MRT4577_11918C.1
catctccaccaacgacctgtacgccatgaatctacggttcctggcagcggacacgttgcagaagctggtcgtcctcgcgaggctggccgcgtgctcaagcctgccctccagtgcatcatatggtacacactgctgctgttcctcttcaagttctgcgccgcgcggacgctcatcgtggaccagttccctgacaccacggcagccatcgcgtcgctgcatgtggacccggacgtgttgtcgctgtagggcgggcgcgccgagatggaggccgaggtggcggaggacgataggctccacgtcacggtgcgctggttgtcggtgtcgcagcggtcgagggggctgacgcagcggcagtccaacttcgacgagcgctcggccttagcccagtcgtcgaggcccgcggccgttgtggagctcgggcgcctcccctgtctcggaggtcaatggccagccggccttcaccggtggtggctcaggtggcgtcaacgtggacgccaaggaaattcgcatggttgtccccgccgagatgccgcagaacggctcggccggcaaaggtccgtgcgcggaattctagtctagcgagtagcgacacaaaccttggccggggcgggggcaccggcgggcgcgggcgggagcgagtatgcaggcggaggcggcagcggcggcggcttcctcttgatggaagacacgggtggagagaggagagtcccggccgacccggagggtacc

SEQ ID NO: 21045 - DNA, 674 bp, Zea mays
  unsure (1)..(674): unsure at all n locations
  Clone ID: MRT4577_119190C.1
caaactccanacagnagaaggagtgatgctgtccttcgaattgctgggcttgtttcttacagtcattcttcttcttgagcaccagtatcagccgcctaacctgaagaagggaggtcatgtttcgcgtttgagctatatatatatgcttctcatggggaaacgggaagtgaatgtttttctgactcgggaagttatacaaagctatgagctagccggtccggctgcctgcaccgcatgctcaagaagaagaatgactgtaagaaacaagcccagcaattcgaaggacagcatcacttctcaacattgggtgcaaggtggtattgatgagcgtcaagcactcaagttcaccccagaactccagatcagatgaagaggtgttttttttttcttgcatccctcatgtttatacattttttttacgaaaaatatattagaatgatctctggtggtagtgttggagttggaggcttactgatcatcgtgcacccgtcaggtcagagagcaactgcaagcctacacgacacaggagcccctttattttctttcctcttaaggcaaggcaactcctgtttgtaggggaatcgttatggttctgcttctgattgctcctagttcttccatcattttcgtgttcaaagagaaggctcccagaaaataaaataacgattgctatg

SEQ ID NO: 21046 - DNA, 241 bp, Zea mays
  Clone ID: MRT4577_119191C.1
atatggtggtggctcttcttactgctggtgctgcagctggtgcactttcacatccgacatcagaggatcctgctgccaaaacacctgcttcaatagctttagcatatggtttcaagggcctatccgcgttcctttcagaagcacaattaacaactcatcttgattctatcgagtcaaaagaaaatggaaaacttgattctagggaagaggggatatgtcgtgctgtggacagaatatcaga

SEQ ID NO: 21047 - DNA, 1407 bp, Zea mays
  Clone ID: MRT4577_119192C.1
gacaagccaaacgtgcagctgaggaatcgcaacggcagtgacgtgtgcgcgttgccaaataaagctactatactagtcaccgctcgattgccgtcgcagccgcccgccggccggagatgggtgcgccggcgctgtcgtccgtcgtcgtggtggccacggcggcagtggtttgcctgtgcggggcctttgcgcgggcgcaggacatggacagcgagtgggcgcggccggcctaccgcgggttcttcggcgccccggccgggtcgctgctgccgcagtcggacgtggacctgctggagttcccgctgaacctggagtacctggagacggagttcttctgctggtccgctctggggtacggcctcgacgccatcgacgccaacctcaccggcggcgggccgccctccatcggcggccagtccgcgtccctcaccccgttcatccgcgacgtggccacccagttctgttaccaagaagtcgggcacctcagggcgatcaagcagacggtgaggggcttcccgaggccgttgctggacatcagcgcggccaacttcggcaagatcatcgagcaagcgctgaacgcgacgctggacccgcccttcgacccctacgagaacagcctcaacttcctcgtcgcctcctacatcatcccctacgtcggcctcaccggctacgtcggcgccaaccccaggctcctcacccctcaggccagaaagctgctggcggggctgctggcggtggagtcggcgcaggacgcggtgatcaggacgctgctgtacgagcgcgggatggcgcgtgtgccgagctacgccggcggggtggcggagatcacggcgcgcatctcggacctccggaactcgctggggaggaggggcgtgaaggacgagggcctggtggtggcgcccgagctggggcccgaggggctgaccgtggggaacatcatcgccggcgaccacctgtcgctcgcctacgaccggacgccggaggagatcctcggcatcgtgtacggcaccggtaactccgcccagcacggcggcttctttccccagggcgcagacggccgcatcgccaggggtctcctcgcgtagcgcatgggtgagttgtgaccgtgcgctgagcagtatgaatccgtgcacggcgcagactgtagactagctagcagtactatacttgtttgtgagttggtatggtgtggccttgagtgccttgtgtaaactggatgatatacatgaatgtaggtggaaacaaataaagtaaataatgggttgctgcactatacgcgcaataaaaaaatataagggccatgccggggggggttcattaaaattaaaaaaaaaaaaaaaagtttgtacctgcacggggtggccgttcaaaattggaaaattctgccaatatccatcacacggggga

SEQ ID NO: 21048 - DNA, 639 bp, Zea mays
  unsure (1)..(639): unsure at all n locations
  Clone ID: MRT4577_119193C.1
tgtcctttattacntattcccgtttcaaatcaaaaaaaaaaaaaaaaaaaaaaaaaaaaaaaaaaaaaaaaaaaaaaaaaaaaaaaaaaaaaaaaaaagtagtgtcacctgcacattgcagaccgcctcagcgcctcaccaagcgaaactcgttggcggctagggttttgctgcctcccgagcccaaaccctagagcacccgcgcccatcccatggcgtgctaggcttcgattgagactggggggattagtaccgcaggctgggattagagcaagcgccgagcggaaatggcatcgagtaaccaattcgatctacttggagacgtcgagaacgacgaccctgcccacctcctcgcagctgccgagaagaaggcggccgcggtgcctaagcccgcgcccgcgccggccaagttgcccaccaagcctccgccgcccgcgcaacctgtgagggaggaaaggaactatggtgctccaccgcgcgatggtccaggacgtggaagaggcggccgcggtggcaggactggcccgaggcgagattttggcgatgctgatgcccacggctttgagggggggcgacagggcggcggcggcggttttggggacggtggagttgctcgcggtgaaaatggtgagggtaggc

SEQ ID NO: 21049 - DNA, 185 bp, Zea mays
  Clone ID: MRT4577_119194C.1
cccacgcgtactcccacacattcatacttacgtattaaaccataacaactctaaatctggcggggtaaaaaaatttaacggcgggggccaacataaaaccaaatagacttctcttatattaccaatcttgtcttacaataaacctactccacctaccatcataaaatctttttaaatcattaacc

SEQ ID NO: 21050 - DNA, 523 bp, Zea mays
  Clone ID: MRT4577_119195C.1
tccatagcttcacccgtttgggtgggatttcgcgagggaactctcgctgttccgctccgccacagccaagtctgccaagcttgctgccttcttcaatgccgaacagacggcgcggtctttgctgcacaagcatcaaattcaacagctcggccatgcctctctccttcgagtcgcacatgtgccgtttaacgggaatggcagaaactaccgtgcggcctttgagatgctggaggacattttgaactctgcacaccctctccatcgtgctgtgcaagaggactcctacaagctcgtgtgcatcgatgactcggctgccagggagattggggagatggtgcacagtgaggctttctggatagaggtggatgctgtgcattcgctcgtgaagctgatatttgatatggtgaaggagatggaagctgatcgacctcttgtagggcaatgcctgccgctatgggaagaattgcgcagcaaggttaaagattggtgtgagaaatttaacactgatgaaggcgctgccctg

SEQ ID NO: 21051 - DNA, 239 bp, Zea mays
  Clone ID: MRT4577_119196C.1
cagcaaaaaacaaaggatcaaatcaacggaccacccaaacgaacggggttcaatccagaggggggaatccaacaggggcttcagcacctaaaggacccgaagcataaaggccctaccattattggggggggcgccccgccaaatttaaattttcaggcaaggaaggggctgcacatgaaaccaaccgagggcggcctcatcccaactttgaaataggagggctggggggcctccatttt

SEQ ID NO: 21052 - DNA, 1824 bp, Zea mays
  Clone ID: MRT4577_119197C.1
taggaggacgagggagggatccagcgagcggagcggagcggacgccaccctcgcgcgcacacctacgcgcaggcgcatacaccaacgaagcagagccgttccagggctcgacggagggcaccaccgccgcgcacccgacccgacgccccgcggggagggcatgggccagggcgagcgggcgcgcggccgcggccggggctcgcggcgaccctcgctgctcggccggcgccggaggccctgggcccggcgaccaccgcggggaccagcgcgcccgccctggtgacaactaccgcggcctcgggcgccgcgtcggcggggctgccaagggtcgccgaggcgccggagtacaggaacggggacgggtgcccggccgcgggcacggacgcgggggtctgcgacccgggcttggtgcacatcgccatgacgctcgacgcgcactacctcaggggctccatggcggccatctactcgctgctcaagcacgcgtcctgcccggagtccatcttcttccacttcctcgccgcggaggccggggcagtggacggggcggacccggagccggagctgctgcggcgcgcggtggcggcgtcgttcccgtcgctgcggttcgagatctacccgttccgcgccgaggccgtggccgggctcatctcggcgtccgtgcgcgccgcgctcgaggcgccgctcaactacgcgcggaaccacctagcggacctgctcccgcgctgcgtgccgcgggcgatatacctcgactccgacgtgctcgccgtcgacgacgtgcggcgcctctgggagacgcgcctgcccgccgccgcggtcgtcgccgcgcccgagtactgccacgccaacttctcccgctacttcaccgaggccttctgggacgaccccgtcctcggcgccagggtctttgccggccgccgccgcgcgccctgctacttcaacaccggcgtcatggtcatcgacctccggaggtggcgcgttggcaactaccgccagcgcatcgagcgctggatggagatgcagaaggagaaaagaatctacgagcttggctccttgccccccttcctgctcgtcttcgccggcgagatagaggccgtcgaccaccggtggaaccagcacggcctgggcggcgacaacgtcttcggcagctgccgccctctccataacgggcccgtcagcctgatgcactggtccgggaagggcaagccatgggaccgtctcgacgccggcaagccttgccccctcgaccacacctggaagtcgtacgacctctacattggcgagaatgattcttcaccagcatcagggccgtcccggtcagccttgtcatcgttggtggcatggtagaagttcatatacacaataattctttgatctcgggtgcccgtggttcttggccggtaatggaattgccttgcgatgcattcccactgccggctgccgccacagctgctgccgcaagccagctgccgccttcggctgtacaggacagtgaggggaggggcggtatacagattgcagcaggagcagcagcagcagcaagggggtgaagacagtgaatagcgggggggagcaaattcttgttcgttttgcactatgattgagattgattcattaggctctggtttggaggctgtgactatcatgggatggaaggaattacttgattggtggtgtacaattcttggataggacaaaggtttcggttttttggtgtattagttcagaattgtttcatttacatgtctattcagtacactcgtgtaatacggattaaattgatttgaaacaaattgagtgcaaactggtcgtgtacctgtgctg

SEQ ID NO: 21053 - DNA, 302 bp, Zea mays
  Clone ID: MRT4577_119198C.1
atcctatcctaccacttctctaaccacacaccaactcttccctaacaactacagaatactcgcccaactttaataccacctcaacaccatcccacaactgtacacgaatcaaaatcttctacctcaacataaaaggtaactaccaccagtaccttgcttagatcaaatcttattcatacaccaaacattcttcatacagcaccatcaatccctacaaaaatgctcatgacatcgctctttcatactctactaccacccaccccattaagccttccccttctcttaacattctcaacttctac

SEQ ID NO: 21054 - DNA, 262 bp, Zea mays
  unsure (1)..(262): unsure at all n locations
  Clone ID: MRT4577_119199C.1
ttgacgcgtggggcagcggcagggaggaggcgaacgccgccgtccaggctcaggctcaggcccaggcccaggcgctgctgctcgccgccggtctgcaacagcagcagcagcacggccgtccctggtacgcgctccagcagggtgggtacntacctctctcagatccttacctcgctcattacccttgcaccgctttagacgcgaatcacatacaacggatgtaatgactcctgccgcggggtatggatccgaaccttaaaag

SEQ ID NO: 21055 - DNA, 877 bp, Zea mays
  Clone ID: MRT4577_11919C.1
gtcaaccatgcatgtcaggtaaaacaacacaccatgagaaaactggcagcgctcatgctcatcctaggtggagctctgggtgtctctgcgcgtgtgccatgcgctggcgctgctgctgccgccgcctgcaggagtgcatccataacatccctcccctcaaccttctcttcctccacttcttctccgacgcatcagcagctctctcaggtggcggagtacgtagcagcaccggcggaggcttctgcacctgtatccatggcctccatctccgtccccgaccccgtcccttccgcaaccgaggacgccgagaacattaggaaagcagcagtgcaaggatggggccccgacaagaaggcgctgatggagatactgggccaccggacggcggcgcagcgcgcggagatcgccgcggcctacgcgggccgctgcaacgaatccctcctcgacagactccactccgtgctctccggcgacttccggagcgcgatgatgctgtggacggcggacccggcggcgcgtgacgccaagcttgcccacaaggccatgaagaagaagggcgagcggtacgtgtgggtgctcatcgaggtcgcctgcgcgtcgacgccggaccacctcgtcgccgtcaggaaggcctaccgcgagtcgtaccccgcctccctcgaggaggacgtcgccgcgtgcccgctctacaaggacccccgcgtcaagcagttcttggtgcgcctggtgagctcgtaccggtactccggcgacctcgtcgacgacgagctggcgagggcggaggccgcggagctgcacgacgcggtggtggccagaaagcagctgctgcacggggcaagtcgtgcgcatcgtcagctccaggagcaagcagcagctg

SEQ ID NO: 21056 - DNA, 438 bp, Zea mays
  Clone ID: MRT4577_1191C.1
ggaaataaaagcaccaaagttgccggccttttgaggcacccttgaaacctaaggcgtggttcctggtaacactggctgtaatggtcgccgtccttgcagttttgccactaacaaaagggccggaggaggaaggaggaggggggccattccccgccgtggcccccgccgaaccaggttctgggccgtcctgaaccaggggcggtttttgttacctgtttaacccgccgaatggccaatgcctgaccttttggacggcgggtggccaccaatggtgcaggcggtgcttaaggaccaccgccaacggtgggtgtaccatccggcccttgcccccttaccgttgctccaccttttttttaaatttttgtaagggctgttgtaaaactcccgttcccttcgattttttgtcaccatatttccggttccttttccttgcattct

SEQ ID NO: 21057 - DNA, 293 bp, Zea mays
  unsure (1)..(293): unsure at all n locations
  Clone ID: MRT4577_119200C.1
gcccgacgggcacctatgacggatgcccgccatcctaaacangggcgatcaaattgaaccttttgtttgtcatggtgacgagggtgtcttacactcatgtgatagaactcggcagatcgtaccatgccctgctgcgacagtgttcatcctcttaagataaccgagtatacctagaccgtaccgccgttcagacggacgagatatggaactcaccgtgccctacaatatccgacacatgatacacagataggccccaagcagcaccatagatgcagcacacgactacctactgg

SEQ ID NO: 21058 - DNA, 170 bp, Zea mays
  Clone ID: MRT4577_119201C.1
aagaaaaccggggactaatatacgaagcggggtgttttttcccaacttaacagctgaatgaaaataatggccccttttgcattataaccggctggaaatatcaagaacatgggggctgaaatgtcgaacggggcggcctgccactaaccaaaaactccaggggggcctat

SEQ ID NO: 21059 - DNA, 1480 bp, Zea mays
  Clone ID: MRT4577_119202C.1
gtaggccgcgaacctttttcccattatctaaaaaatctatctccaagccatgaactgcaaaagtcagaagaagcagctgagtcagtaacaataacaagtaatcctgatctgattcccagcagaagcttctttctgtccctccaacggaatctgtccatggttcatcaaccatgcgtgctgccgtggcacggcgtcgactcggcgcgaatcgacgccgtctgcacttgcctctgtgcccaatcatcgtcgctactgcacgccgtagctgcgaatcgatccacataaaacaactccgtctccagcctagctaatactaacagctatagagctgagtgactgacacccattggcggctggactattagtttatgcttggcgtttgtaatgctcggcctataaatacgcctgctcagtgatctgatgctccttcattcagatatatacagataagattttcttgctagcctcgaatcgcgatcgagtagctcatcagctgattcacaagtgcaagcatttgatgaagaggtttgcagttcaggagagcgagatggcgcgcatgctggtgctcatgtcgcgctcgcacggccaggaccaggcgctgccactgtcggcctgcctcgccggcggccagcaaggcgaggaccggcaggcgccggagcgcgtgttcgtgtgcaagacgtgcaaccgcgtgttcccgtcgttccaggcgctgggcggccaccgcgccagccacaagaagccgcggctggacggggacggcggcggcgacccctcgctcgccaagcccaagctgcacggctgctccgtctgcggcctcgagttcgccatcggccaggccctcggcggccacatgaggcgccaccgcgccatgacgggcggcgtgccggcggtgccgcccgcgacgacgaggatcgtcgtcgacgagaagccggacggcgacgtcgtcggcatcatccgccacgaccacgtccacgaccacggcggcgtcaagcagccccgcggcgggctgtggctcgacctcaactacccgccgtgcgacgacggccgcgacgcggtggaggcggagtgtggccgcaatgccgccgccgccacggggatcacgttccatcagttcctcgacactgccaccatggccgtcgactgccttggctactagatagatagataccaccaagctccatgattcttctcccctgccgcgtactactggtgcaccggtctcttcttcttcttctttcttttcttttctggaatcttcttcctcatttgcttctgcgcggagggggagaaatccacattttgtagcagtagtagaatgaaggtgcctactgcctaatgcatgcatgggcatggctgatgtgcatgaaggttttgggatgtctttgagctgctcggtggataatctggaggattgattccaccaaagctagcttattttgccatgggtttcatgttattatggataaaaaccctttggtcc

SEQ ID NO: 21060 - DNA, 534 bp, Zea mays
  Clone ID: MRT4577_119203C.1
ataatactacgagctgatcggcctgacccgcgactccctgatctgtttgaacgcatgccacttccctttcgtcttcgccggcattgcctgctcatcctcggacgccatcctccaaatgaccgtccctcatcactgcgatccccggcgcgtccaggatttcctcggccgcggtgcctagcgaattcagtacttcaaccccctggtgatggatgtgtccaagcacgccaaaactatgttgagatatacctaatcactgagtttcagagtacttgcctataacagtattgagagatttcgacattgtcagagctaagcttatcatctctgcctatggcattgtgattcattgaaaaatgaagggatacagcagttgttggttatctaagaacatggtttctaggatgggaacgtgaattatcttgcatatgtactagcatgaacgcactatctacttctcccacacaacctggacgaattacccctgagacttcactttatgctgggctgactgataggagtatccgatactatgat

SEQ ID NO: 21061 - DNA, 312 bp, Zea mays
  Clone ID: MRT4577_119204C.1
gggaaaagggagcgatgtcacaatcttcccgttttgacaacttctttagcaaggaattacatcacaattcaatagtccttggccccccttaaaggaagccattgtggaaaaactattcaactggccctccaaggaacacaatttcaggccaaaacactttgtattttacaagggacgacaccccgttaaattaaaacttttgggagcttgaaccacaccggggggtaaaataccggtgcatttacgaatttccaattagttttcataaaaaactcacgaaaacttggggggggttaaccctgccccccattt

SEQ ID NO: 21062 - DNA, 615 bp, Zea mays
  Clone ID: MRT4577_119205C.1
aacctttttcttagtcttgtctagacatttctcccccgcgccccggccatgaacagaggatattggatgtcgacaatgtagccaagcacggggagtaatatgaccgccactagagagagatagcaccgccctgattccacccaccggtgtcctttgcttatttacaggcgatccacgatcaccaccagatactctacagctatagagagtgataccggacgggcagaggtagagagagagagtacagcaaagcggtcttctttttctgtgttgaccaacaaacgaaccccagtccaagctctccgagtgtagaccgatcgttgtccggtgaacacagaaagcaactcacaggccggatagcgactgactgaactgcgttgctcacattcatcgaatgaaacgcaggcttcggattcgccgacgagagatgatgagggaactgcagtctcctggactagaagtgcgcaaacctcttcaaccacatccacgacctgctcgacttccccgatgaggagtcagacgccgacttgctcctgcaagacacaagcaaattcgctgagttctctggagtcggatggaataatctgcgtcctaagctccagctatggtacctgc

SEQ ID NO: 21063 - DNA, 525 bp, Zea mays
  Clone ID: MRT4577_119206C.1
attacttcaaacttacctgctgttcacatggctactcctagatatcatgctgaaggcatcatgtagctgtgattttgtaaaggctgaaacacgtgaatgtgtaaatgaatttaatatgaagcaacactatcaataatggcatgtgtgacattggtgagattgcttagttttttgtattatcttttatggtcatctaatgcaatataaaaatgtggggcatgttgcaagtgttaatattagtggctatgttgttgctttgagtatagaattttcttttttggtaacctttacgaataactgtattacatttatttttgtggattttcaggtgaagaatttattatcagttagtgctgatgatgaggttcctataaaaagtgtaactatccgcaaaattcctcgtgttctagaagaaatgcccctctatgacatcctaaacgaatttcagaaaggtcacagccacatggctgtagtcataaggaaaaacaatccagttaccaaccagctgaacaagctgctaatgat

SEQ ID NO: 21064 - DNA, 341 bp, Zea mays
  Clone ID: MRT4577_119207C.1
gggggtctgtcgaccccgctgcactgtcaaaccacttccggttcaagcgccggttgcgggactgcaagaccggagcacacatccagctctctgagcacatcatctacccactcacatgctactacactgcactatccgatccaacatccaattaccaatgacgtatcacactttgagacactctgggccgcttggtacgtgctatattgtcttaatcatgctctggatcaacacacattggctcacactctagatacacatcaccaaccacttatgaacatctactggagacctattttgaggctgatattatgccgaacctacattgcctattagcatgg

SEQ ID NO: 21065 - DNA, 235 bp, Zea mays
  Clone ID: MRT4577_119208C.1
ctaagcacagcaacctcatctctaacggtcacttcaagaagcactggcagaactatcccaagacatctttcaaccagtcctacctcaagcagaggcgcctcatcctacttcaaaagaaggctgtcattatatttccaagaccaactgcttaatcactttactctcattgcacaatgccacaatatttaatacaatatgaagtcaatgccttgaattatactggctcttgacgatt

SEQ ID NO: 21066 - DNA, 501 bp, Zea mays
  Clone ID: MRT4577_119209C.1
accattaaaaggacaccactttgggtccctaccattactatctcacttacatggggggccccaagagttaaaggcaggggggggccatgggatatatttaaaggttgggtcttttaaagggataaaacccaatggtccaaaataaaaaccaacccaagcagcaaggaattgaaggggggacggaacacacttggttggatgctgggggcaacattgaaagcttgaaggcggggcgtaccggcccccatatttcaactagggaactacctaactttgggtacggacccacaggcagccagcagtatttttgcctggacccaaaaaaaggggaaaaaagaagggtcacttgttgcaccccccggggcccgtaagggaaacgcattaaaaacaacgtacatgcctgtaaagcaactagtaacaacggccaacgggggaacccaccggtaaaaaaaagaagaaagccctacctaacccacagcgaaactgaactggaggttttgg

SEQ ID NO: 21067 - DNA, 822 bp, Zea mays
  Clone ID: MRT4577_11920C.1
atcatctgtacacactgctgctgtcctctcaaagttccatgccgcacggacgctcatcgcagaccagttcctagacaccacggcggccatcgcgtcgctgcacgtggacccgaacgtgttgtcgctgtagggcgggcgttccgagatggagcccgaggtggcggaggacggcaggctccacgtcacggtgcgcttgttgtcggcgtcgcatcggttgctgctgatggcgacgccgctgccgtccaacctgacgggcgcggagatatactcgatgagcttgtcgcggcagcacagcccgcagggctccaacttcaaccacgccgacttcttcgccatggtcgacggcgcgccgcccacgccggcgactggcgcgcgcgcctcgagcttcggcgccgccgagctgtactcgatgcactcatcgcgggggccgacgcagcggcagtccaacttcgacgagcgctcggccttagtccagtcgtcgaggccgcgaccgttgtggagctcgggcgcctcccctgtctcggaggtcagcggcctgcaggccttcaccggtggtggcgcaggtggcgtcaacgtcgacgccaaggaaattcgcatggttgtccccaccgagatgccgtagaacggctcagccggcaaaggtccgcgcgcggaattctagtctagcgagtagcgacacaaaccttggcctagacgggggcaccggcgagcgcggcgggcgcgggtgggagcgggcacgcaggcggaggtggcggcggcttcctcttggtggaagacacgggtcccggccggcctccccggccggcctcgaggtacccaatg

SEQ ID NO: 21068 - DNA, 101 bp, Zea mays
  Clone ID: MRT4577_119210C.1
tgtgccgtgaacgcgacagagggtggtgaggtcgctgtcgaggaagggcgacaggatagcgggcgacgcgacgccaaggccacggccggtggcgtagagat

SEQ ID NO: 21069 - DNA, 442 bp, Zea mays
  Clone ID: MRT4577_119211C.1
accaaaaaaacccgggggggggggcccccccctgtgggggggatggggcccctccggggggccaggaaacccccttgttttcccctttcaggcggggcccacccaggggggggtttttggccggtcccatgggaccatttccccctccccaaaggggggccccccttaataatggtttctacaaaacaaggggggtcactttttaccctttacccatgttttttgggggggggggtgcttccccaggggaagaaagggaagcccttttttgattgggggttggggccatctgaatttgcccatccaatttgttttcggtgattgggggacacaaccaacttgcccggccgagaaacctttccttttttgatgggggccccatgattaatctcccttccgtggagaagcccaaaacaaacatttcctttttcactaaaaaaca

SEQ ID NO: 21070 - DNA, 849 bp, Zea mays
  Clone ID: MRT4577_119212C.1
gagttgacaaagtttaccttgctgcaccctccaaaattgctatcattgatcatgagaagaaaagaacatttgtcgtgacaaaagaagggcttcctgatgctgttgtttggaacccttgggacaagaaggcaaaagcaatgcaagattttggggatgcagaatacaagagcatgctgtgtgtggagcctgcatctgttgagaggcctattactctgaaacctggtgaagagtggaaaggaaggcttgtgctctcagctgttccctcgagttactgtagtggacagttagatccattgaaggtccttcagggctgaaaatccttactttctgcctcttgtacagaagttcattgcccttactatttgatgctgggctagcgtctacgccgcatcgtccttttgccatttccaccacccgctatatctctggtcctttttgtatctagagtcttgagtgataggttgattccgaataacagtctgggctttgagcttagccttgggtcatctcatcggtgaatgctgaatggtacaaaatactggcatacgtgtcagttttataaatcatttctgggcagcacagattctttaacattgtgctttggtgcttctttaatacgtagttgatcatgtttgagagctgctatcctcgacctttgctcattcagtctaggacactgcaaagctgaaaatggatcccctcattttactatcttgtaatgaggtttcgatcgtaagcggttagcccttaacccttaccagtatgtgtgctcccccgccttctcatgtgatccgtcttgttgcaaaatcatttgtctttggatttgaaagaacaaaagattagtcctcc

SEQ ID NO: 21071 - DNA, 2098 bp, Zea mays
  unsure (1)..(2098): unsure at all n locations
  Clone ID: MRT4577_119213C.1
gcgcctgctccggggacgtctgcgccgctcgccaggctccggctcggtccagtggttcatcggggacgacgacgacaagccgcagaagcgggcggacaaggccgccgcgccgcacggccgcgtcgtgcgggagggcgtcgagttctacagcaatggggactgctacgagggcgagttccaccagggccgccggtccggcagccccgtctcgaccctctcgtccgtgtcggcaagggcaagtacgagggcgactgggtcgacggcaagtacgacggctacggcatcgagagctgggcgcggggcagccggtaccgcggccagtaccgccaggggctccgccacggccacggcgtctaccgcttctacagcggcgactgctacgcgggcgagtgggccggcggccagagccacggcatcggcgcgcagacctgctccgacggcagctcctacgtcggggagttcaagtgcggcgtcaagcacggcatcgggagctaccatttcagaaacggtgaccgttacgcgggcgagtacttcggggacaagatccacggcttcggcgtctacagcttcgccaacggccactgctacgaaggctcgtggcacgaaggcaagaagcagggattcgggatgtacacgttccggaacggcgacaagcgatcgggggactgggattctgggacgctcaagacccccttgcccccggccgatccttctgtccagcgagccgtacaggctgcacagcgagctgcagagaacgcgtttcgcttgcctagagttgatgagcaggtccacagggcggtaatggccgcgaacagggcggccacggccgctcgagtggcggcgatcaaggcagtccagaacaggatggatgggaagttttgtgagacctatgtgtgaattgctgtgtgcgagaccatgtttcgctctctctctctctttctaactgtacattagggtagtgaaggacaataactaatcagtgaggtgagacgacgaccggggcagcacaaccgcgcgcttccgagtcagggttcagcaacgagacgacgggagcctgtctgacgaagagcggagctggcagaaaccatttgcgagaaacggccatatcgccatggctgtcggaggggttccctcgcacctttccttgcaacaagctgtaactgtacatagatccaggcggtgtatcaatggtggagagcgagttttttcttcttctttccagtgcccttcctaagttttcatttactcctcaattatgctctcagtaggggggatgtgtgcagggcattggggcccccattgctgacaggctaataagtaagctttgcatttgggattggggcgtgcacaccccgtaatcacaacccccacagcccccgttctttgatggcctaccgaccccccccgcagtgcaactaatttgttagatgagagccccccaatcgtcggccgcctatggtgccctttttctttatccccccattttttcgtcgtttgtaggtcttcagttagacaatattatcaactttgcccgccggcttacgtcgcgtgaaataccccgccgaattcaatatcacccagtaatcacacttgctactctaattgcgcgccgagcggacgcgttcgactggacgtgccccagtgtatcatctacccctctattgttatgtaacanttctttcatccccgtacccgctttttccccccgcttttttttttatctcaatttctccaacctaaatcttgaccgcttctcccatgtgcagtgattctccgtttgcaaatgtacttggaggtgcacatgggggaaggactgtaaatctccccgcttgtcctgccctgcaatgcaacccaagcgtctctggtctggcacagatggcatgaataatttccagtggcctgttgtgttgtcgatccacaccctgctccctaaaaacctgagcccactgttttctgaaacctagagagagagagagagcaattcacagctttcggtcccctcacagatctttgcaccgggggcgtgaatgctggagaaaaagggttccggatcgcggaaatgtgaggctggcacaacgcattgttggttgccctggat

SEQ ID NO: 21072 - DNA, 176 bp, Zea mays
  Clone ID: MRT4577_119214C.1
agccagtgcttagattggcaattttggcatcggtggtctgaagccacgcactcatcagtggaacattcgcagtcaataagtagaacctgtctctgagctgcttcccacgagtgaaagttgtactcacatctgaggggattcatggccaagtatacatccccgagatccattggatg

SEQ ID NO: 21073 - DNA, 344 bp, Zea mays
  Clone ID: MRT4577_119215C.1
tggaactttgggctagatttagtgcatgttcacactttcctgttattactatacctagttagttaatacacacgctgtgtgctatagtcgtggcgtctccacatacttctgttgccgtcgtttctagtgtggataaagttttggtagagctattgaaggaaggtagcgtcgttaaggtattcgagctcgataagagaatcgtcgtttttgtcgaagtatttgaagttgtacctatatatgctgctgttgtcgttttactgttggtgcacacgaagctcggcgtagtcattgagttagttattgttcacatatttttcgaccttatggatgaggagccgagtttc

SEQ ID NO: 21074 - DNA, 106 bp, Zea mays
  Clone ID: MRT4577_119216C.1
tgacgcggcggtgtgccgcaatcggccaatcctcctattctacccctcaactcctcaagcctactccgataacagcgggcgctgggagcaaacgaaaactaaaacg

SEQ ID NO: 21075 - DNA, 579 bp, Zea mays
  Clone ID: MRT4577_119217C.1
ccctctgcgagttttttttttctttttttttttttttttttttttttttttttttttttttttttttttttttttgaaaagaaataaaaatcgttttgccaatagccccacaaaaggtaaaaacagttaactcaggtaaaattaaatagtataagggaaggctgcccccacccaaggacaatatgcccggccgttgggttttaaaaaagaaccgattgggccccccaataaaaaattggcagaaattttacaaacccggacacagggcagggtttttggaaggggcacccagttttttacaggggcacccccaaaaaaaaaaaattccacccccagcccccttgtttgttgcgggggaatgaggccatttttcggggggaggggggggtttttaaataaaaaaaaaaaacggctgggaaagggatgcttcacgggtaaggtttgaacagggggggccctgggttgttgccccgtttttttttaaggaaagccctggggttttccctggattgggggcccccctgaactaaaaagtgggcccagtttttggagaaacatgggcctggcccccgatgtttt

SEQ ID NO: 21076 - DNA, 323 bp, Zea mays
  Clone ID: MRT4577_119218C.1
tttggtggggaagaacataatagatggcgacataacaccaactgatagcgagcaaatattgtacacacaaattgagactgatcaagacatgctgagacaactggaatacaagcatagtctgaacaatacgtctaggtgcgtcaaacatgggtaatacagagacatacctttaactacactgcagagggggcatggaagctatcagatgctatgataaaggaaatgatgtgtatttttgaaagggctaaggatattaggcgaaccttttattcaaatgaatcgagctttgcgaaagatagtgctgcactaattatattccagga

SEQ ID NO: 21077 - DNA, 307 bp, Zea mays
  Clone ID: MRT4577_119219C.1
ggacgggccgtgcgtccgttccagcgtataggaacatctgttctgaggaaccgccagcgattgtacacctcgtgtgtgaccgatatattgctttgtgaacttatctacaggacatgaataactgcttgtcacccatcaccatgggtggcagtgtgagcaatgacctgaatgaaccattgaaatggaaaggaataatatataaggaaaaaagatgatttgaaaaaaacaaagaaaaaattaaaaaaaaattaaaaaacaaaaaaattaaaaaaaaattgtaaaaaaaaaaaaagagcagcattttttt

SEQ ID NO: 21078 - DNA, 286 bp, Zea mays
  Clone ID: MRT4577_11921C.1
gggctcatttcctattctaaatactccaatgtccttcattctttttacgacaaacttgatcgggatttcgtggatattaggacaaaaactcgcatcttttttcaaagagaagactatctaaacaaaattagacatcttcgtggtaaatatgcgctgacagaaatctacaagattaccctctagacaacacaacttttgagagatgataattttgcacaaaatgcattcacccgatatgataagatctgcccattctacatatatttttgcatgatgcgcaacatta

SEQ ID NO: 21079 - DNA, 293 bp, Zea mays
  Clone ID: MRT4577_119220C.1
caatccagggatgggtcctacatttattgggaactaaaggggctttttcaggacccaaaaatttcaaaacagtgttggggtaatgaggtcgtttgttttcgcgtttgattacggggtttttaatttattttcgggggggttactaaagcaaaaaagcggcgtcttctggaaccccaggaaattaaaatccagcagctccccctgcctgcaaaaataaatccgtttggttggccccatcgggggactccgtaacctggttggggccgtcgtcgggctaaacttttgacctaaaa

SEQ ID NO: 21080 - DNA, 370 bp, Zea mays
  unsure (1)..(370): unsure at all n locations
  Clone ID: MRT4577_119221C.1
tagacacacattatcatgtgtggtatgaccaatatntatgcatggtcataataaattttggttttaatgaaaaaaaaaaaaaaaaaaaaaaaaaaaaaaaaaaaaaaaaaaaaaaaaaaaaaaaaaaaaaaaaaaaaaagggggggaggtggaaattatggggaaaaggctaaaaactggattttgggggagagcattgattttctagggcccctttgggccctaatttaaaaggccttacaaggcccttgccgggcttttaaaaaaatttttaaaaagtaaaacttctggggtttttaaaaataaaaaaccttgggaaaaaactaccttttatcccaatagggcccataccgaaaaagccccctttagt

SEQ ID NO: 21081 - DNA, 577 bp, Zea mays
  Clone ID: MRT4577_119222C.1
cgttgctgtcgggggcggtaacatcaatatatgtttctatgtggggaaaaacatatactgactcggtaccagttctaggtgtggttaaaaaattatcttaagtctgactaagtttgtagaaaacagtatcagcatgcttgacttcagataggtataccatgaaaatatatttcatcacaaatctaatcgtacttgtataaatttagtcaaacttgagatacttagcactattctagaattgcatcttttctggaatcaagtatatgttaaattggacatagagcttcaacttggcattgacgataccgaagtccacagtcccactaaatagttgattaatagattgaactacatatcaagttacaaattatccaacaacaatgtggcatgcattgtaatcgtcaaattgcagaaaagacagcatctccaccaggtattcctatacaatctcctatacctaaaaagtagcgttttaggggacgaaggtgctgcaataaatctcctatatcatccctcatacctatattttttaacagatctcctaaaagaagcacccttcctcacaatacctgctctc

SEQ ID NO: 21082 - DNA, 244 bp, Zea mays
  Clone ID: MRT4577_119223C.1
ctttctttcttcctgtgaatatacaccactacttgtagcctcttgctggaaacgagtcagaagagaaattaaattgccagactggatagacttcagcggctatgatatgacagggacgtgaaaagtttagcttaaaaaaaaaaaaaaaaaaaaaaaaaaaaaaaaaaggggggccgcccccgattaagccaactatttctaaatcggggggggccgccaaatagtgaccccttcaacccgggaa

SEQ ID NO: 21083 - DNA, 377 bp, Zea mays
  Clone ID: MRT4577_119224C.1
ggaccggccggaatcccgggtgacccacccgcaataaaccccccctccccctctaccaagggtggccggagagggaacccagggaaagaggaggggcgatggcggcggcagaagaggagaaccgaagcaacgacggagggcaagccagggccaccagcaacgagacgctggagaaagcctacgccaacaacggcgagaaccaagacaccaaggacaacaccgaccgggagacggggaggacacgaggaaccggcaacgcaaccaactacaccgagaacaccaagcacgacgcaaacgagaacaagaacggcaaggagcccgacggacgcaacaaaacccgcaaccaagaacagacccgaggcggcggcggaggcagc

SEQ ID NO: 21084 - DNA, 5058 bp, Zea mays
  Clone ID: MRT4577_119225C.1
tcatctgcgtattgcagactgatcacccccattttcaataatgtgaggaaccatgcccacgagaagaccctcatgttgcgttcaagtaaccaaacaagcaggtctatctgcagcaatcttaaagaggagaggaaagtcagcatccccctgccggacacccatatgagtatcgaactaaggaacaaaagtgacattagtcacaacatccacttttccaccactgtctgtttttattacgcagcaaaattttttttctccaaagccttctttgtgtaacatttggtagaaaaactgccaatcagccttatcatatactttcttaaaatcgactctgaacattattccattttgtttttcctttttaacctcgtgaagaatctcatgtaaagctactacactatccaaaatgtacctttccttgaggaagcctgactgcgaattactaatgaccttagtaatgcatgacgccagcctgttattaagggtttttgtgataattttatagctcacatttaaaaggcaaaatcgccgctgggatgcagtactttgtgttaacatgtccggtatatgtattgagaaactttcatagttaagtctttctataggaagcacacctttatggaagtcttcaaacatgtgatacaagtcaaacgaaatcacttcccaaaaatcttggtagaactcggccggtaatccatcgggaccaggggcgctgttatgtttcatggacttaaccacattatggatttcgtgaatagaaaaaggagaagtgagaaaggacttatcctcttccccaagcctagccatatcgacattactcatagaaatatgagtatcgtcagaggtcccgaacagatttcggtagaagtttgtggctaacgcattaatattatcttccccttgtatcacatggtcatcttttgtttcctcctcaatcacaatatttctcaaacgagcttcatagacaattttctccttttccttccagatctccaaacttgaactgctccttacgggtttactccagcactctttcacaatctgaccaaagtcgggtctgtgtttccagcacagttcatatttaaaatccctcttgttataaattcttgtaccagaactcaaacaaagggggacatgatcagaaaacgttctattgaggcccctgacacaagtgtcatggtaagttaagtcccattccggactaactaagaatctatccagcttctcaaacgtggggtcatctctattattagaccaagtgtagagtctatcaaccaaattcagctcaatgagactattctcttgctccctaacatcaaagcaatcactattaaatccaactaaaaggccgccagacctacctctagggatagagtgaatccaaatgaatttttttcccccactgatagcgtctaaccaagattggctgaagttctttttcatagtctcttgcagacctatgaaatcaaccttctcatcacaaatgagttctttcaagaactcaatcttgccttgtttcctcaaacctttgcctcctccttttttttcagaagagggtgcaacagtcacagactcacccctcttcccatcctgaattatcatattagacctaactaattctagggatttgatatgacagagactactttcagcttccctactattttttcccaaatccacattcagaatattagctatatctattaattcagaatctttggatagaaaagcatctttggctgcaactctagaaatagctttctcagtcacattcatctcttcagaggtttccagtctgggactccttcttggaccttcagcctgctcacctactttttgcttccctttcttttcattctccgcttgattatacttcttagtaactgcatcctcttttttatcatccacctcttcttgtggtgtgcttatatcaaccccaacactttttgctagagcttccaattcttgagaactgagcaagtcttcttcactatcttcgagattcactttatcatcatcataatctgagccctccaccagaccctcggacacactagaccttatttttactttatcatcttctagagaaatgacagttttgtcaaaatctgtcccagcctgactgtttttagtttgtaagaacacatgtttctcctcatctgtctctttccttatctttttcccatttttccccttttcccaccaccccctatgctgggtatccacagaagctctctttcccaagttaccactctcttcattccaaccttccccaacttcaagcacaggggggatcatagagatgcttttgacatgcaccttgaacctcacgcaattttgcatttctaaagcttttagatccacctcctcaacagcacccaatgccgagcctagctcgcaaatagcctggaaattacgtaactcctcaggaacattttctgccaccacccatatcgtatgtagtcttgccttggcagtggctgaagatatccatggaaccactgagattttcactcctgacatcttcatttttaactctggaaattgaaccatttcatccagtctctcctgtgaaggaaattgcatgatgtacccaacctggcacttggttgctttccaaacacgtccccacgggaaatggaagtcaaagtcctttaccaactcttctgcagagactccaccctccagaatttttaccaaacctaaggcattaggttttggttttttgagttgagatttagcaaattgcatcatgtagaagcctaatccatctgctgccatcccgactataggcatggtcggtttggtctgtttaggccaaacacacttcgtcgtaacatgggtgtctttcctacaaatctcacaccataaatttttgctacagtctctagcatgatgaccttcatccccacatttctgacagaacaatttccttcccgaatcaatctcagtaagcgatgatggggcaatgggattaggaatacctgcgctctcgatttcccctgatgtcgacgaccccgggagaataaccttggggccacccctacccagaggtgggctgagccgccagctcagattccgatttcttccccatgggggagtcacctgctgatcacggggtcctctcctgtcccatccttgactccgctgcttcggatccatcatccggagacccttagctcccaacctcggccactcttcaagcacggatgggggtctgaatggtaaacgatgccagccacctccgtaaagagaaacgtaatcagtgggtaggagccacatccgagagacgaatgcggcgaggtgtgggagggtacgtgaacccactaggtcattcggacagctagaatccacgaccgtcggatgcaaattcggatgtgaacgaccccacgtgtcacccaacggagccttctcaaactgggccgtaaccctgttcccagctgggctgaaatccccaccactggaaaacgtctgcgcgatttcaacacccggcatccatcccgtccaaatttttccttgcaaatcatggaaagagcctgtacgatcatcagcttcaaactcccaatgctccagattcctggtattcgactcaggaagcggagccacagtgagtgaagcatgaattgacaaatgacggaaatcgcttctcatccccaatgctgccgacgggtactcagacccacctgaggagcgacccaagtctccgatagattcagcagcccgagattgcacaccaccagacgacgggggacgcgatgaagcagcgacgaggagggtggtgcgacgggtgaccgggatggagagccggagaggaaacgccctttccctcctgctgggtgctcggagtcggcgagtcgccctttccctccgcgaggcggagacggaggaattatgatcccagcctcccaggaatagctctacagaacacttgagttcactaatatcatcgccgagctgccaaactttcacggtcttgtcattgtcaagcgccccggatgcgatcatgttttccttgggatgacatgagaccgcaatgacagtatcagtatggccttccagtttctgcactattcttcttgactggaggtcccataggtagacacatttgtcctcggagccactgacaatatacttgctattcgtgatagaaaacgccgctgggatgcagtactttgtgttaacatgtccggtatatgtcttcagaaactttccagctgagaaattccaaagcctctttaggccccgtttgtttcgttggtggaattgaattatattttttatggcggcaagaatcagttccaaggtgctgtcaagcgttgccgcgaggataaacttgccattgggggagaacttggcaaaggacactggtgggctctcgtcgtcgatgagggttttgacgcagtgaccggtggccgagtcccagacgcggcagagcccgtcgtagctccctgacacaatcatgtcgccctcgcgatcgaagtccacggcggtgacgggttcagaatgggccggcagcacgcggaggcacttaccggacctgacctcccacacgcgcaccgtctcgtcaaaggacccggaggcgaggacgttgccatgggggctgaaggagacgcagaaggcgtagttggtgtggcccgtgagcgtcttgacgaggcgggcccctccgccgacggcgaggtcccagatgcggacggtgcgatcatcggaggcggaggcaaggaggcggccgtcgggggagaaagagaggtctgagacaccctctccatggccctcgagctccgcaacgggggtgagatcggaggaagaccacacgcgaagaagcttgtcggcggaggcggaggcgagaaggcggccatccggggagaacttaacggttgatacggcgcggcggtgcccctcaagtgtggagcggaggacgtagcctggggatgccgaggcatcgtcggccgccggcgccgccattgccgccgattgaaagggtttgggggttttggaggagtttctccgcgagacggtggtgtggtgacggtgtggctcgcggaccggtgcggaccaatg

SEQ ID NO: 21085 - DNA, 437 bp, Zea mays
  Clone ID: MRT4577_119226C.1
cctcacgcgtccgcccacgcgtccggtcagttgtgaaaatctcagtggttccatggatatcttcagccactgccaaggcaagactgcatacgatatgggtggtggcagaaaatgttcctgaggagttacgtaatttccaggctatttgcgagctaggctcggcattgggtgctgttgaggaggtggatctaaaagctttagaaatgcaaaattgcgtgaggttcaaggtgcatgtcaaaagcatctctatgatcccccctgtgcttgaagttggggtaaaaccttacctgtttgacatttttttcaaaattgatggcgttgaagagaaagttggaatgaaagagtggtaacttgggaaagagagcttctgtggatacccaacacagggggtgggggaaaaggggaaaaatgggaaaaagataaggaagagacagatg

SEQ ID NO: 21086 - DNA, 382 bp, Zea mays
  Clone ID: MRT4577_119227C.1
accgtcgacctgatccgggtgcgccgctacaacgccgagtgggcgctgaccgagcagctcgacgtgatcagcggccacttcgacgacatcgaggacgagtacctgcgcgagcgcaaggccgacatcgagcaggtggtcgagcgcgtgctgaaggcgctggccggcgcgccctcggcctcgcaggcgctgggcggcgcggccggcggcaaggacgacatgatcgtggtcgcgcacgacatcgcgccggccgacatgatgcagttcaagaaccaggctttccgtgccttcgtcaccgacctgggtgggcgcacctcgcataccgggatcgtggcgcgcagcctcggcattccgggctcggtcggggtgcatcacgccagcgcgc

SEQ ID NO: 21087 - DNA, 1124 bp, Zea mays
  unsure (1)..(1124): unsure at all n locations
  Clone ID: MRT4577_119228C.1
agataacaaaaacagctccgcatcaaagattagggaatcagaaacacaacaaatgaagttcaagcattgttgtgttgagtctttcttacatgatcccagcctcccaggaatagctctacagaacacttgagttcactaatatcatcgccgagctgctgaacagacaatatagcactcactcagttacacatgccaggagcatcacattctccactgcagcaaactttagttgcttgggaagctgcatattttgcttaccattagtcagtccacatgacagccaatgtagataagagcgtaaccaggccgctcatcaatcttcttccttttggacccaaactttcacggtcttgtcattgtcaagcgccccggatgcgatcatgttttccttgggatgacatgagaccgcaatgacagtatcagtatggccttccagtttctgcactattcttcttgactggaggtcccataggtagacacatttgtcctcggagccactgacaatatacttgctattcgtgatagaaaacgccgctgggatgcagtactttgtgttaacatgtccggtatatgtcttcagaaactttccagctgagaaattccaaagcctcaaggtgctgtcaagcgttgccgcgaggataaacttgccattgggggagaacttggcaaaggacactggtgggctctcgtcgtcgatgagggttttgacgcagtgaccggtggccgagtcccagacgcggcagagcccgtcgtagctccctgacacaatcatgtcgccctcgcgatcgaagtccacggcggtgacgggttcagaatgggccggcagcacgcggaggcacttaccggacctgacctcccacacgcgcaccgtctcgtcaaaggacccggaggcgaggacgttgccatgggggctgaaggagacgcagaaggcgtagttggtgtggcccgtgagcgtcttgacgaggcgggcccctccgccgacggcgaggtcccagatgcggacggtgcgatcatnnnnnnnnnnnnnnnnnnnnnnnnngtcnnnnnagaaagagaggtctgagacaccctctccatggccctcgagctccgcaacnnnnntgagatcggaggaagaccacacg

SEQ ID NO: 21088 - DNA, 113 bp, Zea mays
  Clone ID: MRT4577_119229C.1
gcgtctacgctaactcgccaggatcctccttgtcgcactcctgctcagcaggggtaagacaccgtgccgcgtctcgactcggacatcgcacgcttttagatgacttcaaaaag

SEQ ID NO: 21089 - DNA, 354 bp, Zea mays
  unsure (1)..(354): unsure at all n locations
  Clone ID: MRT4577_11922C.1
tcatcctcttactcttgatcttacatcataatctgacgcgtgggcggacacataaaanaaaatanaanattattaatnaaaaaattttttattaaaaataaaancaannataaaatattattttttantaaaatagaatntttttattttaaaaaatncattataatatatttttgtaataacacntttttttgttattatagaaatgataaaattttntggaataacatnaaaagatggtttccaaactgatataccgaatgcaacaacttactttcccaaaccaccttcaaaattcaaaaactcctttagtaatctttcttatataactatctaatccccaaatggtaggaa

SEQ ID NO: 21090 - DNA, 823 bp, Zea mays
  Clone ID: MRT4577_119230C.1
agaccttgggtataaactccagctcctagtagcacgacggccagcgcgcagcgcagcgcactgcagatcgagcgcgcgcggcagaggcagaggcagaggcagagccaagcgaagcgaacggcgggcgggcatggactggcacgcgtggctgtcgggggcgcggctggagccggcgctggtgtacgagtacgcgctggtgttcgcgcgcaacgagctggaggccgacgacgtggccttcttggaccacgagttcctgcacagcatgggcatctcggtcgccaagcaccgcctggagatcctgaagctcgcctggcgcgaccgccggagccgcggccgcgcgggagcccgccccgcggcggcggcgctggcccgcatcctcctcggccgcgtcgccaggtacgtgcgctcgctcgtgcggcgcgagggcgactgctcgtccacggcgctcgtgctggtccccccgacgacccagccgcagcggcaccccggcgacggccgcagcccaccatgcgtcggcgtcggcgtcggcgtcggcggcgtctgtgtctcgaagcacagccagcagcgccgcggcggcaaggcgctgcggcgggccaggtcggagcccaagggcaccccgcccagggcctcctccgtcgtcggtgggagggccgccgcggccgtgcacgcggtaggcgacgacgtggagggcgggagcggcagcgagatggtcaggtgggaccgcctgttccaggacctcaaaccaactgacacgccgtcatcgagtgcatgccgctgggacgacggaggaaggaaccatcagcgttcggagtgctatgtttag

SEQ ID NO: 21091 - DNA, 830 bp, Zea mays
  unsure (1)..(830): unsure at all n locations
  Clone ID: MRT4577_119231C.1
gctctacaatccgctccggcngaagcgatggcaaacacacccatcggtcttgatgtggcgctggcggttgctgcggcggtgctgcagcgttgctgggtccagcgccaggatcaccaccggttcggcggacacgctcagggtcaaatgtggcccgagcgtccttgttgcggcatttcttggcatggcgacgtccatgtcgatgcgcaacacgtagaaggcgacgtgcgacagaatcagcacctcgccggcgacgacggccgccgttcaaagaccgaaggatgaagtgaaagaagtggacgccagtataggacacaaccagacgactcaacggagaagtggatacgtgttatcaagggtcaacctcccttgaatgtcggctgggagcagcagtaactgcttaaatcccgtaacatcttcaaccggtaaccctacttcgcgtacctcggcgatccgcagccggagacactggccttgtgcttgttccagcccaacaccgacccgccggacaccggatccgtgctcaccaacaccatattcgacgccctgcgcgaccccgacgaggacggcgccacggtggagaacgcgcgcgcgttcgtgtggggcctcgtgtcccacctccggtctctggccggcacgctgcgggcgcccggcaagtacgacgatgacctcaagcctggcaaggcgtcggagcgggcacttcgggctgttcgagaccagcctcaccgagacgtaccagacggggttgtccaggaacggctcggccggactgataccagccacagcgcaggcgccaataacatccgccccggcgctaaagccaacaccaggca

SEQ ID NO: 21092 - DNA, 461 bp, Zea mays
  Clone ID: MRT4577_119232C.1
acctgccacagggggactttcaaaagggtgaattccaacacaatgggggccgatactagtgcaacccaggtcggaaccaaggttggagtaattatgggcataaaagtttcctgcggtaaaaagttatccgataacaataccccaaaacataaaagccgaaaccttaaggggcaaagccgggggcgcacaaagagtgagcgaactgacattaatggccgttttctaactggcaaatttgcagtgccaaaacctttaatgaaacctgcattaatcaatgagacaacgctcggggagagggcgcttgtccattgggccctttaccgattccttgctcactgactttctgcgctggggagctgggttaggtcaatcggaatcagctaacccaaaggccgcaataccggggtccaacgaatgaaggaacaacgcaggaaaaaacatgtaaacaaaaggccaccaaa

SEQ ID NO: 21093 - DNA, 272 bp, Zea mays
  Clone ID: MRT4577_119233C.1
acttcttcttacactcctcctcttctctactactacctcccctcaattacttttaattttcaatatatacaatcacataataatcatccattattacatcatttatacattcaacaaccatcccattacttattttacatcctcacataatccttacttttcaaactataccatttctcaatttaatcacatacttataattaaaccaacaccacataatacactaatcaattttcctttcaaaacttattcaatatcactttaactttcaa

SEQ ID NO: 21094 - DNA, 208 bp, Zea mays
  Clone ID: MRT4577_119234C.1
ctctctcgtagcgcagaatgaaacacaccttacacactacaagcctaccttcgctacggggccaagccacttctccaaacccaccacaccagtctcaagtgcccaggaagcaacgcgccccaaaagcagcagccgaccaatgcaccacgcacgtcggcagtactacctgcagcacatccataacctacagatctagatccggcacaag

SEQ ID NO: 21095 - DNA, 2114 bp, Zea mays
  Clone ID: MRT4577_119235C.1
ctcctctgcacatgtacactcacctcaaaacccccaagcatcgtgctaaaacccggcctagccctcgaatccccccttgcccgcgcggagtagacgagcccagcccgtcccatcgaccatggcatcctcagggtccgccgctaacctctggtactgcttggcctaagcatcgcgggcgtcctcctggcagcgcggcgattgaggcaccatacgcgccctgaccacgacgctttcatggcccgcctagagctcctcccaccgccacagcctccgccgtcgcaaggaggccagcccgggcgaggtggcgcaggccatcgccatgttccccagatcctgttccacagcgtcgccttcttccaggtacacccagctctcgccttcttcaggcacagctccaagccgtcaagcgccacccagtcccgattcccttcacaccgtctctcgccctatcctatctgacggtccaagactctgagtttgccgtggtgagtgtgcttcactgcttctctaattcctcccgttgcattggttcgatggaatatggcgctgaggaggaggcggcgaccgatgaccccagtagcagcgggggcaccaggcgttgggcgactgaaggggagcccgaagctgactgtggatgcggacatgcgagatatggcgaagacggccgcgtggagcgttagttcctacagggctggcaacggtgtcacggccctgcacgacaacaaccttgacacctgccgacagtctgatggggctcaagtgtacagccgcaaatggtgaacatccagttccagaagaagttgcaggcgtgtagctgcagcctgcagctcgtcgtgatatacgtggatttcaagctcgaagaagtgctccactaaaaatgaaacgttagaattcagctgagcatcttactctacattgcagcaaactgtgacgtgctttgctgagttagattagtctggcatgcttgagtttcccatggtagggcgccgcgaagcgcgcctctttttctagtaaacaaaagcgcaaatggaagccgcttcacgtagcagcccgtgcaaagcaagcgaaagggacccgcgagcagcgaagcaaccaggccaagcgcaacacgacctacaccgtggggccggccatccaggagacacgcgtattccgtcctggacaaaggaccgcatccacttgctagctcgctagtcattacctgatttcgccgcgggcgtcgtcgtctttctccttcctcgtcctttataaaggaaggtggcaatggcctttccctctgcaccgccaagttagcttgcctagccacatcaaagcaaagctagctacggccagctttggcgatctgcttgcttctctctgagcgtttctttacaactaaaccaactgagcaatggggaggcaaccgtgctgcgacaaggtggggctgaagaagggcccgtggtcggcggaggaggacgagaagctcgtcaccttcctcctcaccaacggccagtgctgctggcgcgccgtgcccaagcttgccgggctactgcggtgcggaaagagctgcaggcttcggtggaccaactacctgcgcccggacctcaagcgcgggctgctgtcgtcggaggaggagacgacggtgatcgacctgcacgcgcagctgggcaaccggtggtccaagatcgcgtcgcacctgccgggacgcacggacaacgagatcaagaaccactggaacacgcacatcaagaagaagctgaggaagatgggcatcgaccctgccacccacaagcccctccacccacagccagcagctcctcctccgactcagcaggagcaggacacgggcgggtcgcccgaggaggagggggagaaggccgacgcggtcatgatggcagcagctacgccgattatcgggcacgagacggcgccgttctttaccgacgaggaggagatgctggcgcacctccttgacgacatcgacgacttcccacccgcggcttattctcccgacgactcttcttcgccctcctcctcctcctccgcgtcccggtcgtctcactcggcctccgtcgtcacagcgccgtcgtcgagcggagctggtggaagcagcgtcgccgacggcgagcggccgc

SEQ ID NO: 21096 - DNA, 435 bp, Zea mays
  unsure (1)..(435): unsure at all n locations
  Clone ID: MRT4577_119236C.1
ttgttctctgaagcatcacgagttctcctgggcgggacgcctacagagtttgggcatctctctattgttaaggccacaagagcggtngggaagctcaagaagaatgcattcntaccccttttggnccaagcctcttagctctccaccacctcttctcgcgccccttgtctttactttgttcttttcagnactcctcttaaaccggtctattcaaccactctataagtgcttttcttgctcactcatttttttgagccctttctcgtttatattttcctgttagatgtccattttttttttctacctttgttaaatcttttttttttttttgtattcagtattagtgttccataactaattttttctatcttcaaatttttttcatacttattttgttatcttaattatttgtatatatatgttatttatttcttt

SEQ ID NO: 21097 - DNA, 1481 bp, Zea mays
  unsure (1)..(1481): unsure at all n locations
  Clone ID: MRT4577_119237C.1
gcaattgcaagcagcacaagggctccaaagatgcaccgctccttcctcctcgtctctgcactcgtagccgccgcgctgtgggccgacaccaccgttgccgctgcccagagccagagccagagccagagccagaggtcatgggccgaactcagcgggcgggacaactgggacgggctcctggacccgctcgacggcgacctccggcgcgccgtcatccggtacggggagctggcgcaggcgacgtcggacgcgttcatcggcgacccggcgtcgccgtacgcgggcgcgtcgcggtacgcccccggcgcgttcctccgcagggcgcaggcgcccgacccggacgcgtacaacgtgacgaggttcctgtacgcgacgtcgagcgcgcgcgtccccggccagttcatcacgcggccggcgccgccgggggcgtggagcgccgagtccaactggatggggtacgtcgccgtggccacggacgccggcgtcgcgaggctggggaggcgggacatcgtggtggcgtggcgcgggaccaagcgcgccgtggagtgggccaacgacctggacatcacgctggtgccggcggcgggcgtcgtcgggcctggccccgggtggtcgcagccggcggtgcaccggggtttcttgtccgtgtacgcgtcgaggaactccacgtcgcggttcaacaagaaaagcgcctgcatgcaggtgttggccgagattagaaggctattggacgcgtacaagggcgagaactgcagcatcacgctaaccggccacagcctgggcgcggcgctctccacgctcaccgccatcgacatcgtcgccaacggcctcaacgtccggggccccaacaacgacacggtccccgtcgccgccatcgtcttcggcagcccccgcgtgggcgacgaccagttcaagaaggcgttcgactcggcgcccggcgcccggctgctccgggtccggaacgcgcccgacgtcgtgcccaccgtcctgcccaacgccttctacaaggacgtcggcgtggagctgctgctggacacgcgcaagtcgccgcacctcaagaggcccggcccgggccccgccgcctggcacaacctcgagtgctacctgcacggcgtcgcgggcacgcagggcgccggcgacgccgccgggttcagcctggaggtggaccgcgacgtcgcgctggtgaacaaggaggtggacgcgctcagcgacgactaccccgtgccggcggcctggtgggtggaggggaacaagggcatgaccagggacgccagcggacgctgggttttgcaggatcatgaggagggtaacctcgctatgtgatgattttgataacttcattaaagatggttattaatgaattaataatacgaaagcaagagttttctcgacaaaaaaaaaaaaaaaaaaaaaaaaaaaaaaaaatcgagggggggctgactaaacccaactgaatatctgntntagaaaaaaaagaaatt

SEQ ID NO: 21098 - DNA, 910 bp, Zea mays
  Clone ID: MRT4577_119238C.1
gcccccaagggacagaagacgcactgggtcatgcacgagtaccgcctcgagggcgcctacgcctaccatttcctccccagctccacaagggacgagtgggtgatcgcgagggtgttccagaagcccggcgaggtcccacctgcagcccgcaagcaccgcctcggcgcccttagcagcactaccggcaccgccgcgggcgattcctgcttctcggactctacctcggcctccatcggcggcgcgtcgtcgtcatccacgcctggcccgctgttcgcgtcggcggccgccgccgtggccaatgccggcgccgccgacggcgacaccagctcctactgcggcggcgctgccaaccatggcaacctggtcaccggccgtgagctcgtgccctgcttctccactgccaccattaacggccccctagttgccgccgcgctcggcatcgggcagccgtacaacgcagccccgctgccgttcgagcagcagccgccgcctccggccttcctgccgagcctgcgttcccttcaggacaacctccagcttccaccgttcctctcagcaggcggtctgggcggcggcggggctctccactggctccccgccggcggcatggaggtcaaggtcgagggccgctcggcgccaccgcagatggctgtcggccccggccagctcgatggcgctttcggctggagcttctagttcttcgctgcactacatggttgtgcccatctatctagctagtagtggtttcttcatgcgttgtacgttaagcttggttaatcaactgctagtaagtgactgggtcgtcgttctaagtaatgtagtaactgtgttgtagtctctcatctaactgcagtagcagctttatttgttaaaagattaaaaaaaaaaaaaaaaaagggcggccgcaaaa

SEQ ID NO: 21099 - DNA, 336 bp, Zea mays
  Clone ID: MRT4577_119239C.1
ctgagggcacagagcgtgtagcgtggcctggctggcggtgtctttctagcccaagatcaggggcgatcggagcgaccgctttatggggactccatgcgaatgtacgctggctatgctgaccgtttactgtagcaataactagtttcctgcacttgcgctgcacagttcatcactgttcacaggcaactgactactaactagccgcagacgttgcactgatgattgacgcgctacgtggtgacacgcattgtcagggggggggcatgacttggtattgatgacaacaatagacatgcgaggcgtacagtaaatccttgatgcaccataactaggaga

SEQ ID NO: 21100 - DNA, 718 bp, Zea mays
  unsure (1)..(718): unsure at all n locations
  Clone ID: MRT4577_11923C.1
ccggccgggatcctcttctcactctcctctctacacccgtgtcttccaccaagaggaagccgccgccgatgccgcctccgcctgcatacccgctcccgcccgcgcccgccgcgcttgccggtgcccccgccccggccaaggtttgtgtcgctactcgctagactagaattccgcgcgcggacctttgccggccgagccgttctgcggcatctcgacggggacaaccatgcgaatttccttggcgtccacgttgacgccacctgagccaccaccggtgaaggccggctggccgctgacctccgagacaggggaggcgcccgagctccacaacggccgcgggcctcgacgactgggctaaggccgagcgctcgtcgaagttggactgccgctgcgtcagccccctcgaccgctgcgacaccgacaaccagcgcaccgtgacgtggagcctatcgtcctccgccacctcggcctccatctcggcgcgcccgccctacagcgacaacacgtccgggctccacatgcagcgacgcgatggctgccgtggtgtcagggaactggtccacgatgagcgtccgcgcggcgcagaacttgaagaggaacagcagcagtgtgtaccatatgatgcactggagggcaggcttgagcacgcggccagcctcgcgaggacgaccagcttctgcnagcgtgtccgctgccaggaaccgggagattcatggcg

SEQ ID NO: 21101 - DNA, 663 bp, Zea mays
  Clone ID: MRT4577_119240C.1
ccccccctcgagttttttttttttttttttttttttttttttttttttttttttttttttttttttttttttttttttttttttttttttttttttgggggaaaaccgaacccctttttttttattgggggggggaaaacaaaaacccggatagaggggacctataatccttgggggaaaaaactttttcccaaaagccccccactttttttttgggcccccaaacgggaaccccaaaatttcccctaataaacccctgggggggggaccaccccccccggtttccttttaccgggggggggccaaaaaggattttcggggggggggaaaaaaaaccccggggcccccttgggggcccgggaatccccttggggggacagattaaaaccggccccccaggcagggccgggcttttaatccccccggggggggaaaaaaaaaatttcattccccccaaagccccccctttggaacctttggggagccggaaatccccgggaaacattttccccaaaggggccaggggggtcaaaaaaataaaatcccttcacccccaaaaaaggccccccccccgggggaaaaggcctgggggaaccccccccctggggcctttattaaccaacccggttaatttaacggggcccccaaccaaaaatcccggga

SEQ ID NO: 21102 - DNA, 486 bp, Zea mays
  Clone ID: MRT4577_119241C.1
cagcccgaagggaagaagctgccacgcaccttctgccagctgatcctggaccccatcttcaaggtgtttgatgcgatcatgaatttcaagatagaggagacagcaaaactgatagagaaactggacatcactcaaccataacacttgatgccgtttctttcaatatttatttccagagtccggacgcagcagacacgccctcttagtagggacttaatgggccggtcggggagggggaggcgggatgggacacccaacactttttccatttcttcagagggaaactcagatgtccagactaattttaacaaacgcattaagaggtttatttgggtacatggcccgcagtggcttttgccccagaaaggggaaaggagctcgcgggtagatgatttctagcaggcaggaagtcctgtgcggtgtcaccatgagcacctccagctgtactagtgccattggaataataaatggaataaggtggtgaaa

SEQ ID NO: 21103 - DNA, 267 bp, Zea mays
  Clone ID: MRT4577_119242C.1
gttcatggttctgatcccctcggccttgatgactgagcagatgatgccggccgtgggtggactctaccaggagtagttccagttgcccagctgccgctccagcccctgtggcgtctccgctgcgctgccgccctactactgattcatgatatttgggaagtctcctctatgcatgcctctctatctatatatgtactattgcagtaagacgactctcattatcatgtcgtgccgtgacccttattatatgcctcatagcggcagtcc

SEQ ID NO: 21104 - DNA, 292 bp, Zea mays
  Clone ID: MRT4577_119243C.1
cccactgcgtccggtctcaaattatacaagatcaagtgcaagtaatatctcgaaactaacatcatccaatgtattgttcagctgcgctgcgaggcatcgcagcgactgaatctttagttcgagatgtaggaatgaattggatgatgttagttgggagagattagttgtatgtcggtattgttgtgtgcaatcataaagaatcaagtgcaagtaaccgggtttacagtccaaaactacagttgaaaaatcatgacgacctggatgaagcaagggagaaggtgtgaagagagga

SEQ ID NO: 21105 - DNA, 249 bp, Zea mays
  Clone ID: MRT4577_119244C.1
tatcgaggtagcgtctgctactcgtatgttattacacttcttgcaaatatgctcaggcgggtacgcactgaagccgagtaccaagcaaatgacataaactaacatgcagactagacaacccaactgaatacatgtatctcaatgcatcattctgcaatcatctttactgaaaaatattaaaccgctcgatacacgaaccttttcttttcgtaagattcataatatagatagtcactgacatgttctatt

SEQ ID NO: 21106 - DNA, 365 bp, Zea mays
  unsure (1)..(365): unsure at all n locations
  Clone ID: MRT4577_119245C.1
ggaacctttgggctgatttatgtgcttgtcctttctatatacttcgccctccgttgtatcagaaatgctgacttagtaacggtcgtcattttgattactgcctcggcgtttgctcggggtaccggttatcctgcattaacgtctgaggctggtaagtggtcgtctgtatgtagtgtatcgttttctattgctattgcgtctgcaacgttgccgttcgtagaggtgaagtgggtgcttgagactattgagtatacatgttagtaggaagttcctggttctgttacttgtccntattactcgttagtggcggaatttttaattgattatctgggtactgaggagcatacactttgtcatgcgtagtc

SEQ ID NO: 21107 - DNA, 609 bp, Zea mays
  unsure (1)..(609): unsure at all n locations
  Clone ID: MRT4577_119246C.1
ggtttcataatatttgtatcaccacgatgatgtgctacttaaaagaggtaactcaaagacattaaacttcatttttcaatgaattattcatccttgagttctggtaaatatatattacttcattcagtcctgttaattttttcctgcgctttatatgagcaatcacatgcagaattgcagattggcactagagctttgtgtagctgattggccctagagctttgtgggaaaaacttgtgttcaagtacatgcatcagcatccaatattgttcttgtttgtgtcctactggaaaggaggaagatttgagatactgaagattaatgatgccccctgctatataaatctgacacagggtgctttgtaaccattgttttcataagttattttttctgatgcttattttctttatataatgcagatgcgggttttatttacaccctgctgaaggctcgcctgcaccaaacataactcaagggaagcttagtgctccacggatattgcgaattcacaaggtagctaactatgtggntgagaaactcgttcttgacaaaccattggatggaggctctgatgcgtttgntatgggattgagttctgctcatcacagc

SEQ ID NO: 21108 - DNA, 395 bp, Zea mays
  Clone ID: MRT4577_119247C.1
cgacctcaccggccacgagacggtgcggataccgtcggtggcgctggtgttcgccgacggcgccaccgtgcacctacaccccagcggcgtgctgtatacctggagcaatgtctcccagacgtgcctcgcgttcctgcccaaccccgacgacacgtccttgggcgtacttgggaacacgcagcagaggacgctcgccgtcatctacgacgtggacaaccagaaggtcgggttcggcgccaatggctgcgcctgaaatcaaccgtgtttcgcaaaagatcaacggctataacgtgatgcactgatgcgatcatagcgatcgtggtttagctttcgtagcggtgatcttgcgaggaaggtttttagactttccagggttggtgtgcacggtttgtatc

SEQ ID NO: 21109 - DNA, 1992 bp, Zea mays
  Clone ID: MRT4577_119248C.1
ccacgcgtccgaccacttcgatgtttcctgcgacagcaacgatgtttgttgggttggtgaagcgagggagttcgaataatcagtcctcagttcctcacgcatgtggcacgccagtctcggccgatagagtgcgctcgtcgactccgctcagccctctcgctcactatcaaccccgctaggtcctagcggagaggcaggcggcgaggcgcgccgccgcgaagcaactggatttcacggggtgcggagagccgtctcggccgagagagtgcgctcgtcgactccactcagctctctcgctcactctcctcccccaaggtcccagagacaggcagccggcgaggcgcgccgccgcgaagcaatggatttcaaggggttctgggagtccagattcgggggcaagaaggaacccgagccggagcagaacgggcacgccaacggggtccagaaccagaagaggacctccgatctggcggtctacgagcagttcgagcagcaggccaggcagacccaggtccgagccgccgcgattcgcgacggagacgctgatgtcatccagaagccccttctaccttcatttgagtcagctgaaatgcgtaatctcgcagagacattgttgagggatattattcgcgggagcccagatgtgaaatgggagagcatcaaaggactggaaaatgcaaaacgccttctaaaagaggctgttgtcatgcccataaagtacccaaaatacttcactggtctcctttctccatggaaaggcatcttactttttggccccccagggacaggaaagacaatgctggcaaaagcggtcgctactgagtgcaaaaccaccttcttcaacatttcagcatcatcaattgtcagcaaatggcgtggagatccagagaagcttgtcaaagttctgtttgagcttgctaggcatcatgcaccatccacaatattccttgatgaaatagatgctatcatcagccagcgtggtgaagctcgcagtgagcatgaggctagtcgtcgcttgaagactgagctacttattcagatggatggtttgacaaagacaaacgacttggtatttcttctgccagcaactacctcaaagttagaaatcccttacgacatactagttgaaaagactgaaggttactctggttcagatattcgtctcgtgtgcaaagaaactgccatgcaaccactgagacgtctcatgtcagttcttgaagccagtgacgagttggttccggaggaagaactgcctgaggttggccctctgaaacctgatgatattgaacttgcattaaggaacactaggccgtcagcacatctccatgcgcatcgctatgagaagttcaaccaggactacggtagccatgtcgtttgttcagagctagcatgatcttattatcgggttgatgtttcgttcaatcatggaaccagagcagagctaatatatgtcctgctccggcgcatcagtttgttggcatgttgatgggggtcgcgtgttgtcaaaacggttgctgcgctggtaacgcgactcccaacatattgcagtttccctctggccgcagtaccttgcattttgcatgggttaaagtgcgaggtgcaggtgcttgctgctcagatctatgtgggcatgtggctttgttcatgcaatctgagattttcccgaatccttgaactcagaaaaaaaagattcgttctctagttacgtgtctaataaatgttagttaccctgcagaaaagtacactctggtttatatttaaaggaaaacgagccagagagcttgtataagtttcttctgattgttggtgtaattacccagctcgttaaaccaagctttaacaacaaattcttgcatgttgtggtccataaaaaagtaaaaaaaaaagtacaaaagaaatgggctcgaaataagtagggcaatataagattggctgatggaaaagttggggcgggcaccgccttttggtgttattacccccataattatttcg

SEQ ID NO: 21110 - DNA, 340 bp, Zea mays
  unsure (1)..(340): unsure at all n locations
  Clone ID: MRT4577_119249C.1
gggctgatacaaatagattcggtggggggcatggcgggcgaaaagcacttcaagtacgtcatcctcggcggcggcgtctcggcggggtacgcggcgcgggagttcgccaagcagggatttatttttggagagcttgttttatttgaaaagaaaggagactacccctcccttncngnccnaancaaggnnaccncnnacccacgaacgcggcaagacgcccaggaccnaaagnacgngngggaagcggnggagagaagccaccgcccgagcggnacccagagaaaggcaccgagcngaaccccagnacagaaagggncaaagcngancnnnccaccaagac

SEQ ID NO: 21111 - DNA, 647 bp, Zea mays
  Clone ID: MRT4577_11924C.1
cattgggacctcgagccggcggaattcattcggatgcgccgtcatcagacgatagtggaagagctaaccccaaaggatgagaggcgatggcgatgaggctctacctcgcgcgcagggcggcgctcactgattcttacagggcaggaaccagaaggctaccgcaggagtccttctcgcattcccaggtccactcctttgacgaagctgatgtgcgcttattgggaccctccgtctgggcacctgatatggcattgggctcctgcctgctgcacctcggtttagggcggagcagacccctgaagagcttacagatatgaaaacgcacacgacagtcgatgccatgctttcaccagagcggaggaagcgctactacgagcacctaagagcctcagaagaggacttgctctttgatatccacacctgcgtgaatagaagagcgatctcggaagataggtcgtttttaaagaactagggctactatgatgccatgggtgatctgtgctacatctccttaaatcatgtagaattagaactgatgagctacgtactctgtctctgaaatctctcgtttatctatacctaatagatgtcgtcaggatcgtcctctgaatttccttctcaaaaatactgacgtctcatttcaaatt

SEQ ID NO: 21112 - DNA, 1681 bp, Zea mays
  Clone ID: MRT4577_119250C.1
ttgggtacctcgaggccggccgggtcagatgatgaaacctcgaaacatcttaggaaccttctgacacagtgtttcatcactgtgagtgagaagtaccttcttttctgatgatagtctcggccgcgagagtgcgctcgtcgactccactcagctctctcgctccctctcctcccccaaggtcccagagacaggcagccggcgaggcgcgccgccgcgaagcaatggatttcaaggggttctgggagtccagattcggtggcaagaaggaacccgagccggagcagaacgggcacgccaacggggtccagaaccagaagaggacctccgatctggcggtctacgagcagttcgagcagcaggccaggcagacccaggtccgagccgccgcgattcgcgacggagacgctgatgtcatccagaagccccttctaccttcatttgagtcagctgaaatgcgtaatctcgcagagacattgttgagggatattattcgcgggagcccagatgtgaaatgggagagcatcaaaggactggaaaatgcaaaacgccttctaaaagaggctgttgtcatgcccataaagtacccaaaatacttcactggtctcctttctccatggaaaggcatcttactttttggccccccagggacaggaaagacaatgctggcaaaagcggtcgctactgagtgcaaaaccaccttcttcaacatttcagcatcatcaattgtcagcaaatggcgtggagattcagagaagcttgtcaaagttctgtttgagcttgctaggcatcatgcaccatccacaatattccttgatgaaatagatgctatcatcagccagcgtggtgaagctcgcagtgagcatgaagctagtcgtcgcttgaagactgagctacttattcagatggatggtttgacaaagacaaacgacttggtatttgtacttgcagctacaaatcttccctgggaattggatgcagccatgctccgccggcttgagaagcggattcttgtaccgcttcctgaaggtgaagcaaggcaagcgatgtttgaggaacttctgccagcaactacctcaaagttagaaatcccgtacgacatactagttgaaaagactgaaggttactctggttcagatattcgtctcgtgtgcaaagaagctgccatgcaaccactgagacgtctcatgtcagttcttgaagccagtgacgagttggttccggaggaagaactgcctgaggttggccctctgaaacctgatgatattgaacttgcattaaggaacactaggccgtcagcacatctccatgcgcatcgctatgagaagttcaaccaggactacggtagccatgtcgtttgttcagagctagcatgatcttattatcgggttgatgttccgttcaatcatggaaccagagcagagctaatatatgtcctgctccggcgcatcagtttgttggcatgttgatggtggtcgcgtgttgtcaaaacggttgctgcgctggtaacgcgactcccaacatattgcagtttccctctggccgcagtaccttgcattttgcatgggttaaagtgcgaggtgcaggtgcttgctgctcagatctatgtgggcatgtggctttgttcatgcaatcctgagatttcccgaatccttgaactcagaaaaaaaagattcggtctcta

SEQ ID NO: 21113 - DNA, 440 bp, Zea mays
  Clone ID: MRT4577_119251C.1
catattcggtccgtcctggccaggaagaaatcgagcagccaaagagaggagaagatggctcgtacgaagcatacctgcctgtaagtgcacgcggaggctagagaccctgctgcatgcagttcgccaccaaggcggcgaggaagtctgcgccgaccatcgtcgtgcgtgaagaagccccacatgtacaggctcggcacggtggctctgcgcgagatccgcatgtaccagaagagcactgagctgctgatcctgaagctgccctttcagcgcctggtgcgtgagatcgctcaggactttaagacggatctgcggttccagagccacgccgttctggcccttcaggaagccttcgaggcctacctagtcggtctggtcgaggacaccaacctctgcgccatgcacgccaagcgcgtcaccatgatgcccatagacattcagct

SEQ ID NO: 21114 - DNA, 150 bp, Zea mays
  unsure (1)..(150): unsure at all n locations
  Clone ID: MRT4577_119252C.1
tgataatttgttngatattatagcataatnaacagnatacaagtccagtcattatgaactttgacactagaataaattattagtttaacttcataatgactggacttgtactctgttattatgctataataatctgctgagtgggggggg

SEQ ID NO: 21115 - DNA, 239 bp, Zea mays
  Clone ID: MRT4577_119253C.1
cttcagtgtggaatgttaaataacgcttttatactgtattttgtactatgatgtaactccccttccttatggctaggctactgtaacacttgcctgtaatcagtgaagggctgtgcaccttgtactatttcacaatgggttctgctggacagataatgggccagtgttattgaggtgatcaagatctgttccacagggctaatgccaccatctcccctcaaaattttgtagaggttcta

SEQ ID NO: 21116 - DNA, 196 bp, Zea mays
  Clone ID: MRT4577_119254C.1
caaggggtcccatggccacacggcgtcactcatggtatgaacgtcaaccgtcgcagtcattagcggcatcctaacaacaacgacccatggcgtatcatgcatcgaactgccaagtggcagcacccaaggggttgcactcaagtgagacttgcgatgcccttctagactcctcgcaatcgatctgagccgcatctct

SEQ ID NO: 21117 - DNA, 369 bp, Zea mays
  Clone ID: MRT4577_119255C.1
acgcccacgcgtccgaaaaaaaaaaaaaaaaaaattataattttaaaaaaaaataaaaataaaaagagataaaaataaggcaacacacatatcgtgcgcacaagcttaaaaaggcggaccagttcaacgataacgaccttatggagagcgtgactcgtagctccttgttcaacttggttgtacatttaagtatagtgcgcaaaacacctttcgtttccaccatgttctccagctacatgcaatacatcttcggctggatcctcttcttcggaataccctgtatcgtcatcgtcttctcaatcgttctgttcctgctcgggaccatttcataccgcttgtacacgaccgttgcggacagccccttctctt

SEQ ID NO: 21118 - DNA, 427 bp, Zea mays
  Clone ID: MRT4577_119256C.1
gccggccgggtccgggaagcatgttaatccatgcaaaagatatcgaatttctgaagcttcagagaagtggagagcagggttgccgatgcgatgctgacaagtgacaacaaatgtgccagggcgatctcttcgccgaacggtgctgtttgtcgctggtgcaccagcacagcaccacacgaagagtcggaggcagtagcagctagcaagcagtaggaaccgccactccgccagcgttcaaaaacaagaagaaggtggtggttttcaaattttcagaaacggtcaaaatgacttgtactgtgccagccgatcagctctaactgtctgacatcatagatggttttttttctctcctcccatacacatgtagtacacatctataataatagtttcttgtcaggtatgaaaaaaaaaaaaaaaaaggccccta

SEQ ID NO: 21119 - DNA, 221 bp, Zea mays
  unsure (1)..(221): unsure at all n locations
  Clone ID: MRT4577_119257C.1
ccctgttnatgcatatgagcaagatcctattcgcacaggagatatagttgttttcaatatcgatggtcgtgacattccaatgatcancgcgtaattgagtgtcatgatcgtcangacactgcagacgtggacatcctcaccataggtgacaataattgtgntgatgactgactattatatgtacatggcagctatggctcagcgacatcacattatgggac

SEQ ID NO: 21120 - DNA, 273 bp, Zea mays
  Clone ID: MRT4577_119258C.1
caggaagttcctttatttaaaacgcgctgttagggcacgcgacgacactcgattgtcgcccttttattcactccatatagagggatgccacgggaaaaacaaaaattcggctttctaatatattacaaatgcaataagcttatgctgatgaacgatggatgttttttctgcacctatgcttagcatacttagacaaaaaattatgggcctggatgtgcctaaagttggatagagcatcccactggttttcccgttataacacagctgtttccc

SEQ ID NO: 21121 - DNA, 200 bp, Zea mays
  unsure (1)..(200): unsure at all n locations
  Clone ID: MRT4577_119259C.1
ggccgacgaggcgtccgaaccaccaacaacaaccatatttttcattttctcgccnncacnccancggggggccgccccctccaacggccaatctgacacaataccaaaatcactaggacacgatcccttacattcactcctcaaccaaatgcttcccagccctgcgatatcttcttccccttgcagatgaccctcatcac

SEQ ID NO: 21122 - DNA, 593 bp, Zea mays
  Clone ID: MRT4577_119260C.1
ggccgttatcacctgcaggccgagcagcagtgcgatccggcgcgcgtgcgcatcgagaagcccgggatgaacgtgacgatctggcaggcgatggccgactggctggtcgcgcacgcgagccggctcgcgcgggtcggctacgacgggcggcggatcagcgtcgggcaacgcgaccgtctgctcgcgcagacgcaggccgcgtcgttcgactggacgagcctcgccgatcgcgagatcgaccgcgcgatcgcgctgccgggctgggccgtcgagcgcccgatcttcgagctgccggaatcgatgaccggtgtcaccgtcgcgcacaacctcgacacgctgaaccgcacgctcgccgcgcacaccggcgcggcccacggcaggaccgcattcttcacctgcgcgtcggacgatctcgcgtatctgctgaacagccgcggctatcacatcccgaatgcatcgtcgcacctcggcttcctgttcgtggtcggcgacgaggttgcgctgttcctgccggaaggctgcgaccgctgcgaggtcgcgctcgaatcgtacccggcgctgcaggtgatccggcgcgatgtcgcggcgctcga

SEQ ID NO: 21123 - DNA, 732 bp, Zea mays
  Clone ID: MRT4577_119261C.1
gaatcacccgagatcgtctcgcgagccgcgactcgtctcgtcgtttccatcgaacgcccagatcccacattcccacctagctctgcgcgattcatcccggccgccacgccaaggaggccctcgcctgacctcggatcaaagcctccatccgccttcatcccggccggtggttcgggccgtcacgggaggggtccgtcactggttactcggtggagagctcggggctcggctcccatctcacgattctcaccccacacgcgcaccgggtcacctcgattcggcagcctcgcggtgagttgagttcttcgcttgtcgggccagtccgcctctcgcttggcgcggttatggattctcgggtggcgtggcgtcgtccgcgatcgctctagctcgcattgagcgattcgcgagttgcgactccttgttttgtttgctctctgttttttttttgatgtcgatggtgatatgtggcggcgggattctgagctcggttgcttctaaccttccgcggagtggtttagctaatcggttttgaagctgttgatatggatgtgccgtgtgcgtgacgaatcgaatgagccgcagcaggatgcctacgcagctcggcagcaggggaattggatcctgcgaccatgcgaatttggaaccctggagcagtggagtgctaggaggtctcggtgtcgtcatttttttccatgcgaatctagttaggcataatttctctttctgatttca

SEQ ID NO: 21124 - DNA, 1006 bp, Zea mays
  Clone ID: MRT4577_119262C.1
ggggaagattgggaatgcaccgttggcgcctgtggctgttggcgctcttactctccagcgtccagaccatcattaaatagatgcttgattgacgatcggtaggggtttagggtaattagggaacggtttgatttgttgatatgctcagactgctatcgtacgcgaaaaaaaaaaaaaaaaaaaaaaaaaaaaaaaaaaaaaaaaaaataagtcgcctaaagaggcagaacacctcgccggttgccgccgacgcaccgtccgaccccgccagacagatggaacgcgccgtccgcacgtaagcggtcgtaaagctacttacccgatccctgctatctggcgtgctccagccgggccggcacctgaccgtaaccaccggcgccgcctccgccaacgccggcaccggttcgtggccctccacggcagcgctgccaagcaaatcggtcgtggcagacctgctcgacgccatcgagacgaaccgggccgtgccgcgctgcggtggatccggtggcgacggcggactcggactcgggtggtggaacctcaacgtggagggtgtaatgctgttgctcagggtcgtccaggcggtccggggaaggaacaatctagcggcgccggcgccagggggaaagaggccacgggacgagggaccagctggccgcgacaccatgagaggtggcgttgtgggaggcagcagcgcggcacggcggtggtgtggcgctggcgggcggccggggaagattgggaatgcaccgttggcgcctgtggctgtggggtccagaccatcatcaaatagatgcttgattgacgatcggtaggggtttagggtaattagggaacggtttgatttgttgatatgctcagactgctatcgtacgcgatgcatgattgatgatcggtatgcttcgagaagtcaaattctttattagttctcgtcgagaccatcaccaatcaaatagacgcatgcttggcgatcgcagagttctttgtcgtctcaataatactcgat

SEQ ID NO: 21125 - DNA, 368 bp, Zea mays
  unsure (1)..(368): unsure at all n locations
  Clone ID: MRT4577_119263C.1
aaaaaaanganngagagacgggataaggtaaaagaacccagccgcgcacaaacaaaggacaagcnacaaagnccgggcccgcccaacgaccagcaaacgcaggagaaacggccgccncagcacacaggaaagcaccccaagcaaaaaagcagcgccccccgaaacacaccacccacccggnagaagaaccgcaaagccagggaggggacanncccgncaccgccaaagacngacacacgagagcaccgncnncgaaccnncccgagggaaaccagggaaggagggaagccagcancaaccaacccaacaagnanggcaagagcagccccgggaaccnnngangcaagaagggcaacgacaagcaggga

SEQ ID NO: 21126 - DNA, 834 bp, Zea mays
  Clone ID: MRT4577_119264C.1
ggccgcgctctgcagccaccggagttcccggcgttcccgagcctggagagcagcagcgtgtgcaaccccggagctgccatgccgggggttacagtgccgggctgcaggagagcgcggctggcaggatgctcttccccttcgaggacttgaagccggcagtgagcgctgctggcggcggcgcgagcaacggagctgatcatcatcactacgagcacagcaaagatcaagcagcaggcgacggcggcggagccagcggcgtcaccggcggccacgaggctccagcaggatgctggagcaatagcatgatcgggaatggcagcagcaatggtggcggaggctcttggtaaatggtaaggcggcgcgccatgcatggctcatgcacgcgccgttgtcagcatgcggagataggggggtagagacaaggatcggagttaataagagggtggaggtgattagtgttcacatatggcgtttgatctctctggttgtttgccttctctttttattttcggttcttggtgttcgtgtgtgtcaatcgacttgggggctaacacagcaggatatacagattgttaaggcggtgaaccgattatttacatcatctcttggccaatcaaaaaaaaaaaaaaaaaaaaaaaaaaaaaaaaaaaaaaaaaaaaaaaaaaaaaaaaaaaaaaaaaatggcgtttgatttttctctgcttgtttaaattttctcggatcttcgtgatattgtgtgtaaatcgaaatcgacttagagggcaaacacagggggatatacagattgttaaggtggtgaaccggtgccctacagctaaaaaaaaaaaaaaaaaa

SEQ ID NO: 21127 - DNA, 605 bp, Zea mays
  Clone ID: MRT4577_119265C.1
gcgtagtttttttgggacctctaaaaaaaaagccctttgtttttttttttttttttttttttttttttgttttttttttttttttttttttttttttttttttttttttttgggggaaaaaaaattggattaaaatttgggaagaagggagaaaagaggagggttttatttgaaggaaaagggaaagggggagggggtataaaaggaaacaggcaggggtggccaaaaaattggaaaaaggaaaaaaaggggttggaaaacaaggtcaaaaaacttaaatacaagaataaaaatgggaaatggggggaaaaattataatggaggggaagggttttcgggttgggattttttttttccaaaataggcataggaaaagggaaacgggcttggcagggtaagggtttttaaaggtttgaaaattttaagggagggggggggtttaaggcttttcagggtgggtaaatttttgcagaaatggggttcaccaggtagggggattaggcttttggggggggagttcgaggggggcttttgataaaaggtaggggggggaaccttgggagaatttggggccaggggggtgggggtttggtttgggcttgttg

SEQ ID NO: 21128 - DNA, 1218 bp, Zea mays
  Clone ID: MRT4577_119266C.1
cccacgcgtccggtacttctctgtcccagcgcctacttcctttgcttctacctcacggcgctcctgccccatctccggcgttcctccagctcgcccatggtggcgcgcgctgctcccctgcgttcttccctgcaattttcagccttcccgcgcgcgccctcctgctccctggccgtcgcgccatgccggccggagctcgctcggctgcagtctccttctccctcaaggtccctcgcgcccgccgtgctccggtcggagggggatttgctgcgcgcccatctaatcctgctcgggtcgtgttgagcaccaaattgagcgcggaccgtccgagccttgagccggaccgtccgcggtccccccggtgcgcgccggtgttccgcacggaaagcgcgtgtcggactgtccggccctgaggccggacggtccacggtccggacagtccgctcctgtgggccggacggtccgcgcacgcgcacatcagattatggttctgagtttcttgctatgttggttggagagaatctcgggataagctgagatttttgttggtaacgggtgccagacccccttgtctatgcaagcagacgaatacgaccgatttaatcaatcaaatcgaatcaaaacacttctatatcaaatttatttcctaggagtagttctagtttagttctagtttagccttccgattctcaaattcttcacctctcttcgactctacgttgattagaggagtctaggtcaacctgcccgagcctagacaactcctaggatctctcctccccgacagggtccctcccgggagcgagatccaggcgccgccggcgatcttccgccgcccctgcgcacgcgcggaccgtccgaccccaggacgcggaccgtccggccgtcaggtaggaaaccctagcccctgcgccaggtcgcggaccgtccgcgcctgaccagagagcatcgccacagtttttgttgagtgtttggcgctccaaaaaggcgtcaacaactatgctatgcggtggacattccttacagggagcatttctatttctgaaaaaggaccacaaacatataatctcacacttaagctttgccggtgctgatcgtcatcatgtagtaagttgttggaccacgccactaagctctgcagcagtaaaacaatctctgcatttgggtgacagttgaacggggtgttgggaacacataggtcttgctcgtcaatgggta

SEQ ID NO: 21129 - DNA, 500 bp, Zea mays
  Clone ID: MRT4577_119267C.1
gggggctgcccaactggccccacttttttgttacccgtttattcaaaaatcgaaggacttatctgaacaaattttttaagggcaaaacccacgggacaaacccttttacagccgggccatcccaaaaccacttttttgccgggcaaaaagccctccacccccaaaaaacccaaggggcgtaaggggagcccccaaaaacccccacacctccagctttttccggggggcccccactggtaactctgaaagaaactgaattagctaacaaactgacaaacactaactgactgaactgcactaactgaaaaatctgaattaaccgacaaaattggcaaacccggcgaaagctaggagtattcaacagggggcaggggcaagggcaacccaaaactaccccaaaccctgaaaacacactggcccaacgcaaccagggaaagagcgggttcaaccaaccagacacattacacattaactgggctatgcaaccctagcatgggcat

SEQ ID NO: 21130 - DNA, 318 bp, Zea mays
  Clone ID: MRT4577_119268C.1
ggagcctgttggggatatgtttctggagtatctcaccgccgtattgttgggtaccccaaacaggttacacgaaaagccaagtttaaaaaaatttaaaattgcaaaagatttcctttttatagatccctctaattcctttatcacctaaccagccctaaaggtaaatgctccccaagtctttccactaggtaagttttttgaggacaagggtgggaacatgcctcattatttattggggtctgcgggggttggggggtttgaattcattaaaaatgaacctactgaaattgatggaaattattgtctctgaaattaaaa

SEQ ID NO: 21131 - DNA, 239 bp, Zea mays
  unsure (1)..(239): unsure at all n locations
  Clone ID: MRT4577_119269C.1
cgcggccgggtagcaattagttagatnaccgcgccgtcctagccaccagtctcccaattctaccctataactaataacatctcctcggacgccaggttcctcgagacactatatccaggagcgacaaacagatccacccgccagccatggagaagaagaaggtcctctgcgccgacctcgtcgccgccgcctccgccaccgccgtggtgtgctcagtttcctccgaagcaccctccaag

SEQ ID NO: 21132 - DNA, 1058 bp, Zea mays
  Clone ID: MRT4577_11926C.1
cagagtcaaagtatgagctaccaagagcaatcctgtacattgtgacagcaccattgttactccacaacaccaaattcctaaccacaacgccatcgtctgaaacatgagcatcccattcatcactgctgaggaaaaaagctccagcagggcataccttgtctactgggtttttgtccttgcaaagagaagtacccagcagagatacctcaccgagcacaaccccctcagtgacacatttcaacaaacatctagtcttcagcaccaacgccacgttcttcccatcatgagacaacgccacggcttccaccctctcgtccgccaactccgccgacgcgacgctggccaccgagctcacgatgagacgcctgggtgggtccacttcgacagccgcgccctcggcaacgggcatcacctgcacccgaccctgcgcgtcagccaacacaacgctgactgcatcatcaccgccgccactaaccgcgatcgcattcggagtcccgaccgagagaatcccatggaagacggtgtagaggacggcgagggtgcgtgcgtcgacgactacgagtgctgaaacgtgacggtggccgtcgtcgggagcgtggcagaggatcgcgactcgagggtcggcggaggtgatggacgggagcgaggcgatgagggagggtgagccgacccagagcgggagggagcggcggcggaggcagcggaggggtgcggaggtggagaagagggagagcactcccgcggtgcaggcgacaagaagggaggccggtgaggggagtgggcagagggaggtgatggcagcagcgtgggcgcagaggagggaagacgggcgcggagatggggaagctgaggcgagcgccagtggccagtggaggacggtgccgtcggcggcgccggtgaagagcgcgaccggggttgtggcagcggcggtgacgtggtgtgacggcggcaacggcgaccagagcgcggccacagagtggcacttcatcgcattggtggggtggggtagggtgatccggcatccggcgaggcctagtctataccggaggggaagatct

SEQ ID NO: 21133 - DNA, 427 bp, Zea mays
  unsure (1)..(427): unsure at all n locations
  Clone ID: MRT4577_119270C.1
gcgtccggggcggcaagcaaccacagtcggacctcgnggtgntctcctcctcccgtctataaattcccctgttttttttactccatatatgggggccatcacatccaagaagagggaagagcaccaaggaccttcagcgcccgttcaggatccacatctacccgagcgagttcttgcttgaccattttctgttcggaccacctacaaggctcttggagtaacttgccactctcaacaaacaaattttcatgtcttatcttcacattcaaaacccaacttccttccaacccttctcttaagccaaatcttgggacccttggtcaacaacctggtcaaaagactaccttcaccttcgcattcatcaaccgaattgttgcaagaaccttaccacaccccactgattgaaaaaagaatttaacttctgcca

SEQ ID NO: 21134 - DNA, 569 bp, Zea mays
  Clone ID: MRT4577_119271C.1
attgggacccctcgagccggccgggccgggtctgtcgccattgctcattgtatacatgtcttatcctctccggctggcagtcactgcagcgtgcgccatcattctgatgtgggtcgtcctggtgccgaacccgacggacgccgccttagatgacatatgcaaggccaagtgcgagacgccgcagccggcggtatgcttgcgttgcaccggcggcgtgagaatcgaagacggcaaggtggtgacaacagaagttgtgccgtgcagcgacggctgcatccctgccaccacccgtctccagtgcgacctcgcctgccatttcgggggcctattgtcgtcgtcgccaaggaccggatgcgtgagatgccctggccctgaccctgtccccgaccctggcctgccggactgcgccgtgcaggccgcattgtgccggtctctcagcgcggcggagcggcgccaggagtgcctggacgcatgcgaccgtcgctgcaactcaaccgccgccgccttctgccaggaccgctgcgagatgcgataggtcggcccccccggccccccccccgcgacttgtc

SEQ ID NO: 21135 - DNA, 841 bp, Zea mays
  unsure (1)..(841): unsure at all n locations
  Clone ID: MRT4577_119272C.1
tcgaggccggcctggccgggattttagcgagagagttaaactaatacgagctaataagtacagcaagtctcaccagactagtcggctatctgcgagaatggccagaggacatctaggccgcgtcgcacgactgacaaggactactcgaacccgcctccgtggccgctgctgaacgcgccaggatgtgaccaactgctcgatgtaccgcgcggtgatcggcgagctctgaggtcactcatgctcttcctctacatcacggaggccacagggatcgcatacgagcaccagcaccgacgctgcccacagacggaccgcgacgcctcgggcgtcagcgtcggcgtggtcactatcgcctgccacttcgaaggcgtgagcttcgtccacggctactgcaacgagaactggtatcaattctgcctcaatcatcccgaaagcatactgcacgtcatgaagtcaaacgttgcagtgaagtccgagcatatgtacataacggacgacagattgctcaaggaaatgggcatggacgcatataaggtctctatctcttgctccaaaatactgccgaagggaaccaaagaaggaggtattaacccggatggcatcaagtactacagaaacctcatcaacttgttgctacaaaacggtatagagccatatgtaacaattttccactgcgatgtacctcaagcactagaagagtagtacggcggcttcctatataagagtcataagagcattgtagaagatacacatactttgctaggtgtgctttgataacttcggcgacaagctgaagaatggntgacctttaatgagccccgacatttacttccttttctac

SEQ ID NO: 21136 - DNA, 725 bp, Zea mays
  Clone ID: MRT4577_119273C.1
gaccagtgttcgtcatcggctacccatcgtgcacgtactgtcttaatgcagacgagtgctcgacgcgacacgcgtgaagctatcacgtttacaaacatgatcatagacactccactgcattcactcactgcattgctccatgcatgcatttcacctgcatcaaactcctactacaggcatatgttactccctgctgacttgcaccttaggccgtctccgacttcagcagctacctcttagataggtgcttgcgaatcgagatggacaaggctgaactctactgagattacgtctgacagaagcatgcgtaaaggatactgtgcgtgattaattcatatgttgaagagaattccgagcatatgaaccaaacggacggcagattgctcaaggaaatgggcatggacgcatataggttctctatctcttggcccagaatactgccgaagggaaccaaagaaggaggtattaacccggatggcatcaagtactacagaaacctcatcaacttgttgctagaaaacggcatagagccatatgtaacaattttccactgggatgtacctcaagcactagaagagaagtacggcggcttcctagataagagtcataagagcattgtagaagattacacatactttgctaaggtgtgctttgataacttcggtcgacaggtgaaagattggttgacctttaatgagcccagacatttacttcttttcctacga

SEQ ID NO: 21137 - DNA, 602 bp, Zea mays
  Clone ID: MRT4577_119274C.1
tgtttttttttttttttttttttttttaataatcaaccaatccatccatgctgctcgattcattccatcgcaacaacaaaaccacacaactaactatccctttttctcgattaggaactgcatccatccatgatatattgatatgagaagtagctagctactagtacccaagctcaggcggcatgcaggccacaatggcctgcatttctcttctcctccgcttcctggccctcctcaggatctcctggctctcctccgcgcccaccttcaccaggtcgcactcacctgcacctgcttgcacaaataaaaagcccacgccctttgctgctcacctcaaaggccacaattctgaaatgctcgctccctaggggcgctttacctacctggccccaggggcgccggcctcaggatcacgcaggaagcaagggcctcgctgccgccatcgtcggagtcgtcgtcgatgaatatcaccaccttctcagttgccgctgcccggccgacgacgacctttgcctgcggcgccgcccccccctggttcgggggccccctcgtccggcgcccagttagcttttggggaaccgctctcagctttccctcctcta

SEQ ID NO: 21138 - DNA, 697 bp, Zea mays
  Clone ID: MRT4577_119275C.1
ccggccggggagcagtagaccctcagcagtctacgatacctttggtctcctctacataaaaaacaaatcatctatcaccacttcaggagcaatcagcaacaccatccggtattcctccgttccctgcccgacggagctgcttccctccttgctgtgctgtgctgtgcttgttccagattctactccatacgcccttgatttattttacttcgtagaaaaaagaaaaaaaaaaagcttcttactgaatttcatggccgacttggcgctcgccggcttaaggtgggcagcatcgccgattgtcaacgagcttcttactaaagcttcagcttacctcagtgtggacatggtgcgtgagatccaacgactagaagccactgtcctgccacagttcgagctggtgattcaagcggcccagaagagcccccacaggggcatactggaggcatggctccggcgtctcaaagaagcttactatgatgccgaggacttgttggacgagcatgagtacaatgtccttgagggcgaggccaagagcggaaaaagtctcctgctgggagagcatggtgttagaattactggtgcttaggatcgtttcctaagtccctagaataccaatccgtgtctaaaatacctcgatgatgagtagatctattctactgaggggtataggttgaaaaaaaaaaaaaaaaaagcggcc

SEQ ID NO: 21139 - DNA, 641 bp, Zea mays
  unsure (1)..(641): unsure at all n locations
  Clone ID: MRT4577_119276C.1
cctcgtccttttcctttagcgaccggaaaaacacgtttttgattgaatggttattcctttcttctagtattttttaactattacactattggctacaacttacaacaacagcagccgccaccgccaccatgcatgaacagcacgcgaaccatgcaacaaaaaaaaaaaagacgccgtggacatttaaaatcgtcaccactcaccaccctgccggagcgtcatcgcgcgggcctggcgttgtggccgttggcggcgggcctggacgcggcacgggcgccgccaccgacgcgcggcgaccggtggtgcggcgcggcaccggcgcggccagacccggacccgccgccgcgcgcccggttcttcaccgcctccacccgctccagcgtctccaccacctccttcatcgagggccggctgcgggggtcgccggccaggcagccgagcgtcagctgcgccgcctggaacgcctgcctggagttgtactggccctcgaaccgcgggtccatgagccgcgccagcctccggcggtccgccaggtacggtttcgcccagtcggccaggctcaactgcccgctcggccggttcggntccagcgctcgctgccccgacagcatctccagcatgaccacgccgaaaccgtacac

SEQ ID NO: 21140 - DNA, 303 bp, Zea mays
  Clone ID: MRT4577_119277C.1
gccagtggaactggggatgcctgagctgttctcttctttgtctcgctgggcaagatgaaggtaaacctgacgaaggcggaggtggctaactggttgatgcacgtggctgaaccggctgctggtggagaagctggtgcttgccaagaagaccttcgggcgtgtgctcctcccggaaacattcaaacacctgaatgctgttaaagcggggggtgttggccctggtgagctcgacatggtacgcactctgatcccagttgctctgatcgaacgcgacactgttcttctgcccgagcctggtggatc

SEQ ID NO: 21141 - DNA, 208 bp, Zea mays
  Clone ID: MRT4577_119278C.1
cacacgtttggtcccaatcactcggaagggatactggccggtcaacatgggtgatgtcccgggtgatggaaaggccacctggttttgggcctgtggcctggccacccttgcaaattcttgaaccttcctgcttgcttgccccaccacccttattaccggaatcaatgaaaaaattggtgcctcttgtgttatcaggccagaatgccag

SEQ ID NO: 21142 - DNA, 387 bp, Zea mays
  Clone ID: MRT4577_119279C.1
tcctaaacaactaccaacatagaaagcacaatactatacctacaatggcagccaaaatattaagcttgggtattctcctaaatctgggtgcaagtgttgctacctcaaccatttttccacaatgctcacaagcttctatagcttcccttcttaccacatacctctcaccaactgtgtcttcaatgtgtgaaaacccaattgttcaaccctacatgatccaacatgcaatcgcaacatgcatcttaccattatcacccttgttactccaacaaccatcagccctattacagcagttacctctgatccattaggtggcacaaaacatcaatacacaacaactacaacaacttgtgctagcaaaccttactgcatactctcagcaacatc

SEQ ID NO: 21143 - DNA, 405 bp, Zea mays
  Clone ID: MRT4577_11927C.1
ggaaaaaacaacgggaggacttgctttaaaacccacagggggggcccgttgggtaaacccagggcattaacccattaacaggggctaaggccctaacctgcccaaggaaacccaacaactgtttttttgaccttaaccaaaaacggggtgccatgccacacggtttacaaataaaaaaaaacccgttcccctaaaaaaaaacactgggtaaaaaccctggacccctttgttttaaccaaaaaaaaggggaggggctgattccccaaaaaagcagaacatttccccttacccaaaggggggtccccccccccaggtgggacccccccctgccttttggggccacccttaggcccaaaattgggggaaggggcatatgcatttaaaagtctttttaaaccatttttt

SEQ ID NO: 21144 - DNA, 774 bp, Zea mays
  Clone ID: MRT4577_119280C.1
cattgggtacctcgaggccggccgggaaaaaccctcccattccccctccgctgccgccgcccacccgacccaaccgatcgaggcgcgccagcgccaggccgccagcgccctacgttgttgtcctccatgccgggatcatctggctctcccgctgctggctacagtaggagcggcgacggctcgcactctgcctccgccatcgtcgccggcgctgtgaccggctcccacgtgcttaagatcgtgttctactcccgcactaaggaggtccccaatcgtcaggtcatctgctcccgtcacttccgcctgggaggacacacctggttcgtgaagtattaccccaatgggaacgccgccgacaaagccgatttcatatcgttgtatctcgctatccatggtgcagtagtcggcaagccagtgaaggcgcaggtcaccatcagtttactcgaccaggacgggaagccggtgccgtcgtacaccaaagtcacaccattcgtggacttcgctgcgaaaggggactggggatacacagagttcatcgagaggaaagctctggaggaatccgagcatctcagggatgactccttcaccgtcaggtttgatgtgaccatcatgagcgacatccaaaccgtagaaatgccgtcagtggtcgtgccgccgtccgacatgcaccggcactacgctgatctcctgctgagcaaggaaggcgccgacgtcaaattccgaatcggcgggcagacattcaccgcccatcggcttgttctctcgacacggtcg

SEQ ID NO: 21145 - DNA, 344 bp, Zea mays
  Clone ID: MRT4577_119281C.1
gtaacaaaaaggcgctataatttctttcgatcgaaaaggtgcaacaacgaacggacacggcccaatcaatggccaaaatcatgaataaaaccctgcaactcacctaaaaacaaaaaacacaggacttgcgtacattctaaacctaagaaacccaactttcttgtaccgaactacccaacacaagcacgccctcctttaaccaactatgccatgatccaatttggaactacgctaccacaacaaagcacttaaaatacggacccgcccccatccgctaaccatgatctgtaactttccaggtggccggcaaactttcaatttatcaaaccctatatttgtcggcc

SEQ ID NO: 21146 - DNA, 228 bp, Zea mays
  unsure (1)..(228): unsure at all n locations
  Clone ID: MRT4577_119282C.1
nntttntnttttttttttttttttttttttttttttttttgtttttttttttttttttttttttttttttttttttttttttttttttttaaaccgaagaaacttattgctgtttttttcatccaatttttgcctgccatgatccccatgcctggaaaccaacattctattcaaaattttcccccggggcacctttcccagggggacggggtttacctattcccttgg

SEQ ID NO: 21147 - DNA, 561 bp, Zea mays
  unsure (1)..(561): unsure at all n locations
  Clone ID: MRT4577_119283C.1
gnatattattaatttgcgtcgtcacaaaaaaaaaaaaaaaaaaaaaaaaaaaaaaaaaaaaaaaaaaagaaaaaaaaaaaagaaaggaaaaaaaaaaaaaaacaaactaaataacaaacgtgaaagcaaaaaaaataagagggggggggcctgttttgggagggtcccaggtttctgcacccgcggccttggcggggggggggcttttttttatcccggcccttaactttcatttacctgggccggcgttttaccacccgttttgctgggggaaaaccctgtggcgttccccacctttattgccttggcggccccttccctttttgcgccggtgggtggcattacgggaaggggccctttccgttcgcctttcccaccggttgcgcgccctgtaggcgcaatgggccccccccttttgcggccctttaagcgcggggggttgggggtttccccccagggtgcccgttccttttcccgggcccttaccgcccggtccttacgttttggccccttctttggtgcccaggtgggcctgttttccccgtaaggttttaaaggggg

SEQ ID NO: 21148 - DNA, 976 bp, Zea mays
  Clone ID: MRT4577_119284C.1
ccggccggataactgcggcggggacacgcgacgctaccgacttcgccgccgcctccttccttccgcccgtcgagtcgaccgaccgattgttcgcgggtcgcggcctccctcctagtcagatccactcaatcccaagaggccaagtccaaaccctacccaccacccttctcaaccagcgatgatggcagcggagccctcgccgtcggttccctccaccgccgctgacgccctggaaaccctcgccctcgactcatcctcgtcgtccgccgccgctaccgcctccacttccaccgaccccctcctccggccacctacctccccgaccgccgccgcgagcgacgacccattcgtcatcgacgacttcgacgaggacgacttctccaccgccccggcgcccaacgtcgcccgccagccgcgcgctgcgcgtggtgatgcggcgtccccagtgttcgccaaaatcaccgtatcggatcccaagaagcacgcggagcccagcggcgggggtgccgccggtgtgatcccggggtccggtagctacttctcttacctcatcaccacccgtcttgcgggcggcggcggggaggtccgcgtgcggcggcgcttccgcgacgtggtgaccctcgcggaccgccttgccgcagcccaccgtggcctcttcgtcccggcccgacccgacaagagcgtcctcgaggggcaggtcatgcagcgccacgacttcgtgagccagcggtgcgctgcgctccagcgctacctccgccgccttgccgtgcaccccatcgtcggccacagccctgacctccgcacgttcctcacggagcctggtgccgtccctgcctttcagggtgagcccccgcggtactggactaccacgctgaatgctgctgctccgctggtgccaacgaaagctaggagggacttgtttgggatgtttaagggtctcaagcagacggtggtgaatggactggttgcaacaaag

SEQ ID NO: 21149 - DNA, 387 bp, Zea mays
  Clone ID: MRT4577_119285C.1
aaaacccagtgaggggatattagcccacgttcaaggaggttcaacacccaatatagctgcaatacaaaaaaatacccacacaatacatctgggacacgttaaagatatacggcgaacacactacacaatgaaacggacggatcggcagaaaacaggccgggagcagaaagctctgctttattctctcctaaaacgtcaaacggggccggatggcgagccacaaatgggggggatcatgctggggaaccagcggaccggaaacatgatcggtacaagacgcggttcattttgtccgatgggctgggccacaacgcgtccattgagggaaaccacctaaatgtttcagaaaccttcagtatggtggcttgggaagcatcgccttctata

SEQ ID NO: 21150 - DNA, 315 bp, Zea mays
  Clone ID: MRT4577_119286C.1
gagagaatggggtgttttctcaacaatttccgacacgcaacccacagggaaaggcaaggtaaaaaatggcgcggtcccagagaaaagccaaacaaaggaaaaaaaagttggccgggggaaactggaacacaaaaaccaatcccaaaaaaaaaacagaaaggagtaaaaaacgacaaagcagacggaccaaaagaaaaaggagaacgggccaaactcggtgtcggagaagaagacattatcggccaaacaaaagccgccagacgtggtaataaaaaggaagcccacccggcgcaaaaggcggaccaagaaaacccc

SEQ ID NO: 21151 - DNA, 416 bp, Zea mays
  Clone ID: MRT4577_119287C.1
gttggaggccccccccaaaaaaaaatgaaaaaggggctgctggcggaaaaaagggccttttttttaaagagggggcggcctccatgcagactgcgaaaaaaaaagggggcgaaaacacgggcccccctgaagataacaaggagccgcgggaaaccgcggggaccccggatcccctaccgctgttggggggagccaccagggcccctacgaggccgggggggcccaccaaaaatccccccgggctgtccaaagggggggccccccccccttgacccaaaaatttttgccgggcccgggggcatgcccccccccaaaaagtccttttccgaaagggggggggggggcccctaaaaaccttttttgcgcgagcccttgacgccgcaaagcaaaggggacgcgccacacagggggggggg

SEQ ID NO: 21152 - DNA, 639 bp, Zea mays
  Clone ID: MRT4577_119288C.1
atacatcaatatcatcgacctcgcgccgattctctccccttcgatccacaacgtactaggataccgaggagatggcgatgacgatgtcacaggtgggctctcactccatgcacggggagaacatggactccatacacatggactcctactacaaggatctcttgcacaagaaaggggatcaccctccgcagccccccaccactcagaatgccaggagctctccaagcagatcttctacacccgcctcggaagcctacgaggtcggtatgagacattctgaaaggatctcgctggggccaagcaggtatggaacaacatgacggacctctcggctcacgaccttgtgattgccactttatgtgcagctgagcttaatgcatggatctggcaacgatagattgatggcatagggttcagcataacctcgtataccgtgctagctgacttccagtgattagaagaacaggttgataagcttacactttaaatagtggttgtccaaactacgatgatacctgacttccgtcacaattatactacttgaaggagcctacctagtgctgaatgtcatgaaagacgggtacatggatgcaacattgtcgcaagaagttgcccgcgcaattcttgattttgctgctg

SEQ ID NO: 21153 - DNA, 403 bp, Zea mays
  Clone ID: MRT4577_119289C.1
cagacatactagccacaaaccaagtactatcacttgccaacaaagccacacaacgtgggatttttcaatatgcgcgacgatctctgttacagttctcattacgaatcatttctcctacactgctaacactctcctatagctcacttttttcccacatacctcttacaaacactgtcatcaccatgtcacaacccactacttcatccataccgcatccactatcaaatacaagtacacatcttacatgtatcacgattcaacatacaacatccgtcatctctattctatccttaatcaactgtacctttatattctgactacatctatacacaacgactacatttacttcagctactaaacctctcagattactctaactaacacaatttttttccattctaac

SEQ ID NO: 21154 - DNA, 557 bp, Zea mays
  Clone ID: MRT4577_11928C.1
aagcagcagcaaggatgttttaaaggacgaacatggaatattgatactgaacgacacctctggaaacaaagaatctggtacctccacacagataccaaatgaaaagcaaggtgcattacttggaagaaaaaataatgacttaactgaggtcgaactgggtccatgcttagagaaaggagtaccttcacatggccattgttttgttcagggtgataatggtgtagatggggtaggttcagttgaaaatagcttcaacacttcaaattgctctcatggacaaccttttttcaactttgatgattcacattcttatattcacccattcattaagaaaaaggtatctcatcattgggacattactttcaatcagaataaggaaactctgaatcactatatacaagagtcatcatatccttcacatgagaaaataccaactgattccttggtagaagtagagagtacagcagatacaactgtgacagatcaagttttgaaagcaaggtcttcaaaaattctcgagcattcacctgatgatgaagttgaaggagagatggtgt

SEQ ID NO: 21155 - DNA, 390 bp, Zea mays
  Clone ID: MRT4577_119290C.1
cccacgcgtccgcccacgcgtccggttctagatcgcgagcgccgccctttttttttttggttttagcagaataagcttaattgcctttgatgcatcaccctgattccccaagaacatcagaattcactgatcacaacttttttgtatcgaaatcgaaacaacaaacaatatctccacaaggaactgcagctaatttgaggacatccgaacccaacctaacactagtgactagagcaatattgtgtggctcgttgtatgtagcagtaccacctcgccgctggcgtgcctgtcctgtggatcaccagtgagcacagagcttgtgggggcgccgtcgctaggccgagataaccgtctcgacggacgggagcgtgagcagctccagcacgcgcc

SEQ ID NO: 21156 - DNA, 361 bp, Zea mays
  Clone ID: MRT4577_119291C.1
ccggccgggggttccaacttcccaccgctactccgccgtcgccagggatctcggcatctcgcgccgtcgccgggccgccgcctcgcccacgacgcccagtctccagcctctgggctttggcgccctcaccggccatgctgcgtgcgactcacctcccactcccccagcagccactgccggcgcattcttcctttgattaatgtaagtttggcccggggctggacggcggcggctaggatttggtgcccactgagctgcctcacggtgagataacatgagaattggaattatggttttttgaaaaattatatcatttaataaagtctatctatgtgataaaaaaaaaaaaaaaaaagcggcc

SEQ ID NO: 21157 - DNA, 487 bp, Zea mays
  Clone ID: MRT4577_119292C.1
atgcctgaatcatgaaaaaaaaaaattttgcgacctgatccaatggacctccagtgggggaaaagggagaaaaatggtccatcttctactaatggtcccaccccattaaagagaataaaccgattcattgtttcccagcaaagaaaccatcaacaaacaaaggagctcgctttgatggactaatttgccagagggaccaaaagggaccaaaaaatttgtcccaatcacattgggtgaccttgtgatctaactgattaagggtcctttacaggctgtttgcttttccgggggggtacatcccagttgaataccccagcaattgtaacccgagtgatggtttggtggtctcgcaagaactgaagatcaccaacaagggcttttaagctggccttagcattttccaaggtttttttaaagaggggattggccttattggaaggatactccagcattacatttggccccaaccacaggcgccctgggtcag

SEQ ID NO: 21158 - DNA, 241 bp, Zea mays
  Clone ID: MRT4577_119293C.1
acccgtccgcggtcgtcgtccatcgcacgactcatacgatccacagatgtatacagctggaggagaggaaacgcgcgacacaggtgcagcaggctcatgaaccattacgcggctgccagctgacaaggttggcccttcatgcactcgaaagctactagatggaccacttggaaggagctctttgacttctactatagccaacctcacgcctctgtggtcaatactcggcatctcgaagata

SEQ ID NO: 21159 - DNA, 292 bp, Zea mays
  Clone ID: MRT4577_119294C.1
gttaatcgaactcggagattgatccaagggtgctgttgctctctttactatattgaggacaattggtatattacacatagtttcttttatagaaaaactacgtcccgaagcttgaggtctggattatttaataatagtgcttctactgacttcgcctctagtgaagaataaattcgattctgtcgaattccttatattgagtcgcatttgctgctgacgagtaacccaactctgagatgggatactatgctggatgaggcatgagattcaacatcataacggttttctcgtg

SEQ ID NO: 21160 - DNA, 326 bp, Zea mays
  unsure (1)..(326): unsure at all n locations
  Clone ID: MRT4577_119295C.1
actcctcgttttgctgccgcatctcctgtaggggtgagggggggggaaagagggcgaaatggggagagcgcaacaacgtgctccccaacgggcacttcaagaagcactggcaggactatgtcaagacatggttcaaccagcccgcccgcgngcagaggcgccgcatcgcacgtcaaaagaaggctgtgggcagccgggtcttcatctgctgggcctgggcgtcccattgttcaatgccagactctcaagtccaacatggagtcccgggctgggcgaggctttgcccttgcggagttggcggctgcgggccttccgcggcggctcgc

SEQ ID NO: 21161 - DNA, 982 bp, Zea mays
  Clone ID: MRT4577_119296C.1
ccggccgggataagatacgaatctgatgagtggggcataacctgggcaacggagctggaggaagaggcacacagaccacctaacctaccaaatctcaaaaggaggatttcagaaattgttcgagtgctctcaaacttcagcaagctgaggcagaaagatgttccacgaaaagattatatcaaacaactgaaaactgatatcatttcatactatggatataatgattttctagttgaagcattaattgagatgttcccagctgttgagcttgttgagttactggaagcctttgagaaaaggccgcccgagtgcttgcggacgaatacactaaagacccggaggagggatcttgctgctgctcttataccaagaggatttaatttggacccgataggaaaatggtcaaaggtaggattagttgtctatgactccaccatttcagctggtgctactactgaatatatggctggtcattacatgaaacaaggtgcaagttcgtttttaccagtgatggcacttgctccacaggagaaggaacgaattgttgatatggcggctgctccaggtggtaagactacgtacattggcgctcttatgaagaataccggaatcatctatgcaaatgagttcaatgagaaaaggttgcatggacttttgggaaatatccatcgcatgggtgtgacaaataccatagtttgtaactatgatggtaaagagctacccaaagttcttgggatgaattcggttgacagagtattgctggatgctccctgcacaggaactgggaccatttggaaggatctacaaattaaaacatcaaaggacattgaagacatcaggaactgtgcctttgtccaaaagcaattgctgctagctgctattgatttggttgatgccaactccaaaactggtggttacattgtttactcaacgtgttcgataatgattccagaaacgaggcagtaattgactatgcacttaa

SEQ ID NO: 21162 - DNA, 1326 bp, Zea mays
  Clone ID: MRT4577_119297C.1
cccacgcgtccgcccacgcgtccgcccacgcgtccgcccacgcgtccgcccacgcgtccgcccacgcgtccgcggacgcgtgggcagtaattgactatgcacttaaaaagagaaatgtaaagcttgtgccttgcgggttggattttgggcgtccaggattcatccggtaccgggagcatcggtttcatacttctttagaaaaaacaagaagattttatcctcatgtcaataacatggatggattttttgtagctaagctgaaaaagttgagcaatacaatcccggtgacgtctgagccgtctaaagcatctgaagaagcagctaaggttgatggcgaagatgagaaagctatttctaatgaacaagagactggtgttcctgataaagatgagaaaactgttgagataaaaaatcataaaaatgtgactaatataagaacaagtgtcaccaaagagaatggaagccataaacgtgaatccaataagccaggaaagcatctcaagaaaaataagaataatgctaccaaagaaattgatggctctgagagcagtgaaacaaatagaggtgggaaagaagagcatcgcgaacaaaccaagaaaatgagtcacaagaggaagtttgcttctgatagatccaaaaaaatctggccccgagagcttctcgggtgtcaaagagaagagacaggtcagtgacaagaagcggaaaaagaaatggcaattcaagctgaggcgtgactgggaagctgaaaagaaaggtgacaagaggaggaaggtatgaaggagtattcagatgtccacaggccccaatgaaatttgatgggtgtgtaagggcaaccgagaattttgagcaagcacgagtttgcagccaacgaaaattttgaaactgaagcatattattatcttgctgaatgctatgtgaatcctgctgtacgtgttataaaaaaaaatcatatctgagctactagctgagagaacctgacttctagatactgtggatcctgaatagtttcgacttgtggcttgtttggagatctagatcatgaaggcgcagtggcaactgattctgaagttcacgtttggtttggagtcttaaaaacaagatgagatcagacatgtcctttagctgatcgatgtttgtgtttgataggagtgatggaggcggagagaatgcatggttgtttgttttcagtaattattgttcgcttttccaatagagggtgcgtttggtgcttggacaaccgtgtccctccaattttaagggatagctaagagatcagacatgcctttagctgatcgatgtttgtgtttgataggagtgatggaggcg

SEQ ID NO: 21163 - DNA, 210 bp, Zea mays
  unsure (1)..(210): unsure at all n locations
  Clone ID: MRT4577_119298C.1
gnttgacttatcctccccctccggatacagattcggtttcgtgaggatctccggaattcgggggcgtggtagagcggttcgatgatgtccccattagttgttgagtaccgctgcttctgcggcggcctcgcctgggccacggacgaccactctcttcacaacgccttcagcacctaacggagagggcctcgagttcaatatcattctcga

SEQ ID NO: 21164 - DNA, 2512 bp, Zea mays
  Clone ID: MRT4577_119299C.1
gggcgacttcctcggtcgtagtgacgaagtaagccagggcgatcagcctcgaacggagtcagaggcgaacgacggggcgaagagaaagccgcagccaacgcaggagcagccacaccacgccgaaggggaggaagggtgggaccctacggaaagatgaaaagacggctcagatgaagcaagataacaaaaagtaggtgactaataaaagaacgaatgtggccaacgaggctggagggtacaaacgtgaacctaataggtcaggaaagcctctcaataaaactaaggataccgataccaaggaagttgatggccctgaaagcactgaaacaaatggagatgggaaagaagagcaacgtgaacaaaccaagcaaacgagccacaaaaggaagattgattctgataaaactaaaaaatctggccctgtgagcttttcgggtgttcaagagaagaatcaggtcagtggcaagaagacaaaaaggaaatggcaattcaagctgaggcgagactgggaagctgaaaagaaaggtaccaagaggagtaaagtatgagtattcagatatccacaaaccacaatgaaatttgatccgctgggcaacaaacaattttgaccaagcatgggttcgcacccaggattttttttgcatgtacgaaatagcgattgtaatttgttgtattttattcgatgtgcgtgtagacgagtggcatatctgtcagtggaactgaagcaagttatcttgatgaatgccatgtgaatcctgctgcttatatatgttaaatattatattcttatacattaaatataaaatggaaggatttcgtttgttgcactgatggcattagctccacaggttaaggaaagacttgttgaaatggcggctgctccggttgtgaagacttcgaagatggaccctgatgagggatctagctgaagcacttatacaaatgggttcaatgagaaaacggataagggaatggtgcaaaggttaggattagttgtctatgactccaccatttcagctggttatgatggtaaagagctacccaaagttcttgggatgaattcggttgacagagtattgctggatgctccctgcgcaggaactgggaccatttggaaggatctacaaattgaaaacatagacggacattgaagacatcaggaactgtgcctttgtccaaaagcaattgctgctagctgctattgatttggttgatgccaacttcgaaaactggtggttacattgtttactcaacttgttcgataatgattccagagaacgaggcagtaattgactatgcacttaaaaagagaaatgtaaagcttgtgccttgcgggttggattttgggcgtccaggattcatccggtaccgggagcatcggtttcatacttctttagaaaaaacaagaagattttatcctcatgtcaataacatggatggattttttgtagctaagctgaaaaagttgagcaatacaatcccggtgacgtctgagccgtctaaagcatctgaagaagcagctaaggttgatggcgaagatgagaaagctatttctaatgaacaagagactggtgttcctgataaagatgagaaaactgttgagataaaaaatcataaaaatgtgactaatataagaacaagtgtcaccaaagagaatggaagccataaacgtgaatccaataagccaggaaagcatctcaagaaaaataagaataatgctaccaaagaaattgatggctctgagagcagtgaaacaaatagaggtgggaaagaagagcatcgcgaacaaaccaagaaaatgagtcacaagaggaagtttgcttctgatagatccaaaaaatctggccccgagagcttctcgggtgtcaaagagaagagacaggtcagtgacaagaagcggaaaaagaaatggcaattcaagctgaggcgtgattgggaagctgaaaagaaaggtgacaagaggaggaaggtatgaaggagtattcagatgtccacaggccccaatgaaatttgatgggtgtgtaagggcaaccgagaattttgagcaagcacgagtttgcagccaacgaaaattttgatgtatgaaatagcgattgtagtttattattttttattcggtgtacgtctcaagttttatctttaatgagtgacatatctggcagggaaactgaagcatattattatcttgctgaatgctatgtgaatcctgctgtacgtgttataaaaaaaatcatatctgagctactagctgcaaaaaaaatattacaaaaaaaaaaaaaaaaaaaaaaaaaaaaaaaaaaaaaaaaaaaaaaaaaaaaaaaaaataaaaaaaaaaataaaaaaaaaaaagggggggccgttcagaaaataaaattagtcgtttgacaaggacccctttccaggcggggttgatgaatccgttgttaacctgcttgttcaaatggtgtaagccctttttttgatttgcactggggggctggaactccttttggatgggggccctccccttttc

SEQ ID NO: 21165 - DNA, 536 bp, Zea mays
  Clone ID: MRT4577_11929C.1
catgatatatgcttttttgtttcagagaattttgattgtaagtacatacactggtggacaattacaagatttgatctgtagataaaggacactgtggatgaggaacagttccccagcggttaccatgcctggagaaagaaaactggacatccgccctggatgagaccaaacgttgtgagggaaaaaatttcacttcttttgattgtaccaggcctaacaagggcagagtatccgttaggaatatcacagggctgctttaccacatgagtctcacggtctgaacaaactgttaaagcgcataaattaggtcttctaatgaaggacccatttgtttgttgtttgaagctgtccacaggtgcataggggcctcttgaacgggacttgatgaaaccaatgtccttggggttggtgccaaatcactgcctgtagacaatgagtccgtacttgctgataagaccgtgagggtttgcgcagacccggccgactcgggagccagggccgtaattcttaaggggcaacttccacacgttggagtg

SEQ ID NO: 21166 - DNA, 255 bp, Zea mays
  Clone ID: MRT4577_1192C.1
ccttaacaaaaaaaaaaaacaaaaaacaaaacaaaaaaaatgaaaaaaaaaaaaatagcaaagaaaaaaaaaaaaaaaaaaaaaaaaaaaaagcctttacctatggctgaatccccctgaggggagattctggagaacttcacacccctgggggggggttaaggaaccctttaaggggcccaatttccccttattgggggggtatttaaattaaaggggcgggtttttaaaacctgggcgactgggaaaaccccg

SEQ ID NO: 21167 - DNA, 839 bp, Zea mays
  unsure (1)..(839): unsure at all n locations
  Clone ID: MRT4577_119300C.1
aaaagttaagcaatacaatcccggtgacttctgagcagcctaaagcgtccgaaggagcagctgagaaggccgatggagaagatgagaaagttatttctaatgaacaggagacagctgttcctggtaaagatgaaaaaactgtgcagatgataaatcataaaaagagtaaggtgactaataaaagaacaagtgtgaccaaagaggctggagggcataaacgtgaacctaataggtcaggaaagcatctcaataaaaataaggataccgataccaaggaagttgatggccctgaaagcactgaaacaaatggagatgggaaagaagagcaacgtgaacaaaccaagcaaacgagccacaaaaggaagatagattctgttaaaactaaaaaatctggccctgtgagcttctcgggtgttcaagagaagaatcaggtgagtggcaagaagacaaaaaggaaatggcaattcaagctgaggcgagactgggaagctgaaaagaaaggtaccaagaggagtaaggtatgagtattcagatatccacaaatcccaatgaaatttgatgcgctgggcaacaaacaattttgaccaagcatgggtttgcacccaggattttttttttggatgtacgaaatagcgattgtaatttgttgtattttattcgatgtgcgtgtagacgagtgacatatctgtcagtgggaactgaagcaaattatcttgatgaatgccatgtgaatcctgctgcttaaatataaaaaaaaaaaaaaaaaacccacgcgtccgcccacgcgtccgcccacgcgtccgcccacgcgtccgcccacgcgnccgcccacgcgnccg

SEQ ID NO: 21168 - DNA, 275 bp, Zea mays
  Clone ID: MRT4577_119301C.1
cggacccaggagcggctaagcactccgaccagctgagccaggactgggaacggactataaccctgagctcttgctgatctaccaatgggcttttcgttctaatactctatccgagagatctcagcatctagcggagctgctcctatctagcggatagctcgcggatcaaatgacgaagacatatgttcgctggagaagagaggaggccttatgcctggatgaaatgacacacgtggtttgcgactcatggagacagagctcccacgcacgtaccc

SEQ ID NO: 21169 - DNA, 615 bp, Zea mays
  Clone ID: MRT4577_119302C.1
cgggtgttcagataacaaaatcttaaaaatgtgactaataaaagaacaagtgtcaccaaagagactggaagccataaacgtgaatctaataagccagtaaagcatctcaagaaaaataagaataatgataccaaagaaattgatggccctgagagcagtgaaacaaatagagatgggaaagaagagcatcgcgaacaaaccaagaaaatgagtcacaagaggaagtttgcttctgatagatccaaaaaatctggcgccgagaccttctcgggtgtcaaagagaagagacaggtcagtgacaagaagcggaaaaagaaatggcaattcaagctgaggcgtgactgggaagctgaaaagaaaggtgccaagaggaggaaggtatgaaggagtatttagaagtccacaggccccaatgaaatttgatgggtgtgtaagggcaaccaagaattttgagcaagcacgagtttgcagccaacgaaaattttgatgtatgagtgacatatctggcagggaaactgaagcatattattatcttgctgaatgctatgtgaatcctactgtacgtgttattaaaaaaaatcatatctgagctactagctgaacaaaaaaaaaagc

SEQ ID NO: 21170 - DNA, 1699 bp, Zea mays
  unsure (1)..(1699): unsure at all n locations
  Clone ID: MRT4577_119303C.1
gtcttcgtcttccgctcccccgggccccattcgcacccagctcagctacagacggtctctatggccaagaaaggggcgaagagaaagcagcagccgccgccggcggctcccaccgcgaagaaggggagcaaggctgtgcccccaccgaaggctgcgaagagagcgcccaagaagcaggagcttctcgagtcctccgacgattctgatacggagcagcagctcctggaggaggcctcccacctcgacgtcccctctgattccgacgccgaagagctctctgggtcggacgctgaggctgacgagctctcgggctcggatgccgattccgacggaagctcgagcagcggcgacgacgtggaggatgaggaggaggaggaaggtgatggaagtgatgatgaccccctggcggacgacttcctcgctggtagcgacgaaggaagcgagggtggtgactctggactggagtcagacgagtctgatgacctcgaggcaaaatcacgagcaattgatgagcagaaactcaaggcggaagaagatgcagaggaggaacttcaaaccaacataagatcagaatctgatgagttcagattacccacaacagaggagctggaggaagaggcacacagaccacctaacctaccaaatctcaaaaggaggatttcagaaattgttcgagtgctctcaaacttcagcaagctgaggcagaaagatgttccacgaaaagattatatcaaacaactgaaaactgatatcatttcatactatggatataatgattttctagttgaagcattaattgagatgttcccagctgttgagcttggtgagttactggaagcctttgagaaaaggccgcccgagtgcttgcggacgaatacactaaagacccggaggagggatcttgctgctgctcttataccaagaggatttaatttggacccgataggaaaatggtcaaaggtaggattagttgtctatgactccaccatttcagctggtgctactactgaatatatggctggtcattacatggtatcctgtctctnnnnnnnnnnnnnnnnnnnnnnnnnnattactttgactaataatattctcctatagaaacaaggtgcaagttcgtttttaccagtgatggcacttgctccacaggagaaggaacgaattgttgatatggcgtaagttgttctcctttcccttgggcaagagttaatttctattacgacatcaaagttagcaatgtaactgtaggccttatcatgctacaatattaagatattatgtacttgtttcagaattttgattgttaatcttcaattgatctattcattagggctatgctatcatatgcaatgaannnnnnnnnnnnnnnnnnnnnnnttgtttacagggctgctccgcgcgggaagactacttacattggcgctcttatgaagaataccggaatcatctatgcaaatgagttcaatgagaaaaggttgcatggacttttgggaaatatccatcgcatgggtgtgacaaataccatagtttgtaactatgatggtaaagagctacccaaagttcttgggatgaattcggttgacagagtattgcttgatgctccctgcacaggaactgggaccatttggaaggatctacaaattaaaacatcaaaggacattgaagacatcaggagctgcgcctttgtccaaaagcaatt

SEQ ID NO: 21171 - DNA, 674 bp, Zea mays
  Clone ID: MRT4577_119304C.1
gggtaccggcgccctctctcgagtttttttttttttttttttttttttttttttttttttttttggacacattaaaatattcttttcttgctcgggaggggagaggacagctgtaaaatgttgttttttcccctatctctttcttctttttctcttcttttctattccttttcaatggaagatcttcctgcttttcgttccggccttcctgacctttagtctgtcgctacccatgcccctgggacctgcctgttaattcctgtcctttccctgaggctgcgccaccagccgcctaattgccgcgcgctgcttgctactgtgccgccgggggcagaggtccgcatcctcgtaatcccttcctaacacgacatgagaggaatttaatgaactgttccttgaattgccccaagggggttggggagtatatctcaaagtcttggaaccactgcgttggcattagggggcatgcttacaaatcttcagttagatgcctatcagcggcaccttggtcaaagctgctaaactttgataatatttgattatgggaagaaaattgtaggtaccgaattctggaactggctgtgttatctgaagtgttaaatctgaatcccctggctgtgtttaactgcaggagcttgattccaaaacctgaatattggggtggctacaaattg

SEQ ID NO: 21172 - DNA, 334 bp, Zea mays
  Clone ID: MRT4577_119305C.1
ttctggctagagggcgctcacgaggtggggactatagctaaccgcgcaggggctcattattctgctgagcctaagcatcgcctatgctgttacggcgggtgatactctaatcgtcaacggtactggcacatgacaaggagaaggcggtggatatgtaacaggcgtacgatcatgatctaagacatatagcgacaagaggatatgctggttatggacaatattctaacgatagacctaccgccgggagtggatctggttgacaaggtagaggcgcatggaatacctacgcatctcggttcgggaggggaactgcctctgagtctacctatgctaa

SEQ ID NO: 21173 - DNA, 515 bp, Zea mays
  Clone ID: MRT4577_119306C.1
tactatgattacccaacaggaagcacaaccatttgttggtttattggagggaacccaggctcacaacacaaggcaggagaccgcgcaaaagataacaggagatgattggctctcgcctggagcacctgcagacgccaatgcacattataccactgctatacagcatgccagaatgactggggaccacggctggcacgcccgagcccttgagggtagagtacgagcactactggacactacaagctggagatgaacacacataataaatcggagagctgatgagagaccttcctacagtaacagccatagaggcggacaagacgagaacatgtcaagtcagcgcatgaactagaatcactcctcgactaaccattcacagagtaaatagaactaaacacgcgtgaacccacaaaatattacaaatggtgtgccacaagcagcgggcatactagtcaaaagccaggtgattgacaaaaccaagtgcatatgacatccaaaaatgcatgcgacataaa

SEQ ID NO: 21174 - DNA, 765 bp, Zea mays
  Clone ID: MRT4577_119307C.1
cccacgcgtccgcccacgcgtccgggcggaacatcatcgggcagagcatgtaccagctcctcatgctcggcgtcctcatcttcaagggcaagagcctcctccggctgggcagcggcggcgatgtatccgacgcccagctcaacacgttcatattcaacaccttcgtcttctgccaggtcttcaacgaggttaacagccgggacatggagaaggtcaacgtgttcagcggcatctttagcagctggatcttcccggcggtcgccggcgccaccgccgcgttccaggtgatcatcgtggagttcctggggactttcgcgagcacggtgcacctgagcgggagactctggctcgctagcatgatgatcggctcgggaagcctgctgatgggcgccggcctcaagttcatccctgtcgatccgggcagtgaaggctcgtctgaccgccacgatgggtaccagcccatccccaccggccccaacgccgtgtgatttccaagaagacctcctgccatccttcttgatttttatttccttctatagaaacaatagaactgaaccctcggatgcgtttgcagtttggggaaaaaaaagatgttttagataggagcgacggttgcatatgatggccgtcctcaagaattttaatcctcgtctcttggctattttgtctttgtagccggcaatgttttgtttctgaatttggatgatagaatcgatgttgctttagcgaataatgagaatctgtgtgaagctttgcataccaaaa

SEQ ID NO: 21175 - DNA, 359 bp, Zea mays
  Clone ID: MRT4577_119308C.1
tcgtaaaaaaaaaaaaaaaaaaaaaaaaaaaaaaaaaaaaaaaaaaaaaaaaaaaaaaaaaagaaaaaaaaaaaaagaaaaaaagaaataaaagaaaaaaaaataaagaaaaaaagaaaaaaaagggggggaacttttgatggggggtcgttttttcgtgggttttttgtgtgacatcgtgtgggctttttttggggggggggggtggtttaatttcctcccgtccgtctttcttattggggccgggtggggggaaaccccgggttggggccttatcgaatagggttcccaccgattggccttttggcatgtggcctttttttgcacggttgtttggcacgctgttgtgtttgcctacg

SEQ ID NO: 21176 - DNA, 395 bp, Zea mays
  Clone ID: MRT4577_119309C.1
tttggttcgacggcaagcacgttctcttccgccaggttgtcgagggcatggacgtgaggttgggcatcgaaaaggttgtcacccgcaacggctctccctgcaaggtggtcaaggtcgctgactgacgacagctcttctagatctctctgatctggtctggtcgggcgcccttccttcggtatcagccacttcccctgcgtccgttcctttggatctgaataagaaggtggtgatctgagtgggggtcttagtttatcttgtattggtcgcagattaatttaacggtttagtggtggatcctgcgtacggacggtgtcttcatgctctttggatatattacctgagttgttttgtaattcctagggttagatggatggaccgtgattcccttttat

SEQ ID NO: 21177 - DNA, 1238 bp, Zea mays
  Clone ID: MRT4577_11930C.1
actaccaaccacatatagcaaactgaagtttgtttcgtcgtgttgcaagttttaatcaaatacggcgcggctggaaattacaacagcaccagctaacctgtcctggtcatctcacttttctcaagtgctatcagtattacttagaataggacaataacatttgagaaatttatatcatccactcagctgctcaactttgttggaatgtaaacaaaacacaactaatgtgaataaaacataacttcatcgccacagatgacttcagtttccgctgatttccttctccttagccttgcacatatcatctgacgactttatgaactttttggtcaattcttcaatctccttctcaatcctctttacgtcatccttgggcatactagatgcagacttctttattgtatcaagtgccttttggcgtgctcttctaatactttgtttaaaatcctccgctgatttagtaacaaccttgcacagtgcctgtatgttctcctttgtcaacggagggatagctgcaataatcctattcccatcaggtgttggattaatgcccaatggtgatgagataatagcatgctcgatcgacttcatggaagtaggatcataaggcatcactgatagggtatgtgcgtccaggacagaaacaacggcaatgcgattcaatgcaactttaacatctgcattctccaccatgatatggtcaagcatgccaggtgtagctcttccagtccgtagtttgctcagctctcgtgacagtgcgatcactgcagcgtccatttgtgcggtggcagctgatttgacagttggcccaatgtcaggaacagcttgaacagtgtcacctcgatcatccttcgatttcttccccttcgcgaagcctcttcggttctcgaagaagaagagctgcgccggagccaattccccggcgcccgcaagggacgccccggctgggaggcggtgcacagtggtggaagcggaggaggcggccgcggcgcggaaggagcgggcggcgatggccacgcctcggcgaaggaggagcgccataagagaaggggttgggagttgcgctgtagctggtctacagaaggctcaggtggtcaggtttcctatcagctacgccggctagcggcggcggcggcggcggcggcgagaagaaacagcacaaagaggggggttttgcaaacttgtcctgatttccgtgggtctttacaagtttgcggccgaaacgagaatggacgcat

SEQ ID NO: 21178 - DNA, 808 bp, Zea mays
  Clone ID: MRT4577_119310C.1
aactccagtctccttctcatccatctaaccacccctgagctaatccagctccgtctccctcgctcttcggttgtagagtaccacagctcaggccatggcctccccgctgcttcgccgcgcggccgccggccgcgggcggtgtccgtcgccggcggaggcgctgcggaggctggtgtcctcggaggcggcgccggagcaggccctaccgcggcctctgcgggagatgccgccgttcgaccaccggccgagcccgtacgctgggatgggcggcgccgagatcctcgagaagcggaagaagttccttggcccctccctcttctactactaccagaagccgctcaacatcgtcgaagggaagatgcagtacctgtacgacgaacaaggcaagagatacctcgattgcttcggaggcatcgtcacggtgtcatgtggccattgccaccctgatattgtcaaggccgtgcaggagcagaccaagttgcttcagcacaccaccaccatatacttgcatcatgccatcgtcgagtttgccgaggcgcttgcctcgaagatgccaggcaatctcaaggttgtgtacttcgtcaattctgggaccgaagcgaatgaactagcaatgttgatggctcggctgtacagcgggaatctcggtatgattgcattgagaaatggataccacggtgggagtgctggaacaataggtctcacgggtttgcagacgtggaagtacccgattctcagggtgagattcatcatgtcatgaatccggatccttacgtggagcttttgggtctgatgctgcagcttatgc

SEQ ID NO: 21179 - DNA, 544 bp, Zea mays
  Clone ID: MRT4577_119311C.1
ttttttttttttttttttttttttttttttttttttttttttttttttttttttttttttttttttttttttttttttttttttttcccaggcccaaaaaaaaaaaacatttttttaaggggaaaaaaaagccccattggttttccaggccccagagtcaaaaaattaacatccgggtttttatgggaaaaaaaacccagcttggggcaggaaacggcccgttaaaaaagattacaagcttaaaaaaacagggggggaaaaaggaaaccgttcgattgtttggggggggttttaaaaagaaaaccacagtaaggggttttcgaaaaacttgtcacaacaccataaaaggatctaaagatgggccaatgttttgaaaggcctaaaattttttggggcccaaaaaaaaaagggaaaattccatgtaaaaccaaggggcaggggaccggaaaaaatgctgggccaaatgttatccatggcctttttcaaccccaggggagcatgcaaaaaggaaccttttgccactcccttttaaaaagggtgtatg

SEQ ID NO: 21180 - DNA, 1132 bp, Zea mays
  Clone ID: MRT4577_119312C.1
ccgaacagcgtggatgctcctgaaacagagctagcgcatttgactgggatgcctactgagacatttgaacagatcagccaggccgcaggagaatgccataaaatgggtgtgaaagaagtactagttaaacttggatcgcaaggatctgctgctttgtttgttgagggataggagccaatcagacagccgataattcctgccacagaaggtattgataccacgggggctggtgacactttcacctcagcttttgccgtaacgttggttgaggggaggcctaaggattgcatgggatttgcagttgctgccatgttcttcgatgaggctgagtaccacacaacccctacgaggtcaccctccaatcgcatgaacaggggtctcttctcagatgaagtggcgttaagtgttcatagggagcagtttatcccttctccgtgatctggtagagtggatgggttggacctcaactccagtggcgtggagttccagaaaattgcatttcatgaacttcgtcagtcccagtcagctgccaactactccgctactccggttcgtgatggtcataggggttgcagtcattctcgatcaattggtattggtcgtggtgttacgggcagaggatcccgagttccacggacgactagtgagggtcctagaggtggtcgtggagcatgaagcatcttctctcgtggacgtggtatgcctcgacctattggtgcttccttctctggtggccgtggtgccaccagtggtcgtggtgccaatatttcagcgccaaatgccgctcacagtcaagaggacaatgacgacgatcgctttgcacaggtaactcatttttctgacttggtcactccaatatggaagagcaaactgcgtcatagatgcaggcactactgtaatttttagcccaaagttttgaactgttttgtttgaaatatgtacataatctgtaatgtttgtgaactgtttgaatggagaggagagctggagagggcacggagaaatggaccgagacatggaccgtttttcttcagcacggcagcccccagccagtttttcatttgtgaatcctgtcgttggttgtttcttcttttgtacgctacacttaaattatcctagagagtgctttaac

SEQ ID NO: 21181 - DNA, 395 bp, Zea mays
  Clone ID: MRT4577_119313C.1
acatgcacctacgtaaactgggatcctaatacggcgaccattttttttaatttataatacaaaactaaaaaaaagatatatatgctaattgagtaatataataaaagggtaaggaaaacggtcaaagagaaaaagacacaggcgaaaaaaagaaaaaggacaggtggcgccggaacctaacgagggcagaggggaaagccaaacgaaagagaacacgaagaaagaacaaaaatgggcgagacaaaagggaatggggggttaagcgagggaaaaacaggggaagtttgattaagggctgggatcttaagagtgagtaggccgatggggagaggggacatgaataacatggtggcaagggtggggttgactggccaggactcgtggggttagagacc

SEQ ID NO: 21182 - DNA, 574 bp, Zea mays
  Clone ID: MRT4577_119314C.1
caaaaaatatagatttggttctctgttttgagactagcagaaatgtgtgcttcagttttggtttttgtacccattaaaatactagatagaatcgaatgggaacagggatataaagcaaggacttggagctttgatgttgtcattgataattgtattgtttattgggcgacaagaataatacttgttcatattgtttaatcttagtttgcttgcagtgtgaaagatgtaatattggaattatatttttgccttctcatgggtgaattggtgggccacaaatatagacgtcatttttctcgcgccttagtctttagtgccattaatttgtttggatctaccttatttctggatatttgtatgcatcagcagcatttcgttcaaagaatattttatcattttaccttattattcaagttacatagagtctatgttgatttgtctttctattgttttgatagaaaattcttctgctacctatacatgaatattactgattgcttgcactaatgaaagtcaaaatatcgtgggacatccagctgagcaagaagatagtgctgcaccaagttcagttttt

SEQ ID NO: 21183 - DNA, 477 bp, Zea mays
  Clone ID: MRT4577_119315C.1
gccggccaggttccgaaaaaaccctacacggcctcccgctcccaccgctgacagccatgccccaccgcgtcgctgccctcctcctcctcctcccgctcgctgccgcgtcggaggaggcgccgggaccggcggccgaggccgcgctgctggagcggcacgcggcgcagctcgcgaaactagaggaggtggcggagtcgcttgcgaggtccgtccacgcgctcgagtccgcgcttgccagatccgcggacccggatccctcgcagcctgtcgccccggcggcggccgtcggggaccggcgctccccgcagggtgtggcggtcaccaagcgtcgccccgtctggtccgagcgcttccacttcacggcggccgcgcgtcttggggagggcgcctacgttgcggcggcggtcgcgctgccgtacgaggacgccgaacggctcaccaagtacttcgccgtcggggactcccgcggccggccct

SEQ ID NO: 21184 - DNA, 110 bp, Zea mays
  Clone ID: MRT4577_119316C.1
tattttttatttatactctgcagtaagaaggtgaattagaaggaaaagctaaaagcatccaagacacacaagaacgatgcaaacaatataaatacccaggctagcacaag

SEQ ID NO: 21185 - DNA, 362 bp, Zea mays
  unsure (1)..(362): unsure at all n locations
  Clone ID: MRT4577_119317C.1
cgaggcgggaatggggctccgcatccgggccggctccctcctactgtgggtggctctccagctcgccgtctcgctcatctcacagtccgcgcaccacaacattcgggatcaactacgggcagatcgccaacagacctccccgagccagcacatgtggcgacactcctgcaatcaatgggcgtgaacaaggttaagctgtacgacgcgcacccccacctgctgactgcattaccacccacgggcggttgattcaccattgccttggacaaccaggacctgcacgcaatagctgccagaccggacgcagagcaccattgggtggcggcgaacgtgcaagcctacgtnccgggcactcgcatcac

SEQ ID NO: 21186 - DNA, 391 bp, Zea mays
  Clone ID: MRT4577_119318C.1
gccccgtcggtcgaggccaccgtgtacctgtcgagcgtgggccagcacctgctccgggacactgtcatctactgtgcggcggaacggtacgggctcgaggagctcaagcgcctcgccttgcgcaagcaaggccttcagagtggtatcgatgtcggtaccatcctgcggagtgcccagtactgctacgcacacacccccgactccgacagccgcctgcgagcacactacttggccctcatcatccgctgccgcaagaccttcaagcgcagcggcacgatgcaggccgagatggagaagagtggagagggcggcaagttgttcttcgacctgttcgtcgccatgtgcaaccacctggacgacgtcattgacgcgtcaaacgcccggacgccca

SEQ ID NO: 21187 - DNA, 365 bp, Zea mays
  unsure (1)..(365): unsure at all n locations
  Clone ID: MRT4577_119319C.1
ataaaaaaaattttttttttttttttttttttttttttttttttttttttttttttttttttttgaatccaaaaatccccaaaacaaactgcggcctttttatacccttcaccccccccaaaacaaccatttgcaggcgagaataatttttttttttttacaattccntttttcaaattcaggctcaatcaatcaatcaataaaagccctctcactactacccatttggaaacaacctttaataaaaaccttggcccctggcatgacaattaaactttcccgccggccggcctgccttccttccgatcgtgccttgtgttttttcagtaacccaaaaattataatttgtcctcgatcgatcccac

SEQ ID NO: 21188 - DNA, 1150 bp, Zea mays
  Clone ID: MRT4577_11931C.1
acaacagcaccagctaacctgtcctggtcatctcacttttctcaagtgctatcagtattaccttagaataggacaataacatttgagaaatttatatcatccactcagctgctcaactttgttggaatgtaaacaaaacacaactaatgtgaataaaacataacttcatcgccacagatgacttcagtttccgctgatttccttctccttagccttgcacatatcatctgacgactttatgaactttttggtcaattcttcaatctccttctcaatcctctttacgtcatccttgggcatactagatgcagacttctttattgtatcaagtgcctggacaaacatggtgaagtttgttatgctacataatgctaataacagcatagagcattggagttgatgggaactaaaatccagtagtactcagaagtcctaggctccaaccagctttagtttagtggaaggttttgaacataataaatttagctttgagagccagatactaggccgagtgagatggcaaaaatacttaagcacaccagtgaacattacccacaatagaaaggctcatcactaaagatagaccaatctattattattcatttctgataatgaaatggaagatcgaatgagctcaaccacaaattagttttcttactcataatatcactaaatgacgacagaataacttgttaaacttgctgcaagtgtaccctgcccccaatgcataataaattctagaaaaataggcatatatttctcctaaattccaagtgtcaaactaatgtttagtttaaaacttgaatcaacttaaactgaagaatgatgcatatgattgtccacatagctactgccatcaccagaataaattaattaactgaagaaaaggagtgacctgtgttaccttttggcgtgctcttctaatactttgtttaaaatcctccgctgatttagtaacaaccttgcacagtgcctatactcaggcaccaaaaaatacgttagttgtttccatacaataaattagcgttaattcagcaaattttacctgtatgttctcctttgtcaacctagcatgcataataaaacaaaattagcagaaggaagcaaattaagaggtagtacaagttattaaataacggaggtggtcgac

SEQ ID NO: 21189 - DNA, 372 bp, Zea mays
  Clone ID: MRT4577_119320C.1
tctggcagcagcaccagtccaccacgccggcgccgcccaaaatctacgggtccccccacccccacaccaccatggcctacttctttgcggacgacggcgccgacgacctcccgcgcgccacctcccacccctgcgactccgacgactttggcgccgacgcaggcgacgacgctagcgccggcgggaacacctccttcgacgacggtggcgtcgaggaggtggacgaggagatcaccggagagtcctacagcgtacggatccgtcacgtctccgggggatactcaccctcgccattgtcccccgacctcgagcccagcggttgcgacggaccgaccctgtcgccgtccaccgtgatggggcggcaggagggaa

SEQ ID NO: 21190 - DNA, 228 bp, Zea mays
  Clone ID: MRT4577_119321C.1
tatatatatatatatatatatagttatagtattaggagccctgggcttccatcaatgcagggagcccctaccaggctaggtgtgccgagacgcggtcgacgtggcaggtggtcggagtaccgcgcacatgcaccgagtgaaggtgggtcgtacgtgcgcacccactattaccatttatgcatccgtttcactcgaattccgtatgcataaacgcgtaactgccacggt

SEQ ID NO: 21191 - DNA, 332 bp, Zea mays
  Clone ID: MRT4577_119322C.1
tgggtttttttttaggctggagtggttttctcaaaaaaagggatggaattttctctactagctgctctacataccatgcagactacacatttgccttttacgagtagccatttcggctaccccgtagtactattatgcttaccatttcctttatgcctctgcgcggtgtacagcaatacgggttcccacccccacgtagtatcaaatcacctgaagcagcaaaacagctgtttaaacagcaacggtgaacaagctctgcactgcatggaaagttgcctcccacacatgctaactggaggatgccctgatcacaggtactctactcacaagct

SEQ ID NO: 21192 - DNA, 482 bp, Zea mays
  Clone ID: MRT4577_119323C.1
aaaaaaacaggcataaaggttatgggaaaaaattaaatcacccgccggttcaccacctaaataaacagccttatcactaacataaaataaactgccttaccactcggatacaaagcataaaaggagcagttcctttggaaagcacaaatccttcaaccaaattatctatactgtttaaggaccaaaacaccatcattgccgttttgatactaaaacaccctggggcggaaaaaactgcacgttgttgtcttaacaaaccccttgatactttttggaaagctcctccaaaacagcaggggtataccacccagaaatgaacctgccaattttaaaccaaggggctgcccagttcctactggggtccataaaaaaaaaattccaggaaagttggggggggggcaattaacaacgttgccgggctctttgcccatctttaaaaacgggcagttttcgaagccgttctccctaaactggtcgaaggt

SEQ ID NO: 21193 - DNA, 538 bp, Zea mays
  Clone ID: MRT4577_119324C.1
cgagcggccgcccgggcaggcacaagctttttttttttttttttttttttttttgattttttttttttttttttttttttttttttttttattttttttttttttttaagaaaagaaccgaggccgggacccagggaggggggaaacccaaaaaaacggaggccgggacaaggggggccgggccaggcaaaaggcgaggcccaaaaaaggggaaagcgggaccaggggagaaaaggggaagcccaaacaaggccaaaaaaaaaaccaaacccggagcccagagggaaaaggcgggggggccaaaagggcgagggaacccaaacagagggcggagagcgcaaagcccggggggccaaaggaaaaaccgaacggccagcggggggaaagaaccggccaccccccggggagaggggaaaccgggcgggggagctgaaaaaaggaaccggccaacgcccgggggggggcggaacgaggagggggggggaggggccccagcccacccaaaggcgggcaaaacccagtccccagaaccgggggg

SEQ ID NO: 21194 - DNA, 443 bp, Zea mays
  Clone ID: MRT4577_119325C.1
ctgggtttttttttttttttttttttttttttttttttttttttttttttttttttttttttttttttttttggaccaaaaaaagggggtttaattttaaaaagggggccccaatgtattttccaggggcggctataaaaatccatcctaaaaccttggggggggttaggggcccccccaagggtttacccccttaataatagggccatcatggccctccttataaaaccccctccaatgttgttattgggggggattatcctcccaaagaattttatgggggctcatggatctggaacaaccctttgcagggggggaactccgaaagatgaaatagccaaacggccccccacaagggcatggggggcaagggatcccccctaggctgggtttcccctcccccaacgggttggcccccaaccccgggaaaaataaaagaaaaa

SEQ ID NO: 21195 - DNA, 627 bp, Zea mays
  Clone ID: MRT4577_119326C.1
cacgcctgcgtgtaccgggcccctattacacggtcgacctcagcgttcggtttcataaaagacacaatgagcgttccactttgggggacgaccatactgcctccttatgctccatggttgaactgtaactgctgatacagcgaccatgggcccccacgcgcaaggctgctgtagcaacactgcttggcccgtaccagtaagcagcggggatggcagcatgtgaagaaccagtaatagggccctacaggatccaacaggcagctggaagaaccgtaacacctgtatcagccttagagaatgtcaacaaggcatcacaccctattacatgactgacctgaggagcatttactggctcaaatcagcagggcacatcaacgacgacaactggtgctatcgaacaaagctgtctactctgaccaccagcagctggttgcatggaaccaactagctgcatagaactcagcttcttataaggcacatcaacaactaccatgcaaccaactacctgtggcctaccccgaacaatggcttgcattcaaacaactgggaacatggagctcccctgcgtattgacagcatcaacaactactagcatccagccagctagctggtgtgagccctggtacc

SEQ ID NO: 21196 - DNA, 676 bp, Zea mays
  Clone ID: MRT4577_119327C.1
gccgggctttgatgatcgacttggtagtaagagtaggcttcgtgttttgtactgcgtatgtctggactcatacttgtatgatggcattttgcgtattcaaacaccacataagaagcctcttttagaatgctgcatcccccccccccctgttgtctatgaacgtgaactgattccctccaatctgtccatgatagcaacgaaattcatctgtcccacacggaccctatattgtttatataactcctgacagtgtgcgcgggactaaaattaatgatgaaaaaactgatctttcacatacgtgatgccctctttgcagatgacatgtgacgtgatggtcacgttcttcatattacatagcttactacaggattatcgtgtgcccatgaattctaaatgtacataacagtctggcgggacttatagcatcttgtaatgtctgtgagccgcgcactgtcagcattgggtgggctcgctgtgtgaactggcggacatgtagagttcatccatttgggtacgccttggtgaacacggacgccccacatgatgcctcagttggagtcgttcgtgtgaactgaaggcgacgtgcttcttccatgtggttgcagggcctacttgagtcaagcgctaacatgagtggatgatactttgcccgaaaaaaaagaaaagaaaagcggcc

SEQ ID NO: 21197 - DNA, 157 bp, Zea mays
  Clone ID: MRT4577_119328C.1
tttgggttttttttatacattttcgggctttcaacctccaaccgaacaaggaatgaagcggtttgtccagtagaggaaagaggaacctgctgaaagcttattgctaaaccggggagttatttgcttgacaaagaacatgaagtccttgttctaacga

SEQ ID NO: 21198 - DNA, 758 bp, Zea mays
  Clone ID: MRT4577_119329C.1
gggtttgtgttttttttttcagcatgaatgaaaacacacacatatatatatataaaccatagaagagcatgaaccctctgcacagaagggatatacattcttaagcatagagcatacgtcaggaagaaacaaccaactacctcagaccatgaccccagcgaagtatacaacctactacctctattatgaacatactacctccattctcgaatatttgtcgcccactttaaactaaaacacgataaataaataaaaaacggagggagtagtacgtttgtgtgctagtatcgatggttaagaaatcctcactgccgcctatactactactctactagcatttctttagagatgaaactcctctgaaacagatagtactcttccatatctcagggtggctagtgctggcctttttcttcttcatcagtagttttcgttccggtgacatccagcactacagatgtcaaagcgactgcagagcctgaaaagaatgctgcccggaagcttccagcactgaaacccagagaagcaccagcagcaaaacctgcaacagcaccattaatgatgtccttcttcatcctgtaccttgcaagagcctgctcgacacctacaaatgtagctccaaaaaccgctaagcttgcggcataatgcccacacaccttggtagttctgatcagctggggatacttgacattattgccaacctgaggtccatcaaacaacatagaatgtagtgcaccatacacactgccaaaagctaa

SEQ ID NO: 21199 - DNA, 582 bp, Zea mays
  Clone ID: MRT4577_11932C.1
gattaaggattgtctcaactcgcgatagcattgaaccgactcgactatcacaagcgacctatgaataaccaccactgaagctcgaagccaacatcatttttgtttaagcggagacaccgctccaatctggggatgactctatctgagcaacatggttcagacagataactggagcattctcaacactgacaacaaacaggttattccacacttcctagattttgagggcctggacacctctgccgaaatgttgggcctccctgatggcgcctgtgaacgaacctaggtgttgactgaccgcatgagacatttaggtcactatggagttgttcaccgtcttcaggtccgtgatattggcatctaagtcgtatcactccatcaagtgcctgtggttgacatacatgatggccattcctatggtggcgtctatcatcttcacagtcatcgggctttgaattgagactggatcttcatcgaccttgatggcgttatccactgatcctcgatgaatactccatcgaaatcttggacgctaccttcctaatgggctcctcatcctcagagtgtgtactctgcaagagc

SEQ ID NO: 21200 - DNA, 293 bp, Zea mays
  Clone ID: MRT4577_119330C.1
gaattaaaggaccgacccacgcgacccgtcacgcgttcgcccacgcttctggatccggttggtttactaatcaagaccacgaccgcgcgagggtggtgttgctagctataattaggctactgctatatagaacttgcttggcacctgggatacagaaacaatgtgctcctcataataattaacaagtaaacctatgcatacatgcatgagcaccgagcgattcagtatcctgactgcatggcggcctgccatatctgtaccgaaacatacatgacaaggagcgtcagctagat

SEQ ID NO: 21201 - DNA, 431 bp, Zea mays
  Clone ID: MRT4577_119331C.1
gggggttctttctttttattgtttttttattaacacacaaatgtgtagttattgcggaaaaacggggaggaaaagggtgaacccccccggagtcttacccccgatagggaccctcgcaaggggaccgcccccaccctcaaatggaaggttggaccaacatttggggggatacgaagatcctacacggataacaccaacaccggcgagtggaccataccatggctttgccaaaaaaatgacataaaacaccacccgcgaaggccggacagtctacagatgatcttgtttcagcctagaaccctacatggttaagataatacccggcaaaccaaaatatgaagtggcgaggggccatcctcaggcactgtttaagattggggcagaaatagtagggcttgaatttcctctgggccctaagaagccgcatcctt

SEQ ID NO: 21202 - DNA, 433 bp, Zea mays
  unsure (1)..(433): unsure at all n locations
  Clone ID: MRT4577_119332C.1
cccctgatagcacagacctaaacgtccacggcactcaccttaaggggcacgcttgtccgaaccggtgtaggactttccgctncgttttcatcgcctgtgctccgcctcccgcgcgcgcccgatgcagatgccggagtcgcggccgatctgacgccatccgccgccggccatgaagcctcgacgccggaccctctaacagttgcacagagcaagcgctggggcctgctaagacccgtgggccgactgtcaaaaaccacccccggttcccagcactgctgattaccgccctgactgttaagcatcgctgcctccatatggagatctaccgcgccctcccgttttgtggccgacagctgatacatatggctgctcccgcgcataactggtgaaggaaccaaggagggacgcatggataccggcccccacccggtgc

SEQ ID NO: 21203 - DNA, 625 bp, Zea mays
  unsure (1)..(625): unsure at all n locations
  Clone ID: MRT4577_119333C.1
aattcggcacgaggggctctctgttgacagcaaactgtgcattctaataaatctgctgatgcagaagagacagtattcaatcgacctgttatagttcaatgctctgaaccttctctagacacacgaaaacttcagccctttgtatgtaaatgaatctacccggacattttacaacacaaaccaaaccctgattctgctgcttatcttcgtaaagaaaatgataaagtgttaaaagaaaatgataccaatggttcctgggtttgtatttaagctcagaatggttcctgtgggaaaacttcagccctttgtatgattttgaatcgacccggacttgatgttacacaaaccacatctgtacctgaccggttatcttcgtcttttgagaaagaaagtgaaaatgtggcaacaagcagtgtcaaagagacaaaaccttttggctcagctgtttgtgaggttgacagaagtgcagaagcagaacaaattgaccattcaaacaacaatggtgatgagcaacactatacgggcatagtgagactattggtagtggattcagtgaacaatgttgggagatacggcaagcaactcttcaatggctactaaatcantncagtatacaatccgatgc

SEQ ID NO: 21204 - DNA, 422 bp, Zea mays
  unsure (1)..(422): unsure at all n locations
  Clone ID: MRT4577_119334C.1
ccgggttgnacccaacgcgttcgtaaaaaaaaaaaaaaaaaaaaaaaaaaaaaaaaaaaaaaaaaaagggcgggcggtctgatatgagggaatccaaccttacccgcgcctgccatgcggatagcatattctctaagtgtagacgctcaacctaatattcaatggacctggccggggacaacacaacggactggacaaaacaaaaccgtgtcgccaacggaactgaatttgcatcacatcacatctttcgttaggtgagctggatataatagcagaacaggcaccgtaccgccttgtcctacagaagagtagcgcagaacggaaaggtggaacgggaccctgccctgtggcgttaaattacagcgcggtggggtgtggtacgctacagcgcagacgcgctacacttcactatgccagctgac

SEQ ID NO: 21205 - DNA, 794 bp, Zea mays
  unsure (1)..(794): unsure at all n locations
  Clone ID: MRT4577_119335C.1
accgctccggccacttggctggagtcaaacactaccttactgtgacatttgttgttgaactttaactgttcattgttatgccagtaacacgatataaactcatttatcaattcactaagaaaattggaatttcagtagtgcaaaatgtgctattttaaacttttcgatacatataactaccattttttctgtgcacacctccccctcagcttcccatcagaattttgtgagtttgatcaggatggcagaaatgacattcttgttattagttttccctttattgtctagtctactcacaattatgtgaattgttaaacaactaatgcaaactacagttcaagacgacttttgaacttttgacttattattatttgttccaaaagcaaagcagcctagattatattcttttacttgatggattcactttactaggttttggcaggcctcaagtcagcaggtttctttgagatgataaccatatatgatgcattgacactaacgatatgtgagctaagtttaaagctccatttggcattgtgtggctcaaaaggacacatacttttagatgcagcaattagtttaatgcatcttttggatccataatagcaaaagatcctacaatgatatagtacagactgccctaaaccctaaacctggtacgctgacgccgtccgggcggngcaagctgacgtgcgcaggagttgatgcgatatctccgtgctgtcacctcagnctacactgtatcangtgcatcgcagaacgagcgtcgcttcatgatgtcgtcgtccacacat

SEQ ID NO: 21206 - DNA, 476 bp, Zea mays
  Clone ID: MRT4577_119336C.1
aaatgggaattatcaatgtattcatgaaatcgttcaatgataaatggaaaaaaaaatatctataacctctcttgttacagagaccaacacagatactattgactctcacggtggaatatatgaattttacctcatctgaactaatcaaaagaatactagttaggacctccaaggtaacgaggctgtttaccaattcttgacagctgctttcagctaccaatctgtgagcgactgctttcccggcaaaaagatggtttcatccaccttgagagcaaaagacctctttcacagttacttcggctccaagtgcatctgctgctcaagccaagaagcaataacactctcatccagtgagtcatcctgactgctcagttcaggcctattagttggtcgagatgccatgcctgccatttcacccctcttgccactcagctcagcatggttcaccattgactgcacccaagacacatctggct

SEQ ID NO: 21207 - DNA, 560 bp, Zea mays
  Clone ID: MRT4577_119337C.1
ttgcacttagtcaaatggatcgaggattatgttgatcattaaaaaaaaaaaaaaaaaaaaaaaaaaaaaaaaaaaaaaaaaaaaaaaaaaaaaaaaaaaaaaaaaaaaaaaaaaaaaaaaaaaaaaaaaaaaaaaaaaaaaaaaaaaaaaaaaaaaaaaaaaaaaaaaaaaaaaaaaaaaaaaaaaaaggggagggggggggggccctgtttttggggaacccaagtttacccccgcggggcgtcgcaaattaatccctttttttttagggccccctaaagcccaattcgggggcccttttttaaacccgccccgatgggaaaacccctgggttccccccctttaacggcttttggaaccccccccttttgccgggtgggggcaaagggagaggggcccttcccaggcccctttcccaacgttttggccacttaaatgggaaaggggcccccccctttatcggctttttttggcgggggggggggggggtttccccccgggggcccctatccttgggctcgcccttagcccccccttttttcttttttttcccttttttt

SEQ ID NO: 21208 - DNA, 548 bp, Zea mays
  unsure (1)..(548): unsure at all n locations
  Clone ID: MRT4577_119338C.1
caattcggcacgaggcttgggtgcagtcactggtaaaccatgctgagctgaatggcaagaggggtgaaatggcaagcatggcttctccatcgattaacaagcctgacctgagcttttagggtgactcgctagatcagtgttattgcttcttggcttgagcagcaagatgcgcttggagccgaagtaactgtcaaagaggccttttgctctcaaggtggatgaaaccatatttttgccgcgttagtttccgagaagaatagttatttgtcctagtaaataataatattcttttttttatttcttgaaattttttgttgcaaagtcggagatggtgtggtcttcaggaaacatttgctcacaaattggtagctgaaagaagctgtcgagtattggtaaacagcctcgttaccttggaggtcctaactagtattcttttgattagttcagatgaggtgaaaattcatatggtcgaccgtgagagtcgatagtaattgtgttgatctctgtaacgaagagaggttatagannnnnnnannnnnntttgtcaa

SEQ ID NO: 21209 - DNA, 2775 bp, Zea mays
  Clone ID: MRT4577_119339C.1
gccggccgccgggaagaaactgcgagtcctcccatccgtgctttgtcgcctctctctatctttctctctctcctctcccactgccgttccccaaactcagcctcggcttctcttctctggacggggggcggctgccggcgtcgaccttcgcgaggaaggagaggaggccgttggatctcgctggattcgattgggttaggacgggatcaccgcgggcagatgcgctgaactcttggcgtgtgcagtgcgcgatggtcgatcttgctgatctcgagggtgcgggcgaggcggcgcgctcgcatctcgccgcctgcggccagcgggacaggctggcggcgctgctggagctcgcggcggccgacgacgtcgcggggttccgcgaggcgctcgcgggaggaggcggctagggcgacgcagcggagctggcggacggggtggggatgtggtacggccgaagcaaggcgtacgagccgcgcacgccgctgatggttgcggcgacgtacggcagcgtcgaggtggtgtaacgttggctcggcctcggatgagtcgacgtcaaccggcgcccgggcgtagacgtcgccaccccgattaataggcgtgaactgagctgtcaggatggctcgcgagatgagagagttgctcctgggtgccggggcctgcccggtaacccccgactccgacggatcgcttgcctgccgacgtcatcttgtctccgtgtgcttcgcccgacgccttgggcgatctggagatgctccttggccgccgccgagggctcgctgtcgcgacctcggttccatcgctctcgtcgtccccgccgctctcgacctcgccggatgagggcacaggtcgcctcacagattgcgtcttcgttgtcgccgattaccgtcgaccgtgccaagaaggagtacccggtggatccgacgctgcccgacatcaagagccgcgtgtatgcctccgacgaattccgcatgttcgcgttcaaggtgcggccttgctccagagcctactcgcatgactggacagagtgtccgttcgtgcaccctggcgagaacgcccgccgcagggatcctcgcaagcacccatacacggcggtaccctgccccaacttccgccgccctggtggctgccccagcggtgatagctgcgagttctcccatggtgttttcgagagctggctccacccgtcgcagtaccgcacaaggctctgcaaggagggcgcagcttgtgcccgccgcatctgcttcttcgcccacgatgaagatgagctccgccatgtgcctcacaatagtggtgcaggtctgctgtctccccgtgcctcttcatccattgacatgaccgctgctgctgctgctctagggcttctacctggatctcctaccaggcactttgtgccaccacctctgtcaccatctgctgccaacaatggtggaggtgctgctgctcattggctccaaggtagcaggctgcgctcttctttcaatgcaagagatgcacaggctgatgaccttggctcgctcctggaatgggaatctcaataccttggagcgctcagcctcccacaaagcagccgatcccagccccgtctttctactggtctgactattcgtccaacagcagttgctccatcctacctcgaagagatgtatgcttcagacatggctatgtcgccaaggttcaccaatgaccaaggtcactcagtcttctcaccagcacacaaatcagctcttctaaacaagtttcatcatcaacagaagggccttttgtcgcctgtcaataccaacaggatgtactcaccaaggggccttgatccatcaattatccattctccatttggtggcatgtctcctcggtcccctcggactatggagctaacatctcccttaagtgtccgtgttggggctgctgctactccgcgtgatatgttggatcagttttcttccctgaacaagcaccaggtgccatctgcgggatcgccacggaatcttaatgtctcatggggcaacattggtaccccaaagagtaaggtggattggggtgttgacaacgatgaactagtgcgcttgaggcaccctgtgcaacctggaaatacagaagaggagccagatgtgtcttgggtgcagtcactggtaaaccatgctgagctgagtggcaagaggggtgaaatggcaggcatggcttctccatcaactaataagcctgaactgagcagtcaggatgactcactggatgagagtgttattgcttcttggcttgagcagcagatgcacttggagccgaagtaactgtgaaagaggtcttttgctctcaaggtggatgaaaccatatttttgccgcgttagtttccgagaagaatatttgtcctagtaaataataatattctttttttattcttgaattttttgttcgcaaagtcggagatggtggtcttcaggaaagcatttgctcacaaattggtagctgaaagaagctgtcgagtattggtaaacagcctcgttaccttggaggtcctaactagtattcttttgattagttcagatgaggtgaaaattcatatggtcgaccgtgagagtcgatagtaattgtgttgatctctgtaacaagagaggttatagatttttttacccccatttgtcaatgaacaatttcataaatacattgatatttccagtttattcttctgaatacgtttgtacctatgtttttttccctattttctaccatggtagttttgtatctgtgtcaattctattacaataaagtcccaaatttggcccc

SEQ ID NO: 21210 - DNA, 594 bp, Zea mays
  unsure (1)..(594): unsure at all n locations
  Clone ID: MRT4577_11933C.1
caagaaagatgtttattgatgaggttatggagcttgtggagcttttacccttaaaagatgcattggtaggattgcctggtgtcagtggactatcaacagagcaaaggaaaaggctaaccatagctgttgagcttgttgctaatccttctataattttcatggatgaaccgacatctggacttgatgctcgagcagcagctattgtcatgagggcaataaggaatactgtggacacaggaagaacggttgtttgtaccattcaccaaccaagtatagatatatttgaatcttttgatgaggtgaagaaaaccatacaaaacatagtttcttatttttagaatgcagaaggaaagtgtgaaccaacactttcgctatttgcattataagttccagaactttaacacctaatggctctgtccacaactgcagctcttcccttatgaaacgtggaggtgaagagatttatgtaggtccccctagggctgcattccatgtgaactggtcaaatattttgaggtgaggaaagagccacttaatattggatatttccaggaattacagnttcatattgaactgcacattatctaaaaaaaa

SEQ ID NO: 21211 - DNA, 204 bp, Zea mays
  Clone ID: MRT4577_119340C.1
gctcataccggcagtgcctacatagcatcgccattcaaaacagggctcagaccgtcattccactcgggatgagcatccctatagcagccacctactcacattctttgcagatctcataccacagcacctgactgtaatgttcgtactgtactagctaacaacatcaccactatgatgctgtccgggtgctctacacttacgaaa

SEQ ID NO: 21212 - DNA, 428 bp, Zea mays
  Clone ID: MRT4577_119341C.1
ggctccttgttgttgcatcggagcaacaaaaaaataaaataaaatgatacagataataacatgctgggatagatagatgaacaaactaccactgcgttctccttcgtgctggaccagcagtggcattacgtgtgtcggcactcagcagagcatgtatgcatgtccggctagtgcttctggagcctgatctgctccctgaatttggcgatgaactcgtcggccttcctgtccacttcctcctccctgtccggctccgccttcgccgccagcttcaaaagctcttcatccacagacgtgtcgtcgccgtcgccgtcgttacagtcactggcacaagaggccaagtccccagggaccgacctttctgacgacacggccgctgtcatctcatcggacgacccgtcggcatcctcattatcccagtcggtgac

SEQ ID NO: 21213 - DNA, 328 bp, Zea mays
  Clone ID: MRT4577_119342C.1
aaaaaaaaaaaaaaaaaaaaaaaaaaaaaaaaaaaaaaaaaaaaaaaaaaattataaaaaaaaaaaaaaaaaaaaaaggggcgaggggttgttcggtttccaggattccttgcttgcgtccttcggtgcttgcttacgttttcgtttgttttttcgttgtttccaattttctggtcccttggttttccgttttccggggttggtgactgccttggcccttgcctgtttcccttctttttgcgccttgtagccctttccccctttctgcctgttgtcctaatggggcccggggccttgccccctttgcctttctcgcccgttcctcatt

SEQ ID NO: 21214 - DNA, 218 bp, Zea mays
  Clone ID: MRT4577_119343C.1
ataaacatcagacacttttactacttatatgaaaagcatgacctaatgtagtcctcttattgggtcccctctctgtttttaggcacgagccccacatccaaaactttccaacgctaacaagcacccgcttcccattgtgccacgtccatgagccagcagtgcctataagcacatgatttagctacaaattctatatgtgcagatgtagaatgatactg

SEQ ID NO: 21215 - DNA, 554 bp, Zea mays
  unsure (1)..(554): unsure at all n locations
  Clone ID: MRT4577_119344C.1
cgggccgggccctcgtcantttcctggcctttaccctaacaccgacccgagaaacggccctccaagcacaacgacgagcgcacatgggtgacaacgcaaggcagcgcgacggcggggctgcggctactgcatagacgagcggtggctgctgccgctgcacagatctggccctccctcgcgcaaactccgttccgcgtggctccctcgcctcccaacgttccgtgcggctcccccgcctctggccaaatccaacaacgacatcgacatagtggtctcccactctcccattcgattcagtggctatcttctcaccggtttgaagattatgcgtcatcgaacacctgttctgttagactagcttgtgccggcgctgtccggtgttaggcctgccgccggctacaagattcgtgtcaatttctgcgcaagcttgagcacactgaaaatcggtggattcgcgtcagattttgtacaagcttctgcacaggcctctgaacctgagctgtcaccaaccaaaatgttgtttcaccactacaactggggattgatgtcgatca

SEQ ID NO: 21216 - DNA, 344 bp, Zea mays
  unsure (1)..(344): unsure at all n locations
  Clone ID: MRT4577_119345C.1
cctcgagaaaaaaaatctacctctgctctcgaatctttgtcggtcactagcctcgagaaaaaaaatctacctctgctctcgaatctttgtcggtcactagtatntcaacatataaaaagttactaaatacaatatagtctaataaaaaatcttacaactatctattatcttagaaataaatagtataaaaatcatctaacatcttaaaataaaagtgtaanaaattaccaaatataatatgattgtatgtattgtgcgcgtacgtataactgcatgagaattgattgatcgagtgttgtttataagatttacggtacctacgcggtgagcgcgaccttctcctg

SEQ ID NO: 21217 - DNA, 179 bp, Zea mays
  Clone ID: MRT4577_119346C.1
gccacgcgttcgccagcgttcgtcgttctagaaataaagcactctccgggggcgggaactactaccatcgccaaaaccctaccccgatccggtcgaggagcactcttcttggcatggtgctactttagccgtcagccttctgtccagaagcattcaaggtttgcgaagaacccctggtg

SEQ ID NO: 21218 - DNA, 1109 bp, Zea mays
  Clone ID: MRT4577_119347C.1
tgatggctggtgaatcatggacggtgccgactccagtgaaagaactggccgccctcgtggacgagccgccgagccggttcgtgcagcgggaggagcaccgccctggcagcctaatgctcgcggctgacatgccggatcccctccctatcgtcgacctcaacaagctgtcgaccgccgacgaggcagccaagctccgctcggcgctacagacctgggggctttttctgtctaccaaccacggcatagacgcgtctctaatggaggatctgatggaggcgtcacgggagttcttccaccagccgctccaggagaggcagaagtacagcaacatgagggaaggcacgcgcttccagctcgaagggtacggcagtgacccagtggtggcgcaggatcatatccttgactggaacgaccgtctgcagctgaaggtggagcctgaagacgaaagaagccttgctcagtggcccgaacatcctgaatccttcagggatcttctgcacgagtacgcatcaaaaaccaagagtatgagggacaaaatcttgcgagcgatggccaagatcttggagcttgatgaggaagatttcatcaagcagcttggtgctagtcctcaagcctatgccagattcaactactaccctccttgtccaaggccggagctcgtcttgggcatcaaggctcactctgacggccctgttctcacggttctcctggtcgatcgtgaggtcggtggactgcaggttcagagagagaacacgtggttcaatgttccgtccgttcctcacactctggtcatcaacctgggagactccttggagataatgagcaacgggatattcaagagcccagtgcacagggttgtgacgaatgcagagaaggagaggatctcgttggccatgctctatgcggtggaacgcgacaatgtgcttcagccggcggccggtttactggatgagaagcgtccggcaaggtacaggaggattacagaggcggacttcttggagggggtcaaagaacacttctctagaggaataagaatgattgagaccttgaagatctaaaccttgtatcttttgttatcaagttaagcaatttcagcagcaatttaatct

SEQ ID NO: 21219 - DNA, 253 bp, Zea mays
  Clone ID: MRT4577_119348C.1
cggacgcagccatcctaccgcgtgctcctgcgtagctagcgtatgcgtaggcgtagccgtagcagcttgtgcgagatggggagaaatgcttatggggagggcgctattggaggacacggacatgccgatgcggatgcaggacgctgggacctccgcaggctcgcagcgcactcgacctcttcgacgtcgccgactgtcgagccatacacgaccacatgaagactgagttcgacaagcggtacggcgtcaggtg

SEQ ID NO: 21220 - DNA, 856 bp, Zea mays
  Clone ID: MRT4577_119349C.1
gacagacgagagggtatgtagtggtgcaccacgagttggtgaagctgccagcatgatctggttatgatggtggtggtatatgtaagatggatgtaatctatactactaccgggccgcggcactctctctctctcccccgtccctgactgtcatatatggatcgacgaatccaaggagagaggggaagggagagagagagagggtaattaatgagcaccaggaccaggtcatgctgtagtttcatctgctggtggccgcacatcgaaaaccctagctagctcaccctcctgcaattcatatccatgctgcactcgccagagaccaccagtcaagctagcttatttccgccgttgacgacgttgattaattatccgtgataataatggccttgtcgatctagtttcctctctctttttttattattatgcctttgcttctctcttggttcggttgtgtatattgctgtctctgtcttcgtcatcactgtgtgcctacaatcctgctcacgataatgcagatgggaagttgtgcattgccggaagtcttcttttcgaaggtaaaaaaaaactaactcgacaactgttttgtagcttgaattaataagtgttgcaggtagaatacccaagattaccttcggctcaccttcggcggggatggttgcaatgcaacaacgaatacaaaagcgcaagcttcggagtaacagcatgtgcacatgaggggtgaacaagccaaaaccatgagaggtcaacaagacagctatagaaattgactgcagtatcctaatatatttgctagctcaattgtatgtgcgttcgagtgtacgattgtaattttgacgaagaagctgtaactcacg

SEQ ID NO: 21221 - DNA, 554 bp, Zea mays
  Clone ID: MRT4577_11934C.1
gctgctgcgtctgggatatataaaggaaaaaaagcgtgacaccaacccgacaccggctcccctcgctggctctcctccgcagctccgctcccctgctcgccacctcccgcccattttaaaccaccaccactaccaaactttgcttgcctccccagtccccaccaccgcttggctgccgcttgctgctgcggtcgtctagctaagctagcttacatagccagcttcgacacgtcgcgacgcagattaagcggcacgaggccagcctccgggagctggtggtggagctaggcaggcggcgttgtgcttgctggcttctgtgatggggtcgtccacggatcacggcggggccggcgccggtgcccgtggcaagaagcaggggtcgcagctgtggaagaaggcgctgctgcattcctccctctgcttcaggatgcgcaacaacggcgaagagccctcacaaatctggtccgactggaccgccgctgcggcggatgcagcgggaccacctggacccaaggagacgacggcctgacctagaaaactctactcaacaggcc

SEQ ID NO: 21222 - DNA, 225 bp, Zea mays
  Clone ID: MRT4577_119350C.1
cactcgttcgctgtacgttagcctatgcattatctcatcgactccagattggagatctcgacaccaacatagttttgccctatatattagcccttcccattcaaagggttcattcaggtcattgctcacactgccacccatggtgatggatgacactacgttatttatcgcctttaaattatttaactaccgagctatgtatgtagtcggggggtccatttcatt

SEQ ID NO: 21223 - DNA, 359 bp, Zea mays
  Clone ID: MRT4577_119351C.1
ttattattgggttggttcttttttttttgtgttcgtcttcaaaaaaaacaaccacctttatcttatgggcacatatacaaactgccatcaccccaccgcaaacacctgcacgccttcaacccatgcccactcggcacacgaccaatacataacggccttcaccgttcttaactcgaccaccgaccctccagcgactggaaacagcaacaaacctccttacgaccctaacctgactaccaccattcaaaggctgaaacaatactctaccaacatcaggtgccccagtaacaaccggcacagcagatgaaagaacccctccaagaaggccagaacctgctccggcctcagctagacatact

SEQ ID NO: 21224 - DNA, 249 bp, Zea mays
  Clone ID: MRT4577_119352C.1
acaaaaaggacgttttattcgaaaaggagcctttggatgcaaaaatggggccccccccgatttaatgggactaatgcctgctggggggggatcaaagggaaatgctgggggggatgcccctcccggggactcccgggttggaaaaggggttgagcagtttgtacgggacaaacccggggcccaaggggtttttgggggccaggttggtgttgcactcgtcaaaaaaccccttgatttcctttatcctgc

SEQ ID NO: 21225 - DNA, 315 bp, Zea mays
  Clone ID: MRT4577_119353C.1
aactaccgactcgtgccactcgtcagctcagacgtatactcatcttaaccaaccgcttccagtcctatccccctctaacatggccatcgagcaccacctctggatctccctggtcctgatagacatgctcaaccatgtggccactcttcagggtcaccctactacctactgcatatacctcgtgctgaagtagaccccggcctactcggacaccatgacgagctgcttgtagcccaagaactgaaaccctttgggaaacttctgaatccccagactctggacacacagcaactactgctctacatcgctgaactc

SEQ ID NO: 21226 - DNA, 329 bp, Zea mays
  Clone ID: MRT4577_119354C.1
aaataaaaggaaagaataaaataatggggtatatgcatggaacgtaaattttaaaagcggccaagaaaaaaaaaagttggactacaacacaaaaacaaaatggttctttgtcctacaccagaaaaatgaatgattacacaagattgactacgggaaaaccaaatgctaccacgggcaaagaacccgcagttcttggcccattggggtcgagaggctacacctagggcctttttcacccttaaagatgcacaatggttgtggggatgaacaactaaaaagaggcggctgggggtgaataaactaaaaacagcggtgtctggggatcaaac

SEQ ID NO: 21227 - DNA, 291 bp, Zea mays
  Clone ID: MRT4577_119355C.1
agcaaactacacgctctgcgtctccttgctcaccaatactcattcaccatccgaagatttcttcacaggtcatgaactatccaccttcctactccttcactctcttccctttcatttagcctcccgctcttctctatcccctctccattcccaaccatcttttcagttttttccgctattgcccgatacccatccacatccagctcacgactaacctcatcccccctcccttctcttctccttcctcctcctcctcctctccgtcttctacttcgttctcggccattgtca

SEQ ID NO: 21228 - DNA, 514 bp, Zea mays
  Clone ID: MRT4577_119356C.1
tttttgcttctcttttttttttttttttttttttttttttttgggttttttttgggtttttttttttttttaaaaaaaaacataaaacccaggtttttttgaatcccttatatgccggcctttacttgttaaccccataaaattatcccttggggggtcaaaacattggcaggggccaatttggaataatcaaacccctttaagggttcatgacaaaaggccttaaaaagcccctttgtaaaaggggcatggccaaaaccctgtttaaaaaccaaaatattggctgggtcagttgggggctaaagcccattaaaaaagggggcttttttttaaaagccccgggtatgtcaacccatcccttggctgaaaaaaacctgcttaaaaaatggggggcttttgcatggccccaaatcctccgaaagcgtttaaaacaactttttgtacagggagccatccccaaaagacttttttagcccgacaccggaaagggattttttattctcaaaccccccac

SEQ ID NO: 21229 - DNA, 300 bp, Zea mays
  Clone ID: MRT4577_119357C.1
acgcccacgcgttcgcactttcagatcaacaatatcattaaggcaggcgagcacaacctcgcggagcttgagctgttgtagatgcacaacatgacatactgcaccgaaattgcccactacggggacacccggaaacgcaaggagatcgtcgaacaggaccacacaactgggcatagcagtgaacaacaaactggccaggatctacaacctgtacggccactgaaatagacattagaaagcggtgatacacgctggcagacaataatggagcgaaaaacctgcaacatgacataccatgcc

SEQ ID NO: 21230 - DNA, 410 bp, Zea mays
  Clone ID: MRT4577_119358C.1
acccggaggaggcctaaaaaaaaaaaaaccggaggacagcaaaaactaaagtttcggacaggcgactcggggacaagaggcaaccctcgctaactgggttaaaaggactaggcaaatcccgactggggggaaaccctaacagaaacagccaggcccagtttggccggggggaccaaaaacggggggatcttgaggacaaaccccggggtctaatcctggttgaagggcggctgcttggggggcgggaccttaacctaacggggaatgggggccgaataaatctaaccgacaagggactcgcccataattgcacgggcgggggggctggcccccacattttcaaaataatcgggagcacccttggcgggggaaaaagcaggacatcatcacccccaggggggccctccaaa

SEQ ID NO: 21231 - DNA, 1351 bp, Zea mays
  unsure (1)..(1351): unsure at all n locations
  Clone ID: MRT4577_119359C.1
aacaaaaccaaactgtaagcgcaccgcccaaaaccctataaaccatctcccatctctctggctcgctcgtctagcagatgcacagcagcaggcgtcccctgtcttcgtccttccgaaatcccaatcctccctccgagtcccccatcccaaaactcggagctccgaagctggcactggcatcgcggcaatgccgaggccgcccacaatggtgatccaggacgactacatcgacatggacctgaccccggcagccacaccggagccctcgccagcctcgccccgcttcgagttccagagcgccggcgccggcgccgccggcgacaggcatagggaggcggcgttcgcgtcccccgcggacgagctgttctacaagggcaacctgctgccgctccacctgccgccgcggctgcagctcgtgcagaggctcctccaggaccaggagcagccgccgccgctgcgaggggcgaagcgggatgcggagtcggatgccacggcggcggcggcggcagagcgaggagacgccgacgctgccgctgccgccagcaaggtgtgcgccgccaagaagccgtcttgggccaagaagctcaaggtggttaagcggtgggcgtcgaaggagtacatccggtcgctcttcctggccaggccgccgttgccgagcgacatcgtcgccgccgccggtggcgccagcgccagcggccacggcatcggcagcgtcagcgcgagggggagcgtcctagagcaggaggaggtgtgccagtgccagcaccgcaagtccttctccggcatcatccgccgggtgcgcctcgtggcgaccaaggcgcctgggacctcgccgctgtgctcctcctcgtcctcgtcctcctcgtcgtccacgccgtcgtgccgcaacgcaaacgggttcttcttccggacgccggcgtcggcggcgggggcgacgccggcgctgaagcggagcagcagcgccgggtcgtccgaggagggcgccatccagggcgccatcgcgcactgcaagcgttcccagctgctgcagcccgggatggtggcctcggcggcggcgcggaggagcgtcagcgacgtcatgttctactcggtgaccaacacgcccagagcctcttccgtgaccgccggcgaggtggcgcaggagaggaggcaggagatgtgcaggggctgatgatggccgatgacatgccacccatggatcaaaagcgacattcttttgtttcttttcttttttgtttattttgcttgtgaagatgatgagcaatgtgatgtgggttgctctggtgatgatcaggacgcaatgtgctgtgactgtttccccggttcccttgattctttgcgtcttnctccg

SEQ ID NO: 21232 - DNA, 1182 bp, Zea mays
  Clone ID: MRT4577_11935C.1
atgtctgaaatgaagagatcaataatgcaccttgaggatactgagtcagacgaggaagttgaccatgacatgcttattatgatgggtgagtacaagaagaggaagaataagcagtataaaagacgtcgaggttcagtttttggacaccaggtctatgatcggagtagagctgagaatgatatgaaattatatcaagactactttgctgaacatccaacatatcctgagaaatttttccgtcgacgttttcggatgagaagacctcttttcattcggatagctgaacaaaaggtgactgcagcatttaggcaattagcttatggagtcccagcagattatgttgacgagtatctgaggattggggaaagcactgcaattgagtgcttacgaaagtttgtgagggctgtttgtgaggtttttggaccagaatatatgcgagctccaaataaagctgatacaattaggttgcttagcattggtgaacaacgtggatttccgggaatgcttggtagtattgattcgtggcaaggcaattattgtggtcatgtgaaggaaccaaccattatattagaggcagtggcatctaccgatttatggatatggcatgctttctttggactacgaggatcacttaatgatataaatgttttgcatagatctcctatttttgacagacttgcacaaggcgaggccccaacagttaactatacaaatggtgggcacaattacaatcagggttactatctagcagatggaatctatccaacttggtccacatttgtgaaaacaatcaaggcccgagtaaatttgaaggacagaaattttgctaaagctcaagaatctcagagaaaagatgttgaacgtgcatttggagtattacaagctcgctttgccgttgtacgagttcctgctagaatgtgggatgaagcaactctaagagacattatgcaagcatgcataataatgcacaatatgataattgaagacgaatgtgaattaggtcgccaagaggcaccctatgacaagggagatgatgacgcaagtggctgggtttcacataaagggacttcaaaatttttattcttcttgaagaagcataaagaaatccaaaatcctaaattgcacaaccaactacagcgagatttggttgaacatctatgggagcggaaaggagatcagtag

SEQ ID NO: 21233 - DNA, 1165 bp, Zea mays
  Clone ID: MRT4577_119360C.1
tttttgcgtgggttcgaggacactggcaacagagtcagtggtgctctaggggctaaagagatgagcaagtacccagcttttagagacccgtcggaactgcgagtggcactgtgaatacttcacaggcggatcggttgacccaaacaaaattgcagaatggcaggtccagcagcttgtgccttcaaaacaattccgatggcattcaatggcccagagaccacgaaggaggactggaaggctctttgaggccttgctctcgcaatacaagctccgagggtgatgagcaacaaaagcggcctggtgatgtcaagttgtttggacagattctcagccatcagtcaaccctgcagagttctggcttgtcttgcaatggtaacaagagcaagcctccctcaccaaagatcgacacatctgtgagatccatgaacaatccaatggaccgtgtggtttgttcttccaggcctggcaccactccacatctgggtctggaggaaagattggcaaggtgctatggtcatctggatggtagcacggcacagcccgagccactgctcgtgatggcaaagcgccagcgggtccttggccggcgtacagttttactcggctaagaacggcacgcttggtgtgttaccagattaccaacaaccttcgacgcagccacagcaatcagatcccaagcgtgtggaaaggttgtctgatccgcagaagaggaacgtgctggaactcatctcgggtttccagcagcccggcagagtcgcccgtttcgggggtgctggcatcctcgtaagcggcaacgtctcggaccctgtggctgctgctctcaaggctcagtatggtcccggttctaagattatgggcagcgacgtggatccttggacggacataggaagcaggtagcgccgtagcagctctactgcttctgttgctccttgtaccatatatttagttttggtgtaacttgaatgaaatcatcagaatatgagatgtggggggtggggagtgaatggctttcctgcccatactatctgtaggcttttggccagtagcagtcgggtttcgctgtttactggcattaacatttttaaaagaaagaacaataaaaaaaatcgaatacaaaacagaaaggaaaaaaaaactcgagggggggcccggtacccaattcgcc

SEQ ID NO: 21234 - DNA, 382 bp, Zea mays
  Clone ID: MRT4577_119361C.1
ccgcgcagtcgtcctccccaccccactccaccccagcgcactcggaaaccactttccgatcccaagcggacgagacgtgcaatcgctagatctcccgaactaccatatatcgagaatccgacgaacgaaggcgtcggggaaggacccgaaccaaaaaagtagtggactggcgtgcttcgagctacacggatggattgactaccgagactaagcgatgcagatattgatgttgaaactgattctgggaggtgaccctggttaataggagggagtgaagaagccatgataggtgaccacgaggctctctccaggacctgcatacttctcaagctctagactacggacataagtaccggcaattacatgcatcgccaggctcgaa

SEQ ID NO: 21235 - DNA, 3903 bp, Zea mays
  Clone ID: MRT4577_119362C.1
gaaattgaaacagctccagttcataatgcaaaaacagttccttcagaagctggtgctatatctcctgtagtcgctgagggtaaggcctgtgcagctgctgatcttagctcattgaaagcttctgaagaagctgggtctcaaaatgatattgacaatggcaggctggaaacttcttcacgccaagctaatgctgattccatgaaattagaaattagtgatgacctaccagtgaagaaatggacataccatgatcataagtctgatttgctcagttctgtcacatctgcaaatagtgctatagccaaagaaattaatgaagtgctatttaaatcattgcctgctgatacacctcgccttgatttgtttgcatcaagtcatcttctgagccaaaggaagagtgatttgattgtcaaagaaaggcttggagtatgtaaaaccaggctgaggttgaaagagcagatgcttacaatgaagttcaaggcatattgtcacttgtggaaagacgtccaactattttctgcaaataaacagcgttcaaagtctaataagcgcactgatcagagcaaccgaacatcacaaattggatctcagaggcaacgctcctctaaccgctcgcgattaaccatgcctgctggtaatttaagtacattctcaactccagaaatgtcagatgttgcaatgaggttgttttcagagttcaaaattaagcggtgcagaaattacttgaaaatgcctgcactgattattgatgagaaagagaaggaatggttgaagcttatgaacaagaatggtctagttgaggatcctgttttagttgaggaggatcggatgatgataaatccgtatactaaggaagagaggacacgtagtaggacgggaagggcttttgaggcctagctctcgccctacaagctccgatggtgttcagaaacaaaagcggcctggtgatgtcaagttgtttggacagattctcagccatcagtcaaccctgcagagttctggcttgtcttgctttggtaacaagagcaagcctccctcaccattggacgacacttctgacataaatggaatcctgagtcaaatgctcgttcgcgtgatatgcttggggtagcatcagtaatagcagcccatggccttgaatatgcaaaacaagtggagaaaatttctgcgaaatccctcatccggactgcatatgggcccagtgtgacttccgtggctaataaatcttctgataaggagtgcattgaccatgtgcctttgcacgagagagaatctgtagcagctgatgtactagcaggcatatgtggcactctctctcctgatggaatgggctcatgcattactagttctgctgatcctggacagaagattagcatgaaaagagtggagcatgtcttgtcccaagaaaatgacaaaaccgttgaggaggaagacacactctctgatcaagagtgtgaagttgacccagttgattggaatgacgacgagaagtcaattttcattgaggctatgaataactacggaaaggattttgctcggatctcgtcatgtgtgaagagcaagtcatatgaacaatgcaaagtgttctttagtaaggctcggaaatcactcggtttggatttgatccatcaaggggcagccgatgttagtatgccagctagtgataccaatggagggaagagcgatactgatgaggcctgcgctgtggaaatggattcagctatctgtagcacacagtcatgttcaaagattgcgatggatgtttgtcctactgaaggagccattggagggcctaactctgttataatctctaagcaggcagaagcatatatatcaaatgggtgcaatgctgatgttaaaattgaggaagatgagaaggtagctgataaaaattgcagcattgttgatgataagaggtccagtgatgctactcacgaagctggtcctattgacatcaattgcccaggaagcacagataagctgcaaggaactgatgatgtcgttgacctagtaaacatgcatagtaatagtggcatcagctcttcagctaagcatgcagtggccattcactcggaaatgagatccactttacattctgtagaggtccttcaaacagacaaaggtgaaggtactggtactgatttgtcctgggtggaagaatgttcacaccatgctctggataacacaccaatgaaaaatggaaattctggtgccccggctttcttggcttcagatagtggtatcaaggacaatgttcgcatctcaaacataactgctgcttccaccgttagtcctgcattcacttcaagttatcagcattctgtacctggagatatgcccctgccaaaaccaaagccacttgttaccccgcttaccccaaaggatttaatgcctgtgcagttcagttcagtgcttcctgaccccactgcaattcgtttcgagggcatagcctcaataactacgcccaacttcgaggacactggcaacagagtcagtggtgctctaggggctaaagagatgagcaagtacccagcttttagagacccatctggtaatcagcaaagcaccttgttttgtaatattgatggttatatgaatcatcgtctgacaactgaattaccatttttttctgaaagaactgcgagtggcactgtgaatacttcacaggcggatcggttgacccaaacaaaattgcagaatggcaggtccagcagcttgtgccttcaaaacaattccgatggcattcaatggcccagagaccacgaaggaggactggaaggctctttgaggccttgctctcgcaatacaagctccgagggtgatgagcaacaaaagcggcctggtgatgtcaagttgtttggacagattctcagccatcagtcaaccctgcagagttctggcttgtcttgcaatggtaacaagagcaagcctccctcaccaaagatcgacacatctgtgagatccatgaacaatccaatggaccgtgtggtttgttcttccaggcctggcaccactccacatctgggtctggaggaaagattggcaaggtgctatggtcatctggatggtagcacggcacagcccgagccactgctcgtgatggcaaagcgccagcggtccttggccggcgtacagttttactcggctaagaacggcacgcttggtgtgttaccagattaccaacaaccttcgacgcagccacagcaatcagatcccaagcgtgtggaaaggttgtctgatccgcagaagaggaacgtgctggaactcatctcgggtttccagcagcccggcagagtcgcccgtttcgggggtgctggcatcctcgtaagcggcaacgtctcggaccctgtggctgctgctctcaaggctcagtatggtcccggttctaagattatgggcagcgacgtggatccttggacggacataggaagcaggtagcgccgtagcagctctactgcttctgttgctccttgtaccatatatttagttttggtgtaacttgaatgaaatcatcagaatatgagatgtggggggtggggagtgaatggctttcctgcccatactatctgtaggcttttggccagtagcagtcgggtttcgctgtttactggcattaacatttttactctttcttctgcagctccatacccttttggtatagcttgacatgccagcagtggcacagtgccgtaggttccctagaggtgaactagatgtttgtcagcatggtttgattttgccagcctatgcagaaaacctcacttggtctttgtaatgtggtaatgccatgtatcagtatcctagtctgatggagttttggttgagacagttctcattaaaggttctgtctagcttctggaacatcattgacattataatacgtggattaaggcattggccggc

SEQ ID NO: 21236 - DNA, 466 bp, Zea mays
  unsure (1)..(466): unsure at all n locations
  Clone ID: MRT4577_119363C.1
cccgggtcgcccacgctccgtaatcaaaataaattttttggntgatgtgtgtggccaaccagaaataagaagttacatttccagaattctaatgtgaaaaaaaaaaaaaaaaaaaaaaaaaaaaaagaaaaaaaaaaataaaaggaaaaaaaaaaaaaaaaaacggtgcgtgcttactaagaggccccacctatagtgggggggtgggtggaaggcacatggcctgttgttttacaacgctctaaactgagtaaaaccccgccgtttcccaactcgttcgccttgcaaaaactcccgctttccccagctggctccattgggaacaggcccccatcgcccgcgcttcccaactgttgcgcagccccaatggntcctgtttcccccactgttgcggccccttaatggcgatgggccgtgccccttcccgcgccctttaccgccccgcttgccggggcgttaccccccg

SEQ ID NO: 21237 - DNA, 521 bp, Zea mays
  Clone ID: MRT4577_119364C.1
accgggaccctccctcgagtttttttttttttttttttttttttttttttttttttttttttttttttttttttttttttttttttttttaagggggccaacccaaaattaagccccctccaaaggaaattccttaaaagggggcaaaaaaaccccccccagggacaaaattttttagggttcaaaacccggaaaattttcctaaagcaaaaccccttttaagaaaactgcctaaaaaaaacccctttataaggattgttgggacccaacccgccccggggggggggccaaaatttggcggggggaaaaaaaccccatcgttttttggaaaccccaacggtttttccacccctgccaaaatttttggggggctggccacggccccgggggccccaatagggacccaaaccacgggggttcctgatttttttgaccctctaaagggcgcccctgaccttaatataaggggcgggggaaacaacctgaaaaaacccgccgcccttgaaacccttcttcctggg

SEQ ID NO: 21238 - DNA, 253 bp, Zea mays
  Clone ID: MRT4577_119365C.1
tgctccgacgcagccacaaaatggctcgcgtctggtcttttctgaacggccgttacatgcgcctcttctagtacactactattacgggcaagttctatatatgtacctattgcgataccctatgcgcccgcagcgggggtagcgccatcccagacagcaccgatggtcggcaccctctggactaggtccacatccagattgacaggcacgaagccctatgtcaacgtcggctcgattgggctcgaccttcacg

SEQ ID NO: 21239 - DNA, 247 bp, Zea mays
  Clone ID: MRT4577_119366C.1
gccacgcgtccgcccacgcgtccgggtaggtgcatagcttccgtggtccaccatggcgctgcgagcggaggcctcgaggacgtctaataagcccctcctgctcctcgccctggcgttcgtgctccttggtgcggcgccggccgcctggatcgcgcccggcggggcgttctgcaactgggtggcgatgaacctgcagagctacgcgctgtacgcgcagtagtccgcctgtgtcgggggctaggagccc

SEQ ID NO: 21240 - DNA, 538 bp, Zea mays
  Clone ID: MRT4577_119367C.1
gccccctctcgagttttttttttttttttttttttttttttttttttgaacacaaaaaaacttaccgggggggtttgggtttaaaaagggcccccaaaaactggcccctaattccccggcccttccttaaacccccaacaatgttttggggccctatttaaaaaacttaaggggaaaccgggaccatccatgaaaatcccaatgccacaaggggttgatttatggttgggttaggggcccccttttttggaaaagggttctttgaaacaggggggccccgggggccttgtccctggaaattcaaggtgcccccttgaccctgggaacccggggtgccccccggggaacccggattgccccccccccaatttggggggcccgtggggccgcccccctgggaggggggggggggccccggggggccgcccccctggggggggggggggggccctggggggccgccccccttgaaaggggggggggggttgcctccctgggagggggggggggggtttcttccttgggagggagggggggg

SEQ ID NO: 21241 - DNA, 879 bp, Zea mays
  unsure (1)..(879): unsure at all n locations
  Clone ID: MRT4577_119368C.1
tccgaccttctcctcctgtacacagctcagcacttcagcagcagcatcgcatcatatcgccctcgtctccagttctcctctctctcggtcttaaaaatccagcgccaacgcggccgccggacgcgcattgctctccctccctgcctcgtctcctcacctcattctcgccacatcttcctctgctcccctcctcccaggtggcgttcttggagctccagctcctcgagctgcgtctgtctacgccgccgcggttgtcgcttgggtggcggcagcccgcaatggggaggagcanccgcgcctgctcccttctcggttccgcccagctgctcctcctgctgctgctctcgctcggctccgcggccgcccagaagggctccacatggaagaccctgagcggcaaggctccagtaatcgttgctaagggcgggttctccggtctatttcctgattccagtgattttgcttatcggattcttgggaccattagctcccctgacacagtcatgtggtgtgatgttcggttgacaaaggatggcgatggtatctgcctaccgagcataaacatggataactgcacaatgatagacaatgtttttccagaagggaagaagacctacaatgttaatggtgtatctacggtgggatggttctccgtggactatacgagcactgatctgctgccaaacgtgacactgaagcaatcggtcctatctcgtacccctggttatgannnnnnnnnnnnnnnnnnnnnnnnnnnnnnnnnnnnnnnnnnnnnnnnnnnnnnnnnnnnnnnnnnnnnnnnnnnnnnnnnnnnnnnnnnnnnnnnnnnnnnnnnnnnnnnnnnnnnnnnnnnnnnnnnnnnnnnnnnnnnnnnnnnnn

SEQ ID NO: 21242 - DNA, 325 bp, Zea mays
  Clone ID: MRT4577_119369C.1
ggggggggattattattttttgaaaaataacacaatttttttttttttttgggccatttgggcaccttcaaatcccattccaaggggtgcaaattacacattttggaaattttttcaccgggggtacaatattaacttaaaagttgttattgggtggaaaattgaacacaaaaaaacccgctcttggggttttggttcattgacggggcaaaaaacgtcccccggttttaaatgacccaaaaccaagccacaatggaaccaattgcaaggcccaaaacgggggacaacctgttgacaattccgggggttttcaagtgggggatgg

SEQ ID NO: 21243 - DNA, 328 bp, Zea mays
  Clone ID: MRT4577_11936C.1
gtcggcgatggctcttcggcgtcgagctgctctggctccggcggcggtctactggtatgcttcttccacccatctcgcaatgcgctgggcagtccacatgccccccatcccgcgtcagccacgacgcttcgtctcgccgcatgcacatctccggaggcgcccggcgtcgcatggcgtgctcatgtcgctggagtcccgggcgctggcggatccggcgagccctgcaacggcggagtcccgaacgcactcacatccctggagacacttggtgcctcgtgctgcccactccaggtctcaaactacactgataggttatagtttagtcagt

SEQ ID NO: 21244 - DNA, 2973 bp, Zea mays
  Clone ID: MRT4577_119370C.1
aaagaaagcttcagtaagtccagaacagcaacctgtcattgcttctcctcagctcaaaatggacatgccgtcttttactcctgccattaagcacacagcaggatttgccttatccggtagcaagcttgttcctaagacgggtgagattgcctctgaacctaactaccaggtcactggtggtatggatagtgagcaaagaatcatcttttcagaaaagatccgttgtgcagtagaacaatcaactgcacaggctaaaggtgcaagccttgactcaatggaggcagttaagcacaaggaaggcatatggagcaatctatctacaatctcaaggaataagttacctccaaaagttgaagagaaacttacctcagttgcagctgctgctgaagcagcagtttctgttgcaaaggcagctgcagaagctgccaagatggcgtcagaggctgcattgcaggcaaaaatgatggcagatgaagctcttagctcttctatatctgtaatgtccatgcatcacgaagctgatcaatataatgtcattagtagtccactgatcttgtcaagttcaacgccagcatcatccctgaaaattaaggacaagagtcatgccccaggttccatcatttctgtggcacgggaggctgctagaaagagggttgaagaggcatctgcagctgcaaaacgtgctgaaaacttggatgccatattgaaagctgcagagcttgccgcggaggctgtgttcagggcaggaaccattattggaatgggagaaccactaccttttaccctaagagagcttttggaagcagggccaaatggctattggaagtctgcaagtgtgaggaataaatctggaagtggtaatgataatctagtaacagaaacattggaggtagatgcacctgctaaccctagcaaatctggcagaaagcgtggtcggaaacctaaatatgatcaagcactaccgaattcagagccattttcaaactgcaaagaattacagccatatggaatacactcaggacatggggttgtaggaaatgttcctgtcaccgagccaatggatggtaccaatgttacatcaccaataagcattgtctggaatggcattgaaaagggatctgcagttgaggttttatctgacaaggttgggtttggagtagcttggttttctgctaaggttattgatataaatgaaaataatgcttttgtcagctatgacaaccacaatggaactggtcctcgtgaagaatgggtgccattgagacaagagggggataagccgcctcagatacgtcttgcacaccctgctaccctctccaaattcaaaactaggaaacggcgcagggaaacagcaggcagttgtttatgggtcattggagatcatgtagacgcatgggtcaataattgctgttggcgagagggagttatttctcagaattatgagactgacgagacgaaatatgttgtacatttttcagttggaggtggtggtgaatccttagtagttgatgcttggagtcttcgtccatcacgtgtttggaaagatgttcaatggatagagtggtcccgtgcaagagaaaggaaatccaagtctaataagggcgattcacctcttgagaaacgccaaaagacagacttgcttcaagcaggtggcaatctatctgttgttgacgaaacgggaggatcttcaaaggacaagaatacaaacaatgcaaaaaaatcggatgaactaaagacattgtctttgtctcagggggaaattgttttcaacattgggaagagtgtagttgagaacaaatctgatgctcttgcattcaaacggcctggattacagaaagaaggatcaaaggttgtctatggtgttccaaaacatggaaagaagaagtttatggaagtaagcaaacattattacgcaggccaatttgacaagatttctgagggtaatgcatctaacagatttgtgaaacatctggtgacacaattgccaagggaacgtgaaaatgattccaaagttgatcctattagaggaaggagagtgggtgagacgaggtctagattacctaaacctacgaagtctcagagcgttcgagctagcagtgctcctggaaatgattccttccccatgcatgttcagaatacttgtgtttctcaaaggagttttggttttgcgggaagttcgacaagcacttccaacaatgaaaagtccacttcagaaaaaaataatcctgcgcttggtgtgggctttagaactgaagttccttctgtttctgaactgcaaactgcatctactgttcctactaatcgagctaaaaagaaatacattcccactgttagcaacataaacagaggtatactaaatacctctgaaaaggcaaattctgattctggtgagccccgaaggactacttctgattctaccgaacccagacggtctaacaggcgaattcaaccaacttcaaggttgctagagggattgcaaagttccctcataatctctaaagttcctggcgagaaggttcctaggagcaattacaaaagtgcatcgtcaagagggagagctcaatctcatggttgagtgaaggcaccacatagctaccttttgtgggatacctctcgttgtacatagctgcagccttctagtacggaagcaggataggattggagtaggaagtcttcattggagcacaaggattcggatgtattataaactagcttaagtgaattctgttaaccttttcttttacttgcctgaatcagacttttccgtgttgtagaatagtcattaatatcgtagaaacctccttttagtatgtgtgggtacaccgggaaagaaattgggtgtggtttaaatttatccgataatttaacatgtgctgtagcctgtgaaagacaatttggtttgccagcgtcgtttgatcattcattccttttctaaaaaaaaaaaaaaaaaaaaaaaaaaaaagaacctcgtgc

SEQ ID NO: 21245 - DNA, 370 bp, Zea mays
  Clone ID: MRT4577_119371C.1
gaccattacccgactttttaaataattttccacagggcacaaaacgggggtcttcgaaaaaaaacccccatagcaaccaaaaaaaacttacggggggggagagcacagccccccccccctagaccccccgaaaaaaaaccccccaaatcctctttaactaatggacaaacccaaaacgggacaatttttaagagtttttgcacccaggcgcaaagggttttaaaaagaaaaaaaggttttaattatggttaaaccaattgggaaaaaaaggagatgcctgacacggttcccccccaaaaaatttggaggaaccccaaacctgtggaaggaaaaaaaaaagaaaagggccgcaaaaagggtggaacaaaaa

SEQ ID NO: 21246 - DNA, 333 bp, Zea mays
  Clone ID: MRT4577_119372C.1
ctacttatctttcatcacgtcttaactcgtgacttccttactcatatacctcatcacctctacctcgcgtccacctcagcaccacgcgacatcttaccttccttgcgctaccggacctttctgcttcactgcagagaatattgatcgggtcttatactgtttgtcttgcatgatgagcagtgtagtgactctcgacatatataaaggtttctcaaagctcactggttcagactcacctttctagacaggcactcataactctttcctcactccctcttcccacacccatcgctcgaaagccaccatccaacaagcattcgattatccgccgaa

SEQ ID NO: 21247 - DNA, 439 bp, Zea mays
  Clone ID: MRT4577_119373C.1
gtttgttcgcagtgttctttcagacgtttgctcactggccttggcaagttccagtaagtctgcatgatgagctaactacctgcttgcattcggagggacgtctcatgcctatagtgatgccttgtaccccgccagagttttgtgcgtccactgtgacaaaaggcagcttaaaaaaaataagagaggaacttacacgtggctatgttttgacaaggtccattcaaatttcagtgtgcacaatcatttggaagtgagattgcagttttattctgggaaattggttggtggcaaggggatccagcttctatttgcaagatccattgaggcatgatttccagtggagctggctttttgaacccttcccatatgatcagaaatatcagcagtttctccgcattgctttacgtgcgccaactattgctgaactaggaaactgggc

SEQ ID NO: 21248 - DNA, 229 bp, Zea mays
  Clone ID: MRT4577_119374C.1
gtccgtaccggccccggcgcccgcgccgcccgtggtggtggacacgcatgctcaccacctgcatgagggagagcacaagccgtacttcccggcgccggcgcctcccccgcacgtggagacgcaccaccaccccgtcgttgttcacaagatcgaggaccacttcacgaagacgtaaatcccaccacaggctacagtggtggagaagaaaggcctcctcctcaccatcaag

SEQ ID NO: 21249 - DNA, 539 bp, Zea mays
  Clone ID: MRT4577_119375C.1
cggacgtgtgggcggacgcgtgggcggacgcgagggtggacctccaccacaccagaccggcgccttcaccctcaggcctccgcctctgtgtcaggttatctccgggtccttacttacggacgacgattcttctacgcgaaagattcctggctgcactgtcgactctcgtctcgtttttcgcgtgcatggtgctggacggctgggagatcgcgatgggcctggatctggggctggacactaggctgttcgccgcgcggagcgcccgagggatggacaagggcgctgaaccggcggggctccagtcctgcatcacgagccatcaggtggagcgcaagaagatcgaggtgttcaggcacgagcttcaggtctggctacgcctactcggcgacgtgatcgacgagttgaaggaggatgctgccaagagaggagagtacgaccaccgtgcactgacggtggacgacggtcacaaacggcagtggatgagcccagctcagttgtgggtggacagcgacgccaaattgggcgagtctgacaaagag

SEQ ID NO: 21250 - DNA, 1476 bp, Zea mays
  Clone ID: MRT4577_119376C.1
aggaagcagaataattgtcaccacaaggtttcaagctgttgccacgacatgctctgcacataaagatcaagatcatattcatttggttgatgttctttccattgaagacctcgtcagtggccgggtcaaaaccttgtccgagtgtagaggtaatagtgccagacaatcaaaccagaccaaggtgccagacagagtttggcagatgtgtggtggcttgccgttggccatagttaccatggcaggtgtggtggcatccaagccactgatgatcagagatgaatggattgccgtttgcaattccttgtttccggagccagaaaaatgtcataaaccagaggaatttatgaggataataaactattgctacaacgacttgcctagtgatctcaagacttgctgtctgtatcttagcatatttcctaagggccgtgaagttagcaggaagcggctgattcggaggtggatagcggaaggtttcgtcagtgagaagcaaggtttgagtgtggaggatgttgctgacacatgcttcaaacagctcatgtgggggaagatgatgaggcccgttgagcacaacagcaatggaagcgtcaaaagttgtcgggtccatgacatggtacttgagtacattatttccaaggcagcagaggagaatttcatcactgtggtcggtagccactggtccatgtcaacaagtagcaagaaagttcgtaggctcactatccatggcagtgaccctaaacgtgcaaagaatgttgacagtatgaacttgtcacatgtccgatcactgactgtgttcgagaacctggacaaactgcgcttcaaatcatttaaaactggaatagtgcaagtgttagatctcgaaggctgcaaaggtttcagggaaagcgatgccaacgtttcagacatatgcgaaatgattctacttaagtatctgagcctacggaaaacagacataaaaaatcttcccaataatatttccaagctcaagtacctagagactctcgatgttagggagacagaagttaaacagctgcctacgactgtagggcagttggaacggataactaacatccttggtggtgataagagaagacagagaaccctgaaacttcctaaggagctcaagggaacaatgaaatctttacgcatattgtcgggggttgagattgtggagggatcaacagctgcatcagacttcagttacttcactactctgaggaagctggcaatttacaggatccaccacaatgaagatatattcaaaaatttgctgtcctcgatccagtacctcagtggttattcactccaaactcttttaatcgttgatgagtcatctgaattcttcaagaccctggagtcaatgtcgtcatcccatctaactgacctgagagctctggagctgtctggcaaattgctttaccttccaaagtggctcgacactcttcaacatcttgtgaagttaacgctttcaacaac

SEQ ID NO: 21251 - DNA, 614 bp, Zea mays
  Clone ID: MRT4577_119377C.1
cccacgcgtccgctggagaccacgcatgactacttcaccagagctcaggcgaaggctggagcaatggctcttgcgggaacgaagactcgatggcgcaactgctggccaaaatcgaggaaggcaacaaggcgacccatcgacgcatggagaccgtacaagcttccctggcgatggtagaggcgacggtgaaaaacatgatgaaggaacaaggcgaattccaaaaatggcgaccggagacggaggtgaaggtctcagaggtggcggaggcgctgaagacgatccaggccaaactggatcagttcggaccatcgccatcgatggagttccttcctgacggggaacacatgaagaagggtgtgctgatctccgctcaactagagattccgccaatcgacgcgacacacggacaatttcgccaccacttttgctgaaaaccactagaggccgagtggtgaggagaatctccgaacacccgctctagtcggaagtatcccaactcctcctgagtcatttcctccattcatcgattggggatcactaggcaggaattcggtagccaattggtcacagatgagtggaccaaccatgtctaatatgatgtttcctgttttgat

SEQ ID NO: 21252 - DNA, 258 bp, Zea mays
  Clone ID: MRT4577_119378C.1
actctatatcggccgacctttttttttatttttttaattacttttttaacacataaaacttgggctcttggctaacataaaaagtcatttaagtctactagtacacattacacaatacaaagtttaaaacacatattcataactcacttgctcattaaatcaattagcacgcatagactttaacaaccaatacttatttgctcacatttcctaacaaacataatacatattgcttattaagaggaaccacttgctata

SEQ ID NO: 21253 - DNA, 303 bp, Zea mays
  Clone ID: MRT4577_119379C.1
cctgcgcttttgccggaacggttctttggagactgaaaagctggacataccggggatttgtctactcaaagatgcaaagaatatcaacggtgcaagggcacagaatacagatgacctgcttaaaagctataaaaccaccatgcacattgataaccacaactaatgtactctatgatgacttggtagatcctttggagggcacatgctacctgcccaccggccacagcttaacctgaaccatggcggccaaacctacctggatagggagggctacaacctttggacacagtttgtaccatggca

SEQ ID NO: 21254 - DNA, 252 bp, Zea mays
  Clone ID: MRT4577_11937C.1
gctcctgctggtgccgatgctgaggctgctgctcctgctggtcccgatgtgactcacatggccgctcatgacgcacccgccgatgatgatgctgctgctgctcgtcctgctggtgcagatgagcccgccgcggtcgagccggtcgccgaggttcaggctgctgctcacgaagaactcgccgctgacgagccgtgacgctcctgctcatgctggtcaccaagagccctccggttcaggcaagtgacgttgctg

SEQ ID NO: 21255 - DNA, 248 bp, Zea mays
  Clone ID: MRT4577_119380C.1
cgcgtgcgcaggaaataaagtcgtatacagcaccattaattgatttacaccgcagaccaaaacttggaccatcgaggcgctcatgggtctccttacatttctggctctcgctacaatctccccttacagttcaaaagctcgattagcttccctataccccccattcatttaaccgctgctggctatatgccggcaaaccccaatcttccacccaactaggctccaccagccattccataccccactca

SEQ ID NO: 21256 - DNA, 396 bp, Zea mays
  Clone ID: MRT4577_119381C.1
aagaaaaataaaacaaccgtggtcaccataaaattaaagcgcatagcacacattggatatattgggtctaacaaattatattacatgcattacgaaaaataaaaacaaccgggacatataataaataaagaaaaaacaatagttaggcttgcccattccatgtggttgccactcgcattccatgcaccgatgcacgtacatgtttctatatcggcaaggggcaacgcatatactggtggtcattccagagaatgaagagctttttgcgtttagttagaggagctactggtggggggcccctctgacaaccagtctggggatgaggaggaatctggccattaagcgggggcataagccgccgccttcggtgcatcggcggatgccatggacctaccc

SEQ ID NO: 21257 - DNA, 516 bp, Zea mays
  Clone ID: MRT4577_119382C.1
taaaaaaaaaaaaaaaaaaaaaaaaaaaaaaaaaaaaaaaaaaaaaaaaaaaaaaaaaaaaaaaaaaaaaaaaaaaaaaaaaaaaaaaaaaaaaaaaaaaaaaaaaaaaaaaaatttaaaaaaaaaggggtttccctttttgaggttccaatttttcttccctttttttggaacttctttttttttttttgggggggccttttttaatttctttggcgggggtttcccacgtttgtccttgggaaaccctttgctttccccatttttttggctttccggcctttcccctttttgcccgttgtggtattactgaaggggccctccccgttcttttttcctaaatgttccccaccctttttggtttctggacccccccttgtcgcgtgcttttagccccgggggttgtgtgggttcccctcagcgttcccgtttctttttccacccccttagcgcccgtttttttggtttttttcctttttttccgccccaggtgtgccggctttccccgttttgctt

SEQ ID NO: 21258 - DNA, 200 bp, Zea mays
  Clone ID: MRT4577_119383C.1
aaggcacgtagcaaagaggcatgggaacaacaagatttaccttgcctgccggtgtaacacatgagggcacccagaccccgctggttcacgccatagatgcttttgccgagaaacaaacccctaaaccatggaaggacatttcagtgacgatcaaagccctctacgaaaggaagctcctagactatgaaaccattgacgga

SEQ ID NO: 21259 - DNA, 306 bp, Zea mays
  Clone ID: MRT4577_119384C.1
cggggcggcccacgcatccggcaatcgatactttgatgtctctattttttatctatagacgataatccataccatgcgagggcgcgcgcgtagaaccgggttagtttactataaatactcctctctatcgaatcatgatgagtctgctttctaactttttttttagatatttactattatacctaaaaagatcttatctagaaaataaaagtactaacttgttgtcattttttaacgaatataatttatttgtaaaatttggttttttttcgatgagatattataaaatttaactctttcatataa

SEQ ID NO: 21260 - DNA, 151 bp, Zea mays
  unsure (1)..(151): unsure at all n locations
  Clone ID: MRT4577_119385C.1
gtgattataagatggtggaataattttggtgtcaaagagagaattctacatttttttaggagagaattttatccaaagtcagactgggaggcttactgttcttatgttgctatcagaaagtatatcattgaaagggttccctcatccgtng

SEQ ID NO: 21261 - DNA, 300 bp, Zea mays
  Clone ID: MRT4577_119386C.1
ggacgcggggggcgcacccggaaaacaaaaaccagaacccgccgccctaccagtcacccaaatacaaaataggataaacgaatggcggaaacacgggcccaagggcacccccgggcgaaacgggaatgcgtccaaaacacaccaaaaacaacgaccaaaagagaaaaagacaaaaaccaagggcgccgaacgactaaacaaaccacactaacctgggtggggcccatggccacgataaaaatcggaaaaccagaccccccaaccgaaaaaacaaaatgagcacaaccgccgggggggggg

SEQ ID NO: 21262 - DNA, 1399 bp, Zea mays
  Clone ID: MRT4577_119387C.1
tggctccatcgaggccgggccgggaaatctcctcatcagcttcagttctgagcgatcaacatcaccatcgacttgaactcaagcgactacagcaaacttgctgagactgcagctgatcatggggtcgatgacatggttggcggccgtgctggcagcactcgtcgtcgccgcctcctcatcggtggcatcacacgcctcgccgccggggaaacttgaggtcggtttctacgagcactcgtgcccacaggccgaggacatcgtgcgcaacgccgtccgccgcggcatagcccgcgagcccggcgtcggcgcggggctcatccgcatgcacttccacgactgcttcgtccggggctgcgacggctccatcctcatcaactccacgccggacaacaaggccgagaaggactccgtggccaacaaccccagcatgcgtggcttcgacgtcgtcgacgacgccaaggccgtcctcgaggcgcactgcccgcgcaccgtctcctgcgccgacatcgtcgcgttcgcggcccgtgacagcgcctacctcgccggcggcctggactacaaggtcccgtctggccgccgtgacggccgcgtgtccaaagaggatgaggtgctcgacaacaatgtccctgccccgactgacgaggtcgacgagctcatcgagagcttcaagcgcaaggggctcaacgccgacgacatggtcacgctctctggcgcgcacaccatcgggcgctcccactgctcctcgttcacggagcgcctctacaacttcagcgggcagctggggcggacggacccgtccctcgaccctgcctacgctgagcacctcaagatgcgctgcccatggccgtccagcaacgaccagatggaccccacggtggtgccgcttgacccagtcacgtcggcgaccttcgacaaccagtactacaagaacgtgctggcgcacaaggtcctgttcatctccgacaacacactgctcgaaaacccatggactgccggaatggtccacttcaacgccgcagtcgagaaggcatggcaggtcaagttcgccaaggccatggttaagatgggcaaggtccaggtgctcaccggcgacgagggagagatcagggagaagtgcttcgccgtcaacccacactactagtcgtcaagtttagctaattaccccgcgaattatgtttgtttatacgttccatacatcaacattatgtagagtgtttttcgttctcttcaagggtgtgaaatcaaacaagtttatcaagtaaaatggtttgagtttcaaaaaaaaaaaaaaaataggtaccatacatatatcgactttaataccatgtgttggagacttgttctcaaatgctatgaattaagggctaggcaacacaccagaaaaatattaaatgttgaa

SEQ ID NO: 21263 - DNA, 1147 bp, Zea mays
  Clone ID: MRT4577_119388C.1
ccaattgcccaaaagctgctagcactcatcactcttccaagtttgatcaaattggagggttgggaaagcctggttactgtaatttctagtgacatgcggtgttgggctgcccctgaaaagacggaggttttggtaattgaattgcttgggtcgtttggtgacaaataactatcttctgagtgtcttgatggtgcattaagatacctgaagcctgatgcgatttcctctccttcatcatacaccatcttcacccaaccaataacagaatcaaaattgcacgacgacatcaaagcacacaaagatattgcacattttgaaacggcatatgttgtgaaactacaccgcatagcgacacttgcacctccacaacaggtttttactttcacccatccaaatttctcaccaaatgccagcaaccaaaggtacaccaagttgcaatttgaaatgctgccagacatgggttcatgccttgtgcacggatttgctggctattttgactctgttctttataaggatgttcatcttggaatcgagccaaacaccgctacaccaaacatgttcagctggttcccgatctttttcccattgagaaagcccatctacgtgcccgaagggtctcctatagaagtgcacttctggcggtgctgtgcccccacaaaggtgtggtacgagtgggctgtgactacgccgaccccgtcgccgatccacaacagcaatggccggtcctattgggttggtctataataagacatcaagatcatctgtgttgtaacagagaggaaaaagaacagagatgatatggtttagttctatctgagttgagcagtgtgcttagtgctactggtttctgcctggagagctgatcaaaggatatctgtagcgtgttgttatctgatctgaaagggagtgcttgacctccaacgttgttcaactcgattttgctagcgtttcagtagggtttttctagacttgcaaacgttatgctttcgtcagattctgaagcgtctgcatcctttcctttttcatctatgtactgtggctcttgtgtgtgactggaaattcgttaccagtttgctatgctggaacatggaaaagaaaaaaaagagataattataattgtttcaaaaaaaaaaaaaaaaaagcggcc

SEQ ID NO: 21264 - DNA, 138 bp, Zea mays
  Clone ID: MRT4577_119389C.1
cgcggccgccctttttcatgatggccaagtgcgacacacgcaatggcaagtgcatggactgttgcctcatgatccgcggtgatgtgggccccaaagatgcgaccgctgctgtggccacctcaagaccaaactcaccat

SEQ ID NO: 21265 - DNA, 374 bp, Zea mays
  unsure (1)..(374): unsure at all n locations
  Clone ID: MRT4577_11938C.1
gccgagcttcttgcgcgccgcttcttccgtcgtcttcgtccatcactatagcgctaggaaaaaaagcgatacgaggcgtccaactacgtggacacactccgtcgacgcagggacggttccacggaccttacaaccacagtaccagcaccacccccacggccagcccgacggccggggcggcatcggcgggcaacttcccgcgcaacttctgctgcaggttctcctccggccactgccacggccacagccacggcggcggccgacgggggggctggtccgtcgccgcggcggcggccgggtgcgtcccggtggagttgccgctccgccagcgggcggccttgctgcacttcacgtgggccgtcatncctccccct

SEQ ID NO: 21266 - DNA, 1339 bp, Zea mays
  Clone ID: MRT4577_119390C.1
ctcgaggcccgggatctcctctcctcgtcaccatctcgatcgagctccagagctaaagcagatagaaagctcagagtgagagagcagcatctgatcgatcgaccaattgttcaccttcgtcatgaggtcgacttggttggcatttgccttgtcggcgctcgtcgtcgtctcctcatcagcggcacacgcacacgcctcgccggggaagcttgaggtcggtttctacgagcactcctgcgcacaggccgaggacatcgtgcgcaacgccgtccgccgcggcatcgcccgtgagcccggcgtaggcgcggggctcatccggatgcacttccacgactgcttcgtccggggctgcgacggctccatcctcatcaactccacgccggacaacaaggccgagaaggactccgtggccaacaaccccagcatgcgcggcttcgacgtcatcgacgacgccaaggccgtcctcgaggcgcactgcccgcgcaccgtctcctgcgccgacatcgtcgcgttcgcggcccgtgacagcacctacctcgccggcggcctggactacaaggtcccgtctggccgccgtgacggccgcgtgtccaaagaggaggaggtgctcgacaacaatgtccccgccccgactgacgaggtcgacgagctcatcgagagcttcaagcgcaaggggctcaacgccgacgacatggtcacgctctccggcgcgcacaccatcggccgctcccactgctcctccttcacgcagcgcctctacaacttcagcgggcagctggggcagacggacccgtccctcgaccccgcctacgccgggcacctcaaggcgcggtgcccttggccgtccagcgacgaccagatggatcccacggtggttccgcttgacccagtcacgccggcgaccttcgacaaccagtactacaagaacgtgctggcacacaaggtcctgttcatctccgacaacacactgctcgacaacccatggacggccggaatggtccacttcaacgccgcagtcgagaaggcatggcaggtcaagttcgccaaggccatggttaagatgggcaaggtccaggtgctcaccggtgacgagggagagatcagggagaagtgcttcgccgtcaacccacactactagtcaagtttaattatctaattaccccgcgcgtgttatgtttgtttatacgttccatacatcaacattatgtagagtgtttttcgttctcttcaaggctgtgaaatcaaacaagtttatcaaataaaatggtgttatttgcacaacatgcatgtatatatttagtgatgacacccgatcacaaatatagaagctcttttttcc

SEQ ID NO: 21267 - DNA, 1274 bp, Zea mays
  Clone ID: MRT4577_119391C.1
ccgggaaatctcctcatcagcttcagttctgagcgatcaacatcaccatcgccttcaactcaagcgactacagcaaacttgctgagactgcagctgatcatggggtcgacgacatggttggcggccgtgctggcggcactcgtggtcgccgcctcctcaacggtggcatcacacgcctcgccgccggggaaacttgaggtcggtttctacgagcactcgtgcccacaggcggaggacatcgtgcgcaacgccgtccatcgtggcatagcccgcgagcccggcgtcggcgcggggctcatccgcatgcacttccacgactgcttcgtccggggctgcgacggctccatcctcatcaactccacgccgggcaacatggccgagaaggactccgtggccaacaaccccagcatgcgcggcttcgacgtcatcgacgacgccaaggccgtcctcgaggcgcactgcccgcgcaccgtctcctgcgccgacatcgtcgcgttcgcggcccgtgacggccgcgtgtccaaagaggaggaggtgctcgacaacaatgtccccgcccctactgacgaggtcgacgagctcatcgagagcttcaagcgcaaggggctcaacgccgacgacatggtcacgctctccggcgcgcacaccatcggccgctcccactgctcctccttcacgcagcgcctctacaacttcagcgggcagctggggcagacagacccgtccctcgaccctgcctacgccgggcacctaaaggcgcggtgcccttggccgtccagcgacgaccagatggaccccacggtggtgccgcttgacccagtcacgccggcgaccttcgacaaccagtactacaagaacgtgctggcgcacaaggtcctgttcatctccgacaacacactgctcgacaacccatggacggccggaatggtccacttcaacgccgcagtcgagaaggcatggcaggtcaagttcgccaaggccatggttaagatgggcaaggtccaggtgctcaccggcgacgagggagagatcagggagaaatgcttcgccgtcaacccacactactagtcgtaagtttaattagctaattaccccgcgtattatgtttgtttatacgttccatacttccatacatcaacattatgtagagtgtttttcgttctcttcaagggtgtgaaatcaaacaagtttatcaagtaacattctttgtgtttcaagatttctacagcagtaggtaccatgcaaaaaaaaaaaaaaaaaaggcccctagggcc

SEQ ID NO: 21268 - DNA, 1317 bp, Zea mays
  unsure (1)..(1317): unsure at all n locations
  Clone ID: MRT4577_119392C.1
tcggnctcgtgggcggccgggccgtgggctcgatcgagctccagagctaaagcagatagaaagctcagagtgagagagcagcatctgatcgacccattgttcaccttcgtcatgaggtcgacttggttggcatttgccttgtcggcgctcgtcgtcgtctcctcatcagcgccacacgcacacgcctcgccggggaaacttgaggtcggtttctacgagcactcctgcgcacaggccgaggacatcgtgcgcaacgccgtccgccgcggcatcgcccgtgagcccggcgtcggcgcggggctcattcggatgcacttccacgactgcttcgtccgcggctgcgacggctccatcctcatcaactccacgccgggcaacctggccgagaaggactcagtggccaacaaccccagcatgcgcggcttcgacgtcatcgacgacgccaagaccgtcctcgaggcgcactgcccacgcaccgtctcctgcgctgatatcgtcgcgctcgcggcccgtgacagcacctacctcgccggcggcctggactacaaggtcccgtctggccgccgtgacggccgcgtgtccaaagaggaggaggtgctcgacaacaatgtcccagccccgactgacgaggtcgacgagctcatcgagagcttcaagcgcaaggggctcaacgccgacgacatggtcacgctctctggcgcgcacaccatcggccgctcccactgctcctccttcacggagcgcctctacaacttcagcgggcagctgggacggacggacccgtccctcgaccctgcctacgccgggcacctcaaggcgcggtgcccatggccgttcagcgacgaccagatggaccccacggtggtgccgcaggacccagtcacgccggcgaccttcgacaaccagtacttcaagaacgtgcttgcgcacaaggtcctgttcgtctccgacaacacgctgctcgacaacccctggacggccgggatcgtccaatttaacgccgcagtcgagaaggcgtggcaggtcaggttcgtcaaggccatggtcaagatgggcaaggtgcaggtgctcaccggcgatgagggagagatcagggaaaagtgcttcgtcgtcaacccacactactagctattgcaactacatacttcgagagactacctatagagctaaaaatagagattttgaagagagagaaaaaaaactactctcgcgagtgcaaataagactcttgtagacgctcgtattactctccgtggaaatctctagccagaaatcattaatataataaaggacaagtggcacgtccatcaccgcatc

SEQ ID NO: 21269 - DNA, 235 bp, Zea mays
  Clone ID: MRT4577_119393C.1
tcccgaattcgacggcacgcactcacgcgacccgtatcagcaaagcgtcagtgcgtacagaggatcgtcgaacagaacagcatgaggatggtgatcgctctcgtcgtgtgcctggctctgtcagctgccagcgcctatgcaatgcagatgccctgcccctgctcgaggctgcaaggcttgtacggcgctagctcacacctgacgactatgatgggcgccggcctactcgacccat

SEQ ID NO: 21270 - DNA, 731 bp, Zea mays
  unsure (1)..(731): unsure at all n locations
  Clone ID: MRT4577_119394C.1
atctcctctcctcgtaccatctcgatcgagctccagagctaaagcagatagaaagctcagagtgagagagcagcatctgatcgatcgaccaattgttcaccttcgtcatgaggtcgacttggttggcatttgccttgtcggcgctcgtcgtcgtctcctcatcagcggcacacgcacacgcctcgccggggaagcttgaggtcggtttctacgagcactcctgcgcacaggccgaggacatcgtgcgcaacgccgtccgccgcggcatcgcccgtgagcccggcgtaggcgcggggctcatccggatgcacttccacgactgcttcgtccggggctgcgacggctccatcctcatcaactccacgccgtcctcgaggcgcactgcccgcgcaccgtctcctgcgccgacatcgtcgcgttcgcggcccgtgacagcacctacctcgccggcggcctggactacaaggtccccgtctggccgccgtgacggccgcgtgtccaaagagganggaggtgctcgacaacaatgtccccgccccgactgacgaggtcgacgagctcatcgagagcttcaagcgcaaggggctcaacgccgacgacatggtcacgctctccggcgcgcacaccatcggncggtcccactgctcctccttcacgcagcgcctctacaacttcagcgggcagctggggcagacggacccgttccttgaccccgcctacgccgggcacct

SEQ ID NO: 21271 - DNA, 617 bp, Zea mays
  Clone ID: MRT4577_119395C.1
tctttatcttggatactgagaacaaaatatatcaattcaacggtgcaaactccaacatccaagaaagagccaaagccttggaagtgatccagcatttaaaggaggaataccatgacggagtgtgcgctgttgcaatcgttgatgatgggaaactgcaagcagaatcagattcaggagaattctgggtcctttttggaggttttgcgccaatagggaaaaaagcaataagtgatgatgatgttgttcttgaaactacatcaccaaagcttttcagtatcagtaacggccaactgaagttagaagacgctgtccttacaaaatcaattttggagaacaccaagtgctttttacttgactgtggggctgagctattcgtgtgggttggtcgggtaacacaggtagaggacaggaaagctgccagtgcagcagttgagaaatacattattaaagaaaatagaccaaagacaacaagaataactcaagtgatccaaggttacgagaatcatacgttcaagtctaagtttgagtcatggccagtaagtaacacgtcagggagtgccagcacggaggaaggccgagggaaagctacagcactcttgaagcagaaaggtggtgat

SEQ ID NO: 21272 - DNA, 373 bp, Zea mays
  unsure (1)..(373): unsure at all n locations
  Clone ID: MRT4577_119396C.1
tccgaccttttgttttcaacgagactgactgactgnatacggggtggggtgaatgaaagaaacggggcacgccactgaccaaccgaatataccactgtactctcctgtctacgctcctgtcgagactcccaaagcaaccaaaggaggacgaacagggggaggaagagaaagagatagagaaaaagaacgggttcaagatccagagacagaaacctagccaggcacctcctgatacacaggtatccagcgaggccagaagggaggcccagaggcagagacagagaccggaactgtgttcagggacctggtcaaggacttcgacgacaacgaagggcccctggcggcgccgtaggaggcattggatgatcccatg

SEQ ID NO: 21273 - DNA, 609 bp, Zea mays
  Clone ID: MRT4577_119397C.1
gcggcggcggcggcggccgacgcaggggcggctgtggcggcggcggggggcgcgggccggcgatggcgcggcggcgctgagggcgcggggcgggcggcggccggagagcggcgcgggaggaagcggcggcggtggctccatggcccgggcgcgctgagggacgcggctctcgcctcagcccggcggcggcggcggccgaacaatgaagctcctgaagccgacctgggtcaaccacaatggcaagccaattttttcggttgatattcaccctgacgggaccaagttcgcaactggaggacaaggacaggattctgggaaggttgtgatctggaatatgtctccagtcctccaggaggatgacgagaaggatgaaaatattcccaagatgctttgccagatggacaatcacttaggtattacagagtggccctttgcaggctttgcgtgttggcagagtgcccaaggttagcacatgtgtttgtaattagaaagataaggccccgtgcggcggtaactcccctcggcctgctgtctgaaggcacagatgttggctgcacacctgggtgagttattcggcagaagactcggcccgcccacagaaccatcttt

SEQ ID NO: 21274 - DNA, 2366 bp, Zea mays
  unsure (1)..(2366): unsure at all n locations
  Clone ID: MRT4577_119398C.1
atattccgttgaagtcgaagagaggcatgcgctcgggaggtggttggctgcttcatcatagtccgtagccgcctgcgaggcccttcatatcttagaagaggaggaggaggagaagaagagcagggagaggagccaggcgcgcctctgcagcgatggaagtggcggacgaggtggtgcgggtgctcggcgccgggttcgacctcacgtccgacttccgcctgcggttcgccaaggccagcgaggggcggcgcctggtggagctcggcgaggacacaagggacgtgccgctccccggcggcggcggggccacgctccgcggggtgccgcgcgacgtcggcgtcgacaagggcgaccgcatccgcttccgctccgacgtcctcgagttcaatcagatgtcagaattgcttaatcagaaatcttcagtccaagggaaagttccttcaggctattttaacgctctctttgaattaagtggagcttggttgactgatgccaaagacaccaagcatctagcattcgacggatatttcatttctttgtacaacatgcacctaaaggcttctccattagttcttcgagatgaagtaaaaaaggctgttccatccaagtgggatcctgttgcattatcatggtttatcaagacttatgggacacacatcattgttgaaatgggaattggaggtcaggatgtcatatgtgttaaacaaagtcattcttcaacagtttcaactgctgatcttaagttgcacctggaggatcttggcgatttcttattttctgatgggaagaaccactccccaatacatcgtaagacaaaggatggcaagagcacggtgcctgatgtttttgtcaggatagtgcagcattctaataacctgcacctttctagctactctgaaacatcaaccaaggatggactgacagttacctgttctaagaggggaggagaagcatacctacccaaccactccaaatggctgcaaacagtgccaaagaaacctgatgccattatgtttaaatttgtccccatcacctctcttctaactggtattcctggcagtggttacctcagccatgccatcaatttatatcttcgctataaacctgatcttcaagacttgcaatatttcttggagtttcaagttcctctacaatgggcacctatgttcaatgagcttgtccttggacctcaaaagagaaaaggctcgtacccttcaatgcagttcagatttctcggccccaaactccacgtcagcacttctcaggtatccagctctcagaaaccggttgttggcctacggctatacctggagggcaggaagtgcaaccggttggccatccatgtccagcacctctccagtgttccaagcatgatcgcagactccgtggcgtcttcaatgtcagaatggcgcgagtcccaggacagcgacccagggtacatcgaggcaatccagtggaagaactactcgtgcgtctgcacctccgccgtcaagtacaacccggagtggcacaagagagcccccggcggagtgttcatcgtcactggcgcccagctcgtctcgaagggggcctgggccaagaaggtcctccatctgcgcctcctctacacccacatccccaactgcaccatccagaggaccgagtggaggaacgctccggcggcgtctcagaaggggagcttcctgacgacgatcagcacgacactgagctcccctttcacgcagcgtgctgacacccaccaggcgaaacatgagccggcggtgcagctgaactcaggtgtctaccccgacggaccgccggtcccgctccggtccaggaagctcctcaagttcgtcgacatctcggaggtggtaaaagggccacacgacgtcccgggccactggctggtgatcgcggcgaagcttgtgaaggagggagggaagatcgggatccatgtgaagtttgcactgctgggctatgaagggcagtcgcagggtaacagtttcatgagctgaagtctctgtacataacaacggctggctctgatctttgtagatttcaggattttggaagaagcacatgattaggatttttaatactggatttttttttgtgtgtggagtcgacaggaactgtgtggagggcagtcggaaaatagaccaatcaccgctttgttaggaatgcctgtggaattcccgtggcagtataattagagcacgtagttgtaaattgctcctttgtttacaaggtgtgttttatttcagtaggaaacacctcagttaagaattactggcccgatattttcatttatatttatatggtgcggaattaccccccaaaacnnnnnnnnnnnnnnnnnnnnnnnnnnnnnnnnnnnnnnnnnnnnn

SEQ ID NO: 21275 - DNA, 339 bp, Zea mays
  Clone ID: MRT4577_119399C.1
ggcaggttcatatggcagtggtcctcaatgaatatggtggaactattggtattgtaacactagaagacgtagtggaagaaatagttggtgaaatcttcgatgagaatgattccaaggaggaaatccagaagaaaacaggctatatagtaaggcggggggatggaacatttgatgttgatgcaaacacatcgatagatcacctatctgaagagcttggtatcaaaataccagagggacatcagtatgagacggtgtctggttttgtctgtgcatcttttggctatattccagaagaaggtgggagaatgcttgtgattcttgaaaagaatttcagagaag

SEQ ID NO: 21276 - DNA, 1287 bp, Zea mays
  Clone ID: MRT4577_11939C.1
atgtctgaaatgaagagatcaataatgcaccttgaggatactgagtcagacgaggaagttgaccatgacatgcttattatgatgggtgagtacaagaagaggaagaataagcagtataaaagacgtcgaggttcagtttttggacaccaggtctatgatcggagtagagctgagaatgatatgaaattatatcaagactactttgctgaacatccaacatatcctgagaaatttttccgtcgacgttttcggatgagaagacctcttttcattcggatagctgaacaagtagcacaacacgataactactttgttcagaaaaaaaatgctattggtgtcagtggtttttcctatttgcagaaggtgactgcagcatttaggcaattagcttatggagtcctagcagattatgttgatgagtacttgaggattggtgaaagcactgctattgagagcttacggaaatttgtcaaggctatctgtgaggtttttggcccagaatacttgagagctccaaatgaagatgacacaactaggttacttagtattgccgaacaacgtggatttcctggaatgcttggtagtattgattgtatgcattggaagtggaagaattgtccaacagcttaccaaggcacatattgtggtcatgtgaaagaaccaactattatactagaggcagttgcgtctcccgatttatggatatggcatgctttctttggactaccaggatcacttaatgatataaatgttttgcatagatctcctatttttgacagacttgcacaaggcgaggccccaacagttcactatacaattggtgggcacaattacaatcagggttactatctagcagatggaatctatccaacttggtccacatttgtgaaaacaatcaaggccccagtaaatttgaaggacagaaattttgctaaagctcaagaatctcagagaaaagatgttgaacgtgcatttggagtattacaagctcgcttcgccattgtacgagttcctgctagaatgtgggatgaagcaactctaagagacattatgcaagcatgcataataatgcacaatatgataattgaagacgaacgtgaattaggtcgccaagaggcaccctatgacaagggagatgatgacacaagtggctgggtttcacatgaagggacttcaaaattttcattcttcttgaagaagcataaagaaatccaagatcctaaattgcacaaccaactacagcgagatttggttgaacatctatgggagcggaaaggagatcagtag

SEQ ID NO: 21277 - DNA, 993 bp, Zea mays
  Clone ID: MRT4577_1193C.1
atcgtcgagccccctatcgcggggttaccggtgatctcgtccgctcccagccggatacctcgttccattcaaaggcgcccctggcgtgggtgtctaccgaaggcgatccatacttcattctcgacaacgtcaacgagcgagatgtctgggctgagttccaggcacaggcccatcgccacccaagcatgttgcttcgatcgaacgagtagttggcctagaggagcgccgaagtggccaacctgacgtcccggtgcaagggactgaaggaggagggtgtagccgaccgcaaggaggcctgtcgactgagggctgaggtccttggtctgaaggcagaggcagaccaccgtgaggaggtgctacggtgggcgcaggagggcctccaagcggtgacggaggaacgtaactccctcgccaagtccctggaggacgactggtcctcgggtcaagccctggccgcccaaatagaaggtcttgagaagagtctggagggcatggcttggaccgtggagcaacagggggccgaggcggtggcagacctctttcaagacctcgatgtggtgggcatgcctcgggttggacccatgcggccttgcatgcaagccctgggcgacttcgtatggggtgagctccgcagggctgtccacctcgggtgaagcgagccctggtggtggtcgcttcccactacgagattgacctcgagcgggtgtgcgacggcttcgtacttcccgacaagcccgagctggctgctgctgaagggcagaggctgatggacgtcgtcgaggggccgaggactttgtgggctcgtcacttcgaggacgaggcggtgcctctttccccatcgcatgtggccgccgagcctcctgcgagacctcctccagcggcgtgaagatggccctagccatgcggggaattatcaatgtttttgtaatatatgctaagactctttgcaaatactaagtgtttaaactcaaaaaaaaaaaaaaaaaaaaaaaa

SEQ ID NO: 21278 - DNA, 2194 bp, Zea mays
  Clone ID: MRT4577_119400C.1
cgccttcctggcttcttcctccccagcacgcacacgcacacgcacacacccagccttttggctgcggtggcgccgtcagagagagaaaccgagctctaactaactgaagtggcggccacatagctagctactcttctgatcctgagcgcgcacgcgccatggctcaggaggacgtgcacctggacgacgcaggcctcgcgctgggcctgtccctcggcagcggcagcggcggcgcctctggtgcggcgcgccacggtggtatcagccgccggctgagcatggaggtgcggctgccgtcgccgcacccgctgtccgtattcattccttcctgactttcctcctcccgcacgcagcgcagcttgcaacccgcaacgaaccaaggccgcgccgcgcgcgccctgccggccgtcaggaaacccatctaactgaagtggcggctacatactgctgtgctagctgctagctagctactcttctggtcctgagcgcacgtacgacatggctcaggaggacgtccacctggacgatgccggcctggcgctgtgcctgtccctccacggtaccagcagcagccggctgagcacggaggcgccgcgcacgctggagccgccgtcgctgacgctgagcatgccggacgaagcgaccgcgaccgcgaccggcgggtccggcggcagcggcggggccgcgcgcagcgtgtcgtcgcggtcagtggagggcgtgaagcgggagcgcgtggacgacgccgagggcgagcgggcgtcgtcgacggccgccgctgcgcgggccggtgccggcgccgagaattcggcacgagcgacagctccatcgattcatccaccgctatctctctctctttcaactgcaagggaaaccgagctcaaagtggcaaccatcaatggatattatggcgcttaatgcgagagacgaggagcagtacgggaacaaccatctcgggctcgggctgagcctcagcctcggcctcggcgtcgccaccgcggctccggtcgaggtcgagcccccgccaccgcccgcggcggcggcagcagcagcagcagcgagctatcagcgtcgcgcccatcacctccctccccgcgccgtagtggtggaagtggaacggccccggtctcttcttcgggacgacgatggatccatctctggagaggaaccagcagcagcagcacccggcggccgcgcgccacggccacgagatgccgttcctgcggggggtggacgtgaaccgggcccctgccggggagaccaggaggggtagctgcagcgaggacgacgaggagcctggcggcgcgtcgtcgtcgccaaacagcacgctctccagcagcctcagcgggaagcgcgcagcgccggcgaggagcggcggagaggtggccgaccacaccccgagagccggaggcggcagcgacgacgaggactccggcggtgggtcgcgcaagaagctccgcctgtccaaggaccaggccgccgtcctcgaggagagcttcaaggagcataacacactcaaccccaagcagaaggcggcgctggcgaagcagctgaacctgaagccgcgtcaggtggaggtgtggttccagaaccgcagagccaggacgaagctgaagcagacggaggtggactgcgagttcctgaagcgctgctgcgagacgctgacggaggagaaccggcggctgcagcgggaggtggcggagctgcgcgtgctcaagctcgtggcgccgcaccactacgcgcgcatgccgccgcccaccacgctcaccatgtgcccctcctgcgagcgcctcgcctccgcgtccgcgtccgccgaccaggcgggccgtgcagggccctgctggggccctctccccgtgttcgtcgacggcccagcccggaggccgtgatccacgaccacgatatggcatgagatggatgcgcttgctaatcgctaccgctagctaagtagctagtgctaattagggctggatcttctttttttctttgtttggttcttattatactcgcaggctattacagcttagtagtgtttattagtccgatatgataaaaatcttcgttgtttggcagtgttttatttgctgaaaaatagataacgatgtcttatgtctttgtactcataagtgatgcaaaattgtcttactactactttgcatatataaggtttcagttgtttgcagaaaatcgcgttggc

SEQ ID NO: 21279 - DNA, 470 bp, Zea mays
  Clone ID: MRT4577_119401C.1
actttcctcgtctctcctcggcggcttctgccactatgaactctaggactgagatttgccctatctctgcttgtgagtagaagcttcatcttgcgccatggagtaacgagaagtccaacttcaagattgtggccattgcccattactgctctggcaagtcgaacaccaccctctatgtgatatacaagattgtaacgcattgaccactctaaaatatacaagctggataacgaatgtgcatcgtagattacttatgggtttttcgaggatattagagctctcgacaagaatctagctgacagagaaatgctatatcaacatctcgatcatagctctgtgataagctgacactgccatgtatcactgcctctccattaatcgtgcactgaaagcgcttcttcatatataacatgatcactgtgatctccgagcttgactgcgatgtcattatcagtgactccacctatgat

SEQ ID NO: 21280 - DNA, 1901 bp, Zea mays
  Clone ID: MRT4577_119402C.1
ctaagtgcaacattttaaccagctgcggctcgacacagggctctgcccacgcgcaccataggtctgcggcacggggttgacgtccggcgagccattcccggttgagcgggatgtattctgtccaggcgaggtcgtgttcaggttccacgcgaactggtaaagtccccaggcccgataccagggtattaacgacggtgaaccgcggatcacaccggcagcagcctcactggattctggcgctgagctcccagtgatccgtcgtggttgcagaggagaaagagaaagcggtggatgtagggagagggaaggggtatgtattttatacacccaggtgaccgaaactccccccggaacaaccggatcgctcaaacagatcagcgcgattcctggcttcacggcagcaaatcccagcgacccgcgaaatccatgggtctgttgagctcgtatcgggaggggaaacgagcgtgcactccacctcagacacacggtcgcgcagggagtaaggggtgaggagaggattagaggcaccctgccttggccataaccacattgcgatgaattccccagaatctcgtgcggttgaatgagtccatattctgtgcttaagtccatactcactgttaaactggtgataaacacctgggttgttacatccatacccagtgacttggtgtgccatggtgccaccgtgagccaaacggttgcccaacccgtcaatatgagcttccccatgtttttccccatgatcttagcttcgggtagcctcacttgtatcgaatttgggaaccagcgtgcgatcgcggcctcatcggcgataccgccaccacgatactcggcggcgccgccacgtctaaggctagtgtaacacctgcgatgcaatgcatatgacaaattgagtttaagttccatatttttaatcatttgagtgtccgagctgctcatgaccgtgagcacggctagtataccagttttacactctgcagaggttgcgcatctttacccacaagtcatgttacccatattccaagagacggccaatcccatacacctctaccgaggaggcgaggcagggtaacactacgaggcctttacaaagttccactagcttcagaaaacccgctacagtttataggaagctccaatgcaggaatcccccgcatgaccgccatcgcagcaaaatcatcccaagggtctccctacactgaccactcccctaccgcccttgccccgttcgggtatggtagtcctccactagctttcctaattagtcagccaagggcgtccataaacccttgtggtagcactgttttcccgggtggttctccatgttccaattaacataatgatcttatcatgaacagtaaatagcaattgataataaaagtataatcatgaataaaatgtatctccatacccataaccacataaagcaatagcaggtactaccaaaaaattcagtggtaaacaaggtatgaagatagtcaaactagggtaacctattgggtcccatcaaaattaacctatgcagatcattatgattaataagagcatgattggataaaaagaagtgatcaagggcacaacttgcctgggacttgagattccaggtaccaacttgctcttcagctgacttgtaacctcgttgtcgaagttatcgctagagttcgggagggaactcgaatttcgatgagctggtcatagcggcttatggctacgagcttggctgaggtcagtgaccggcaaggaatcttcggccctctcgtctctgtttgctcacgaaaaggccatggacatcttctgcatgcacgaccagagttcgcacgacgacgcggctaacccctgttcttctctctctactactctgcttggctctcatctcatggcgatggtggtgctttgtg

SEQ ID NO: 21281 - DNA, 1548 bp, Zea mays
  Clone ID: MRT4577_119403C.1
ggccgcaaattttttttttttttttttgtaataacagagtgtatagagataaatgtcacaataatcataaatgtacttattacatagcagaagtcttaccaaaaataaaagataaatataaagcaggatctaaacattaaccttggcgccagaaagtcgtctaggagacgccacctagatcaagtcaaaagcctcagtgttaggcggctcctcttcgaccacctgttcttctcctgtggggggtgtgagacaccaagagtcagttcacatacgttcatagctcaacaagttatggggaataatgtgcatgaactcaccaaaggtgagagttcatgtggtgtgtaaggctgatcaacagaataaacgctgaagctgagcattgcttttataagttggtcagatttttattagcagttactaagtgtaagtaaataccaacccatagtaataataaataaaagtaatagtaaaataatcccagatgcaatgaaatgacaggttaagtttaagttccataatttaatcatgtgagtgtccgagccgctcatgaccgtgagcacggctagtataccagttttacactctgcagaggttgcgcatctttacccacaagtcgtgttacccatttgccacggagttgatcagactccatacacctctaccaaggaagcgaggcagggtaccactacgaggcctttacaaagttccactagcttcagactacccgctacagtttataggaagctccagtgcagggttcttgtctgaccgccatcgcagcaaaatcaacccaaggacctccctacactgaccactcgcctactgcccttgccctttcgggtaaggtagtcctccactagctttcctagttaatcagccaaggacgtcccattccacccctatggtggcacgtgtttctcaagttaagttcgatgttccaattaacatagtggtcttatcatgagcagaagtagaacaataataaagaatgatcaagtgtaataattatctcaacacccaaaaccatatatagcaatagcaaagactacccaaaaattcaagggtaaacaaggtgaaaagataaccagactagggtggcctattgggtcccatcaaatttaagcctatccatgataaaataattatagataacattattgggtaaataagtggtcaagggcacaacttgccttcaatgagctcctgctcagcaacttctacctgctgaacaccagaatcctcggccactagctcgtcgacgattgtgcctcgcagtgccctgaccacggggagatgttgttctcctacagcggtcgcgctccggcgagcagttccccgaactctggtgacctacacgcccagggaatcaatcaccagcgatctccgcccgcgatagaacccatgtgacccctccctgagcacgggacaacgatgactacggaaattgagctcagcggcctccactccccgcacaaacgctctctgccaccggcggcttctttccacattagcttaattggatcccggccggcctcgaggtacccaatg

SEQ ID NO: 21282 - DNA, 436 bp, Zea mays
  Clone ID: MRT4577_119404C.1
agaaatcgggggtttcgagttctaaaaagtcccaatcaaagtcgaacaagaagaaagagaaaactcggaagaagcaaagttgtaagtctagcggtgaaaagaacaagaataagacaagttcggaaggaaaatatttggaacaaccagactcttgctacgaaagcaaagatgaagacagttggagtggtaacagtagtagttcattatcgaagagaccaactcagcatgcttttggcgcaacgagtcgattttcaaaggatacagtacactttgttcaagatgaatctagtcgttactccaatggacctatcatggataaagatttagaagagtgggaagcagatattgaggcggaagtggaagctttccgtaagagactcgaggaacttagtgcgccattgaagaataagccaaaggtcggtgcctttccgcatcg

SEQ ID NO: 21283 - DNA, 466 bp, Zea mays
  Clone ID: MRT4577_119405C.1
tcgacggtatcgataagcttcttgttatccttgataatcaatattaattcactaatagttcgactatgtggttgaccaggcactggatcaagtggcttctactgatctgaaacaggtcatgcttgttaaggcattattaaatgctcgtgacacactgcttgcggagctgcaaaaacttagtgctgccattaaccatgctgttcatttgactgaatttacctccaaaatgaacgatatgaagttatttgattcctttctgcaagaaccggttgctgctgatgctgaagattcagcacaaggcaagccacaaaatggtcttgaggtccttgctttatgttattgaacagtgtactcttattcttatttttgtgttttaatatattaaaatgataacacctttgtctcttaacagagagtaaatggcagattagagtttcaaagtgatagattgctccataatttatcg

SEQ ID NO: 21284 - DNA, 900 bp, Zea mays
  Clone ID: MRT4577_119406C.1
ttattacataggggaagtcttacaaaaataaacgagaattataaagcgaactaaacattcatccttggtgccataaagctgactaggagacgccacctaaatgagctcgtacacttcattgtaaggatcctcctggaccacatgttctttctcctatgggggacggggtttatatattgcaagggtgagctcacaaaagatcatagctcaacaagttgtgggtaataatgtgcatgactcaccaaaggtgggagttcatgtgaagtgtaaggctgatcaatgaaataaaggctgaagctgagcagtgcttttagaagttggtcaaaattttataagcaattactaagtgtaagtaaataccaaaccatagtaataataagtaaaaaaaatagtaaaataatcccagatgcaatgaaatgacagattaagtttaagttccatagattaatcatgtgagtgtctgagccgctcataaccgtgagcacggctagtataccagttttacactctgcagaggttgcgcatctttacccacaagtcgtgttacccatttgccacggagttgatcagactccatacacctctacctaggaagcgaggcagggtaccactacgaggcctttacaaagttccactagcttcagactacccgctacagtttatagaaagctccagtgcagggttcttgtctgaccgccatcgcagcaaaatcaacccaaggacctccctacactgaccactcccctactgcccttgccccttcgggtaaggtagccctccactagctttcctaattatcagccaagggcgtcccattaaacccttgtggtagcactgttttcccgggtggttctccatgttcccattaacataatgatcttagcatgaacataaaatgat

SEQ ID NO: 21285 - DNA, 338 bp, Zea mays
  Clone ID: MRT4577_119407C.1
gtgaaccgccgaaggaggacaaattagcgagatgggttcatgaaaatgttacaagccttgacaaaacctaactatacattggttgtcctatttcaaaaaaaaaatctagattttttttgtatatcagccggaaataatggacaaaaactttccagcccaacttacttggttcacatcaactctatttaacattaaaggctcatccataatttgatcatattagatccaacttccttgctttttaagaacaccaaccaaattttgaagggaacaagaccaacagttgttcaaatggctaattgactccttgaggcgctgccaatgcattatcagtgcat

SEQ ID NO: 21286 - DNA, 421 bp, Zea mays
  Clone ID: MRT4577_119408C.1
cagatccgttgtcgagatacgggaggtgctgcgagggtctgactcgcgggtgggcagatcggatatggtggctccgagtgttgagacccgctgctcatggagcggccttgcctgggccactgaccaccactccatccacatcgaccttaaggacatacggctatgccctcgaggcctacatcatcctctatgcgggagactcagaggtcccgcggttctggctcatttgctttatccacggaggacgcgatgctgaaagccatgaagggcatgaactgaaaagagctggacggccgctccatcaccgttgaccatggcaagtcctgcggttgacgtgcaggaggccgcagcgcctactgtggaggacgccgatgctgcacctacggctgtggccggcgctgtgatggggcttgtagctacg

SEQ ID NO: 21287 - DNA, 334 bp, Zea mays
  Clone ID: MRT4577_119409C.1
cccacgcgtccgcacgctgttattgccaccttacgagcatcttgctgaagactgtgggcgggctggaactgcgggtggggtactagcactggactactccggggcaccacatcggcttcatcgatatgtaccgcctcaccttcttcttcgacaacttcggacccaacgcgactaccttcattgtgccctcagtgatcttcccggacagattgcctgttacgtgccacggtatctcaactgactcacgaaagctggagcgctatcatcgtgatgcttcaagttcctgtacctggcgcaaaaccgtttaccgggccaagacagaccactgataccc

SEQ ID NO: 21288 - DNA, 582 bp, Zea mays
  unsure (1)..(582): unsure at all n locations
  Clone ID: MRT4577_11940C.1
ctcgagnttttttttccttttttttttttttttttttttttttttttttttttttttttttttttttttttttttttttttttggggaagggccccggtggttggaacgacctttacccccctttggggtttttggccaaaaagccctaaaaatttttttgggggaaaaaaaaaaaaacaaagcccgggggaacccccctcccaattttttttttttacaggggggggggccacatttaacccagggttcccggccccaatgggctcccaaaaagagggtggccccggtggggtttttgcttggggaacccttggttgattttttggtaaggcagggggggcccagggaacccaacctggaatggtttggggaaacccccaaagggccaaaaaaaatttttacccctttttttttgggggcttttttgcccagggaaggaaacccccctgggcccgggcctttgggaactttgcccaagggcccaaagcttttttacccccctacccgggggttttaaacaaaaaaaaagggggggcccgggcaacaaaacataagcctcccagggccgcggtttaatggcc

SEQ ID NO: 21289 - DNA, 259 bp, Zea mays
  Clone ID: MRT4577_119410C.1
gccccgtcgccttcgtagctcgtctaatttgagcggcccagaaaaaaaggattgcgcgtcgtgactgctgatttcactctaaagtagactggtcccgctcgatttcacccaaaaccatccaccggcataggccggagagacagcgtataggcaggcaaggatgcccagggtgaggaatctgcctcagatgttcacaacgatgtttctggaggagcaggtcaaccaggggctggtggcggtaagcctgaccacagtaggc

SEQ ID NO: 21290 - DNA, 140 bp, Zea mays
  Clone ID: MRT4577_119411C.1
gaagaatgcacactcccttcctgtgaggccaatccaatggcgccctggctacttgccaccttctgcgcctcacccttactactacccggcagcagccctaggccgatgggcgctgcccccacccgccgttcctgactgca

SEQ ID NO: 21291 - DNA, 353 bp, Zea mays
  Clone ID: MRT4577_119412C.1
aaaacagccataattattctcaataacccggtagcaatgcagggggaattaacaactcttacaacatcaggggttggaaaccacacaattctttagaacagacccccataacacgattgcgggggcaactttcgggagatcacgggataagggcagcacactggcctgatgctgggtaataaacaaacttttttagtactcggaacccttggggccatccttgcccttattgaactcagcaccgacctccttgtagtcctttttgagcgccgccaggtcctcacgggcctcaaaaaactaacctttcttcatacccttaccgacgtaccaatgcacaaaggcacccttggcgt

SEQ ID NO: 21292 - DNA, 318 bp, Zea mays
  unsure (1)..(318): unsure at all n locations
  Clone ID: MRT4577_119413C.1
ccgcttcgttttttttttttttgtttttttttttttttttttnccttttcaccccatgaatttttaattaatctaccaaacaatacctagcgttttggccacaaaaaaaattagtcccacttttcaatccccaaattattattcccacttgatcacacattgtgctccgggtacattatcttttccccccaaccaaaattcccaaaaccctttgccaaccaaaaaaaaaatttttccaatcttacttttttttaaagtctttatttgccttttccttccaactaatttaatcaaaccaactttcttaaccgccctttt

SEQ ID NO: 21293 - DNA, 333 bp, Zea mays
  Clone ID: MRT4577_119414C.1
ggaagcaacaacgtaaacagccataattattctcaataacccggtagcaatgcaggggaattaacaacttttacaacatcaggggttgtaaaccacacaattcttcaaaacagacccccataacacgattgcgggggcaactttcggcagatcacgggataagggcagcacactggcctgatgctgcgtaataagcaaacttttttaatactggtaaccctggtggccatcctggcccttattgaactcagcaccgacctcctggtagtccttctcgagcgccgccaggtcctcacgggcctaaaaaaactaaccttccttcatacccttacc

SEQ ID NO: 21294 - DNA, 359 bp, Zea mays
  Clone ID: MRT4577_119415C.1
ttttttttttttttttttttttttttttttttttttttttttttttttttttttttggaagcaacaacgtaaacagccataattattctcaataacccggtagcaatgcaggggaattaacaacttttacaacattaggggttgtaaaccacacaatactttagaacagacacacataacacgattgcgggagcaacttttggcagatcacgggataagggcagcacactggcctgatgctgcgtcattagcaaacttttttagtacttgtcacccttggcgccattcttgcccttattgaactcagaaccgacctccttgtagtccttcttgagcgccgccaggtccttacgggcctt

SEQ ID NO: 21295 - DNA, 601 bp, Zea mays
  Clone ID: MRT4577_119416C.1
cacggtggtgcgcgcgtacctggcgtccgacgtgacaaaggccgggttcggcgacctggacttcggctggggcaagccggtgtacggcgggcccgccaagggcggcgtgggcgccatccccggggtggccagcttcctcatcccgttcaagaacgccaagggcgaggacggcatcgtcgtgcccatgtgcctgcccggccccgccatggagacgttcgtcaaggagatggacaagctgctgagcgcgcccgcagacgcagaggcagagcagcagaaggatgcgttccccgtcatcaggtccgcgctctgaagtgagctctctgctgaggcagccgcgcgcacggcgccgatcgaaccatcgttttcgcttcgtgctacagcaagcatataggtaatcatcagcgggtcctgagcagctgagcttgtgtaacgtagtgggtgtgggtgtgggtgaaccatagtacgttgacgtgcgtggagctacgttgatgtatacgtatgtaatgcgcgcatttggccggctatatgggttgttgtgacgttgtatgtatattttggtaccttttcatccaataattcatatacacttcttcccttttcc

SEQ ID NO: 21296 - DNA, 434 bp, Zea mays
  Clone ID: MRT4577_119417C.1
aacctttgggctgatttatgtgcttgtggatgtgcgggcctgttgttgctgttcgcctctcgccgttgctgttacggggagaagggtcgtgagacgtcactgttagactaagaataagttacattttaagcttaggcatcgttgcggcgctttcgattttaagactaggactcatgacgccggtacgaagagaaagggcgccgacgagccttttcatcgcgcgtattccgctctccgggagaaggagaacgctcttagcgaggtctccgaggtcgtttgcaccgttcgtaataagcatacgattaagctcgtaggaaaggacgttccttattcctgggcttgggcctattttccttacgcttcctgcactaataagacgtccctgcgcgtcggggtcgacaggtcttagatcggaacgaagggcgttcccggta

SEQ ID NO: 21297 - DNA, 439 bp, Zea mays
  Clone ID: MRT4577_119418C.1
cgggcggggcgcagtcaactgcggtgggacaccccggaagcggcggcggtgcaaagcgcgcgacgcagagaagcgtaacttcaggccggcggtcgctctacagcgtcctgctccccgttctcgccggagatgcaccgtggcagtgctttctttacccttacttaatgaaggaaactgcaattcgactgcgcggcggtggggtctcggttctgactcgaggcttcaccttcacgagtgctggggggacaccgacgatacggctaaatggagcttgtcggctgcgccgacgtaatacactttgggcacgaaggacgaggggtgggacatcaagttcaaggtcaaatatggcgagacacttaaaaggtcttatggctgcgacagtgggagtcattatgacatgaatttacctgctctacgggcgaggagtgacactgccttt

SEQ ID NO: 21298 - DNA, 627 bp, Zea mays
  Clone ID: MRT4577_119419C.1
ggcagctggtgttctcgctcaaatagaaaagaacaacaaaaagagacaaggagtggaggtatatggagcattaattccttgtttcagaaaacactaaacagcgtgactcgttgaaggtttgaatgtcaaaacgactacttttacatgacgaattcgaacctctttttttttgttatacaatacagtggagcaaggacgaggaagaagccttcaaagccaaagtcgtggaggcttacgacagagaaggaagcccgtactactccactgctaggctatgggacgacggggtcatcgaccctgctgacaccaggcgggttctgagcctctgcctctccgcttcggccaagccggttccggaagacacaagatacggtgtattccggatgtgaataaatgtgtgtgagtaataacgcagacgtgtttaataaaaagctgcctgcacgcacccaatgtgtgtgcacaaataaaaatttcgccctggtttttctgtcgtcgaaatatgttgaagagtgttgttcatttcatatattactagatctgatgaatgggaagtgttcttcatttgatagtaggtatatgactgtgcattgctacggaattaatataataaaatataataattttggt

SEQ ID NO: 21299 - DNA, 445 bp, Zea mays
  Clone ID: MRT4577_11941C.1
gccctgggttgtttttttttttttttttttttttttttttttttttttttttttttctgtttgttcttgagggtatatatatctctataggctcaaaccagatcatcggggcccatttttttttttgttaccgcagccccaaccggctccaccaggggggggggggacacccctacaagagccccaaaacccaccccagagggggggggggggggatccccaacgggggaactctgttcctcttctcggtctgacacaccacaaaatgcccttgctgggcacccccttccggcccggttcttttggggcacccgcccccttggctgccttggcgggggaggccttggcgggggtcttgtctaccttgtgagggcgcccggggggcttgggcgactcggtggccggagcgacaggcgggggccggccctttgtcttttgtttgggc

SEQ ID NO: 21300 - DNA, 2567 bp, Zea mays
  Clone ID: MRT4577_119420C.1
gtggaattgccaaagctggagcaaagatgtgtcatggcagtttcctgtgctaaggttcctaaaattacaataattgttggtggaagttttggggctgggaattatggaatgtgcggacgtgcatatagcccaaactttttatttctttggccaactgctaggatatctgttatgggtggcatccaggcagctggagttctcgctcaaatagaaaagaacaacaaaaagagacaaggagtggagtggagcaaggacgaggaagaagccttcaaagccaaagtcgtggaggcttgggtacctcgaggccggccgggcaccgggcccaccacttcgcatcgacttccttgcaagaggcatctccgaagagcccacgggggctgggaatgggaagacactgcagcccagctccagcagcactacagcagtagcgccaccgaacctgaaaactccgaccccccacgaaatcgcggaacctacccacgagccgagccatgctcagccgactcgccgcggcgaggcgacagctactgctatccccggccgtcgcgtaccgctcctcctcggcagcggcgacggcgtcggcggtccacgagagagcagcgcccgcctcggcctccgtgctcccggacaccctcgaaaggggctccgacgcgtaccagcgcaacacggccgccgtcggcgggttgctctccgacctgcgcgcccgcgtctcccaggtgctgcgcgggggaggcgccgaggcggtgaggcggaacgcggcgcgggggaagctgctcccgcgggaccgcatcgaccgactgctcgaccccggcgcgtccttcctcgagctctcgcagcttgcaggctcagatgtttatgatgaagcattaccatcagcaggtataataactggcataggacctgttcatggacggttatgtatgtttgtggccaatgacccaaccactaagggtggcacatactatcctcttactgtcaagaagcatctgcgagcacaggaaatagcttcggagtgcaaactgccttgcatatatctcgttgacagcggaggtgctaatctccccaggcaggctgacgttttccctgaccgtgataattttggccggatattctacaatcaagctaagatgtcttcagatggtatccctcagattgcagtagtcttgggttcttgcactgctggtggggcatatattcctgcaatggcggatgagagtgtaatagttaagggaaatgggactatatttctagcgggtccaccacttgtaaaggctgctacaggagaggagatatctgctgaggaccttggtggagcatcagtacattgcaaggtatcaggagtctcagatcattttgcacaagatgaaattcatggacttgagttggggcgaaacattgtgaagaacctgcacttagctgctaaaggaacaaatattcagagttctgcttgtggttaccaagagccattgtacgatgtagaggaacttcgctccattgcaccagctgatgtgaaacagtccttcgacattcgttcaataatagcccgtattgttgatggaagtgaatttgatgagttcaaaaaattgtatggaacaacactagtgactggttttgcaaggatatgtgggcaaccagttggaattattggaaacaatggcattttgtttacagagtcagcgttgaagggctcccacttcattgaattgtgcgctcagcggcatattcctttgattttccttcaaaacattactgggttcatggtcggatcaaagtctgaagctagtggaattgccaaagctggagcaaagatggtcatggcagtttcctgtgctaaggttcctaaaattacaataattgttggtggaagttttggggctgggaattatggaatgtgcggacgtgcatatagcccaaactttttatttctttggccaactgctaggatatctgttatgggtggcatccaggcagctggagttctcgctcaaatagaaaagaacaacaaaaggagacaaggagtggagtggagcaaggacgaggaagaagccttcaaagccaaagtcgtggaggcttacgacagagaaggaagcccgtactactccactgctaggctatgggacgacggggtcatcgaccctgctgacaccaggcgggttctgagcctctgcctctccgcttcggccaagccggttccggaagacacaagatacggtgtattccggatgtgaataaatgtgtgtgagtaataacgcagacgtgtttaataaaaagctgcctgcacgcacccaatgtgtgtgcacaaataaaaatttcgccctggtttctgtcgtcgaaatatgttaagagtgttgttcatttcatatattactaaaaacgaaaaaaaaaaaaaaaaaaatttgatagtaggtaaaaaaaaaaaactagagaatagatcgctctctcctagtgcgagtccaggggcatgggcccaccctgttctgatgaatgggaagtgttcttcatttgatagtaggtatatgactgtgcattgctacggaattaatataataaaatacaataattttggt

SEQ ID NO: 21301 - DNA, 189 bp, Zea mays
  Clone ID: MRT4577_119421C.1
tcggttctagatcgcaagcggactctcgacggacacttctactgacaccgggtgccacgcctcgtcggatcgttccgtcgatacctgcggcgaactctggacatgtttgaaaactgccgagcttcgttacccgaaccggtcctagaggtgttagaggaaacccaagcctcaaccctaacctctagcaac

SEQ ID NO: 21302 - DNA, 190 bp, Zea mays
  unsure (1)..(190): unsure at all n locations
  Clone ID: MRT4577_119422C.1
cnaagcatntggcgnatcaagcctactacctaacctacacgacccctgtacatnngganacgccgtaanaacttggcatacnccacggcaattaacngccatgganggactgcctcancgactgagctggtacncggcgctntctctcccctccantaagctgccgttcctcngancgcctgntgaggta

SEQ ID NO: 21303 - DNA, 377 bp, Zea mays
  unsure (1)..(377): unsure at all n locations
  Clone ID: MRT4577_119423C.1
cccacgcgtccgcggacgcgtgggtccgaagctgaatggtagttcacgctgagcaacggcgattggcccgtgtggactcacttgtacatgaaactgtagtgccagccaaccagaataaatgtaaatctagtcggccggccttccaaagagaagttctttaggcctaggaaagaaatgtaatcctgttcttaagcttagcctccattaggggtccttcaatatccgattagccaatgaaattggtcttaggaccatggttttagtaaaccagttaatcaaatctatattcctggagttgcgtggcttaaaatnaaccttgatatatattcagcttcacaaaaggtggcagtatatacaaattttcttgtgaaattgta

SEQ ID NO: 21304 - DNA, 478 bp, Zea mays
  Clone ID: MRT4577_119424C.1
gatcttcccccctatctgatcagatcctttggatacggcgtcgcccatgctctccacggccatggcgccactccaggggggcatgctggagttctccgggctgaggagctcgtcgtcgctgccgctccggcggaatgccacctccgacgacttcatgtccgcggtctccttcaggacatacgcggtgagcaccagcggcgggtcgcggaaggcgccgacggaggccaagctcaaggtggcgatcaacgggttcgggcgcatcgggcgcaacttcctgcggtgctggcacgggcgcggcgacagctcgccgctggaggtcatcgccatcaacgacaccggaggcgtgaagcaggcgtcccacctcctcaagtacgactccacgctcggcatcttcgacgcggacgtcaagcccgtgggcgacagcgccatctccgtcgacgacaaggtgatcaaggaggagacagaccgcaacccctcc

SEQ ID NO: 21305 - DNA, 357 bp, Zea mays
  Clone ID: MRT4577_119425C.1
attaaaaattaattccctttattatccggggccgcaagagggtcccccccttttcattccctagatccggcgggggggggccttaattcggcccggcttttaccccctaacccggggtttgggccctagggggtagccccggggtttaacccaagggggccaagccctttcttggcgggccctttaacccattccccccggggggaaaggtcggggggccccgccggatattcctgggccttcacccccttggataggggcgggggggtcccggctatcagtttggcagggggccggatttctctctcgggggcttttgaatagacccgaaccccgggtggcccctctttccccggg

SEQ ID NO: 21306 - DNA, 210 bp, Zea mays
  Clone ID: MRT4577_119426C.1
actgcagataaagaacaccaatctacatatgtcataggcacctttctggttccttgtcgaacagccttgatgtgtattttcccacttagtggcacttactttcaaggcattgagggattctctgaccacacatccttcctcagcccagtgcgtggggaaggggacatgttgtttaactctcacaggctcatggtctttttcgggacttga

SEQ ID NO: 21307 - DNA, 260 bp, Zea mays
  Clone ID: MRT4577_119427C.1
cgtacacgtgaggcccaactgggcgagggacggggagttggagaccaaggattcctgatcaagggtgccaatggtggactatggctccaggtgctcaggcggcacacggagaagaccatagtagttgtcactagtaggaactgcggacttaacaacaattcatgtgatactaagacaagaatatataagctagcatacacaccagtacatgcaggaacatgaccgttgcaatgcacacggagccatatgtaacgtatacc

SEQ ID NO: 21308 - DNA, 1479 bp, Zea mays
  Clone ID: MRT4577_119428C.1
atggggatgatcgtcggcgtcgccctgatcgcaggctgggcacgcgccatggctcgccgcgccgccaaacgcagcaacaaggctgcggttatcagttcgttgggatctctcaaccgtgaagacgtgaagaaaatatgtggagaaagtcttccccagtggatatcatttccagaatacgaacaggtcaaatggctcaacaaacagttgagcaagctttggcccttcgtggaagcggcagcaaccatggtcatcagggattctgtcgaaccgatactcgatgattatcgaccaccagggatatcctcgctgaagttcagcaggctctcccttgggactgttccaccgaaaatagaaggcattcggattcacagttttaagaaagggcagattacaatggacatggacttccgctggggcggggatccaaatatcattcttgcagtcgagacacttgttgcttcgcttcccattcagtttaagaaccttcaggtgtacaccatcatccgtgttgtcttccagttgtcggacgagataccatgcatatctgctgtcgttgttgctcttctggccgagccaaaaccgaggatcgactacatactgaaagccgtgggaggaagcctgaccgcaatgcctgggctttcagacatgattgacgacacggtggcgtcattgatcactgacatgctccagtggccacacagaatcattgttccactgggtggagtcgacgtagacgtcagtgacctcgagctgaagccgcacgggaagctcactgtcactgtggtccgcgcggaatccctcaagaacaaggaactcatcggcaaatccgacccctacgtggtcttgttcatccgcccaatgttcaaggagaagaccagcgtcattgacgacaacctcaacccccattggaacgaaacgttccatctgatctcggaggacaaggagacgcagtccctaattcttgaggtgttcgatgaggacaagatgaagcaagacaagaggcttggcatcgccaagctgcccctgagcgacctggagatggaaaccgtgcaggaggtgaaactgcagctgctgtcgtcgctggacacgaccaaggtggcgtaccaccagttcaccaacgcagaggcgcgggaggccctggagctggagaagcagaccgtggatgagcggcggaaggtgaagagcgagacgggggccgtcagcggcgccgcggacgcggcaagcggcatggcgtccacggtcaccaacgtggccggcacgggcatcgcggcggccggcaccgttgccggcacgggtgtcagcgcggccggctccggcgttgggatggttggcacgggcatcggcgccgtcggctccggcattggcgcgttcggtagcggactcagcaaggccggcaagttcgttggccggactgtcacgggacctttcagcagctctaggcgcagcaccagcagcgttcccaacgtcgttgacgactga

SEQ ID NO: 21309 - DNA, 1650 bp, Zea mays
  Clone ID: MRT4577_119429C.1
ccggccggggagttgggcagcacaaactggcacgtctagcgtccgactagcaatctccaagagaggtcattgggaacctcgaggccggccggggtatgccagctgggactctggactagctagctagtacgagtagcggcattactttcgctcgcggctggctggcatggcgacctccaagaacagcagcccgtctctgtctccgctggtcgtcttcctgctcggggcggcttcggccaccgtgctgctcctcttcttcctgacggcgactgcgagccccgcgtggcccgcgctggaggccggtcctcgctctggctcaggcagcgtgcgctgcagtactagtactccacgagcaaacggcacggtggtcgtcgacgctctagagcaacacgccggaggagtaggagctcctccagcgaacgaggcgggcgcgtccggctccgatgacgatgcggggtttgcgcggatgctgcgccgagcggcgatggaggaccggacggtgatcatgacgtcggtgaacgaggcgtgggcggcgccggggtcgctgctggactcgttcctggagagcttccgcgtgggcgagaacgtgtcgcacctggcgaagcacgtcgtggtggtggccatggacgacggcgcgttccggcggtgccaggccgtgcacccgcactgccacctgctcaggccggagaaggcgggcctcgacctctccggcgccaagagctacatgaccaaggactacctggacctcgtgtggagcaagctgaagctgcagcagcgcgtcctcgagctcggctacaacctgctcttcacggacgtggacgtggcgtggttccggaacccgctggtgcacatcacgatggcggcggacatcacgacgtcgagcgacttctacttcggcaacccggacgacctgggcaacttccccaacacgggcttcatctacttcaaggcgacgccccggaacgcccgcgccatggcctactggcacgcggcgcggcggcggttcccggagaaccacgaccagttcgtgttcaacgagatcaagcgggagctcgcggacgggctgggggtccggatccggttcatcgacgccgccaccgtcagcggcttctgccagctgggcagggacctcaaccgcatcgccaccgtgcacatgacctgctgcgtcgggctggagaacaagctgttcgacctcaagagggtgatcgtggactggaagcgctacatggcgcgcccgctgtgggagcgccagatggggaagatcggctggacgttccagggaggaaggtgcatacactgactcactgcatttgcactgcacgcggtgcctggatggattggctcgattcaaatctgtaggacttgctgaaatccggggcaacaatcatcgtccaaccagcatatgcgtagcctgtcaaacacttaaaactcagaagcatttatgacatcttaattaactagtatgtgtctctttcagacacattgtttctgttcgtactacactgtagtacgtgcgagagacgtgtgtgcccttgtttcttctgaaaacaacgtgcgtacgtgaaaaaaactaactggatgattcaccatcatcattgttttgattaaaaggaaaaaaaaaaaaaaaagggcggccgccaccgcggtgga

SEQ ID NO: 21310 - DNA, 661 bp, Zea mays
  unsure (1)..(661): unsure at all n locations
  Clone ID: MRT4577_11942C.1
tcgggaaaaatatgattaaaaaaggagagcgccaaaagaaaggaggatcattactcgtctaagaaaagcaaggacaaaaaggagaaggtttcagattcttcatcgaaaccacctgtccttatggctgataggcctactgttcctcaataccctcttccagttcttccagtggacgatgatgaaatctcatccaaaggataaacgatgctccagagaccatgaagcagatgccctcgctacctgtgaagataaacgaggacgcagatgcccccgctacccagatgataaacgaggacctcgtcaactcgttgctgcccagaccaactgtacctatgcagtagtgatagcaaaatgaccgtatcctctgtagttccgagagctttttagataggtagacgaaattaaaaagggggtagcactggtacttgttcgttcgttctgtggctccatcctttcgcctcctctactgtatgtctgtatatgttttgtctagatatttatgttcccaacctttccaaagtcatgtggttggaaactccaattttttgtattttaacattttttgaaaaatattaaaatttagactcttagatgacttaaaaannnnnnnnnnnnnnnnnnnnnnnnnnnnnnnnnnnnnnnnnnnnnnnnnnnnnnnntt

SEQ ID NO: 21311 - DNA, 1089 bp, Zea mays
  unsure (1)..(1089): unsure at all n locations
  Clone ID: MRT4577_119430C.1
cattgggtacctcgaggccggccgggnaaaaaaattcaaaaaaaaaaaaaaaaaaaaaaaaaaaaaaaaaaaaaaaagaatatctctcggcggtttaaaatggaagccgaggacgggcggccaaggagttaggtgtaggccaggcaggcagaggcagcagttctcctctacgaagcggcgttccgatccgagatggggggccagcagaacgcgctccaccagctcgtgtccttcatcctcggggcgtccgccgccgccgtcctgctcttcttcctcacgacggcgacgagcggagcgcggttcacggggatctcgagctgggccaacggaaccacgggctttgacgacgatgctcccgtccaggcggctcctgctacccgggcaaatcacgccgacgcaaagggcgcggcggcggagcaggaggacgagctgcagcggctgctgcgcgcggtggcggacgaggaccggacggtgatcatgacgtcggtgaacgaggcgtgggcggcgcaggagtcgctgctggacctgttcctggagagcttccacatcggcgagcggatctcgcacttcgcggaccacgtcgtggtggtggccatggacgacggcgcgttccggcggtgccaggccgtgcacccgcactgccacctgctcaggccggnaaaagcgggcctcgacctctccggcgccaagactacatgaccaagnactacctggacctcgtgtggagcaagctgaagctgcagcagcgcgtcctcgagctcggctacaacctgctcttcacggcacgtgcctcgctcgctagtcgctgctcccgttgagttttcactggtttattcacgagttacgaggcggcgttccgtttgacgactggcgtggcgtggcgcgcgcaggacgtggacgtggcgtggttccggaacccgctggtgcacatcacgatggcggcggacatcacgacgtcgagcgacttctacttcggcaacccggacgacctgggcaacttccccaacacgggcttcatctacttcaaggcgacgccccggaacgcccgcgccatgggcctactggcacgcggcgcggcggcggttcccg

SEQ ID NO: 21312 - DNA, 746 bp, Zea mays
  Clone ID: MRT4577_119431C.1
gcagctgaaagccctgcttgagagcgtcgcggtacccgctggtgctccactgcggatcgaccggcgtcagcgaggcgttctggagcaccggcactaggatcacttgttggctgcacatctgcagcagaagctggtggggcatctccgaagggatcacgaaagagtagtcgccgtcagagccgcttgcgcacgcgatcgggttgatgtcagactggttgggaacgtggagaacgttgatggagcagttggcgaagaagagcaggtaacggacggtgtagtccgacaggttgagccacaaggtcggcgatggcgagacggtgacgttgtggtcgacccgcgggcagctcgcgtcgtcgaggacgtccgggtcggcgaggtagatggtggaggtgggatagtcgatgtccgtcacgttgtaggagtagcctgtgttgctgctgttgccgccgagctgtatggtggggtactcgtcgtccacgcagtcgatggccagcccagggtacccgcagtaggaggaggagttgcccaggacgtccgccgtgtcgtcggaaaggtagaacgggtaggtgatattcacttcgccgcatctgtatggttgcagcttgcatatggagcggttgtagaaatcgtcgccggaagggtcgctacgcgaagcggcaacacagacggcgaggagaagcgccagcggcagacggcgccgtagcgagcggaaagccgccatggctgaatcccggccggcctcgagg

SEQ ID NO: 21313 - DNA, 648 bp, Zea mays
  Clone ID: MRT4577_119432C.1
tcacgagacgcgatacggcgcggcgttccgtgactggcctggcgtggcgtggcgcgcgcaggacgtggacgtggcgtggttccggaacccgctggtgcacatcacgatggcggcggacatcacgacgtcgagcgacttctacttcggcaacccggacgacctgggcaacttccccaacacgggcttcatctacttcaaggcgacgccccggaacgcccgcgccatggcctactggcacgcggcgcggcggcggttcccggagaaccacgatcagttcgtgttcaacgagatcaagcgggagctcgcggacgggctgggggtccggatccggttcatcgacgccgccaccgtcagcggcttctgccagctgggcagggacctcaaccgcatcgccaccgtgcacatgacctgctgcgtcgggctggagaacaagctgttcgacctcaagagggtgatcgtggactggaagcactacatggcgcgcccgctgtgggagcgccagatggggaagatcggctggacgttccagggaggaaggtgcatacactgactcactgcatttgcactgcacgcggtgcctggatggattggctcgattcaaatctgtaggacttgctgaaatcccccggccggcctcgaggtacccaa

SEQ ID NO: 21314 - DNA, 825 bp, Zea mays
  Clone ID: MRT4577_119433C.1
cgcgctgctgcgacagaagctgggtggggcatctccgaaggaaccacgaaagagtagtggtccccgtcagagccgctcgcgcacgcgatcggggctgatgtcagactggttgggaacgtggagaacgttgatggagcagttggcgaagaagagcaggtaacggacggtgtagtccgacaggttgagccacaaggtcggcgatggcgagacggtgacgttgtggtcgacccgcgggcagctcgcgtcgtcgaggacgtccgggtcggcgaggtagatggtggaggtggggtagtcgatgtccgtcacgttgtaggagtagcctgtgctgctgccgccgccgagctggatggtggggtactcgtcgtccacgcagtcgatggccagcccagggtacccgcagtaggaggaggagttccccaggacgtccgccgtgtcgtcggaaaggtagaacgggtaggtgatattcacttcgccgcatctgtatggttgcagcttgcatatggagcggttgaagtactcgtcgccggaagggtcgtcgccgcgggaagcggcaaccaagacggcgaggagaagcggcagcagcagcggcagcggcaggcggcggcgtggcgagcagagagccgccatggctgaataagtcataatatatcatccaagaggacaagaacgcgtggaggaccgactaggagttcgcgcgggaggtgctcgccggcgtcaacccgatggtgatcacgcgcctcacggagttcccgcccaatagcacgctggaccccagcatgtactgccaccacaccatcacgatcacggcggagcacatcgagaata

SEQ ID NO: 21315 - DNA, 591 bp, Zea mays
  unsure (1)..(591): unsure at all n locations
  Clone ID: MRT4577_119434C.1
catggcgacctccagnaacagcagcccgtctctgtctccgctggtcgtcttcctcctcggggcggcttcggccaccgtgctgctcctcttcttcctgacggcgacggcgagccccgcgtggaacgcgctggaggccggtcctcgctctggctcaggcagcgtgcgctgcagtactagtactccacgagcaaacggcacggtggtcgtcgacgctctagagcaacacgccggcggagtaggagctcctccagcgaacgaggtaatgcgctagctgcttccttgttcttggccaccggcgatgagctgatgccgtgtttttttgttctctttcaggcgggcgcgtccggctccgatgatgacgatgcggggtttgcgcggatgctgcgccgagcggcgatggaggaccggacggtgatcatgacgtcggtgaacgaggcgtgggcggcgccggggtcgctgctggactcgttcctggagagcttccaggtgggcgagaacgtgtcgcacttcgcgaagcacgtcgtggtggtggccatggacgacggcgcgttccggcggtgccaggccgtgcacccgcactgccacctgctc

SEQ ID NO: 21316 - DNA, 1472 bp, Zea mays
  Clone ID: MRT4577_119435C.1
gtccctgtccatgaactacaagtttgaggagctggcgaagccctaccctctcgtctagttcctctacggagacgtggacagcgcgccgccggcgccccatggaggaagagtgatgagcggcacaatggcccaaccgggaccgtgggagaaccaccccgaccgggacctgagccccttcgtgcctgtgggggggctgggcgaacactcgtctggtgagataaaagcccacgtgagtacctttgacttgaccgatcgtgctaagttgggcggataataccaggccccaaggcctaggaggaagaagataagggtgcccgtttctctcctcgacgacgacattctcaactctgaaacggcgatgtcacggctactcccgcccgtgctctctcctttaccggcgttctcgctgccgccgccgcttcttcctcgcatccacatccgcacgtcggcggtgagaggcggtgcggcggagaacgcgatggcgtccgggacgacggcgagggagcggcgcctggtcaaggtgcgggaggagcgccgccgccgcgagtacgaccgggagcacacctaccccggatgggccaaggtactggagaacgcctgcagggatgatgaagagctccgcgccattcttggtgatagcatcggcaacccggagctcatgaagcaacggatccaggaaagggtgcgcaagaaaggcagggcccaattcaataaatccaagacaggctccattgttgcttttaaagtcagctttcgagactttaacccattgaattctttcatttggtttgagctctttggagaaccaacagatcgagatgttgacctgcttggtggtgtagtccaagcttggtatgtcatgggaaggctaggagcttacaattcttcaaatttgcagctggccaactcaatgatggactacgacccttcatatgattctgaagaagcttccacagtaatgccatcatctttccatgatatcagtgatgttgagttccaagacaattgggccagggtttgggtggaccttggaacctcggattaccttggcttggatgtattactaaactgcttaacacagttgagctcagagcacttgggtatcaaacaagtggtttttggaggcaagaaaatgggtgactgggaagagggcatgacgagctctgattatggatacaagcacttcaagatatgataaatttacaggtgacaagcaacggtggtgatgcaaggctggccgagaaatttgatcaagactgcatgcatctcgatgtgcccttgtatgtaaataaataaattgtcatgggttttattttatcgtcgtgatagcagtgaattttaactaacagctcaaggcaggctagcagaatagaaaaatataatatggatgcatgtcttgtttcagacacgtctgtttcttgatgatgatgatgataatgatgatgattcttgcaacgtcagggcatttcctt

SEQ ID NO: 21317 - DNA, 1633 bp, Zea mays
  unsure (1)..(1633): unsure at all n locations
  Clone ID: MRT4577_119436C.1
cattgggaccctcgaggccggccgggattttgccgagctagacacgtctgactcacctcctccgagcagaacgtctcgcgtgcagcggtgtagcacaccagaaccggtctcgtcgtcgtcaccctcctcatttgacaggatcaacaccttaagaaccaccaaattctcaagctcctcttgcctcgacggccgggtatatcttggactttttaaaatggaagccgaggacgggcggccaaggagttaggtgtaggccaggcaggcagaggcagcagttctcctctacggtacccctccatcgccgtcctgtctctgttcttggctcctggcctgcagctgcaccagctgacaccggcgtcgttggctcggcagaagcggcgttccgatccgagatggggggccagcagaacgcgctccaccagctcgtgtccttcatcctcggggcgtccgccgccgccgtcctgctcttcttcctcacgacggcgacgagcggagcgcggttcacggggatctcgagctgggccaacggaaccacgggctttgacgacgatgctcccgtccaggcggctcctgctacccgggcaaatcacgccgacgcaaagggcgcggcggcggagcaggaggacgagctgcagcggctgctgcgcgcagtggcggacgaggaccggacggtgatcatgacgtcggtgaacgaggcgtgggcggcgcaggactcgctgctggacctgttcctggagagcttccgcagcggcgagcggatcgcgcacttcgtggaccacctcctggtgggggccctggacggcggcgcgctggagcggtgccgcgccgtgcacccgcactgctacctcctccccacggncgccgcgcgcaacctatccggcgagaaggtgttcatgagcaaggactacatcgacctggtctggagcaaggtccggctgcagcagaggatcctcgagctcggctacaacttcctcttcacggacgtggacattctgtggttccggaccccgttcgagcggatgtcggtggcggcgcacatggtgacctcgtcggacttctacttcggcgacccgtacagcccgatgaacctgcccaacacggggttcctgtacgccaagtcgagccggcgcacggtgggcgcgttcgaggcgtggcacggcgcgcgggaggcgttcccggggaagcacgagcagcaggtgctgaacgagatcaaggtggagctggtggccacgcgcggcctgcgcatccagttcctcgacacggaacacaacgccggcttctgcaacaacacccgcgacttcaacacgctctacaccatgcacgccaactgctgcgtcggcctgggcgccaagctgcacgacctcggcaacctgctgcaggagtggcgcgcgtatcggcagatggacgacgaggaacgcgcccggggacccgtgcgctggaaggtgccgggcatatgcatccactgattggtagtcaatggcgtgtgagtgtgatcgatcgaggccacccggcggtaggtgtgtgcgtaagtttattattgtacagtaatttgtacttgtacaaatcagtactagctacgatcatacaactacactgttcagtgttcacttaaaaaaaaaaaaaaaaagcggcc

SEQ ID NO: 21318 - DNA, 1337 bp, Zea mays
  Clone ID: MRT4577_119437C.1
attcacgggccgacgcacgcgtccacccacgcgtccgcggacgcgtgggactaagttgggccaataataccaggcccaaaggcctaggaggaagaagataagggtgcccgtttctctcctcgacgacgacattctcaactctgaaacggcgatgtcacggctactcccgcccgtgctctctcctttaccggcgttctcgctgccgccgccgcttcttcctcgcatccacatccgcacgtcggcggtgagaggcggtgcggcggagaacgcgatggcgtccgggacgacggcgagggagcggcgcctggtcaaggtgcgggaggagcgccgccgccgcgagtacgaccgggagcacacctaccccggatgggccaaggtactggagaacgcctgcagggatgatgaggagctccgcgccattcttggtgatagcatcggcaacccggagctcatgaagcaacggatccaggaaagggtgcgcaagaaaggcagggcccaattcaataaatccaagacaggctccattgttgcttttaaagtcagctttcgagactttaacccattgaattctttcatttggtttgagctctttggagaaccaacagatcgagatgttgacctgcttggtggtgtaaagtggcattgtacaatttcattggattctccttattcagaaaacaacatactgtcttgacgtgaagtgttctttacaggtagtccaagcttggtatgtcatgggaaggctaggagcttacaattcttcaaatttgcagctggccaactcaatgatggactacgacccttcatatgattctgaagaagcttccacagtaatgccatcatctttccatgatatcagtgatgttgagttccaagacaattgggccagggtttgggtggaccttggaacctcggattaccttggcttggatgtattactaaactgcttaacacagttgagctcagagcacttgggtatcaaacaagtggtttttggaggcaagaaaatgggtgactgggaagagggcatgacgagctctgattatggatacaagcacttcaagatatgataaatttacaggtgacaagcaacggtggtgatgcaaggctggccgagaaatttgatcaagactgcatgcatctcgatgtgcccttgtatgtaaataaataaattgtcatgggttttattttatcgtcgtgatagcagtgaattttaactaacagctcaaggcaggctagcagaatagaaaaatataatatggatgcatgtcttgtttcagacacgtctgtttcttgatgatgatgatgataatgatgatgattcttgcaacgtcagg

SEQ ID NO: 21319 - DNA, 309 bp, Zea mays
  Clone ID: MRT4577_119438C.1
ttttaatgatccggtaacctggtagggaataagcaagggtcagttgccgattgtccgggttgtaacacttgctctattgattgtctggagcccatgattaccaacaatgctactcttactaatgagaatgaaactgcctcttgcccaattacaacaattaaattgttccggtcttctttttggcttgttgcatatcaatgcaagggtgacttttggcttcttaaagtaggttacaggttgaaagcgctatgaacggtttggacttagggtactcggaaaaggggacaattttgacggcatttcttttgt

SEQ ID NO: 21320 - DNA, 178 bp, Zea mays
  Clone ID: MRT4577_119439C.1
gttgatcgacatcatccaatacatgatcgacgtggatgccggtgtgatcacgatcgataactcgcggtctgaccagaagctactgtccgtattccatgcgggtgtgaaggacagatccagcctaggccctggtgtgtacgacatccactatcgtatgattccctacaccgaggagatc

SEQ ID NO: 21321 - DNA, 1865 bp, Zea mays
  Clone ID: MRT4577_11943C.1
tccactcgccgcgcgacgaagagaacggctcccccttccccgccacctactcgggctggagcaacaggttctcgaagcgaaacattctcgccccaattgtgggggttcatgggcgccaacggccacccaccgctggcgagcacccgcgcgcacaacgggtcccactccggcggaagcggaggcggaggaggtgggggagggggagcgaaccctagcaacggcggcacggcggcggcgcttcggcacgaccctggcctggcgcgggagtggttgacggaggagcatgccatccttgacgaactgctggtcaagtatgcatccgacttacctgtcgttcgttatgcaaaattgcaatgaagttgccagagaaaacagttcgggatgtagctttgcgctgcagatggatgattaaaaaaggagagcgccaaaagaaagaaggaggatcattactcgtctaagaaaagcaaggacaaaaaggagaaggtttcagattcttcatcgaaaccacctgtccttatggctgataggcctactgttcctccataccctcttccagttcttccagtggacgatgatgaaatctcatccaaagcatgtatattggaggtccaacaggcgaaatccttgaaactaattcccaggttttgagtcaaatttcaacaaaccttagcaacatatacagaacaacatctctctgttgtgccaaactcgagataatatactcaggatcttgaaagagataaacgatgctccagagaccatgaagcagatgccctcgctacctgtgaagataaacgaggacgcagatgcccccgctacccagatgataaacgaggacctcgtcaactcgttgctgcccagaccaactgtacctatgcagtagtgatagcaaaatgaccgtatcctctgtagttccgagagctttttagactgactgcaacgcttgcctcttcacctcccctacgctaatactgttcatcgtttaggggctacagtctcctcctacctcgcgcagcggtgagtgagcgctcccctctccccttccttgcgacactcttctctctcacgtcagatgcagcgcttcactgtagccaccccctcggcttcttcgcgcggaaggagccgcccgcgccagacaccggaaacttctcgctccacctcgctccgtctccacccgtccacggaagggcgatttttggaggcgacgcggcggcggatctcccgtcggccggtggagtcggcaccggccccgctcgggtgcgcagaagacgaagtcgacgtcgtcagcacgcagtgccgttcgcgaccgaagacgaagaggggtcacatccgcttccgccgaggttcgtggcgtccgattcgttggcttccgtctccgaccatcaacgacgccatcagatccagacgcatccccttcgattcgacttggtgggcactaaatctcccgttcttaaggtaatttgctttacaactccacggcaaatcattgtttatgttccgattgagttacaactcaagtcgtattgtgcttgattcgccgtcttgcggcccagatccatccctactagaggtataggttcttctacctcttgaaacgaaaacttgagtgaggaaaaatgtacaatacctactgcagctgtgttcaaaattcgtattttttgttgccaaggccataggagttagcagatgcagagaactgatctaggtatgaagttaggtagtttttcatcctctgatttatgcgcctggtgtaccatactttatgttccacggcatccagtggtgttgattggactgttcttcatgtttttgaactgaagacaatgtttttgtgccttttatgtgcaatgttaccctttcgcact

SEQ ID NO: 21322 - DNA, 299 bp, Zea mays
  Clone ID: MRT4577_119440C.1
cgcatgactgcagtacttgaataagtgcctacagcagacatttctcattttcccagaactatgatttgtaggtaaagaaatggaactgtggtgtatccaacatcatgtcatatatgctaaggtaaaatctggcactaaataagaaaaatggtttaactcttaaatggaatgaaacttttaaaaaatctgattttttcagctcttaaatagggaagttaggctggagacagtaggctcagtcatctcttaagcattcatggaaaaacctactatgtgtagtcattttgctagggtcatgg

SEQ ID NO: 21323 - DNA, 394 bp, Zea mays
  unsure (1)..(394): unsure at all n locations
  Clone ID: MRT4577_119441C.1
gcggccgtcctttttttttggtgtgggttagacganttgcccgcctgttgccacacaggcaataaccccaacattgatggcaaaccggcaaaacgttatggttgaaactcctccatctttgaaaaagaggagaaagaagctagctcacagcggcgggggggaaaaacatggggaaagaaccccccccaatgtgcccactggggggggcccaccgggggagcgcccccaagggggcgggcccaccggcctggggggggggaaagaggaaccaggaaaacaccctaacaaccgggggagacgaacttcctaaaccccccaaaaaatgggccggggccgggcgccctcgggtcaactaaaaacccccctggtggttgtttaatactttctcgggggg

SEQ ID NO: 21324 - DNA, 649 bp, Zea mays
  unsure (1)..(649): unsure at all n locations
  Clone ID: MRT4577_119442C.1
ggggggggggggggggtttttttttttttttggggggggaaacccccccccccaaaaaaatttccttttcccttccccgccggggggggtcttaaaccaaaaacaaaatttttcccctttgccccaccaaaagggccaaaattttaaaccctttttagggggggggggccccccaaaaaaaagggggcggggccaaaaaaaaataaaaagtcggcaagggccccctttttttttatttgggggggggccccccccccctcccagaaaactaccccaaaaaaactttttttaaaacaacaggtggggggcccaaaaaaaaacgaaatcttttcctttaaagcccttccctaaaggcaaaaatttgggaggggccttccataaaccacccgggaaaaatttaaaaacatggggggtaaacaaattttcaaaaaaaatctttatttttgcccggggggacccttaaaaaaaactaatttccctgggccccccaaaaaaaaaggaccccccatgggttcttaaaaggggaatgtctgaccaaaaaaactttncnttggccccccccccgcaaaacgggaaactgctctccatgggccttttggggggggggaaaggggcaaaatttgcaaccttttccttttttttttcaaaa

SEQ ID NO: 21325 - DNA, 192 bp, Zea mays
  Clone ID: MRT4577_119443C.1
cccacgcgtccgctgcgtgccacagtcgcccagctttgttgccgcgcccagccgttctcagctgctcaccgtggccggctcctgcttggccaccatctcccatggcgatggccgccgagctcccttgtcgtgggctgtcgcgtccctgcggccagcctttaactcaatccgtaagcacgcgagctaactggt

SEQ ID NO: 21326 - DNA, 258 bp, Zea mays
  Clone ID: MRT4577_119444C.1
gggtacctcgaggccggccgggccgggatccactcgactaccccgccatcgatctcgtttcaaatccatccatcctcgtttcctccgtaccgcgcgatctcaaccccatgacccatagtcggatcgggatcctagcgctcgtatggatcgacaaggctgaaggccagggtggctctgcagagtgaccatgtcgaggtcgacctcgagatcgaccccttcatctgcaccgactacatgacctacatgttcaaggaccac

SEQ ID NO: 21327 - DNA, 231 bp, Zea mays
  Clone ID: MRT4577_119445C.1
gctgaatgctcagaagatcactcacaagttagtgaaacgaagataccagatgctggtcgtatgggagtaatatgtgcacacactcatggcaagctctattatgacgaattactgagcctgcgctctaatcaatcgaccgcaagacgctcagcctatgatgactcccttgcggcttgaccttacatatacctacagcccaatggacattcacgagggttgccactactctta

SEQ ID NO: 21328 - DNA, 490 bp, Zea mays
  Clone ID: MRT4577_119446C.1
gtgggatcaggtaaaataggaaagtatacagaggggctttatgatggttttggttatgagaaatgggactcaggggacgatgcacgtagacttctgtgcagagctttatggatgggatgaggaagagatagcatgaccacagcttgaagagatgcggactgttcatgtgggatcaatgggctaagaatcattgtgcgactagaattctgattacatagcaggaggaaagactgagattaccttggatactcgaacaaggtggggacttctggggatgttgactgaaacggattatgtggattctgagagtataaggaggaggacaatgcatgatgacatggaggctttaccgagggtcattgtactagcaagtactacaacgggcattactgtgccaaagatacctcgcagtgctctgaagtcaggagagtcagattatgttgtgacaggttactgatgcgatgatcatggcagggaaccttcttggctg

SEQ ID NO: 21329 - DNA, 624 bp, Zea mays
  Clone ID: MRT4577_119447C.1
ccggccgggactccgcgcccggccgcctttgcctgccttcccacttcccatctcctctggtcttccgccatggcccagcccgtattcctctcctctctccgctcccgcctctgctccgcgccgccgtcgccgcaccatcacctccagcccagccgcggctaccacgtcgagctcggcgctcgcgagaaagcgcttttggaggaggatgttgctttgaagaggttcaaatcatacaagaacagtgtgaaacaggtctccaagattgggaatgttctcactttagctgttgtatttggttgtagctacgagcttggtttgttggcggcaagcatgaagtgaaggaaaacacagccattattccgggaagtgatccatcagcgtagactgtcattctatcacctcgtgtttttagcctgtctgcgtctctctttttttttttgtcgtgcaccatgtataaaataaaactaaactaggttaaccttgatttgcgaataacgttttctgtttcaaaaaaaaaaaaaaaaaaaaaaaaaaaattcggcgactatggcggcggcaccggcaggcggcggccctcgggcattgtcccagcgggaagaggacatccagatgatgctcgccgcc

SEQ ID NO: 21330 - DNA, 793 bp, Zea mays
  unsure (1)..(793): unsure at all n locations
  Clone ID: MRT4577_119448C.1
cccagcgtccgcgatcaactgtgcacatgcgcatttacagctttgctaggatagataagactgattgcaacggtgtcctttaaaccgtcctggattggtataatacgggtttagcggtacaagtaaggccgcaacggtatcctgtaacacctcctgtacattttcaggctagagacctctcctccaaatgtgcaggcgttgtctcgtcctccaaatcatctcaaggtggccgcatccatatcccgagcgacgacggccgatcttcctcgtgcatgtgttcccaagcgacgacggacgatgtacttgccgcagcagccatggttcgtcgaccgttgaagccggtggtctagtctgttcgcaggagcgcaaccgcacagtccaacctggagagcgtcagatctatccactcggaggcagtaccactgaagtcaccgatagaacctggcgtggatcttggaggagaggagagaaggcgtggagggtgcagcaagggtgtgcagcgagctcnacgtggccggcggcgtggggctcggacgcgtggtgctggcgcacggcgtggtgcagactgcgcggacgcagcgtctatggcgcaacacaggacgagtctaggaggcctgaaggatggtttacaggttactgttgtaagagtttagtgtttataggttggaatctttttagagggacactaaatattcctatagaggatataatttacagtccaccgttgcaaacagtctaaagaattagtccctgtaatgcatcaaaaaaataataatcgtggctttccatgccc

SEQ ID NO: 21331 - DNA, 350 bp, Zea mays
  Clone ID: MRT4577_119449C.1
attgtacaaacgttcactaggcgggtgtgaagttaagatgctcataaccacaaagggccttgcaatgggcactttttaaaatgcacgggctgaggctccaagctaagctctaatttaaagaacacttcgaagggcacaaaacagaaacatacataggccggttgtagaagttggggtgtcgaatacaaatagacgaatctcagcatcaatagccggatccactcttcaagactcgagctcgtagcaaagtcgaaatctatcacatatgacttacatactcctgaacatcaggcatctctacacttaacgtgcaagaagctccccaagcgaccatcactcttcatgaatcc

SEQ ID NO: 21332 - DNA, 152 bp, Zea mays
  unsure (1)..(152): unsure at all n locations
  Clone ID: MRT4577_11944C.1
agcagcccgagtacaacctcttctccagacacaaggttgantctgagtncttgccactttacagcacctatgnnatnggttnncnnacntggngcctctctgcttctcaggaganctatcngagaaaatatggcagngggganatnnctgna

SEQ ID NO: 21333 - DNA, 543 bp, Zea mays
  Clone ID: MRT4577_119450C.1
ctaaaatctttatggcacttttcctttattcttggtgctcagattgcatcctttaatcatcaccattcaccatagacaagttaacaagtcaagctgatcgagacgctcgcgccagaggcttcttccaaagcagggagaagagaagagaagagaagagggagcgagctatggggttcggcatggtgtccctcctcgacggtttcttccggcgcgcgctcacgtccgccggcctccgcccaggctccgccgccgtggacgccgacaccaccatccacttctgggcgcacccctccctcctccaggcccaggcccagccctcctccgcggctccgcggccggtggtggtgctgatccacgggttcgggccggacccgacgtggcagtgggcggcgcaggcgggcccgctgtcgcgccacttcgacctgctggtgccggcgctgctcttcttcggcgcgttcggcacgcgcgcccccgcgcggtccgacgcgtttcaggccgccgcgctcgccgcgctggtcgcgggcggcgggcacgtcccgggcc

SEQ ID NO: 21334 - DNA, 305 bp, Zea mays
  unsure (1)..(305): unsure at all n locations
  Clone ID: MRT4577_119451C.1
atcctcagcgtcgagctcggatcggtcgagctatcttgactcgagtgcgcacttctcatggcacagaagctccacgagcatatgtgtggccatacatcacacngncgatgnaggattngcaggatattatagctctgtatgagtaggaaaacacctacttaggtagagtggcccgcctgggagcctggtatccatggggtagccactctcagagttctgtagatacaggcttataggaggcacagtctgtgagtgagacgagactggagtgtagatgttgccatctgtaggtcgtaagatcattg

SEQ ID NO: 21335 - DNA, 545 bp, Zea mays
  Clone ID: MRT4577_119452C.1
gaataatgatgcgacaagtaacatatcaacgagaatccaagagatgcaatgtacagacacatctacagaggagcagacattctccagcctttccttcccacattttggcctcccctgccctcatcaacaaccatcctgtcacaatggcattatacttctcccatctactatcacaaaaacaagctcactttggtttaaaacaaaatgtagaatgtgcaccaaaaccagcaaaacccaataaattaacgaaccaaaccaaaaggtttctcctctcttctatcatgctgagatgaactgtggtagatcgtttaactgtaggaccccggcagctagcagcgacctcacactcattcactggtgctcttcacctttgatctgtaaaggagcttcttcttcttggatgcagggttgttcacagttagcacaagtttgccgggctcgcctaccttgaagcttcccttcatgattggttcctcgttagcgggcaccttccttgatttctgtacaatgacagtgtacccaccctcagcgtcgggggtgaactc

SEQ ID NO: 21336 - DNA, 671 bp, Zea mays
  Clone ID: MRT4577_119453C.1
ctgtcggcatcacccggcgatagcatgtctctgcccaagccaccgcctcgccgccgccgtcgccggaaccctaggccgccggactcggagctcccgtcggcgggggagggggaggatgcagctgcggatctcgccgagcatgcgcagcatcaccatctccagcagcaatggcgtcgtcgactccatgaaggtgcgcgtcgcgccacagccgccgccgccgccgccaccgccgcacggggccgcccggcgcggcgggggaggtggaggggggtggtactggcgcgcagtcgcgttcccgctcgtcgtcgcgctcggctgcctcctgcccttcgccttcatcctcgccgccgttcccgcgctcgaggcaggcggaagcaagtgctcctccgtccaggccacatgcatttccacgcctcaacaatatttacctttgctgttagtggtccatccggtattctgtttcgtactgaactcctccgtgtcatgatatcattgcactgcaaggaactggatgcgtctctcaagacccatgtgcggatgtgccgaatagatgatgtcgccacggtattttatccagattatgaagttggacacagaatatggcagattctactttcatcctgcaaaaaatccaatcttaaccttggggtataagggggtgtttggtttta

SEQ ID NO: 21337 - DNA, 330 bp, Zea mays
  Clone ID: MRT4577_119454C.1
ctcgcgtccttaagcctggtgcccgctgaccgatcccccttcctctatagcgtgcgccctatttttttttttttttgggaatagataaaacgaccggtggatttatcataaattagcgtcgggcatctccgcatacataaggggtctctagatctaaactaagagacatcgggcgggactaatggtaaggcctaccttatatgatttcaagggttcacacttggtggccaccaaatttgaattccggtctatgttttcctgttcaacaaattgggtatatcctggcgttgcaaaaagctccatgctgcacgtggttgggcttgaagctgc

SEQ ID NO: 21338 - DNA, 2616 bp, Zea mays
  Clone ID: MRT4577_119455C.1
aattcggcacgagggagagagagagcgagcgagcgagcgagcgagcgggggaggggaaggggagaagcaagcgagacgtcacgggagcagagcatagccatagctccattgccggccatcgcctagcctagccgccgcccggctcccgggaagagaaatcagcccccatccccaatccctcgcccccccaaaatcccctggggattcgccgatagggcccccccgtgccgccgccccgtatttgcaccgctcgcacccggcgacgagcattgctatttccttctttttttacctattagtatcaccccgtgcgatttagcatgtctctgccccccaatgccaccgcctcgccgccgtcgccggaaccctaggccgccggactcggggctcccgtcggcgggggaggatgcagctgcggatctcgccgagcatgcgcagcatcaccatctccagcagcaatggcgtcgtcgactccatgaaggtgcgcgtcgcgccgcagccgcccccgcccccgccgccgccgcacggggccgcccggcgcggcgggggtggcggagggggatggtattggcgcgcggtcgcgttcccgcttgtcgttgcgctcggctgcctcctgcccttcgccttcatcctcgccgccgtccccgcgctcgaggcaggcggaagcaagtgctcctccgtcgattgcttggggaggcgaatagggcctagtttccttggtaggcagggaggtgattctacaaggctggtgcaagatttgtatagattttttgatcaagttaacaaggaggaattcccacctgatgaaaagttaccagaatcattcagggattttcttttggagatgaaggataaccattatgatgctagaacatttgccgttaggttgaaagctacgatggaaaccatggataaggaggtaaagaggtcaaggttggcagaacagctgtataaacattatgctgcaacagctattcccaaaggaatccattgtttgtctctgcgccttacggatgaatactcctcaaatgctcatgcacggaaacagttaccgccaccagaactgttacctttgctttctgataattccctccaacattatattctagccagtgataatattcttgctgcttcagttgttgtcagctcaactgtacgatcttcctcactgcctgagaaagtagtctttcatgttattaccgataagaaaacatatcctgggatgcattcatggtttgctcttaattccatagctcctgcaatagttgaagtaaaaggtgttcaccagtttgactggctgacaagagaaaatgtcccggtactagaggctatagaaaaccatcgaggagtcagaaatcactatcatggggatcatggaacagtttccagtgcaagcgacaatcctagggtgcttgcttcaaagttgcaggctcggagccctaaatacatatccctgctgaaccatctccgtatttatttgcctgagctctttcccaacctcaacaaggtggtcttcctcgatgatgacattgttgttcagcgtgacttgtctcccctttgggcgatcaatcttgaagggaaggtgaatggagctgtggaaacatgcagaggggaagacagctgggtgatgtctaagcgtttcaggacatatttcaacttctcgcatcccgtgatagctcggagtcttgacccagatgaatgtgcttgggcatatggtatgaatatatttgatctggcagcttggaggaagacaaatatcagggatacatatcatttctggttgaaggagaatctaaaatctggtcttacactctggaaatttggtactttaccaccatcccttatagcatttaggggtcatgtgcatggcatagacccatcatggcacctgcttggcttaggataccaagacaagacagatattgagagtgtcaggagggctgcagtgatacattacaatggacagtgcaagccatggctagacattgcttttaagaacctacaaccattttggacaaagcatgtaaactactccaacgactttgttaaaaactgccatattttggagcctcagcatgtcaaggaatgacctgtaggctgtagcaaataccggacacacggagggagtatagtttatgattcgtttgttggctggagagactgactgttgctggatgataagtatactggttaatcaagaaagcaaccagcattcaatggaactgaccatcccctgtgaaaactgccaggagttttcatctgtaccataggggaacacaattcttaccatctgtatcatattggtgcatcattctttcctatactgtagctgcgcaaaaaggggctctgggactgggctgatccttggtcgcagaacaacatcagaaggctagaagattgaatgcttggttgatcaagacgaagaaaggaggcggatattatgaggtggcaagtttatatgctttacatccatccatttaattctttttacactcgagcattgaaattttgttctggtagttttgtgattgcttcggtaggttcgagatgattgtagtagagatgccattgtttctggagtaacctacaggatattgttacgattgttgacatact

SEQ ID NO: 21339 - DNA, 825 bp, Zea mays
  unsure (1)..(825): unsure at all n locations
  Clone ID: MRT4577_119456C.1
cattgggtacctcgaggccggccgggttttagtattagatcagaggttgggatatgtttttacttaaaaaggttaatctgtttactcacgccccttactcatgctcaaattacacactcatgctatccttggttagttggttacatttcaatgtgatgcattcacttgaagaggtagtataacatctctaatagattcatagatatgactttgtagattttttgctcaaaatatccaaagagaaaggtagactggcttcgtagatttttgctttccatttgacctgttgctgtgatgctctggtacctctcaaccaagctttgcatatttcttgcattttgagtgtaagggaaaacatctaagaagttatgtcgcacttaagattcacatataacaacataaattcttggacatcccctgtagaggaaaatatgattccacctacatcaaaccacagagcactgacagttattttgccttcttgagcaacccttacgggctcttgggtccacagagcaccttcaattcgttgcattatcaccttccttcggtccattgtttcgtcactaactgcacctacagttttgattggcctcgcagatttaatttgcagaggtggcactcgtggcaaacagacactgactttgctttcctctgaagccgaatacacatgcattgacatggcctgcttttatatagcaatccaccttgtaagaaatatgacctttgngttacttgcatagctgtgggccgncccacatgaaactatgaaagcatctcgctggccactgtacatctttatttaagctctgtaaattcttatga

SEQ ID NO: 21340 - DNA, 1262 bp, Zea mays
  Clone ID: MRT4577_119457C.1
accgggccccccctcgagatagggagaccacactgtgcactgagccttaaccacaggcgataaaagctggcgtaggtcaagcccgtagagtccgttccagtgctatgcttccgtttcgattagcccgctcaggacctcagattctctcacattttccacagccaaaacacctacactcctacagtaattccatgaagaagaaaaacaagtgcggcgcttgttttgattccagcgatgttcacggcagcagacaccggctgcactgcaacacaaatgcggcgcttgttttgagcgccagacgagacctttggtgggactgaagagattgcagcaaaaacgagtttggcttgccgcaggtttggtcgcgaagcaaaacggctgtctggaagccatccaaacactcgtggtgactgcaatactttagaatgattaaatttagtcaagacgccaaatgcttttgtctaaaacagacgagaatatctgattccagcagtttacaggcctgccggcaagcaatagtgaagttccttcgctccacccctggctctcgataagctcaaccatggaggcgacgtaaattttcttcagtgaatctggatctctatttctcacaatatagcgcttttactcttgaaagaattatctgcacatctatagtatgtcaacaattgtaacaatatcctgtaggttactccacaaacaatggcatctctactacaatcatctccaacctaccaaatcaatcacaaaactaccagaacaaaatttcaatgactcgagtgtaaaaagaattaaatggatggatggatggaaagcatataaacttgccaccacacaatatccgcctcctttcttcgtcttgatcaaccaatcactcaatcttctagccttctgaattattctgcgaccaaaggtcagcccagtcccagagctccttttccgcagttacagtatagaaaagaatgatgcaacagtatgatacagatggtaagaattgtgttcccctatgatacagatgaagactcctgagatatttgaatgccagttttcgcaggggatggtcagttgtattgaatgccggttgctttcttgattacctattatacttatacagcagcaatcagcctctccagccaacaagcgaaccataaactatactccctcgctgtgtccagcatttgctgcaaatcactccttcacgctctcgctccaaatatggcagtttctaacgaatcattggagtagttacatgatttgccaaa

SEQ ID NO: 21341 - DNA, 353 bp, Zea mays
  Clone ID: MRT4577_119458C.1
gggggttagttggggggataaaattcatcggttgcctcattgtcaaaaaaaaaaaaaaaaagctccggacttctgaaaagttgtcatccgttttttttttttttatttgtgtgttttccttctggggtttttcttttttgggaagatttgtttttttttttttcttatttgatgttttttttttgctaaagcattgtttaaaatgttcttcttggcatggttcttttattacaagaccttttcaaaattgggcgcttttgttggccttgggtgctattttttttgtttaatataaaaattttcgtcctttttgttttgggattatattctttccgtcccccgtatttatgtgc

SEQ ID NO: 21342 - DNA, 216 bp, Zea mays
  Clone ID: MRT4577_119459C.1
tcggccggggacggacatccttttcttccccggcttcgtttcgtgctttcctcaacctcccctcttccgtgccgcacagtttatccgctgcttcacggaaatccttacggggctgcatatactatattccctgcgttccaggcggccccgcccccgccccccaccggctcttgctgtctcctctcgcacggtcgcaccccgctagcctcccggcgt

SEQ ID NO: 21343 - DNA, 130 bp, Zea mays
  Clone ID: MRT4577_11945C.1
agcaaccaggtactccggatcagaggtctggcactgagtcagggcactcatgatactaagcgaggtctgtagtccctctggatatctaccaggactcatgaggctcctcacacagcacatgcacagtgaa

SEQ ID NO: 21344 - DNA, 379 bp, Zea mays
  Clone ID: MRT4577_119460C.1
aacctaaatatcctatatagcgaccacccttattttttttatttctttaatcaactcccattacactggggaggagaaaacggggggctatgaaataatacggatatacataaagaatatcgaatacggaatgaatggcgaagcacttgactaacttattactacctccattcttaaatataaggctccaaattactaccaccattcataaaaattgggtgaccacaacttaaattcacaactaaaacgcaacacaggcagtacaaacataaagaaaggagaacaacatgaacaacgcatcatagaaatggccacccaaaaaatgggaagcaacgcgaactaatcccaacagaaatgaagcaagaaggcgaaaccaaaa

SEQ ID NO: 21345 - DNA, 321 bp, Zea mays
  Clone ID: MRT4577_119461C.1
atctagccaaataggaaatgctgcatgaggtgccgacagaaccatctcactgtctctatagtttctgcagatgttaggacgaccgagaggggctgccgtgtatgagtaaccttccagagggaaaacagcatgccgcaacatcatggtcagagttcggacattgcatgaagcactggggggacatttgagatgatcttatgcctacttgcaagagggatagtcgacactgggaggggagggcgaacccttcttgaagggctctcatcagatgaagcacgccatgctagctattgattaaagtgcaatggaaagccataaaaa

SEQ ID NO: 21346 - DNA, 905 bp, Zea mays
  Clone ID: MRT4577_119462C.1
ccggccgggaggacgtactacccaggcaagccattgggacctcgagccggccggaaacgcagcccttccttcttttccttcccatgctcgggtcgcgtccttctcttcccgacttcctcgcgttcatttcttcaccccacccgccccccaacgccaaatctaacagcaaaggtccggaaccttctagccgcacctagggtttggattggcgccgagcatggcgtacgtcgaccacgccttctccatctccgacgaggacgacctcgtcggcggcgccatggggggcccgcgcggggcgcccgtgaaggagatcgccttcgccgccgcgctgctcgccttcggggcgctcggtaccatcggtggcctgctaatggccgtcaaccgcgtcggaggggaccgcgcgcacggaattttcttcatgatgttgggcattgtaatgttcatccctgggttctactacacaaggatcgcctactatgcttacaaaggttacaagggcttctctttttcgaacatcccaccgatctgaaggagtgtgctgcctgcctgctggttatgaagtggtgtcgctggtttaagagtttgtcgactctgtcgaatggctctgtagacacccttgttctacatctgtctgtggccattctctttgaacactctagaatgaactggtggatgtgtacagataaatgcagccatagttgtgctcctccatcgcggtttggccgattggaaggttgtttgttgtgctcgtgtgaccatgttcaactgatacgcattgctacttgtgcattactgtcgtttttgtcagggaccttaaaccattctatgagaataagatctcgtcgttccaattgtgaagaataaggaaaaaaaaaaaaaaaaaaaaaaaaaaaaaaaagaggggc

SEQ ID NO: 21347 - DNA, 678 bp, Zea mays
  Clone ID: MRT4577_119463C.1
agcagtggtaacaacgcagagtacttttttttttttttttttttttttttttggaggggggttgaacttccagttgcttttataaaattccaaaaattctgcaaaaattaccggggcttggttccgggggatgattctctggctcaaaatttgggggtcaaaaaggaaatgggtttctttggaccaaattacccaatcttaaggcaaaagggggactttgaactaccactattatttaacaggggggaattctttaaaacctatttttgctggcttttaaggggcataacatgacttggtaccaatttctaggcattaataccctttaattcttttcctatgggtttcttaagggttctagcccaaggggggctttctactaccactttttttgaaaaacattaaaccacaaaggtcttatttttcttaactaggattttgggccagaaccatcattctggagtttgggttctttttgcttaagggaagggggtgggttgcattatttaaggcaaatggcccttctcacaatttactaataaaagggctgggttcacttctttttcatgggtttgcatttttctctgggggggttatctcatcatggacctaacttattttttgggtggccattatctcataaaaaggggttggttatgatttattggaaaaagccct

SEQ ID NO: 21348 - DNA, 183 bp, Zea mays
  Clone ID: MRT4577_119464C.1
acgatctcgcgaagaggattcagcaagaagcatgcttacgctgctgctgcccgcactcggatccaagcggccacgcccgcacgcccagtccaaccccaacccgcgaagctggcgcgcgaggcggccgacgcgagcgcccgcaagcgcaaggcgggggactgcggccaggtccccgacgccacc

SEQ ID NO: 21349 - DNA, 463 bp, Zea mays
  Clone ID: MRT4577_119465C.1
gcacgcctgcacgtgccgggacggaagttatacttgggcggtcggcgacgtctatctagtcggcggccgccctttgaggtttttctgtgcatcaccaacaagcaccactgtttcctgatgatgaacttagaacaaatgccgccatgattaacagcatgcatcgatccagacaccgtgctgcatgatgcataagtgtgctggagccctaggtgaacagcagctctgacaactgtcacacatcgaccttggactcaaaaacacacatggtcaacatcaaacgacacgtacgcagatgaaccctttggactcgggataacatggactgaaccgaacaggataacgtcggccgcgcgagccccaccgatgagttcctccacttccagtcggcgttgacggagccgccgccactgctgccaccgccgtagacgccgccactaccgccgtggccacccgccgcaccgta

SEQ ID NO: 21350 - DNA, 381 bp, Zea mays
  Clone ID: MRT4577_119466C.1
gttggagcgagtgcaacgcacccccacccagctgctaagacccgagaacgaagctcgtatcgtccagcttaaccgcacccagctttcgcgactgggatttgtctcgagatcgatcgatcgcgttccatcagagagcatgatcaccttcgtgccttgctcacgcgccaggtaaagctcaatctcagctcgctggttttccagtcgcttcatggttctagcggtcgatccgattcctggggcttgtcctcacccgtgccttgccgcgtacggttcttcgtgatgtcaatgattgcttcgtcctgagaactttcctcggctcgaattcatgcgatttcagttctctccgtgcagaattggtcacgactttacagcataataccg

SEQ ID NO: 21351 - DNA, 269 bp, Zea mays
  Clone ID: MRT4577_119467C.1
tttctcttttttgacataaaaagactatgtcatgattaatttatggtccatgctttgcataagcctatagcctatatacgccctgaggcatggtaaacggccgggatacggcgaactggtgtttcgcaaagctcatgaggtgtatacacaaaacacatgcatgaaacgtacgacaagtagcatgctctaactatacacgcgagtgtgtcgcatccttagacagtgggcatgctcaaggccagacggtactctattatttccagtgcaca

SEQ ID NO: 21352 - DNA, 327 bp, Zea mays
  unsure (1)..(327): unsure at all n locations
  Clone ID: MRT4577_119468C.1
ccggnccgaaatccccggggttgtaaattccaaccgccccttctaaagaatccaacctaccttcctcttccttccaacgtattacctctctaatggtgccacttaaatcaaattcatgtgcctccttttaccaccttctgacctggaaaacccctgccttaccccaacttaaccgctttccataccatccccttttccccagttgccttataacctaatagcccctacccaatctcctttccaaccagtttcccatcctaaatggctattgtaacccctccttttatctattctttaacctctatgttttttgtgaaaataattttt

SEQ ID NO: 21353 - DNA, 821 bp, Zea mays
  Clone ID: MRT4577_119469C.1
accaagctctcaatccactgatcagcagcagcctcaagcaaacgcaaactgatactttagcccgtgtagtttgttaggaagaagcaagcttgcatccacagatcgatcggctgaccaccgtggtcaccatgccgtccattgacaaggccaccgacaacggcgagatgaagaagcggcagccggagcaggagctggtctgcgtcacgggcgccggaggcttcatcggctcctgggtcgtgaaggagctcctcctccgcggctaccgcgtcaggggaaccgccagggaccccgctgaccgcaagaacgcgcacttgctggctctggagggcgccgaggagaggctcaccttgtgccgcgccgacgtcctcgactacgacggcctccgcgccgccttccatggctgccacggcgtcttccacgtcgcgtcccctgtctccaatgaccccgaccttgtaccggtcgccgtcgagggaactaagaacgtgatcagagcggcgggggacgccggcgtgcggcgtgtggtgttcacgtcgtcctacggcgccgtgcacatggaccccaaccgcagccccgacgccgtgctcaacgagacttgctggagcgactacgagtactgcaaaaacacaggcaacttgtactgttgtgcgaaaatgatggctgagatcacggcgacggaggaggccgccaagaggggtctggagctggcggtggtggtgccgtccatgacccatgggccccatgctacagcagtcgctcaacttcagcagcagccacgtggcccgctacctcaccggcgtcaagcccactaaccccaatgcggt

SEQ ID NO: 21354 - DNA, 153 bp, Zea mays
  Clone ID: MRT4577_11946C.1
gggacattcccctcccatatcactccaaaaaaaaacttccttcaaaacttaggttggaactcctggccatcttttggaccatttgatagagactaaatattttagtcttaagaaaatcaagtatttggtatgtattcattttttatctaagtg

SEQ ID NO: 21355 - DNA, 1256 bp, Zea mays
  Clone ID: MRT4577_119470C.1
ccacgcgttcgacgagtatgaacagacgggggctcggcagggcatctccggactccccacacagctcctcttggtggcgccctctgacatctcctttttcctcgccttcgatcggtggccgccgccttcctcgacttccgtcccgacgccgccgccgccatgaagggacccggcctcttctccgacatcggcaagaaggaaggatctactcactaaggactacacctacgactagaagctgtccatctccaccgccagcgcctctggagtgaatccgttcgtcggagaggccatgggctcggcgcaggatccgttctacatcgtccgggaggagatccaggagtcgattgataaattgcaaagtaccttccaccgctgggagcaaactgcttcaaacacaggagaatatgttcatctgacaaaggagcttctgatcagctgtgaaagtatcgagtggcaggtagatgagctagaaaagacaatctcagttgcatcaagggatccggcatactatggacttgatgaagttgagctttccagacgaagaaactggactggttcttctcataagcaggtcggtacagtcaagagagctattgaaaagggcaagagcaatgcagcaacttcaaaataccaggatacaagcaggaccaaccactattctgccgaagataatgatgactttctttcttcagaatcagatagacagcttctactcatgaggcagcaggatgaagaacttgatgagctcagtgaaagtgtccaaaggattggtggcgtgggactaaccatacacgaagagctgtctggacaggaaaggatcctaaacgacctaagcttggagatggagactacttccaacagacttgatttcgtgcagaaaagagtggccatggtgataaagaaggccggcatcaagggtcagatcatgctgatcgtgttcctggttgttctgttcatcattcttttcgttttggtgttcttgacatagccaagtgcaccagggtcctcggttttctctctcatttgttgtgcctccctagtacgaacactagtaaattggtcgcgctccgcgtgagttgttgcttaatgtgcttacataaaatgtagaatcttgttgctataggcatgtatcaacaggtgctagcagcttgcagttctccttctaacagaaacaggtcgaagcagattttttgttctccaaaaaaaaaaaaaaaaaaaaaaaaaaaaaatttccaaaaaaaaaaaaaaaaaaa

SEQ ID NO: 21356 - DNA, 1352 bp, Zea mays
  Clone ID: MRT4577_119471C.1
ttgttggcctcgaggccggccgggatctctcctctctcgtctgcaccgcgagtccgcgactccgcaccaagcaaatcccctgcccccaaaatattgctagggattcgaggggaggaaaatccaggcgcccaggcctggcaatccgttcgtcggagaggccatgagctcggcgcaggatccgttctacatcgtccgggaggagatccaggagtcgattgataaattgcaaagtaacttccaccgctgggagcaaactgcttcaaacacaggagaatatgttcatctgacaaaggagcttctgaccagctgtgaaagcatcgagtggcaggtagatgagctggaaaagacaatctcagttgcatcaagggatccatcatactatggacttgatgaagttgaactttccagacgaagaaactggactggttctgctcataagcaggttggtacagttaagagagctattgaaaagggcaagagcaatgtagcaacttcaaaataccaggatacaagcaggaccaaccactattctgcccaagataatgatgactttatctcttcagaatcagataggcagcttctactcatgaggcagcaggatgaagaacttgacgagctcagtgaaagtgttcaaaggattggtggcgtaggactaaccatacacgaagagctgtctggacaggaaaggatcctaaacgacttaagcttggagatggagactacttccaacagacttgatttcgtgcagaaaagagtggccatggtgatgaagaaggccggcatcaagggtcagatcatgctgatcgtgttcctggttgttctgttcatcattctttttgttttggtgttcttgacatagccaagtgcaccagggtcctcgattttctccctcccatttgttgtgcctccctccctagtacgaacataagtatacgtgctggagctatcctttataaatcccgattttaatgcattttgttctgcgtgagatcaacgtcaatggagcggtgttatggtataaaaaaaaaaaaaaaaaaggttcgaagaactctgaagatcaattctacggataagtcgacttcattttgaggtactgttcatcatccaaaatggaggcagccgattcgattcctctttctccacgtaaagcaaaatgaggatgggcacggtattgttggagtgatgaacagtgcttggtttatagcgtgtaaaatggggacggggagtgactgttggaggagaggagatgagatggatgcgtgctaaaaggcaaccgatactaaatgaatgttcaccaaccaaatgaatgttggaacttttgtttcttaaaaaaaaaaaaaaaaaaagcggcc

SEQ ID NO: 21357 - DNA, 282 bp, Zea mays
  Clone ID: MRT4577_119472C.1
gtcgagagggacttcagttgcgttaccataaacccctgggtagcgggggcgtgcacctattcactcttcaaccaagtgcagcggagactcacgctagaccggagctcgggggcgacgacgagccagccgtcggcggattgaccagacctgaggtgatggactgataaagtatacctgtaagacggagagagctctcccaatggatgatactaaaccggctcccgctgtaaccctcataataaaccccagaatgagccttttatgggaggctggaactggctc

SEQ ID NO: 21358 - DNA, 1362 bp, Zea mays
  Clone ID: MRT4577_119473C.1
gggacccggcctcttctccgacatcggtgggaaggaaggatctactcattaaggactacacctacgaccagaagctgtccatctccaccgccagcgcctctggagtggatacctgaccaggacaagagatagagtctagttcggtcctttaagcgaatcagaatccgttcgtcggagaggccatgggctcggcgcaggatccgttctacatcgtccgggaggagatccaggagtcgattgataaattgcaaagtaccttccaccgctgggagcaaactgcttcaaacacaggagaatatgttcatctgacaaaggagcttctgatcagctgtgaaagtatcgagtggcaggtagatgagctagaaaagacaatctcagttgcatcaagggatccggcatactatggacttgatgaagttgagctttccagacgaagaaactggactggttcttctcataagcaggtcggtacagtcaagagagctattgaaaagggcaagagcaatgcagcaacttcaaaataccaggatacaagcaggaccaaccactattctgccgaagataatgatgactttctttcttcagaatcagatagacagcttctactcatgaggcagcaggatgaagaacttgatgagctcagtgaaagtgtccaaaggattggtggcgtgggactaaccatacacgaagagctgtctggacaggaaaggatcctaaacgacctaagcttggagatggagactacttccaacagacttgatttcgtgcagaaaagagtggccatggtgataaagaaggccggcatcaagggtcagatcatgctgatcgtgttcctggttgttctgttcatcattcttttcgttttggtgttcttgacatagccaagtgcaccagggtcctcggttttctctctcatttgttgtgcctccctagtacgaacactagtaaattggtcgcgctccgcgtgagttgttgcttgatgtgcttacataagatgtagaatcttgttgctataggcatgtatcaacaggtgctagcagcttgcagttctccttctaacagaaacaggtcgaagcagattttttgttctccaagtgatcagtttgtccaaggttgttaggctttccgtaatcgcttcgagtttgcttttcaagatcatcattcacaggttgcttgttagactttggctcaacataaggaggcagcatggattctttatgtttgcaacatttagcttagtgtaaggagccttgtttctagtggtaccaccacccggtatactaagaagactcaatgaacgcccttgattctctgggtgctgagctcttacccctgaatctgcatgtctcccattgtgttcat

SEQ ID NO: 21359 - DNA, 197 bp, Zea mays
  Clone ID: MRT4577_119474C.1
tttcttcaggggatgggtgcctactttggttgggtaccagagctcaaggggcttggaaggttggcttctatgaattctttaaaaaggattactcggacattgcagggcctggatttgccccaaaggaccagactcttatttacctcgcaagatccggatttggtgaaggaattgctgatggggctctcttgcctttt

SEQ ID NO: 21360 - DNA, 152 bp, Zea mays
  Clone ID: MRT4577_119475C.1
tctacgctttctgcaaaagctgtggcctgtgcacagaatgaagctgataaaaagctgtagaaagaggagaagaaagccaagaagaaatttggttcagctgacactgatgagcccttagaatcgtatgccaattttgactaatccatggaagc

SEQ ID NO: 21361 - DNA, 823 bp, Zea mays
  Clone ID: MRT4577_119476C.1
catttaaagtagaaaaaaaccaatacatcgggtaggcagaactgcagaaggatgcccaacccgaacaccacacacacaaaactagggacttcacacagaacggagctgacccagaccaccagacctacctggctgtggcctgcgaccttttacaaagctcctggaggttggcagctccagccctacaagtggtgtgttgtacctccagtaacagactcataattgttaagtagtttatgtgtctgcctattctctcctgtttgtatgtctaataagaggaacaagaggcttcttgataagggtggcacactattctgtaaaagccaatagtgtaatagcagtatagctttagcaatatagcatacagtctttctcatggaacatgtttctatgaaaaaatagtttgttagtggttgattggtattactcttgcattacaaatactgtttgggaaacatatccaatgcatttgaactaccctaatcaaatagctgctgccatcccaccctgggatgtgtagatcatatcttatactttctgtcaagttagttgatgattactttatgatacaatacaatgattttttttttaccatctattaattgttccttttgaattccttggctgtataaaaagtttggatcttatttgttattcaatttgtacttgtttgggctaatacttaatatgctgaagggtgggtgaagaattgtttttgctgttggtagtagcatgagcctggatagatttgaaatcttagaggtgctggtgacgtgaagagagagcaaaacctcaccaaggcaccttattcataaatctacat

SEQ ID NO: 21362 - DNA, 250 bp, Zea mays
  Clone ID: MRT4577_119477C.1
tatcaattttagagttagactcattacgagacctatgacactgcttctgttaatgctagtatgtgaaaatggccagagtgaacccacctgacataattgtcattactagtacaccaaaattctttggtcaaggctttattgccataaagggtgtacccagtgggagaacaattggttttgagggtcgaaagagctactacgagctggtgaataaacaggcagactacactcagactacataatatgttta

SEQ ID NO: 21363 - DNA, 360 bp, Zea mays
  unsure (1)..(360): unsure at all n locations
  Clone ID: MRT4577_119478C.1
catggggggccggcacccgcaggcgtaccagacctccgtgagaacgcccncggccgccgcggaggcagcaggagcggagacggagggggcagccgggaagggaggccgcnacagcggcggcattttttttttccagggcattcacctnatttggggggggggggtttttttttttttcngcaaacaacagcgngacgtacgggggcaacgacgggaactggctgaactgaccgggggggttcgataacgcctacttatgttgtaaggttctgctaccgtgttcacactgtcatacagggggcttattttcgtcagacgcggtcaggcgtaactacgttttgtttcatgatctttgctcgg

SEQ ID NO: 21364 - DNA, 858 bp, Zea mays
  Clone ID: MRT4577_119479C.1
ccacgcgtgccgcacgcgaagaaaaggagatagagtacaggttacagagaggcagagagcaaagatgtgtggtggtgcgatcctcgccgagctcatcccgactacgccggcccgccgcggcggcgcggcgtggcccgccggcaagtgcaagcggcggaaggcggacgacttcgaggccgcgttccgggagttcgacgaggactccgcctccgccgccggggcccccgccagccgcaagcgcgcccgcgccgccgacgccgtcatcgacctcgaggaacaagagcagcgcccggccgcggcggccctgaagcacgaggccgccgagtgctccggatccgacgcgctcccggacttctcgtggcagggcgtgtcggcggcctacgacgagccccccgcgccgcgcccggccttcgacttcgaggcgcggccggagagcgccgcggacgaggcgtcgccccgggcctccgactccgagtcggacgcgctgttcgactcgctcctcttcggcgaccagttcgccttcttcgacgccggcgcgtacgagtcgctggacagcctgttcagcgccgacgccgtgcagagcaacgccgccgcggcggcggaccaggacatgccgctgtggagcttcgacgacggctgcctcgtcgaggacaacctctcgttttaagcttcggcgactgctgctgtgtcttgagttttgtaaattacgacctgttttttttttagtttctgctcatgtatatctgtatcgatgccgatggtgagctgaatgaaatcatccttgtccggaaggaaaacccaaaaaaaaaacggacgcgtgggcgaacgcgtgggcgaacgcgtgggcggacgcgtggg

SEQ ID NO: 21365 - DNA, 538 bp, Zea mays
  Clone ID: MRT4577_11947C.1
gcacaaggcattattcactgatccatgtaagagaccacacccacatcatataggctaacagtgtaaaaaggaacgagctaaatatagaggcccgctgcttaactggacaaaccacacagaaatactgactcatttccacatctaaggaacctgataatcgtctactcacagaggcaacaattgtatcaaatggcaaaggaaggacactgaccaatgcaccaatggcagaaaactgaacacttaaactacatgattatgcaaaaagggcccctgataacaataacgagaatttgatccttagctaactaacacttctgtcacttgaaaccaacatgatgaacaaatgaccttccaagatggctgacaagtactaacaaaaaacctgaatagtcacggtacatgctacaatttcacaatctccataatacgcaaaccccattgttgtatgtccactctcagatcatatagatcccaaagagctcgagcaaaaaaattagcttgcagaagtagcaaaaatcaagctttgctggggagttat

SEQ ID NO: 21366 - DNA, 321 bp, Zea mays
  Clone ID: MRT4577_119480C.1
ttttggttggtttttttttaattttttggggaaaacaactatacataaaaagctattttagaaaaatgcgaatgctttttacaaaaaacagtaccttaaattccttggacacggtaaccaaaacatatgggattgcttcatttaccaaaaaaaacaacacgggaccattcgaaccttaacatcaggcccaacagtctaacaaaaacttgcacaaggtggcctgcattatgcagacgacacttgctccacacatacaaaacgatgaaggaactcttttattcttatcactacacccaaaaaatgcagatgctaggtaggttt

SEQ ID NO: 21367 - DNA, 1228 bp, Zea mays
  Clone ID: MRT4577_119481C.1
gtatcatacacaaccgtaagacaaggacgagagttcaagcgttcccacgcgtacggccaaacacacgcgaagaaaaggagatagagtacaggttacagacaggcagagagcaaagatgtgtggtggtgcgatcctcgccgagctcatcccgaccacgccggcgcgccgcggcggcgcggcgtggcccgccggcaagtgcaagcggcggaaggcgaacgacttcgaggccgcgttccgggagttcgacgaggactccgaggaggaggaggaggacgacgagggggtggtggagagcaagcccgccttcgtcgtccgcgcctcgtccgcggcgacgcagcccagggcgcgccaggagcagcggagccggcgccgggcgcccgaccagcagtacaggggcgtccggcgccgcccgtggggcaagtgggccgccgagatccgcgaccccgtcaagggcgtccgcgtctggctcggcaccttcccttccgccgaggccgccgcgcgcgcctacgaccacgccgcgcgccacatccgcgggcccagggccaagctcaacttcccctcctcctcctccgcctccgctgccggggcccccgccagccgcaagcgcgcccgcaccgccgacgccgacgccgtcatcgacctcgaggaacaagagcagcgtccggccgcggcggccctgaagcacgaggccgccgagtgctccggatccgacgcgctcccggacttctcgtggcaaggcgtgtcggcggcgtacgacgaggcctccgcgccgcgcccggccttcgacttcgaggcgcgcccggagagcgccgcggacgaggcgtcgccccgggcctccgactccgagtcggacgcgatgttcgactcgctcctcttcggcgaccagttcgccttcttcgacgccggcgcgtacgagtcgctggacagcctgttcagcgccgacgccgtgcagagcaacgccgccgccgcggcggaccaggacatgccgctgtggagcttcgacgacggctgcctcgtcgaggacaacctctcgttttaagcttcggcgactgttgctgtgtcttgagttttgtaaattacgatctgtttttttttttttgagtttctgctcatgtatatctgtatcgatggtgagctgaatgaaatcatccttctcaggaagtaaaacaaaaaaaaaaaaaaaaaaaaaaaaatgttctcgaggtcgacggtatcggcgagtcttgat

SEQ ID NO: 21368 - DNA, 186 bp, Zea mays
  Clone ID: MRT4577_119482C.1
acgggctcccccacggtactccagccgctagcctacgactccggcaccgtcaataccccggcaccggcgaacctggactaccggcggcgcccttacccgatatctttaacggcgaacagcgcccaccagatcccgcccctgcgatggagtcccgggtgaaccccaaagcataccccctggctgatg

SEQ ID NO: 21369 - DNA, 652 bp, Zea mays
  Clone ID: MRT4577_119483C.1
cccacgcgtccgcccacgcgtccggcctaccatggtggtgacggatgacggagaggtcgagatcccgtccgcttgaagactagccatccaaggggacttccattggtgctgctgaagtgttgttgttctgcatgctatcgatgtacctttttcaagcaacgcgagccatctattttttttgtctagctatgttagtgatatcttgtgagagacctcaatgttaccaccgtatctttgtctttgttggatggagagatttaagcacctcaaaaaaaaaaaaaaaaaaaaaaaaaaaaaaaaaaaaaaaaaaaaaaaaaaaaaaaaaaaaaaaaaaaaaaaaaaaaaaaaaaaaaaaaaaaaaaaaaaaaaaaaaaaattaaaaatttaaaaaaaaaaaaaagggggggcccttttaaaagacccaattttaactcccgggggttggaaaaaaaaatttttttttttggggccccaaaattaaattaaagggcccggtttttaaaaccggggaaggggaaaaacccgggggttcccaaattaaaaggctttggaaaaaatcccctttttcccaggtgggaaaaaaagaaaaaggcccccccccgtccccttttcaaaaatttggccccccttattgggaaatggacccccccct

SEQ ID NO: 21370 - DNA, 216 bp, Zea mays
  Clone ID: MRT4577_119484C.1
atcaatgctgctgatttgtccagttatcatcaagtcaatcatccaaaggggaagctgcatttcttcatttatgatacccacacccaccttcttactgttcttggtgctggcttctaagctgcttaatgaaaatcaaccgatactgcgtataactcttaaatgatgggagacccagcctacaaaagcactatcaatagtaaagtgaagacgctaaat

SEQ ID NO: 21371 - DNA, 627 bp, Zea mays
  Clone ID: MRT4577_119485C.1
catcatgtccatcaataagctaatattacagttacacaacttcgcaaagttacgtcaattggttaattttcgtgccaaacaattgtttgcaaatgcttgagtgtgtgagagagaggggaatatatgtacacattgtctgggtaaaagaaaaagaagagaatttccaagtgtaagcccattgagtatggcacatgacacaggaagaaaaacgccttttctccccaaaatgtaccgctgcattttttctttggagcagcgaagccaaggtaggtagtcatacagatgcgagaaaagaaaagtcagagtcgtcgtagatcgcgtaagagtttgtgacttaagcgttctttacaacgccaacctttgccggtcgtagtactctgccgttgagcttgaagcccttttgctgtgtgtggaagcaagtgccgtcctccttgtctggctgtggtgcctggaacacagcctcatggacgttgggatcgaacttctccgccgactccgagggatcgaatcgctccaagccgtgcttcttgagcgtgttgatgagaatggtgtcagtcatcttgatgccgtcgtgcagggcaatcagatcggtgttgtccgacttgagcttctcctcgggcacggtgc

SEQ ID NO: 21372 - DNA, 565 bp, Zea mays
  unsure (1)..(565): unsure at all n locations
  Clone ID: MRT4577_119486C.1
attactgcagccttagaatcctatatctacttggtttggttccctcctgagacagagtttcataacacagccacctggttggaattaccgcattgccgaacgacacaccgcactcacaacatgactaagggctcacacatacgatcaaacttattacgaaaaagacaatacgacattctggttgttgacatggacgtctggatgcataacaccacttgacctcatacaacccacaaaatgactcaattggagatagggactgtttacgcatcaaaaacaccccagttgaattatcgtcgagtggacctttttgttcccatatgcaaagccttataattcgcgaatttttctcgactaaaaggggattggcacttggcatcagcatgccttggtgccttgcgatactgaaactgacctccttattaccactcataacgtccttgcaaacagagcatgttaagcaccaaagggtgntgaatcccaggccccctacaaaccagactcgctgtttgtgcacaccttctgcaaggtgtgttcaccttagagagcaccaatgtactcttcg

SEQ ID NO: 21373 - DNA, 276 bp, Zea mays
  Clone ID: MRT4577_119487C.1
taggtcgatagcggccaggctattctcttgttccacatgaactcataaaagcggtactggctggacacggggttcctcacagacactctcatagaggaaggcaggaagacctacattatgaaagccccgtctcgctactcaaagctgccatacatgtcatccaggtgcagctactaagacaagaccaactgggcgctgcaagtgaaggcacccataccatcaatttgcctaagctatccatgtgcatccatcatcagctccttttcacaggcacag

SEQ ID NO: 21374 - DNA, 720 bp, Zea mays
  Clone ID: MRT4577_119488C.1
acccaaagccaagttgcactcctcctcctatcctcttcctcgccgaggcggcgaccggccagcgccgcagcagcaaccccggccgccgccagctccacctccaccgcccgcgcgtctccgattcggcgaatttggggctgaggaaagaggaggagcgacttctctctgctctggtggttgcaacttcaggacaagatgcacttccttgcatcatttcacggccctgcaggttttgagcttttgtctgtttccctgggatggatgccaagaagttcctgcagatggtcgaagacaagaagaagagactccttgagaagaaggaagccccactgaaatggcagcagaaactggaagcggcaattaaggccatgaagagaaggagaagaagctcaagtcaaaaaagcacaggaggcgaagctattcttcctcagagtctgacagtgaatccgagagcgacagtgatcggaaacacaggaagaggaaggaccgcaaaaggcacaggaaacatggccactctgactctgatggtgccaggaggcgcaagcacaggtcaaagaggaggagcttggactctagtgatgagagcgacagtgatgaatatgatagcgaatctgaagaagagcgcccaaggaagaagcactcgcacaggaggaagcatcaccgacactctccaaggtcagagtctgatgcttcagattcagcagcgatgatgatgagcgg

SEQ ID NO: 21375 - DNA, 482 bp, Zea mays
  Clone ID: MRT4577_119489C.1
ctcatacatatgttggaagaggttgatcagtaagtatcctacatgtgttttacactatccataaatgttacacgacattttcacttttattttcagttattctcttaatttttagtacaccatgtttaccatgccatgcacaacaatctgtgataaatgtgaaccttgatccattgccttgagccacttggctatatccaccccttatctagttaaatgattttatcttttttccattaatcattgttctatttgttttgacttccatacctgatcgagatagtggacataggatgccactctttaaaatggaaaaggagtaatcagttgtgacacggaaaaaaacgacttcttttgtagctcgacatttattggagaaattcaactgtatctttggtttgaagaatctttgttttcaactgcaaaaaggcctctagttaagttggttaggtggtctaagtagcactgctcagtgctcactc

SEQ ID NO: 21376 - DNA, 899 bp, Zea mays
  unsure (1)..(899): unsure at all n locations
  Clone ID: MRT4577_11948C.1
ctcgaggccggccgggtactctctccgcaatgtgatgcctgtactggcggacaaatatcatgccattgcttttgattggctcgggtttggattttctgataagcctcaaccaaaatatggttttgactatacacttgatgagtatacttcatccttggaatttctagtcaatgctgttgctcctgataagctctctattgttgttcagggctactttgctccggttgcagtcaaatatgctagtgaacaccaagacaaattgaatcatcttgtactagtgaatccaccaataaccgataaacatttgaaccttccatccaccctggcttcgttcagcaacttcttgttgggtgagatattttctcaggatcctctcagagctagtgataaggtattgactagttgtggtccatacatgatgaaggaagaagatgctatggtgtatagaaggccataccttgtctctggttcctcggggtttgcacttaatgcaataagcaaagctatgaaaaaggaccttaaggcttatattgaatccatgagaagcatattaagaagcagttcgtggaaaacaaagacaacagtatgctggggcatgagagatcgttggctaagctatgatggggtggaagatttttttggaggcctaaaccagaagattgtagaactgccaatggcggggcaccatgtgcaggaggaccgtggtgaagaattaggcaatataatcaaaagtatactgagatgatgactgcggatcgcgtgcagggggtgaggctctagagcgtgccaagaaccagatgctttacgaggggcgagacggggtctcagcagttgcactcgaaaaattctggcagatgcacggggcaatccgctctatgcatcaatntttatcaagagaa

SEQ ID NO: 21377 - DNA, 862 bp, Zea mays
  Clone ID: MRT4577_119490C.1
gcctcccccagcccaacccgaacgccacgcccaaacccaaagccaagtcgcactcctcctcctcctcctcctatcctcttcctcgccgaggcggctaccggccagcgccgccaccgccaccgcccgcgcatctccgttcaattcggtgactcgctacgctccccctgcgttcttctggcaaattcagcgaatttggggctgaggaaagaggaggaacgacttttcgctggtggcctgaaattcaggacaaggttttgagcttttgtctgtttcgctgggatggatgccaagaagttcctgcagatggtcgaagacaagaagaagagactcctcgagaagaaggaagcccctctgaaatggcagcagaaactggaagcagcaatcaaggccactgaagaaaaggagaagaagctcaagtcgaaaaagcacaggagacgaagctattcttcctcagaatctgacagtgaatccgagagcgacagtgatcggaaacacaggaagaggaaggaccgcaaaaggcacaaaagacatggccattctgactctgatggtgccaggaggcgcaagcacaggtcaaagaggaggagctcgggctctagcgacgagagcgacagtgatgaatatgatggcgaatctgaagaagagcgccgaaggaagaagcactcgcacaggaggaagcatcgccgacactcttcaaggtcagagtctgacgcctcagattacagcagcgatgatgatgagcgaaggtcaaccaggaaggaccattctaggagccggaggcgttgccaccggtcctcagacgatgaatctgagggagagatcaggtcgaggcataggaagcgtcatcacagatcaagtgacg

SEQ ID NO: 21378 - DNA, 858 bp, Zea mays
  unsure (1)..(858): unsure at all n locations
  Clone ID: MRT4577_119491C.1
gcctcccccagcccaacccgaacgccacgcccaaacccaaagccaagtcgcactcctcctcctcctcctcctatcctcttcctcgccgaggcggctaccggccagcgccgccaccgccaccgcccgcgcatctccgttcaattcggcgaatttggggctgaggaaagaggaggaacgacttttcgctggtggcctgaaattcaggacaagatgcacttgcttgcatcatttcacggccctgcaggttttgagcttttgtctgtttcgctgggatggatgccaagaagttcctgcagatggtcgaagacaagaagaagagactcctcgagaagaaggaagcccctctgaaatggcagcagaaactggaagcagcaatcaaggccactgaagaaaaggagaagaagctcaagtcgaaaaagcacaggagacgaagctattcttcctcagaatctgacagtgaatccgagagcgacagtgatcggaaacacaggaagaggaaggaccgcaaaaggcacaaaagacatggccattctgactctgatggtgccaggaggcgcaagcacaggtcaaagaggaggagctcgggctctagcgacgagagcgacagtgatgaatatgatggcgaatctgaagaagagcgccgaaggaagaagcactcgcacaggaggaagcatcgccgacactcttcaaggtcagagtctgacgcctcagattacagcagcgatgatgatgagcgaaggtcaaccaggaaggaccattctaggagccggaggcgttgccaccggtcctcagacgatgaatctgangagaagatcaggtcgaggcataggaagcgtcatcacagaatcagtgacgagg

SEQ ID NO: 21379 - DNA, 519 bp, Zea mays
  Clone ID: MRT4577_119492C.1
tgaattcggcacgaggaccataagaaacgaggtaagacgccaaactagaggaacgggcgacaccgacggcacacataaagggacgctcgtctcgtctcgacacgtgccggcgccatgagtcgatctgggcgcgtggcctgccactactgctgctgctccttctactctccgtaggcgaggaggcagcgactgcacgtggtcatcccgtcggcatgtgcatcatgacatacaacacggagaacggaactcggagaatacagcgaaccgagccgcatgcacatgccatatacgacctaggcctagccgagcaaggccgatcctacaactcacgaagcccacgcctatggctatcgcgaccgaaggttgctctggtgatgaaaaaacctacgatgatgaaactctcacaacaagcgcgccacctgacgctatttgcgtctcattatgaaccagtgattcgacctaaacagctacgattgccgctgctaaaaccttacttgcttggagcgctgatacgaaaga

SEQ ID NO: 21380 - DNA, 849 bp, Zea mays
  unsure (1)..(849): unsure at all n locations
  Clone ID: MRT4577_119493C.1
aacccaacccaaacggcacgcccaaacccaaagccaagtcgcactcctcctcctatcctcttcctcgccgaggcggcgaccggccagcgccgcagcagcaaccccggccgccgccagctccacctccaccgcccgcgcgtctccgattcggcgaatttggggctgaggaaagaggaggagcgacttctctctgctctggtggttgcaacttcaggacaaggttttgagcttttgtctgtttccctgggatggatgccaagaagttcctgcagatggtcgaagacaagaagaagagactccttgagaagaaggaagccccactgaaatggcagcagaaactggaagcggcaattaaggccactgaagagaaggagaagaagctcaagtcaaaaaaagcacaggaggcgaagctattcttcctcagagtctgacagtgaatccgagagcgacagtgatcggaaacacaggaagaggaaggaccgcaaaaggcacaggaaacatggccactctgactctgatggtgccaggaggcgcaagcacaggtcaaagaggaggagcttggactctagtgatgagagcgacagtgatgaatatgatagcgaatctgaagaagagcgcccaaggaagaagcactcgcacaggaggaagcatcaccgacactctccaaggtcagagtctgatgcttcagattacagcagcgatgatgatgagcggagatcaaccaggaaggaccacacnaggagccgcaggcgtcgccaccgatcattagacgatgaatctgagngacagatcaagtcgagccataggaagcgtcacagatcaagtgacgaggacagccatcagatctga

SEQ ID NO: 21381 - DNA, 504 bp, Zea mays
  Clone ID: MRT4577_119494C.1
tcgcaggtgcgcagcgtctccgccattgcggcggccctggacgaacctggggcgacgtcgaagagcgcgaggacggccggcagcgccgccgtcgtgaacgggatggagtcggcggcgcggcgcggcaggaggcccagcgcggccggcgccgcggcctggaagtggagcgtcaggcgctcgcccacgcgcaccgcttcctcgtgaaagaacaccgccgtgtgaggcgtcggcgtgcccgcaccgccgcttcgcgccgtcgcgcggacctccgagtggtggtgctcgctgggcgcttcgtaggcggagtaatcgtagctgaactgatcgtctctcgggccgctgccggcgacctcttggctccgcgccttgtagtcgtcgtagctgaatgtcgtgtcgtctctcgagacgccgctggccggtaccccttggctcggcgctctgtagctgtagctgaacggcgtgtcgtctctcgcgccgccgctggccggtactttttgttggttc

SEQ ID NO: 21382 - DNA, 263 bp, Zea mays
  Clone ID: MRT4577_119495C.1
cccatgcgttcgtccactcgtgagtgcttcactcagtcccttcaagcggctgactgtcgtcgtcgatctcctgcaaatagctgcgagacgcgcgcatacaacggagggcagtcgtgtgaaatcccatacacagcggcgcttttgtgcggaggcgagcgcatagcacgggtccgatttatctgcgaggtgccccggagacagcgacctggcactaccgcgcttaaacagctcatccaagcaagcgacctgcgcgtcggatcgtg

SEQ ID NO: 21383 - DNA, 928 bp, Zea mays
  Clone ID: MRT4577_119496C.1
gagctatgacgtcgcatgcacgcgtacgtaagctcggaattcggctcgagttaaaacctaccattctactttacaggatggaagagacaaaaacgatttgctgatttttttttcagaacaaaaccgctttggcgttcaaaaaggcatcagtaaataacaaatttgcatttttgaattcaaacttagctattcgtggaagattacgttcttaaatcacataggaaatttgttaactgatattttcttattgtctagcctaatttctatcttgtatcttgatatatacatatatattgttgacttgtttaggatcatgacttttttgctccataactatttgtcatggataaattttgttgtatttaagttcaaattagctagaggcgtgatcctaactgggtttgagttttagtaaggtctatattcagatgtttcttcaatcattatgcatacttcttccttatctaatctcttgtaaaggataggttcctttctgtctgacatattgagttctgattgttaggggttacaactattgctgggggaaaatcaggcagaggagggcatgttgacgggccaagtgacgaggcaaaattttctactgattttgaagttcgttacattggcagtagctgctcgcttctggtgattgacagaggaaaccaagcaatccgggagattcagctccactttgatgactgtgtataccagtatgaagctggttttcctctaggagtggcactacttcttgctgccgcattctttggctacatgcttgcactgctccaacgccgagttttagggatgtattcaaatggagatgagcaggaagacgagagtccagtgaaagctaaactatctagcatcccacctccgtaccagaagccactgaagtcttctcttcgccccccgctgattccaatgatga

SEQ ID NO: 21384 - DNA, 407 bp, Zea mays
  unsure (1)..(407): unsure at all n locations
  Clone ID: MRT4577_119497C.1
cacgcgtacggaaaaaaggcccaaacgcaattccatgtccgttcaagacacaagaaaaaaatcggggcgggtctttttaattgcggcgcggcatccactancccacaaaaatctcttactcaacgggctcaaggtatggatctcgctcaccttactcccgaagcacaacgtacctaagtcgctctatgattcaacgactctagtgatgctgaaaaccctgccaacaacctatatgtgacttgcttgtcacctcgtctaacgcatctagatctccacaaccacttatgcactgactgtgatgtgattgatacaagctttgtgtatgatccttgaacaaagcaatcacaggggtcttgttcttttaccataccttctcttaaagatacagatcgctgcatcaaatatct

SEQ ID NO: 21385 - DNA, 1336 bp, Zea mays
  Clone ID: MRT4577_119498C.1
aagcttcaagggagggagggagggagggacagggagagccagaggggagggagaagaaaatggtcgcggcggcggcggaggtgtcgacggcggcgacggctagcagtagccccccggcggaggagggggagcggcgggacgagagcgagagcgacggggagatggcggggctggcggccgtgctggacttcgacatgctgtgcgcgtccgtggcgctgtcggcggagaggaggaaggccggcgcggcgctggcgggcgcggccggcgactgcggcggtggaggcggaggggtgcagaggatgtgggagggcgacgtcgtgctggattgcctagacgaccggcgaatcgcgctcgagacgtcctgctgcccatgctaccggtttggtaagaacatgcggagagccaatctcggatcttgcttccttcagggaatggtttactgcattctgttggctgctgtcctaatcagcctaattgccttttctgtaacaaggcatcatatatatttatatatgggaatcggctctgtcctcttgatagccatctatactggttatttccggagaagaatcaggaagcaattcaacattcggggtactgagagcagtctggacgattgtgttctccatctcatatgtccttgctgtacgctgtgccaggaggctagaactttggagatgaataatgtccagtgtggtgtctggcatggccgaggtgataccatttgtttagggagcaacggtgcaggaaacaaggctttcgctgccctgaacaaggcctctctcgtgcctgtaaagtccccggggctgtgtggcatggatagatcgtcaagcgcagctgacgagcagcagccgcttgtcccaccggaccaactggagcaggtttaggtattctctgtcgccacgacctctgcactttcctagaagggcttggacagcgccgacggaaaaaaaaaatcgtcctctgccggattattaggcgcctgcatctgcatccattggtcccgagaactggactttgcagctaccgtacatgggtgatgggcgcagtcgacctgctgctggctgctgctgttgtaaaattcagtgatagattttctcttgcagtcgaattgtttaggtcgaagactgtatcttcataatgtcacgacacgtgctcaggccttttgcctgaatccaactgtaaatttcagatccaatctagcagttcgagttacatagacaggaatgagatggtaatgttctcttcaccggccgtgcttgctccctgtatctttcatacgctgccccttgtcgttcctgttctcaggagcttgattaacactgttttctttacg

SEQ ID NO: 21386 - DNA, 391 bp, Zea mays
  unsure (1)..(391): unsure at all n locations
  Clone ID: MRT4577_119499C.1
tgaaaccctcgttcagggctgcgttcatcagaccacccaacacggaagcaagatttcacttcatcagctatgccaatcctagcaccagagtttgctgccaagtatataaggggaagctttctttcgaagccaggttggcgacagttgtcaaatgggtgcctatcttgcttgatccgaggacacaggtgggcgacttgccagagtcgacatggccaatgaccacaatgttgatgtgagtgttctgcttacccatggctgaaggaaaatgttacactgctcgtcgggcgtnagaagaggggtgggagatctgttcgccggtgatctgaggatcctgtcacccgagcgtcgcctactgccatntctgtntgtncccggctgantctggaaatct

SEQ ID NO: 21387 - DNA, 1758 bp, Zea mays
  Clone ID: MRT4577_11949C.1
ctcgaggccggccgggaaaaccccgttgaatccggttgctcatggcagcatcacccacctccaatggcgccgcagctcgccgcagctggcccgaccttatacgcgcctcgctttggcaccgccctcccctgccgcgcccggacaaggaagccggtctctcggcgccgggccgcgctccccaaggatgaggattattacttgatcgatgcggatgagtccattggggatggcttctcgttcagtggagggaagtacggggatggaccaagtaagtcggatgagtggtttgctcaagggaaaatggtaaacgcttacccagtatatggggacaaagggaaggcaaaagatccattctttggcctgacgatgggatcaggatctcaatcttcatatgatattttcagatggttctgtgtggaggctgggagctcttctagtcctaaagtgcttttaattcacggcttgccatcgcaggcatactcttaccgcaatgtgatgcctgtactggcggacaaatatcatgccattgcttttgattggctcgggtttggattttctgataagcctcaaccaaaatatggttttgactatacacttgatgagtatacttcatccttggaatttctagtcaatgctgttgctcctgataagctctctattgttgttcagggctactttgctccggttgcagtcaaatatgctagtgaacaccaagacaaattgaatcatcttgtactagtgaatccaccaataaccgataaacatttgaaccttccatccaccctggcttcgttcagcaacttcttgttgggtgagatattttctcaggatcctctcagagctagtgataaggtattgactagttgtggtccatacatgatgaaggaagaagatgctatggtgtatagaaggccataccttgtctctggttcctcggggtttgcacttaatgcaataagcaaagctatgaaaaaggaccttaaggcttatattgaatccatgagaagcatattaagaagcagttcgtggaaaacaaagacaacagtatgctggggcatgagagatcgttggctaagctatgatggggtggaagaattttttggaggcctaaaccagaagattgtagaactgccaatggcggggcaccatgtgcaggaggaccgtggtgaagaattaggcaatataatcaaaagtatactgaggtaatgttgttggagtctttttctaatcttgtctcttagttttctccttgtatacattaccatatgagcaaacttttgttggcttgtatgccataatcaagtgtgcgtgtcacacattcatttgactgcggatcgcgtgcagggggtgaggctctagagcgtgccaagaaccagatgctttacgaggggtcaaattgtggcgaagcaataggatacgaaaaatcgagtatgatgcacggggcaatccgctctatgcatcaatttttatcaagagaacgccaccctgaactgaagcggcgatgtggaacattttcagacaacaacaattgattgacgcccttgcgaaatcttttttttcctcctaaactaaagtagcagaactaatgaaatatatccaaaaaaaaaggaaggaagaaagaaaaggtatccccgtgcgtgcatgtatcggtcacttgtacgttgctcgtgcagtgcaatgcaatgcaacgacggcgacgttctgttggaatcgtcgtggtcgttttgcaaaaaaaaaaaaaaaaaaaaaaaaaaaaaa

SEQ ID NO: 21388 - DNA, 284 bp, Zea mays
  Clone ID: MRT4577_1194C.1
gccacaggtcattccacacgtggtctctcacgctcactggcacttcaaatttgaggctggtggaatatggtgcgagcatcatattatcgatcacatggctgcgtacgctcttaatagcgacggatgctatgcgtggactcgcaagaactacgatggtgacatgcagagcgatatcctagctgaaggtgttggatctgtgggtgtgatgacatgagagatggtgtgccctggctgaaaaaccatcagagctgaagctgaccatggcacagttacccgtcatttac

SEQ ID NO: 21389 - DNA, 381 bp, Zea mays
  Clone ID: MRT4577_119500C.1
gggggggtaaaaggtcacattgcatagcaggggggtcgtttccaaaggggggccgctttgggggccccacaaaggggggcccccctccggggggggggtttaaaaaaaaagcagcggctaggcctttcattcattcatggggggggggaaaaaaaagcacaggcccattggagttaaccatgtgggtaaaacatggggaaaacctaattaaaaattgcccccccccaacactgggggggaagttttccccccaaagggttttcacccatggggaaactgcattgggcccaaagggggcatgtttaaccccgcacaaaaaaccttttgcctaaaaactaaaaggggctgggggaaatatcctacaaaattttggggttttgg

SEQ ID NO: 21390 - DNA, 400 bp, Zea mays
  Clone ID: MRT4577_119502C.1
cagtcggtcatcatccctctgtgaaggatcgcctatcgcggctctaccaacattatgcctcaaccgctccacgttgaatcacagctttcctagatcgcgacgcgagttacccgtgtcaagctactacgacgagaacctcgccccgtgcgaacgctcgatctgacgctgacttgatctgcagtcctgatggctgcaccccaccgtgatcttcgagctgatcgccacagtgctggtactgtacatcacgtcggccacggggatcgcatacaagcaccatacggacgcttcgctgtcaggggccgacacaaacgtgcggagtatgtgggggtgctgcacatctgctgtgccttcggaggaatgatcttcgtcctcgattactgcacctccgagatcacgaagt

SEQ ID NO: 21391 - DNA, 587 bp, Zea mays
  unsure (1)..(587): unsure at all n locations
  Clone ID: MRT4577_119503C.1
tgtgcggcgctcaggcggcgggtcggactacaagactacctcccacttctgactgaccacatgagccaagacgtgctaacagaatactctatctatcttactcttatagccgcttccatcttgcaccaaaccacctgcttcctctgtcactccctgatcgcccgttgcgccgttgcctgtgttcgatcccgcatcaccatgcgccggatgtgcaagagctgattattcatgatatggcactaacttggctgccattcgaaccttggcccttgctcgcataatacgccattgtgcctgagcgacgaggttgccggtacctattagtgcaacagcgcgttgctctcgtgctactggaactgcttcgatctaatccggagagcatatatgtgatcctctcgcgctgagagatgatagtgtacttgctgtgcccgttgcctcacatcctgaaatatgaacatcatcacagtgcacgaggcttggagttctcaatgccgttgcttctatcttctcagagggagaaagtgcactacctgncgaaccccatcctgaagtacgggaacagcatccttgccatctgtccatgtcaa

SEQ ID NO: 21392 - DNA, 254 bp, Zea mays
  Clone ID: MRT4577_119504C.1
caggcagccccaggcagcgcctgttgcggtggatgagcatgacgctactgcgcctggcctggatcccgaccggtagtataagatgaacctctacgggcttcgtggcaggcagcgtgtgctgccctgagctgtggcggccaagactgctcctcaggaggatgtggacgagacccccagccccacagaactgggcacggaggctccggagtcccccgaggagccgctcctggtggagctgacagtgacaggatcct

SEQ ID NO: 21393 - DNA, 419 bp, Zea mays
  Clone ID: MRT4577_119505C.1
attcggctcgagtcaagtcctgaaaaactacagactagttaatcagactacttacgatatgtagctatcaccacttggaatgtcgtttactggcacattctgttctttcacaagttattggttatttcatttgttccagtttcgctttagggatgtatgctctgattttggtttagggtttagggaaaacctaatgagttccaactttaattacgccactggataaaatggtatgtatttcaaacagttgtgtggttcgtgtaaagcctgtatgtgcatgtgtggttggttgctgcagaacaaaaaaaaaaaaactcggccggggagggaaagaccgccctcccggtattaaattaagaagagaccgaaacaatggtcccggccgaaaaaatccccgaaccctggcccctataactaac

SEQ ID NO: 21394 - DNA, 137 bp, Zea mays
  Clone ID: MRT4577_119506C.1
cttgtgtttaggctgcaatcctcggcctagggtgggtccctaggaccaaggcgcgcgtattacccactctcttcctggtgcgagaccagtttggttgcttcttgtagtgttaagcgaagatttgatgattatcagac

SEQ ID NO: 21395 - DNA, 434 bp, Zea mays
  Clone ID: MRT4577_119507C.1
ttttaacttttttagtatttaagatatatttcctgcagcccagggaaataaatggaaggtgaattgctatgtggaattaatcttcatgcatcacggtaccttgatctggccttaagtgtggccttccccattaacaagacttttaccccacaaaagcaagggatatatgggtgaaaaaaaaaaaaagaggcttccttcatgtaaaaacccaccaactcgccctaccatattgtggatcatgacataacgagtcccacaaggacaaatctcgtgtggcacagtcctcaacaggtgccttctaatgggatggtttaacaactccttgcatgtagccacatcgtgaggacttttgttttttttccgcggcctccttaaatgtctcttcagggacaagctcaagagcggcattattatggccctgaacagacccagcg

SEQ ID NO: 21396 - DNA, 315 bp, Zea mays
  Clone ID: MRT4577_119508C.1
cgacgcgtacgcgaacacgtcatcgatttgatcttagactatgtctacgtctattgcggcgccttcttcggcgtcgggatgcgcccatcgaagtggacgcagacggtcaagaagacgtacaacctgctgcacaccacgagccagcacaccgatccaggtgtacacggggacattgacgacaatcatgctcacgttcgactactccggcatgtggaacgtgcattacaacatctagctgcggtactacctctgcgtgcacttctacatgagcgtgatctcactggggcaatcactgaacgtctagtacaacatgct

SEQ ID NO: 21397 - DNA, 972 bp, Zea mays
  Clone ID: MRT4577_119509C.1
cagatggtgctgtgtgcgctggcaaatacctttcagcattgcaagaaaaaggctactactctaggagagctgaacaaatcatacatcgagatttgtagatcaacccaagttccagcacttggaatgcttgaattttctaacatgtgtatggttttgagtgatcaggggttcatgaagttggggcaatccaaggaagataagcttaggagagtaacacttcagattgacagttcagatatcacttttgcctttaagggaaatcgtttctttcaaaaatgcctggagcagcgatgctaaccagactcaatagtagatcaatacatgtagccaattgttgttatacactatagtattagtttattgacattatcaagtaccatcagtttcaaccctggatgtatactcaggtgctttcattcaacatgatcaaaccttggttacatcacgaaactcttccttggagtgcagagaagtgtacatgtgacgagttatgacagtattacgtgacataatttttccaaaatatagctgagtgtagttatgttttctcaatttttggttcatccagaactgattgatcatgtagctaaccatttagcataccaagaacatttattgacacattccttgctggaagttgacaccagtaatgagaaaatgcaaataattaatttgtcttttccatgattcaaaggcgtgaataaaaaaaaaaaaaaaaaaaaaaaaaaaaaaaaaaaaaaaaaaaaaaaaaaaaaaaaaaaaaaaaaaaaaaaaaaaaaaaaaaaaaaaagaaaaaaaatgaaaaaataatgaaatgttaattggggtttattgagtagtgttgtgggatttgttgtggctgtgggttttttgtggttggtttgtggtttttttggctttgtttctgtttggttgtagtagtggtgtggtttgggtgggttgggggttttggtagggtttgcctttttgtga

SEQ ID NO: 21398 - DNA, 195 bp, Zea mays
  Clone ID: MRT4577_11950C.1
caatgggtcattcagggcattggttacactggcacccatggggaagggggaaacttcggtacctaatggccgtaaaccagggaactagcttttgggagctaggccgggggtccattaccttattactaaaagacctgcccgggcgggccgtccaaagggccaattttggaaatttcattacaatggggggccgtt

SEQ ID NO: 21399 - DNA, 173 bp, Zea mays
  Clone ID: MRT4577_119510C.1
caccaatgggaaccataacatgggtgaaagccttattatattggggaaagggttccacgggttggggttgaaaaatagaacccggtctttttggaatcccttattccttaccaccatgctttctcctttttggttaaagtcccccaattttggaaaaatttaccaaataaagg

SEQ ID NO: 21400 - DNA, 420 bp, Zea mays
  Clone ID: MRT4577_119511C.1
cacggtcctccatcagctgtacgagatgaatcccccagcctacacctggctctatagtgacatttctgtcaacgatccattagatggcgattacttccttcgcttgctcgccaaggagaggcaagacctcgctgagagagtgatgatcacgcgccttcacctatacggcaaatggatcaagagatgcgaccacgcgatgatgtacgagcggatctccaaagagaacctggatatcatgcgccaaaggttggtcgagacagtggtctggccgaccgatgacacaaacttcggcgagtctaaggattgacgcggagcaatagctgcttcaatagatgctgtatattttcttcaatgttttttgactggctcatttctgtatatggcagttctgcatgaatagaacagttgataggggtctgt

SEQ ID NO: 21401 - DNA, 661 bp, Zea mays
  Clone ID: MRT4577_119512C.1
gggtacctcgaggccggccgggccgggctactgacgagctcgccatggcctccctctcctctgccgccgtcaccgccccttccttcgccgcaccagcgccagcccgcgccgtggtcagaaggaggtccttcaccgtgcgcgcctctctccgcaaggccaccggcaccgccgccgtggcaatggctgccagcgccctgcttgccggcggtgccatggcccaggaggtgctgctgggcgcaggcgacggcgggctcgacttcgagcccagccagttcaccgtcaaggtcggcgacaccatcacattcaagaacaacgccggcttcccgcacaacgactcttcgaccaacaaacgtgccgagcggagtctacgccaccaagatctcgcaagagaatcctcaacacgtcagaagagacctactccgacaccctcaccgtgccgataacctacggcttctactgcagatcgcatcgaggagccgaaatggactataagatcaacgtgaactagttaagctagctatcgatcaacatccattcgtggattacctgctgcttcctgctttgtactccgccgatgtgcccatctctacatggtttcttcttctccaacaacctctgctacgactacctatatatgcatgctactagctgattgattgtc

SEQ ID NO: 21402 - DNA, 293 bp, Zea mays
  Clone ID: MRT4577_119513C.1
tcttcctaaaaaaaaaaaaaaaaaaaaaaaaaaaaaatttaaaaaaaaaaaaaaacaaacactctaaaaagatccagaataacatactcatacatacaacaacataaactcttctataataaaacctacattccaattcactgaccatcattttacaacatcttaactactaaaaccctgaccataccaatcttaatatccttacatcacataccccttttttcagcatccttaatagcaaacaatccctaaccgctatcccttcccaacagttcttcatcctgaatttctaa

SEQ ID NO: 21403 - DNA, 606 bp, Zea mays
  Clone ID: MRT4577_119514C.1
aattcggcacgcccctccttcctcctagctaggtcgtcctgcgcctataaacgcacagacacagcctctcctttgcctgcctccccttccctcccgcgggtggcttcgtccttcggtgcttctcgttttaggagtgaggcagccaacggggttgctaaaggcacagctagcgaagcttctgcagcacagcgtctcgtcgagaagtcgagaagctagctcgcttctgccagaggtcctgcaggcaggtgaggtctagtctagcggccgtgctggtggtgctgaggtaagggaagctgctgcacgcgagcagcgcgcgcccgatcgagaccgtgaagctggcggccggcaagtggtgggagcggccagatgacacggccatgcccggaatggacccgggcgggcgcggcagctcgcgctacttccaccagctgctccggccgcagcagcagcagtcctcgccgctgtcgcccaactcccacgtcaagatggagcaccacaggatgtctgcagacaagagccccgtcggcgaggccgaggcgggcgggagccaggccggcgcggcagctcccgcctcgtcaaccagctgctgcgtcgagggtggcggca

SEQ ID NO: 21404 - DNA, 543 bp, Zea mays
  Clone ID: MRT4577_119515C.1
ggtacctcagcggcgggaatagtcagagaggggtgatcgggtgatctccccaatcactggtaattaaacgttggcgattatctacgtacgaacagatgagctaagcaatcaagaccatcacataacatcacatgaattacggcgacacggatgcacactcccactagcgtgcatgaggaagaaagctgctcgcttatccctctccacgaatgcatcggtccagtacgacggaagcaaggcaagaacctcccgatgtcgcgccacgacactgagaggagatagtgacgaccaacggctcaccggtcatgcagggggactaggtaaagacacctccgcatgagggttagatattttgatacgagtgcctgtacaggatcgtgaacgccgacctttccaccgatctattcctggaagcaacgtgatgggtgttggaactggattgaacacgagctcttgaggggatctcactgcctgaaggcatcaccactcttgctaaatcacacggacttgagttgcaggcattgagtgctagcgcgaacgaag

SEQ ID NO: 21405 - DNA, 704 bp, Zea mays
  Clone ID: MRT4577_119516C.1
gggaccctcgaggccggccgggatgtcttgttgtttctaactggaggaatggtgttaacctgctgtatcatttccttgaatggcttatgtgagagggaggaggacctgagcagcagctcttgcaaaaaaaaaaaaaaaaaaaaaaaaaaaaaaaaaaaaaaaaaaaaaaaaaaaaaaaaaaaaaaaaaaaaaaaaaaaaaaaaaaaaaaaaaaaaaaaaaaaaaaaaaaaaaaaaaaaaaaaaaaaaaaaaaaaaaaaaaaaaaaaaaaatttcccggaaacaaaacgggggccccccccccaaattttccccgccgggccctgggggaaaccctttggggatggggttttgccccgggaaaacccgggggccattaaaaagtcccggggggtttccccccaggaattctttttccggcaattttttaaaaattcggtttaacgttttaaaggcccggatttccggggggggaaccctaaatttttttttccccctaagaaaaaacttttaaaaaaaaaagtttttgggggggggggggccaaaaaaaaccggggggaaaataaagacccccaagggccccggggggtcaaaaagggaaccccccccgggaagggggtttcggggaaaaacaaacccaacaagtttgggggggggggggggaaaaacccccaaaggttcccccttaaaggaaattttgggaaaa

SEQ ID NO: 21406 - DNA, 183 bp, Zea mays
  Clone ID: MRT4577_119517C.1
aaatatatttttttttttgaagagaaaagcattaatatattacatggcaaaagccgttgagatacatacatataaataagtcctaagcataagccccggaacatcacttattactaaacagaaaaaaaaaagcaaaaaaaaatacatgttaaataatcatagtagatacaaaccaacaggaac

SEQ ID NO: 21407 - DNA, 421 bp, Zea mays
  Clone ID: MRT4577_119518C.1
gcaggccgtaccctctcgttttctgtctgcagctgcaacagcatcgccagtgagcaccaggactggatcccgtcgccactgcgacccgtcagcttcaccagtggcaaccaagtatttgtcaggatccagattgggctgacgaagagcggtcctgggagctcgccggcatcgcgcccaccccagtgtggcctctcctccgattccggcggtgccaacatgcggctaaccttcgctatgtgcaaaaagattgtggaggtacagttgttttgccaccgtcgagcacaactttaagtacttccatatatatgaagttgggacatattcgtacgacgacacatcgattttataatttcttcagatgatgaatgatgacatgtggtgggcatcagagtcggaaggccagggagaaaccatgacgtgc

SEQ ID NO: 21408 - DNA, 282 bp, Zea mays
  Clone ID: MRT4577_119519C.1
tgattgggcgttgtgatgccgcgacgaagctcgaatgcggtcgagcacaaacctgcagactctccatggcaggctccacctccctcgagccccttgccgtgcccgccgctgcatctagccatcgcttccacacaacatacgagcatgctaagagggccattgctagagtgatggaggtgcttgttctagttaaaaatgaccatagcttttcaccccctgaagctgtttaagctgtggggccaatcctatcaaaaatctaagtatggagagtttcaactcact

SEQ ID NO: 21409 - DNA, 633 bp, Zea mays
  unsure (1)..(633): unsure at all n locations
  Clone ID: MRT4577_11951C.1
ggggcaaccgacacaaccgagnagcgacggnagnatatacccnaacgctctnngctgcttcatgnatgagctggnaagggacnnatcagcatgnacactgctatgctcaataatggtagtagaaagaactanngtttatnnttgtctactctacgtaggcagnagnagtgctgnngtggttctcatgnaactcaaacctattctgtgctgtgctgtgccctacctgcactgaaccacgnagnnggggctatgctaactagtagtagctttacagaagattcaagttcggttnggttgacnnttggttnntcaattcaagttgggtnntgggaagaacgtaaaactaacatggnnatgctgttgcgtacttcactaggaagnngtgatggctcagaactnnggtgagagtcctggtgcgccatgggatcacagntcctcgaggccgagnaggaagggctgagaatctaacctacgacaaccgtccttctacnagtcgtcgagaaacaagtcaacgtcgcagggtattcgatnagatcgtcacttgctttcagtgctaatgnnaaacggnnaaacagnnagtatgcnnntatgttctgaagaaaaaccaagtgagaactttaatcaatttcaact

SEQ ID NO: 21410 - DNA, 344 bp, Zea mays
  unsure (1)..(344): unsure at all n locations
  Clone ID: MRT4577_119520C.1
atntgactctgcctctggcacctacactctctacttaattanttggagatgctatgtaagaagtaacccacatcccgctcctctgggtgcggccggatgtggtcatcaagttccctgaggaagaagctccctcgactgtcttgtcccagaaccctttcactccaaaacaggacattcagcacctgttccgcgagcctgagaagtggccccccaccgtggtgtccaatacattcactgccctgatcctctcgccgtctgcttctgctcttcgctctgtggatccggattggtgccaatatccagcacttcacttttgctcctagcagcgatatatttcacctggg

SEQ ID NO: 21411 - DNA, 103 bp, Zea mays
  Clone ID: MRT4577_119521C.1
gcagctttgaacaaatcagtcatagcactgcctatagcattagccagtgaccagattagggacaacgtcttggcacagaattgcttatcaagggacatttccg

SEQ ID NO: 21412 - DNA, 375 bp, Zea mays
  Clone ID: MRT4577_119522C.1
atatagtctgttagtttgttttgatcctaaaattatgatgattttttctttatgcatctaaaaaaattctaaatacaaaaaaactttttttttttttttttttcatacaagtagtaaacatttccaaagatgtaattattattcattgttcattatatcaaaatatcttttcttgattttcatgtttcctttcgcatcctaaatgagaggcttttccaacttttttttaccgcctccagaaccaatgttaaagatactctttgtcacagatgggacagctgcagtagctacttttcccttgagcgtagtggtgtctttttcagtcataggcaaatatattctttgtttcacagtcagtttgaaatgtatcacatg

SEQ ID NO: 21413 - DNA, 532 bp, Zea mays
  Clone ID: MRT4577_119523C.1
ggggcttaaaaaaaaaatgggtttttgcccaccaaaaaaaacaatgggtttttcccctgttaccgggaaagggggggggaaagggaaaatcattttgcccccctggccaaggacaaaaaaggggcaaataaaaccctttggccataacccccaagggccccccgggggggaaccccaaaatgggggttttggaaaatttttttccccccgggtcctttttccaacctttttgggggaaaacggggggaagcttttaaccctgaaaaaaaaacccctttcctgggtcctttaagaggccccaaaggtttgccggggaaccccccctttttttgaaaacccccttttttttacccttgaggaaccccctttggagggggccctttgtttttggggccccccacctttttaaacggaaaccccttggccccctgggccccctaaaaaaaccttttttttaggggggccattttttttaaaaacggaaccaattttccacgtttttgtccacccttgaaggccccattaatttttt

SEQ ID NO: 21414 - DNA, 2228 bp, Zea mays
  Clone ID: MRT4577_119524C.1
cccacgcaattgggagaatccatctgacaaagatttaaaccagggaactcttgttatttttaacttggatccatcggtttctaatgaagaggttcgccagatttttggggcatatggggaagtaaaggagataagagagacaccaaacaagaaacatcataagtttatagagttctatgatgtaagagcagcagaggctgctcttcggtcactgaataaaagtgagatagctggaaaacgaatcaagttggaaccaagtcgtcctggtggaacacgcagaaacttgatgcagcagctcggtcacgatttggaccacgaggagcccagaagctacagacatcctcatgttggttcacctattgctaactctcctccaggggcatgggctcactatagtagtccaacagataacaatatgctgcaagctttcaccaggtctccaactggaaatggaatgagtcctatcggaattccttccctgatttcaaatgctccaaagattgctccaattggcaaggatagcaatcggtctaaatatgatcaagtcttctcaaatggtaaccagtcactgggagctgcatttcagcactcccactcatatcaagatcacaacagtgaacagatgagttctagtcctgggactttatcagggccccagtttctctggggaagtccaaagccatattcagaacattcaaaatcccctatttggcgtccaccagcaaacggacctgcattgtcatccagtagtcgcactcagggccaaggattcttgtacagtagccgtcaggcttcattatttggttctttagatcagcaccatcatcatgttggctctgccccttcaggtgctccattcgagaaccattttggctttttatcagaatcgccagagacatcttatatgaagcaactcaagtttgggaacatgggtaatgttggtattggtagaaacgggggaggcctcatgctgggcatggctagtcatgcttctgtgaatcctggttcttctctgattggaagtctgacagataacgtatcttctagcttcagaccgatattgtcaccgagattgggacaggcattttacactaatcctccataccatgggcctggtacattcggacttgacagctccattgaccatgcccgtaaccgcagagttgacagcagtgtgttgcaagctgatagcaagaggcagtatctgcttgacttggagaagattcacagaggtgatgatactcggacaacattgatgattaagaacatcccaaacaagtatacatctaagatgctcctggctgcaattgatgagcttcacagaggaacttatgactttttctacctgccaattgatttcaagaacaaatgcaatgttggatacgcgttcattaacatgatatcgccggtgcatattatatccttctaccaggcttttaatggtaagaaatgggaaaagttcaacagcgagaaggtagcctcgttggcttatgctagaattcaaggacggtctgcactgatatcacattttcaaaattcaagtttgatgaatgaggataagaggtgccgccccattctttttaatcccaatggtcaggagtctgtgcaccaggaagcattcccaattaatggtatatgcatccacatgcccctggaagatgattgccttgacaatgaagaaaacaagagtctgaacgagaagacaggagagaactctactgatatcgctgggagtttgtgactgtcggccatgatagcaaacatgatcagaatggccacatatataaatctaactgtctagagagtatccacctccaaattgtataaaaactgatgaaggttgatggttaggcgttgaattttgtggtctttcggttttagttgcaacagatgtggcccctggaagcggaagcgaaagcgagggagcttcgaaccggagctgggcgcttgcttgtcgaatccccctcactctttacagatgtggggatgagcaaccgctgctgctcatagttgtgcttgcttttggttgcttgctgtaaaaaggtgaactgaactgaagaaatttagccaaactgtacagtttagaaaaaaaaaaaaaaaaaaacttttgtgcatattttgcattctagtatgttaatgtgtatgggtggagcagtagttcagagatccttttttctgcgtgagatcttttttcttaatgcaatatcggggctgtcatactcaggtcg

SEQ ID NO: 21415 - DNA, 202 bp, Zea mays
  Clone ID: MRT4577_119525C.1
aaaagactgcactgtatatagttttcctaacatattgcaagtctttcaccatctcgggtgcgctcaatgtgatgcgcgcgggccctcaaatagatggccttctcagccactattattcaaggaatatagccttcgactgcacatatctacacgatcatctccatcttctccatcaacactttcaggaaagggatgtccaacc

SEQ ID NO: 21416 - DNA, 282 bp, Zea mays
  Clone ID: MRT4577_119526C.1
cacaatccaaattttgcaccaaacattgaggatggtactgagactgaaaagcctaatacatcagatgtgaatcatgatgctggcaaaacctggcatgagtatggtgttgggttttctggacagttcgatcctgaagcaagagatcctcacatctatgatattgatggcaaagaacatttgtctttgcctaatggtgtagcaggtgctcccttggaaaggcagatgaaatttacagttgagaataatggtgtagatgatgaaacctatactggcatgttccaa

SEQ ID NO: 21417 - DNA, 1386 bp, Zea mays
  Clone ID: MRT4577_119527C.1
cggccgggaacagctctactaacttcagaccgatgttgtcgcctagattgggacagacattttacactaatcctccataccatgggattggtacattcggacttgacagctccattgaccgtgtccgcaaccgccgggttgacagcagtgtattgcaggctgatagcaagaggcagtatcagcttgacttggagaagattcacagaggtgatgatactcggacaacattgatgattaagaacatcccaaacaagtatacatctaagatgctcctggctgcaattgatgagcttcacagaggaacttatgactttttctacctgccaattgatttcaagaacaaatgcaatgttggatacgcgttcattaacatgatatcgccggtgcatattatatccttctaccaggcttttaatggtaagaaatgggaaaagttcaacagcgagaaggtagcctcgttggcttatgctagaattcaaggacggtctgcactgatatcacattttcaaaattcaagtttgatgaatgaggataagaggtgccgtcccattctttttaatcccaatggtcaggagtctgtgcaccaggaagcatttccaatcaatggcatatgcatccacatgcttccggaagatgattaccttgacaatgaagatggcaagagtctgaacgagaagactggagagagctcgaccgatatggccgggagtttgtgacgtctgcgatgatagcagacaggatcagaatggccatacatataaatctaactgtctagagagagtatccaccccccaaattgtataaaaagcgaggaaggttgatggttagcgctgaattttgtggtctggtgtggcatggcacgtcttttggtttcagatgtcgccccggcagtggaaatgggagctgaagctcaagcgatcgagcttcgaactggagctgggagcttgcttgtagaatccccccctctgtagatagagatgtgggggtggaaccgcccaaaccgctgcttctcatagtcgtgcttgtttttgattgcttgctgtaaaaaggtgaactgaactgaagaaaaaaaagccaaactgtacagtttagaacttttgtgcatattttgcattctggcatcttaatgtgcagtgctgaagttggggcattgatcatgcaaagttatttgcataattgtatccatggaatctgaccaaaatttagaaagctgcttgcgtgctctctgttctgttcacaaggaaaagagatgtaaatcccacgttaattacagttttctagtcttgaactgaactgaagaaatttagccaaactgtacagtttagaacttttgtgcatattttgcattcaagtatgttaatgtgtatgggtggaccagtagttcag

SEQ ID NO: 21418 - DNA, 620 bp, Zea mays
  Clone ID: MRT4577_119528C.1
aaaaaaaaaccaaaaaaaaaaaaaaaaaaaaaaaatttttggggccggcgccgctgaagcctctgcgtttctgttcgattgaggggggggttgagcggctcgctgggggctggcactgggcctgggcctgtgctgaatggaattccgttcccattaccacaccacacacgataccagaaggataaagtgaaggggcctgcgctggggtacagagtgaagctaacttacattacttgaattgcgcgtccttcactgtttgctttacacagtaaaccaaccctgccaggctatgttaatgaaatgaacccacgcaacggggcagaggagaggtgggtagtgtattggtcttcctttccctctctcagtgaattgactggctgggctcgtcgggtggggtgagcggattcttctcagtcaactggagggctacggatctgctctgcacaaggggatgggacaacgcaagaacataacaggcaagggacaggccagggacaggacccgaaccggggccggggcggctgttgtgtatttataggatacgctccggtgccgtgaataacataacttaaatctcaagtcagaggaggcggggccgcaaccggactgatactatatac

SEQ ID NO: 21419 - DNA, 358 bp, Zea mays
  Clone ID: MRT4577_119529C.1
ctccatcgcgagagacaccccatggcgtccttctgccgcgccgccgacgccggcgttaaaaggttagaggagctccttttgacgtccacgtacatgagaccgtacttggctgttacggatgacgtggcgcgtgtacagttgtgatagagtatgttccctagtacaagtatatcaacgaagctagggggtttaatgacaatgatgccctcgcgaggctgtgccaaattactgaaaagggccaaggtgtcaatgatgaatcgtgagcagttacttcagacttaactgcagatgttggtgaagcacatgctcttattgctgaggatgacgacaacaattatgttgacctttatggagagga

SEQ ID NO: 21420 - DNA, 346 bp, Zea mays
  Clone ID: MRT4577_11952C.1
acggccgaggtaacacacaagctgcacacccgtgcgaactatgtcacagtcgggagcgcccatgcccttcgatccttcaacattgctaaagatgagcttcagcacctccggggaggtcgttcttctctgtcaggatgagtggaggccgaagaaactttttactctttcaacagattatgatctgagcgtggcccgctcgacttcaataatcctgatggacatattcatcaagcctatgcctgggtcaattcaccctctctagaacagtacatgcataccgtgtaccaagaacacaagcttgggagctgtacctccaacaacccaacatcttaaccttctttatttt

SEQ ID NO: 21421 - DNA, 274 bp, Zea mays
  Clone ID: MRT4577_119530C.1
gtatgtgccagaaccatttttttttttaaaaaaaaaggggggcccacgcactaaaaataaaaaaaaaaacggaaggcgctcagatcttataggggagtgtggcctttttggttatgggggtctgcttgggggggtttttgcaacaaagagagactgatgggtacaacaccaccaaaggcgcgctgtcgtggtaagcttccaaacttgctgggtgggccggccctgggtttggggagcgtatggcttctggatgggcgtggtgttcttggcgggg

SEQ ID NO: 21422 - DNA, 283 bp, Zea mays
  unsure (1)..(283): unsure at all n locations
  Clone ID: MRT4577_119531C.1
caagatgtcatgcacaaacatttcgatgttagccttgntcctcctggtcctaggcttcatgtttcatgttgagaaggaanaggcaaatggcatcgatgctaaatcttcctgtcctgttggttccttctacatcaccaagttgttcgccttcggcaatgtcaagacatacaactctaatgctgttcatgaagcatggtcatcttcgttctgcttcactgtgaatcatacaatcctcatacccaatggcgacttccttgtcggacaactcaacttcacaagccct

SEQ ID NO: 21423 - DNA, 303 bp, Zea mays
  Clone ID: MRT4577_119532C.1
ggtacaagcttttttttttttttctgtttagatcgagcagcaaggtctgcggtccgtccccgtctatgaggcaggaccagctgcgattgataaatctggtagcagcagttgctcgtccatctgggctcgccccctagcgtcagatgccaagatggcgagctataacgcgcccatctatttggcgtcatatactgcggccactcccccgcaagagataaaggcgaccccatgaggctctcataggtcggcgatgatgatctctttgaatttggccttagcagtgatactaggccagattaggag

SEQ ID NO: 21424 - DNA, 173 bp, Zea mays
  Clone ID: MRT4577_119534C.1
tcgctcacgcgttctagcgcctctggccagggcgcggaccacgccggaatgcagctggagccggacggaacaccgacgttataacacggccgagacgcctgtggtacgatgggcggggcccgcgactacggaaacatgtacaagtcggaggacatgctcaacatggcggccct

SEQ ID NO: 21425 - DNA, 258 bp, Zea mays
  Clone ID: MRT4577_119535C.1
gccgcaagtacgatcgatgcgacggggatcgccgcgccgccctgcacctggaccattatcctatcctgtcaaactggccacaaccggtacggtgccgacggggaccgtggcccgtcgccgcatgaacggaatcgaaaagagatttcgcggcgcggaggggcacctgttaccactacagatactacctcagccttgccagagggagaagaagatcacattcagactcaagacacaggcgtgcgaggcaaacgcaaacgg

SEQ ID NO: 21426 - DNA, 559 bp, Zea mays
  Clone ID: MRT4577_119536C.1
cctcactaccgcgctccgccccgctcccgtctccaccacccccgtcgcaatggcgattcgccggcagcgccgctccttcccgctcgtccccttcctcgtctccctcctcgccgtcgccgcctatggccgcctcatctccgacggcatgccggccaccccgtcctcctccgtcctcgcgtctccgctgtcctcggccgccatccgcctcaactcctcctcgccggccaccgccgcggccgaggagtgcgagcagacgtacggcttcctcccgtgcaccaccaccgtgttcgggaacatgttcctggtgctcacctacgggttcctcatgttcaaggcggccacgttcctgtcggccggcagtgagctgctgctggagatcatgggccctggcctcgtcggcggcctcctcctccccatcctcggcgccctccccgacgcgctcctcgtgctcgtatctggtctctctgggactaaagagaccgcacaaagtcaggtcctcattgggatggggctgcttgctggttcgaccgtctttcttctcaccctgctttggggaact

SEQ ID NO: 21427 - DNA, 531 bp, Zea mays
  Clone ID: MRT4577_119537C.1
cataaaaaacgaacttcgcatagcacttgtttccatagaaactaccattttcttagtgccttgcctctctcacttgcagtgagtttactccaagctacgagaaggaaaggattagaacatacaaagtggagagttacaaataagaaccaactacattaaaaaaacaaatatagagatgaattactcttgctttggtataagagtaaccaaagggaaatagcaattgcaaagaactgaagtttacattttaattactcttgctttggtataagagtatccatagagggaaacgaaaattgcaaaaaactgacctcatgcagacctattatttcataggaaaatgtggttatgattcctaaaaggtacataaaaactaaccaaatgtgatccggataaggacagagaaagtttcccagctttaaccttactttaactagattttacttggggcatggactttttagttttcctatttgtttaagttgcattttttaaatcgggatatatatagggcatccctgtccccatctt

SEQ ID NO: 21428 - DNA, 338 bp, Zea mays
  unsure (1)..(338): unsure at all n locations
  Clone ID: MRT4577_119538C.1
nnnnnnnnnnnnnnnnnnnnnnnnnnnnnnnnnnnnntnnnngnaggaactggttttataaaactatcttaggctgacctaccagttcattattagaaagttcagcacctggcggggtgcacatttaaaaccccaagaaccccctttgcgaaaacaggaacccaaaagggcgcaccctacatccatgtctggccaggggggaagaagcatttaaatactgcccccacccgccggattacagttattacttttgatccatgcctaacgggtctgattaacagttccaacccttttttgacaaaccaagctcagctccccccctttttattccttgttac

SEQ ID NO: 21429 - DNA, 248 bp, Zea mays
  Clone ID: MRT4577_119539C.1
acctcgcgagagacggggggcaatttattgattattgggcgggaacacacccccagaggagcggatccaccatcggggccatgctatcggcagtttaacagatggcacctcaaacgggggggcgaggcccatccaagacagggactgtaaaagggaacacgcaggctggcgaccatcggtggtgacgcaggaaggcggctaaccgaggagggaggcacagctcgtggcgcaaggtacctgtcgtccct

SEQ ID NO: 21430 - DNA, 373 bp, Zea mays
  Clone ID: MRT4577_11953C.1
ggagggggtgcgtttttgttaactctgagcgaactgtgtgctcctgcacaaaaaggatgctgggccctacgagggcagccccccacaggtgctgttccttcacggcttcacggaacctctggtaccgatggcgccaccagcatgttcgtacatggcggtgcagcggataccgcgcctgtggtcctggacctattcagctactgcgactccgactgcccgcctgatgcgtccagctacaccagcttccatgtgatctgccacctcttcttgctcattctccgaatttctgccacttcagcgacatctgggtttggcacgactccggagccttggtgcagctgcagctcacccccgttttggcgaggctggggcc

SEQ ID NO: 21431 - DNA, 254 bp, Zea mays
  unsure (1)..(254): unsure at all n locations
  Clone ID: MRT4577_119540C.1
cctgcccaaggagcctacgcgtgcaatcaaaaattttatggtgcacaaatacccantctcatcctaccatcaatttcacctcctgattaccaacgatctccacgaatagccaaaaactattttttctaaattttttcctaatacatttgcaagcccttccctcgcacatatacatgtttcccgaactcacgattgtcaacaattgactcataaattccaacatgaccacactacaaatacctgtatcatacata

SEQ ID NO: 21432 - DNA, 419 bp, Zea mays
  Clone ID: MRT4577_119541C.1
cgcccacaaatggtggactagctgtccagacaatgggtagtgcctctcaagttgcttttggttacccagcagtccagctaccaacacttgaaacgggctcttcatgggcatttggtgcttcctcgtctgctcatgctgaagatgagaaaaaggctgatagaggactctctcttatgggttctgccataaggccaggcatcgcaccaaatgtcaaatttggagggtctggatcatatccggatcttccctgggtttctaccatcggcgccggaccaaatggcagaaccatatcaggtgtgacatacaagtttggtagaaatgaggtaaagatagtatgtgcttgccatggcactcacatgtctccggaggagttcatgcggcatgcaagtgcagatgctccggcccaagataatagtgca

SEQ ID NO: 21433 - DNA, 499 bp, Zea mays
  Clone ID: MRT4577_119542C.1
gccttttaatttttgttgttgcaagttaaaacacgggtacttaaacttagcaccactaaaattatccgatgttgcaaagcacttgaaacataaatgtcaataacaaggaatactagccaaaaaatactcatccaacaaaactgtagaacgatggaaaattctgtccaacctatcatgacaatatattaagtgcaatcagaaattcactgaattttaagaaccactactcaaaagacacggtacgatttccccatggtaatcttcagatataggcagcgaacgttctgccaattctttttcagcaaagagacaagggagttaacactcagttgtacattttgggaggtttgcttttccaccatgctaacattccccacagctactcccatgcagagaaccttcttaagctggaacttgaccatggccttggactcattaacctttgactcgagagattcttggtgagtcacaagtggagggaacttccctgccttgttga

SEQ ID NO: 21434 - DNA, 2169 bp, Zea mays
  Clone ID: MRT4577_119543C.1
cattgggaccctcgaggccggccggggtcaagtgtcaacccaaccgtccacggtccgccctcctccttcgttcacgtcttcctcctcgcgttcctctcgtcagtacggcgacgccgcaaggctcgcaccgctgacagtcccccttcccggatcgagcctctcttttcccagatcggattctaattgggctatcgccgccgccgtgccaggtgccgagtccttagccgatcttcgccggcgaggagcgcccaccaggagttacagactgaatgacaagaatgttctctatatcatcctcagtatgtgtgaagaaatagtctgtaactacacatacctttcattgcaattaccaagaactggaaatggacgatgataatgggcttgagcttagtttgggcctatctttgggcgggtcatcagggaaggccaaggctagagatgcacctctagaaccaaaagcagaaccccaagtggaagaaagcagtagcaaaggtggtttacaaactcctgatgctccttctgggaaattttatcaaaagagcgctgataaccatgaacaaaatagtaaacagaggcacagccctgttgcaccacaatttgggaacttctggggacaaccagggaattcctccggtccagtggtagatggttctgttgaaccggtgagtcatcagcctcagctttccagttatcaagatggaaggatgccaattaacagtggaaataattctgaggagcagaagccagtttctggtaaccacaagttgccttctgaagagatgaactttcagaagaaacatcagacagctagtgaccagcctgatgcattcagtaagagctctgacggaggtgcaaagaatgcacctatctcgattagtacggatgatggttcaactggtgaaaatgaggatgttgcagagtcagaagcagaaggctcaaattcttggttggttgcacagcgtgaagacagtgctaagggctctgttgttaacaaaggatctgataggaaaaggtccgccgatgctgctgcagatggttttaaaggaaagagacaaccaagtttctcaggaagtgagtccagctctggaaagttgacacctggaaatcttatatcgatgcaggcatcaaatgtagtggctttgccatatcaagtcccaggtcaagtttctggacctcctgtcttaactaatgcaccaaattttcacccggtatgtactgtgcagttgaggccgcccacaaatggtggactagctgtccagacaatgggtagtgcctctcaagttgcttttggttacccagcagtccagctaccaacacttgaaacgggctcttcatgggcatttggtgctccacctcaggctctgtcttcttttactgcaaaagacaaagctgatcaaacaggaaccaagcaagttgacgatggcaagaagccccaggaggcaggtgcttcctcgtctgctcatgctgaagatgagaaaaaggctgatagaggactctctcttatgggttctgccataaggccaggcatcgcaccaaatgtcaaatttggagggtctggatcatatccggatcttccctgggtttctaccatcggcgccggaccaaatggcagaaccatatcaggtgtgacatacaagtttggtagaaatgaggtaaagatagtatgtgcttgccatggcactcacatgtctccggaggagttcatgcggcatgcaagtgcagatgctccggcccaagataatagtgcaaccctgccagcattccctgctggtaaccaagccacgtctgcagaaaattaggttagcggttcagagaatgcttgactaataatccttgcccctcttgtgtctatatcagccattcactgtaatactcagtgttcatctcgtgttaactttttatcatgcaagtttagattcttgtattttgagctttgtttgaggataaaatctgtgtatttttagcgctatgtaacacatggactgccaattgctgtggttggattttgatctatagacgatgtgttcattgctattagaatataagaaaaaaaaaaaaaaaaaagctgccttaccagctccgataaataaaataaaaaaaaaaaaggggggggcccctttaggggatcaaaatttacgttcccggtgcatgcaaaataaaagttttttt

SEQ ID NO: 21435 - DNA, 604 bp, Zea mays
  unsure (1)..(604): unsure at all n locations
  Clone ID: MRT4577_119544C.1
ccccacgcgtccgcgggaagcttccgactccataccccgcacacgagcgctccctgcagatgacctcggctctggtggagcgcgtaaccaacgacgaccggagcgtagcctcgttgcttgatccaacgctgggtggagaccacagggaagacgagctagcggtcatcggcgaggtgatccgggcctgcatgcagagcgacccgaggcgaaggccgagcatgagggaggtcgccgccaggctgagggaggccgtgggtatctcgccggtcgctgcgacgccgaggctgtctccgctctggtgggccgagctggaggtcctttccgccgcggaagcaagctaataatagtgggcgagaggacaggacaggaacagggcaggatgatgtcgcgcaatctgaccagtttgttctcaagaaaaaaaagccttgcagccctttgtgcatgctgtaaatgtgaatgtgaagctgcagggaaggaatagtaatccgtgaatgtaaatctgaaactctgaaggtgctagatgtacgtagctagtgtcttagctaaggtatcagtaattcagaatcaagtcnnanaaaanaaaanaaaanaaaannaaaagggc

SEQ ID NO: 21436 - DNA, 350 bp, Zea mays
  unsure (1)..(350): unsure at all n locations
  Clone ID: MRT4577_119545C.1
cgggaacttacctggaacggcgtccgactggtttattcaagcaaggcccgctgnggggaggatcaatggccccacattgcacttggcggatgcgcnggcttaccatctnaccagcgggagagtggacgtcatactntgtggtcgatggggtacgctacgcactccaggtcttcgttcgctgctcgttgatcacttcagatctcggcttgggggggggggatccagatcacgccttctgatccatatagtctggactttcttacaaatatcatgttatctttaaactttttcccatatctggggttactgatttatgaaggctgaccagtcccgttgaaaaaaaacataat

SEQ ID NO: 21437 - DNA, 1433 bp, Zea mays
  Clone ID: MRT4577_119546C.1
gtcgcaaattagcttatttgagcagttgctttgatgaatacaagcaggtagacgccctgtcgcgaataaaccacaagaacttcgtcaacctgctcggcttctgcgaggaggaagaaccgttcaccaggatgatggtgctcgagtacgcgccgaacgggacgctccacgagagccttcatggtaggcggaacagaagctcttcttgctaatacaaccacaccattaattgagcttgagccgcagcagtagcagtagcagtgcgtgtcgtagtcgtagctctcaaaaacacttgcgcacgagtgatatggactaacagttttgtggggggaaacaaatcacgttgcagccgaggatttcgagcgcatcgcttggcgaggcaggatgagaatcgtcatgggactagcgtactgcgtccagcacatgcacgagctcagccctcccgtggcgcaccctgacatgcagtcgagctccgtactgctatctgaagacggcgctgcgaaggtacatactccttgtccagcactccagctctccatgtgtttagctagctactagctacagcttggtgttccaattccaacctctgagttcccccctgcctgcagatagcggacatgagcgtttggcacgaagtgatttctcaaggcaaaacgacgacaaatggtgacgaacaagcgtcgtccgctggcctgctggcggggaatgtgtacagcttcggtgctctgctgcttgagatcatctccgggaagcttccgactccataccccgcacacgagcgctccctgcagatgacctcggtaacgagctatcgacggaacaccgttatgtttctaacaaccagaagaagaacaccaaatggtgacgttatgtttcttcttcttcctaggctctggtggagcgcgtaaccaacgacgaccggagcgtagcctcgttgcttgatccaacgctgggtggagaccacagggaagacgagctagcggtcatcggcgaggtgatccgggcctgcatgcagagcgacccgaggcgaaggccgagcatgagggaggtcgccgccaggctgagggaggccgtgggtatctcgccggtcgctgcgacgccgaggctgtctccgctccggtgggccgagctggaggtcctttccgccgcggaagcaagctaataatagtgggcgagaggacaggacaggaacagggcaggatgatgtcgcgcaatctgaccagtttgttctcaagtaaagagagcctagcagccctgcacgctgccgctgtgcatatcatacttgtattgtacagttgtacgcggaaccttttgtgcatgtaaatgtgaatgtgaagctgcagggaaggaatagtaatccgtgaatgtaaatctgaaactctgaaggtgctagatgtacgtagctagtgtcttggcaaaggtatcagtaattcagt

SEQ ID NO: 21438 - DNA, 618 bp, Zea mays
  Clone ID: MRT4577_119547C.1
ctaaaatgaaatgactaatctttagtactcaacccaaccaaacgagacattacaagagctcagttggtgtgatgaactgacggaacggcccctgtaatgaatcatttgatacatccgcaccgcaatacaccaggaaaaaacatacaaattgcctatgtgatatccgcgcaaccgtgcagaccttccaaaagtgaactccaggcacccaaaccttctacagaaccaaaagccaagataaagtatgatctctgctctgaaacctcacatacgtgatacaaagaaaacaactataatcaaactaatcctcgtccatcccgccaccaggctgggcatctcttcttggacctcctgccggctttgccataatgatctggtcaacccgcagcaccgtgcaagcagcatcggcagagtattttagggcaaaaaactttgtgacatagaggtcccatatttttaaagtcgagatgtccttgcaggcgccttcctccagatcaatgccaactttcgcattgccactagcatgctcagcataaagagaggatattatctccattgcgctaagtccagcattttctgccagggttcttggaaccatttcaaagctttcagcaaatttcg

SEQ ID NO: 21439 - DNA, 259 bp, Zea mays
  unsure (1)..(259): unsure at all n locations
  Clone ID: MRT4577_119548C.1
gttggacttttctgatgtgtgtgtactatgtccagagtgtattgaataaactttggtgaagagtggttaaaggactattgatcggtgctaaggatgagaagacaacaatgttctgntgtatcttgtgcattaaccgtatatgtggcgtgaagatgtaatacgttctatatcttnagtgtttatatttcatacaaaaaatgtgcattgggattatttgagctgaatatggacccatttaaactcagattcctactcttgc

SEQ ID NO: 21440 - DNA, 648 bp, Zea mays
  Clone ID: MRT4577_119549C.1
cattgggacctcgagccggcgggatcccgcatattctcaggagcctctccgaaacacgacttcgatggattccaccaccacgaccttcctcgattcctgctggtcgtgaaaatgtccacggagcccctacggaccagctccccgcgcgaccaccgcttcctgctgaagatgaagcatgtgctcggcaactacaccaatgcgtggagctggatgatcaagatgatcaactgcccgatcgagctactcatgcgatacaagttcagcctctaggatccacaaccccatcttgatggccgcgagcgtccatgtcaaggcataccccatgatgatccgcctgcgagagcgcgagcatgtgacgcacatctacaccacatcaccaggcagtcggcgagaatttcgtcctctcctacgacaagtctgtaaccgaagccgccaagagtgtggcaaacgacatctgcaggcttaacgtgcccacgattctagttgccgatatctagagatgcaggccgattactacactatacctaggttggcactgactggaactgaaagactcgacgcctctgataacacgatggtgcgatatcaggctgtccatgacattgctctggttgagcttgctccaactcatcctagtagggttgtact

SEQ ID NO: 21441 - DNA, 374 bp, Zea mays
  Clone ID: MRT4577_11954C.1
gggaacccgggaaatcccccccctttaaagggggccttcctccctggggcgggggggcagattaccaccctttcagaattcagatccctcccagggggcccggccaagccaaatttttaacttttagcttttcccgccccccccaacaaaccaatcaaggtgggcccccccttttacgaaccagggggtacgacagacacagggggcccgcccatgggttggggccccaacctacaagggggggggcccttccccaaaaagacttcagggccggggggaacaaacaaacggtttatgcaaatttgccccacattttttgggaaaggggggggacctaatttgggacttgggaacccccaggaacttgggaaacc

SEQ ID NO: 21442 - DNA, 443 bp, Zea mays
  Clone ID: MRT4577_119550C.1
gccgccgccgccggcggtaccaccaccactactaccgtcaagtgcctcgccgacgccggcctcttcctcgacgccatcgacgtctccggcgggcgcagccttcggtcctactactccgacatcgtggccatgcagggggtgggtcccaacctgccgccggcgtgcactgcccgtttggacaccgcctcgtgcttcttccctaagaacgtgatcgatggcgtaaacaccccaattttcctgctcaacgcagcgtacgacgcctggcagatacaggagagcctggcacccagcggagctgaccccagcggagcctggcgagcctgcaagtccaaccactctgcctgcgacgcgacccagatgaaattcctgcaaggtttcagggaccagatggtagcgtccgtgttgggcgggcgcttcgccggctccaggagcaacaacgggct

SEQ ID NO: 21443 - DNA, 449 bp, Zea mays
  Clone ID: MRT4577_119551C.1
acttacacacaactttgggaggtttggacctgtgaaattgctgcccacttaatgcatgaaatatcaaattaggacgtaaaaacagttcgtgactcatggcgcaacaccaacgactgttcgtaactataattcatagccacattgctgatcatgctctttgatagaattatggggagccccttcaacaccattctcaatcttggagttcgccttaccacacctataaactgcttttacctgaactagataccttgcaatcatctgattctggcttggttaaaggtcaccatgagtaggggaaggaacatttgtggaaactgtcttctctttgaggattgttcacggatctgctttcatctattgcggggagccttacaatttaatggatcgctaccaccttcttatcctggctagatcaagcgaatcaaaccctagctagatcagcaata

SEQ ID NO: 21444 - DNA, 799 bp, Zea mays
  unsure (1)..(799): unsure at all n locations
  Clone ID: MRT4577_119552C.1
ctttggccgggttaggtcctctacanntccttgacgattatgagctcgcacaaactgaaaaaatgcaggtcgtctccttctccggttgagctacgctgccccccctccaaaccctaacccgttgtgtgatccgttctgctatggaagcagcagctcaaccccatccgctccagcttttccaagacatggacccgggggtccgccgtttcctcgacgcccgattccgctcggcggccgatctcgccacggcctccgatgtcgaggccgagatccgcgggcactgtgcggagctagaggcatcgatttacgacctttacgtacgcctacaggaaactgccgcagcgtactcgtcttgctgcgaggtcgctggttcggccctccgtggcgtccgcggccggcttggtgccctcaaagcatccgggtcaacaggggctggagaagaggtggaggtgagaacggagcagatgcagttcgagcaactccctgctctggcctccgaggtggcgagagtagagatggtcagagagtatgcagaaatggctctcagacttgacagtttggtgggtgatatagaagatgcagtttcttcttctgttactggaaaacttaaatctcgtgtagacaattcggaggaaacacatcatgttgctattggatatttgaaaagcatagaagatcttctagcttctgtagctgtgactagaccacaatggactcgncttctatcttccgtggatacagagtagaccgatctttagctatacntagaccacagccattggtgatcatcgatcacttc

SEQ ID NO: 21445 - DNA, 298 bp, Zea mays
  Clone ID: MRT4577_119553C.1
tacgcctgcggtaccgttccctaattcccggtcgggcacgcgtccgggtctgttattcgtttacatttacctatccaaatacttagctaatatagtactgtatgctggggctatctactgccatggatccagatataaaagtgctatcgtattctgtatttccaaattatttacatgtcccacatgcaacttcacgtctatgtatctgaatcccgaacatcttctcaacccgtcgctaaaccacctctttactccataaacacctttctttccaaacttaattggcctgtaaactatt

SEQ ID NO: 21446 - DNA, 315 bp, Zea mays
  Clone ID: MRT4577_119554C.1
atggaagccaaaccattccttggtagagcccaacacgggggggttccagggctggcgaaaaaaacaaaaaagggcatcacccattaaagttctctccaagcccatgggggggaggggaccccccccccaagggcctctgccatgaaccctaggaccaagaaggggcgcactttaagaaccctggttaacaaaaaaggggggcacccactgggtaaaagcttcactgccaaggggaggttcccggaggcttaaagaggttccacctaaaagaaaggagtagtggccacgttggttttaggtttggccattccacta

SEQ ID NO: 21447 - DNA, 2324 bp, Zea mays
  Clone ID: MRT4577_119555C.1
aggaaacccgttcgtcttccatgcccccctcgcacgccgcgatgctccgctcgccttcctccctccgcttgcttctccacctctcccgccgcctcctctccaggaaccctctcctccccagctccgcgctctccgcccgccctcgcttcctctcttcgtcctcctcgtccacccccggcggcgcaggatgggccacctacgacccgctcagcgacagcctcagcgcctccgctgcgctctcttccgcctccatctccgattccgagccttccgctgtgtcggatgcctggggcgtttacgaccccgtcttgggccgcatcgtcaagcaggggtccccacctccttcgtcgtccatcaccgtggaggaggacgacgaggagggggaagaggcgggaaagctcgaggaggagaaggcgggcgtaaaggagaaggggaagaggcgggtgacagcggtcggcgtgaatggccatatcaggtggtcgtcggtggcggcggcgcggaggcccgcgggtaagggcggcaaggagaggagctcgtacgtgtgcagcaactgcggggagggcgattcacagtggtggggcaaatgccgccactgcaatgcgatggggaccgttgacaagtacgtaggcgtagcagggcctgagagcggtggtgtcgatgtggagtggtcgcaccacatcggacgatcatggatgccccagaaggccaaggaggtggtgccacagagccttcaggaggtgaacaagggggtcgatcaggcacagtggcgcatacctctgtgggggagtttcgggatggagatatctcgagtgcttggtggtggtattgttcctggctccttgattttagtcggtggggatccaggtgttggcaaaagttcattgatgttacagcttgcttcgaatatattggagggtttcaaggccaaggagtcttctcctgttgtatatgtgtctggtgaggagagtattgagcaaattggaaacagggctgaccggatgagtatcacgtccagcaacttgtacctctactctggtacggatattgaggatatcttggacaaaattcaacccctctctccagggctcttattattgattcgattcaaacagtttatgtcagatcatttgctggaagtgctggtaatttgtcacaggtcaaagaatgtacctctgccttgttacgatttgcaaagctgactaatatcccagttttcttgattggacatgttacgaaaactggcgatattgctggtcctcgcctcttggagcacatagtggatgttgttctgtatatggagggagagaggtgctcatcccatcgattgttgcggtcagtgaagaaccgttttggttcagctgatgagcttggtgtatttgagatggctgaatttggtctgcaagctgttctgaatccaagccagatgttcttaactgagcatgactctgattctgaaattatggctggtcttgctgtagctgttattttagatggatctaggacctttgctcttgaagttcaggcattgtgtgtttctggttatcatcgttctggacaagtagttggtataccacaaagcagggctgatgtcataatctctgtcctcatcaagcaagcaggcctaaaactccaggataatattgtttttttgaatgttgtgagcggcttcaagttgactgagactgcaggagatctggctatagcagcttcaatttgcagcagtttcttggaatttcctatcccaaatgacgttgcatttattggagaggtcggccttggtggtgaacttagaactgtgccaagaatggacaagcgagtgattgctatttcaaagctgggatacaagaagtgcgtcgttcccaaaacctccgagaagttgctcagaccacttgatattgacattgagatcttgccctgcagcaacctgaagcagcttataaataccgtgtttaggccccaaggttgatgtaggcgtacaagatgcctggtttaggaaatctgacagtaggcagttatttagattagagtattgttgtaggtcaaggacttggctagtttgggttggtgtagcatagtgtggtcggtgccagttagaaagtgcatggggttcattgctgggcttccgttccgttgaattggtgtagcatagtccggtagtgccagttagaaagtggattgctggtgttactctgaaacacagtagggcacacttcttttggttgctttatgtgatgaaataccggacatattctttgctacttcagcaccgtgaacttattggctttttgagttgacttttgttttaaacacgagagaacaacaag

SEQ ID NO: 21448 - DNA, 559 bp, Zea mays
  unsure (1)..(559): unsure at all n locations
  Clone ID: MRT4577_119556C.1
tttccactgcctggcgtcgccatggnacactgatacaccgtaccgtcgtctctgtttgcgtttctgtcaagtgtgcatggaataatactgtaactgtgtttcctgccgggcaatgcactgtgatatgatgcccaacgaataaatgtcgcttttatttttattaaaaaaaaaaaaaaaaaaaaaagggggggaaaaaaaaaaaaaaaaaaaaaaaaaaaaaaaaaaaaaaaaaaaaaaaaaaaaaaaaaaaaaaaaaaaaaaaaaaaaaaaaaaaaaaaaaaggggcggccccttttaaaagaaccaaagttactgtccccttgcttgcaacgtaaaactttttttttgggggcactaaaataaaattcacgggccggctttttaaaacgtcgggactggaaaaaccttggggttcccaaattaaatcccttggaaaaaaatcccctttttcccagttggcataataccaaaaaggcccgcaccaatcgcctttccaaacagttgcccaccctaaatggcaaatggaacccccctttaaccggcccataaagcccggggg

SEQ ID NO: 21449 - DNA, 191 bp, Zea mays
  unsure (1)..(191): unsure at all n locations
  Clone ID: MRT4577_119557C.1
gctaatccccgtcctttcggcgccgcacccagcccgacccccaccacatatgcccccgcgcgaccacgcggcaggtctcgctccggcccgtctaccaactccgccgcttcgctccnagggctcgtcgttgctatcacttcgtcgccgcgggtcgatagcaaagcttggcccgcttgcgcatcgggcacgna

SEQ ID NO: 21450 - DNA, 271 bp, Zea mays
  Clone ID: MRT4577_119558C.1
ctttttctattttatctttatgaactgacttcttccaagaaaacacatgctaacaaattgcaatgaacaggacgtcacaagtcatcatacattcgattgccctttgctgcgcgaacaagtatctattttaccccatgctaattgatttcaaagattctattcaccactatacaaaatggttccagctttcacacagcttatgtctctaaccatacctttatacatccccgtcctattcgatgactctggccaagatttcaacttgccaaaa

SEQ ID NO: 21451 - DNA, 644 bp, Zea mays
  Clone ID: MRT4577_119559C.1
cctcgagccggccgggaaagagatcaaaaagcgatttccatctcgaccgtgtctcatcgggaagctacgctacgacgaagcatggcgtccgacaccgcccgcgccccggtcgcggccctgcggccgacggtgtctctcaagtcgtcctcgtcagcggcggcggacttccttggccactctagccgactcggacgaactgctaccgcgtcgccgacaaggcgcaacctaaaggcggagggcaagggcgagcggctcccgggccttccctcccccatctacctcgacggcagcctgccgggtgacaatggcttcgacgcgatggatctggcggaagacccggaaaacctgaggtgttacgtgcacgcggagatggtgaacgggcggcagggagatgatggacgaggccgttatgctgatcccggatgagctgaccaaggtcgggctgatcaacgcgccgcatgggcacgacgccggcaagtaggagcacttcgcgtcgccgactacggtgctcgtgatcgagatcatcctgattcactacatgaagatccggatgtggcaggacatcaataaccccggcagggacaaccaggaccccatcttcaagagctacatatctgacggcgcacaactgcggctacgccggc

SEQ ID NO: 21452 - DNA, 374 bp, Zea mays
  unsure (1)..(374): unsure at all n locations
  Clone ID: MRT4577_11955C.1
gctgctcgggaagagggctaacgagaggaatgctgctatggggggtagtgtgcctctgcggctgaaccccgtgctggtggacaagtggtggcacgctaagaggaaccgctccggcctcactgtctggtactcatcctagcaatgctaaacacgccaagggcatgctgatgaacgtgaacttcgagacagggccggggatgctgaacaagaccctcataggggggggccactcgctgtcggggtggacggggcangggcacgtggagtacttctcggtcggaacacagcccgggggcatgtagttggcggagccgcacggcatgcacgcgctgcgcctaagcagccgcgcgtcggcgtctcagaacgtgacggtg

SEQ ID NO: 21453 - DNA, 330 bp, Zea mays
  unsure (1)..(330): unsure at all n locations
  Clone ID: MRT4577_119560C.1
gcaccgcgcaggcgctggccacgcggcggggggtcggggacgtgcttgtcacggaggcccgcgcccgccccggcggcaacattaccaccgtcgagcgccccgacgaagggtacctctgggaggagggtcccaacagcttccagccctccgaccccgttctcaccatggccgtacgctcctcgctggcgccgcagcgtcttcttctcagactcatgcggagccatggaattgagatgctgaatggattttatgcgcgcgcgcangtggacagcggactgaaggatgacttggtttttggggacccaaacgcgccgcgtttcgtgctgtggg

SEQ ID NO: 21454 - DNA, 196 bp, Zea mays
  unsure (1)..(196): unsure at all n locations
  Clone ID: MRT4577_119561C.1
cacgcccatagagaggtccagaacgaggcccaagcgtggactgtagacggaggccatgctttgttgcctaggtggctagggtactcattcaagggcgatgggtaacgtattgagaggcaatgagaagggtggtggtgtgngtaatgatggtgtgggaatgattgaaatgggggggggggggggggtgtttgttttg

SEQ ID NO: 21455 - DNA, 255 bp, Zea mays
  Clone ID: MRT4577_119562C.1
catgaccatcttcattgaccgcgacatttcgtctcccaccactgactcatggaacctgaactagatcttaaccaccgtgatcgcgctcgacacctacatatccatcatcactgacaactacttatacctcacccactacaccaacttcttcacgaacgatttatgattgaattacatcaactagaacgaccagttaacttatgccatagctatacctacaaaccatcatcatcatcaaggcgctcatcttcacaa

SEQ ID NO: 21456 - DNA, 231 bp, Zea mays
  Clone ID: MRT4577_119563C.1
tttttttttttagtcccaatatggaccttttaattaaccaatttgcaaaatgtatgttttttatgacaaaatctggggcggggtaaagtttattttttaaccagggaggattttttctcctattggggaactaatctcccccccaggaaaccccaaaagaaaagtgggccccaagtgccacctaaacacaggggaaaacggggggcggcgcccaaatattcgccccccccg

SEQ ID NO: 21457 - DNA, 186 bp, Zea mays
  Clone ID: MRT4577_119564C.1
cggctcgagacgccccgcgtggtccctatttaccggcgagcactaggctaccgacgccgctcgcaggtgccggtgccccgaccttcgacgtgcccatttcaccgtcgacgagcacccactaggtgttgggaactggggatagagatggatcaccaccacccgcagcagcagcagcagcagtacggc

SEQ ID NO: 21458 - DNA, 333 bp, Zea mays
  Clone ID: MRT4577_119565C.1
gattcaagtctcttcggctctttatcacggctttctacacaacacagacttagcgaacatatatatgcagttattgtgttcaaagcttatggataagaccgattgacttgcgtctaggtagtctagcaatgacagtctacatttgatactagtcactacattctcgatttttgaccagtatcgaacaattttatatgcttgaccaatggacaaattatagagcatccgaatggtgcacattactgtgaaaacatttatgagtacatgtcatagggaggcactgcaatgtcgtacgagctatgcccaaccagatgtcttcagagaatgatacct

SEQ ID NO: 21459 - DNA, 584 bp, Zea mays
  Clone ID: MRT4577_119566C.1
attttctctcaacactccccttcgatccatccgttgccgattgagtccatatcatcatcatcagttccaaaagagggaaaaggaagtgatggagcacagcgagcaggagcagcacgccatggacctgccgccgggcttccgcttccaccccaccgacgaggagctcatcacgcactacctggccaagaaggtcgccgacgcccgcttcgccgccctcgccgtctccgtcgccgacctcaacaagtgcgagccctgggacctgccatcgctggctaggatgggggagaaggagtggtacttcttctgcctcaaggaccgcaagtacccgacggggctgaggaccaacagggccaccgagtccggctactggaaggccaccggcaaggacaaggacatcttcaggggcaaggccctcgtcggcatgaagaagacgctcgtcttctacaccggcagggcgcccaagggcgacaagtccggctgggtcatgcacgagtaccgcctcaacgccaagcttcacgccgccaggaccaggcgcggctccctctccggggggcaggccggcgtcggtccaccaaccagtgggt

SEQ ID NO: 21460 - DNA, 220 bp, Zea mays
  unsure (1)..(220): unsure at all n locations
  Clone ID: MRT4577_119567C.1
tctttcgacctgatccaatatacgncgatccagtttccatggggggtgtggaagagagataacnaatatgatgtcaagtgtccaggccgctgtctatggtagcaaggactgctagcttaccccaggactgttccttgagtttttgtactacaaggtcactgttcacaatcatctgtgaatttttgctcttgaggatccaaatcacgatgcctatttttcc

SEQ ID NO: 21461 - DNA, 579 bp, Zea mays
  Clone ID: MRT4577_119568C.1
caaacttacgaacaattttaacttattcaatacctaaaggcacaccctgaaagccctgatgcttgagatttctattgaacaactgttaataccccaaagcgatatgctctcattatagagaaagccaaactttctgatagcccacaaggctataagatccccaaacgcagcaggaacttcactgctaaacaccggcggcatgtgaaaaagactaccccatcaaactgcataatccaataatgctgacaccacccagtacgccccaagtgaagatggcacaccagatactgccgtggcaatgaagcctgccaatgaggccaaagaacctcctacttaaaccgatgaccctgacatggctgcatacccagctgacgatactcctgcttcgtcgcccatggaagaatacgagaacgacactgagaaatccagtaactctgttgtacctcctcttgcgcaatcgatggaaaacacttattatgccaatccacatgagcctgaacctgcagctccagctccagcaaactacccaactgagaactgaaaccctgctcctgccgaacctgatactgttcctacccc

SEQ ID NO: 21462 - DNA, 270 bp, Zea mays
  unsure (1)..(270): unsure at all n locations
  Clone ID: MRT4577_119569C.1
gcatnnggcatcaagaatcacattataatgtgtatgtttgtgttataccatcaccaagaaagagganaaaaaagagggagaacagaaattcccaaggggaacatccatggatgtgccttttgcttccaagctgatgaccctggataggtatggactctggagggcggggattgtgctggtatatgggttatgataaagctgggacccctgcattatccccgaaagactttgaggagaaacaaacccataggtctgacagggtgggttcta

SEQ ID NO: 21463 - DNA, 269 bp, Zea mays
  Clone ID: MRT4577_11956C.1
atgcagaatccgtttttttccacccccggaaaaaaccctgaagaacatgggccataggtacacaaaggcaaaccacagagcacatgaacggactacccagtctgccaaaggcaagacaacaggcaccggttaaagaccttgggaccgaaaaatcggcggctttgactcgtctgcttacccggaaccttctacacctcaaaaggctacgcggacttaggcgcagagacagacacttagtcaccatgccgaacatgttgttggacaataag

SEQ ID NO: 21464 - DNA, 299 bp, Zea mays
  Clone ID: MRT4577_119570C.1
cattgggtacctcgaggccggccgggatccaccatctgtcaatttagccagtaaactcgcaactgatcactgtcccttcacttcactttcttttttattaacaacaaagcaatcgccaccatgcgttccttcctcgttgttgccgtttccctcgctttcttgcaaaccttctccgccctgccgatcgacaagcgtgccgatgcccaagaccacggcaaagacaagtcgtctgcacgaagctgcggtaaccagtccggcctcctgaatctcgccctcccttacagtagccactgcacgtc

SEQ ID NO: 21465 - DNA, 241 bp, Zea mays
  Clone ID: MRT4577_119571C.1
cacccagagatctatgagtactattcactacaactcacatgcaacgaagatagcacttgtgatcgatggcagatggcatcttcaaatatcatgtccacacatgtcatcaaggtcgtcacactcgaagcatgataagagtagcccttcataccatagaatcagttccgatttgaagcctggaatggtgtttgttgtccctcccggtcatcccttcgtcaccatagcttccaataaagagaat

SEQ ID NO: 21466 - DNA, 500 bp, Zea mays
  Clone ID: MRT4577_119572C.1
gagcttgacgtcgcatgcagcgcgcacgcgtgcttgagccctgttccgcgagcgccctcgctctcgatctataactagcttgggatgggcttccgggggaggcctgatgctataggggctgctactatgactggacttacacatcgcatttctaaccgatcgttttgcagccactctcaatgccaaagtcacaggggccgtctgacaatttccaccacattgagctcctaagttgttgccacctataacgcctgtagttggcggccgaccaagccctactagatcaaagcatatttgggggcgacctctctgggcgtacggcctgttctttggtgcagagagctgtatactatggttgacctaatgcactcttttaacaggcttatccgcacttctaattcgtatatttgcaactgggctccatgcacggcttagaacaccaaaactcaaagcacggcagaatacactccaagagggattgctggcttgttggcggtatt

SEQ ID NO: 21467 - DNA, 1690 bp, Zea mays
  Clone ID: MRT4577_119573C.1
gaccaccctttttcccccacagaacaagcgaaacggatagaccaaaaaaaggaggaagatactagtagcgggcgacgcggccgcgaggcaggcaggtagaccacgccgcacgccagccagcggccagcgcccgccccgccgcgcttcggcattttcccattttctctctctgccgccgctccctcccgcggcggactcgataccccgtctctcctctcgcgaactagggggcagcgggcaggtgccggcaggcggctcgatcccttcctcctccctcgtcgcggggactgctgctgctgctgctgccgtgaccgcgagcatggccaccggcgccgttacgccgccgccgctggctggcgcgcggcgattcccccgtggacgaagcttcctccaccggcgcctcgctacctcgcctatgaaagatgaatctgtgatttccacagatggtggaaatgaggagacagacactgacagcctccatgttgctagaggattgtgctcatcctgggctttcgtcaagcacatccaataaggcatcagtggtcccaacccctttgcttccttctggacaatctgatctccggttcaatcgtcttcgaccctcaattgatgaaagtgattgcaaatacaaaagattatttggctgctatgttgctcgtgaggctgtgatcgatgaggaatactggatcgctgcatggttgagagcagaagatcagtatgaaaatgagtcaggcaatcgctatgttgaaagctttaaaagaaagtttgcatcaaaggaattccatgcattaaagaagagatgcaacacacaacatagagagaagtatatctgtcttgtcgcggtaaagaacgatgacatcaggcgaactgtcctgaatagtgttgttggtaccttagatgtatgtgtaaggcatcctctatatggggagaaatttcctgaggagcctggaaaaccgtctcttcactgtcgaatttatcagcctgatcagccaaaatttgggtatgtaaccaatgtatgtgttgctaaatatgcaaggcgtcaagggattgctagcaacatgttgttattggccatagatgctgcaaaacttaacggtgctgaaaatatttacattcatgtgcataaagataacttaccagcatggaggctctatgatcagattggattcaagatcgttgatcaggatgacgcttgttcatcagacctgtgcttactctccttcagttcataaggcttgctgactagataggaatagaagggacatggcccctagttccatctccctgtccagggaaatgccatcagtcctcgcgatttggaaaggcgggatggtatgtgccaagtaataccttcaccaccttgtatatgatgaaagtgtttccaaatgtttgcggctttcgagattgtcactagatcggtggcagttcagatccaccagaatgtttgaggtatctgaatacatcaaaagcttctgtcgtgtatagtttgtgcagtcagcaaagagcaaatgtttcttcgttgcccctgtgattcggcaatgaaaaattgaaaatacatgatgtcggtacctgatactgtgactgtgctcttgttgctggccatatacaattgcaagtctttgacacccatgaacataaatgcttcatgctaataaacagatttatttggtttgaaaaaaaaaaaaaaaaa

SEQ ID NO: 21468 - DNA, 380 bp, Zea mays
  unsure (1)..(380): unsure at all n locations
  Clone ID: MRT4577_119574C.1
aataaaaatttttttttataatttttattctattcattttcaaaataattagtnnaagaaaaagattaaagagaaaatacatttggtgggaaaaagaaagaaaaattttggcataaaaaaatttaaggggaagaagggagggagaaaataatgagaagaaaacgaaataatttgagaagtgtttttaagagggaaagggggggtaaaggctgagtgcatagagaaaggaaatttaggggtttttttatgaaggatgaattagacaatggggaaattgggtagggttaagatcgtggcacaagtgtgagtgacttgacgagaaatgatggttacggagaagatggaggatggtggtgagactgtagggatttggggagggg

SEQ ID NO: 21469 - DNA, 274 bp, Zea mays
  Clone ID: MRT4577_119575C.1
cccacgcgtccgcggacgcgtgctctcgcacatacggactctaaccatggctcctgacggggggcatagtagctacaacaggctacgacaggcacattcagtcatatgagcattcatgccattatacatgaagcaattgacattgacgtgcgctttgcaaattgtgatggccaagactatgtaacagaagccccaatctaagctatcacgatctgctaagaatcagtactgaatgatggttgcagtaacttaactgtactccgctatctgctaa

SEQ ID NO: 21470 - DNA, 347 bp, Zea mays
  Clone ID: MRT4577_119576C.1
tcgcccacgcgtacgaccacgcgtccgcagaggtcattctagcgctctctctgcgttactctctctctacacagatagatcagtataggatggatgtgcaaacctagctagctgctgcctttctagctgagaactgagctgtagctgttggtacggttttactcctcgctctgcttctgctccatcttgctgctggttgcccggagctgagatcgatcgatagcactgctgtagatcttgcggtcggaggcagtagcgcgcggcagaggacggagacgacgaccgatcggtcaaaaggaatgtcgtccgcccaaatagtgccagcggaccatgtgagctatgtgcac

SEQ ID NO: 21471 - DNA, 242 bp, Zea mays
  Clone ID: MRT4577_119577C.1
gtaccgcctggacaggggtttccagatcttcctcaccgcgtacccggagtgccgtcgcctcctcgacttcccggagctcaggctccggccattctaccccggcgcgctcgtcttcgtcggcgccggggagccgttctacctgctctccgacccgttccgcctcccgctgcgttccctctcttcggtgttctcccccgtgggcaccctcaccgacaaggtcctcgtcgggctcacgcgcctcc

SEQ ID NO: 21472 - DNA, 267 bp, Zea mays
  unsure (1)..(267): unsure at all n locations
  Clone ID: MRT4577_119578C.1
gatccagagatggaattatggaaacttaccgtttaaccagntatatatacttcgcacaatggcgtcgtcgacatgctatatgcagatcaaggtcatcatcagagatcactcgtccatcgatcatcacagcagtacgtaaagattataaagctcgtcttgaccgcacgcacatgcgctgtctattcagcttctgaccacctgctgggcgttggcggggccccggtacaccccttcctgcgggtactttagcaacgggcggagcggctg

SEQ ID NO: 21473 - DNA, 206 bp, Zea mays
  Clone ID: MRT4577_119579C.1
tcggacttccaccgagccaagtaccagctggagcacgttgtgcgcacgcacaaaggcggagacgaccgctccttgcggtccgtgtactattaggtagactagcttcttatcaagggcctgtccatcagccttaatcttctataggtggactgccactcacttaataccaacatcatcactctggggctcctggagctacccttctc

SEQ ID NO: 21474 - DNA, 196 bp, Zea mays
  Clone ID: MRT4577_11957C.1
tcgttccaacacggacaaaaaaaaagggcagcccgaaattcgcgcaggagggggcctcaatcaaattatatattctcttcggacaccggatcgaagcacactggacaggaaccgcccaaactatctgcaaaacaggttaagggttgccgtacggacccccaagctgtgagaacccaccccgacgtaagctcttaga

SEQ ID NO: 21475 - DNA, 276 bp, Zea mays
  unsure (1)..(276): unsure at all n locations
  Clone ID: MRT4577_119580C.1
taccctcggttcggccggacactgatacaacacacgccgccgcctcgtatcactggtcgagctctgcaggtgtgcttagctccgagcttcactgccttatatgactgctccacagtgcacacacacacacgtccaggtagctgcactgcaccaatggccggcgtcgaggtccaggtcccgactgccgctcccgtcgaggaggctgcccagctggccgccgcctccgggggggggagcccnaacgaggagaccgctgctccggcggtggacaccgag

SEQ ID NO: 21476 - DNA, 223 bp, Zea mays
  Clone ID: MRT4577_119581C.1
tctggaaagggaaggaagcatgttcgggcagcaccacatccacggcgggcaccaccaggccccgtcgtcgaacgagcagacgcttttaagatctttttccccgcccaccaaggcttcttgcttaaccttccttaacatctctcttgtcttgggcccaacaaacccccggacgagtaccaacacttgttccaggacattatgcacaacaccaatgttaaagacc

SEQ ID NO: 21477 - DNA, 303 bp, Zea mays
  unsure (1)..(303): unsure at all n locations
  Clone ID: MRT4577_119582C.1
ccggccgggagccngctcctatcggattcagatcagatcgtagctgccaaggattccgcgctccgggggtgccatgaagctgaagctcctctctccctgccttctcctcctcgccttctttgccaccgcggcgtacgcggcgtcggcgtcggcgtcgcgcgcggcggccgtcgtcagaggcgacgaatgaccacaactacgccgagtttcatgccccgccacaacatgcataggttccacactctttacaggcgacacggttccgctcggaataagatgagaaacgacactatctgcattacg

SEQ ID NO: 21478 - DNA, 268 bp, Zea mays
  Clone ID: MRT4577_119583C.1
caaacaataaaaaacactctaagcttagcgtattaaaaacaacaacaacaacatggggcaggggaatttgggggctttctttggctgacccacgcttacagacccggcaatacacggacatatctttccattagggtcacttaaatctaaatcactgatcgtacatttacaactacattgattgggaaaaccctgtctaacaccaactaaatcacctcgacatacatcaccattggcgcagatggagtaatttacaacagcctatcac

SEQ ID NO: 21479 - DNA, 824 bp, Zea mays
  unsure (1)..(824): unsure at all n locations
  Clone ID: MRT4577_119584C.1
ctggccgggataacacgacacacagcgagagaaatttttttggaattaccacaacaaaaagtatctaaaaacacctgccagtggccgcaacggtccctataggccatcacgcgtccctccgcgttgatggagtgcctgtaaggtcgccgtcgcggccacggtagggacagataagcacaacatacgagcaagcttcaaaacatgacacattcctcgaacgcaacgacaaccatttagccgcgatgcagcaacacaagacgcgacgacagagcccagacaacttattacacagtagtcccaacaccacataacaccacacagtcacagatgggtttcttcgacaacccatcgtcaatcgacaatgtttgcaacgtcccgcatcgacgaaccatcaattcgaacggcatcatctctctcatgaatcgactcacagacatccggcacgctacgatcggtgctacagtactacagtcatacagacagctttgcccactgtcgcccccagcccgtgtcaaaggcctggttccccttcgacacatccgaaaaggtctgaggaaattcatgagagagctctcatgctcagtagactcgacggcgcgcacgaagcggagcatcgctctcgtggagctgcgtcacgacaaatgacactgccgctgcgttcggcggtagatcacaccacanaacacagccacataggaccctagcggtcgcagttacaacaccaacgaacaacanaaacagagaacatatttcggctctgagggcaagagggcaaacttgaatacaccgaaggtcgatcattggggggaaataaggtattgcag

SEQ ID NO: 21480 - DNA, 279 bp, Zea mays
  Clone ID: MRT4577_119585C.1
attatatactgggaaaaaggttcgttatttgaaacctacataataaaccaataacacaatattattaagatattcccaagtcctctaataaaatataaaacataaggtataatgtacaatcacaacaatcaaactgattaaaaaaaaaacaaattaacaaaattacacatgaataaagaacacttaatatacctattgaattaatttggaaatatctaaacaatacgagcatgataaaaatttttccttaaaacaaagataaattagaacatggcgaag

SEQ ID NO: 21481 - DNA, 156 bp, Zea mays
  Clone ID: MRT4577_119586C.1
tttacttgggggaacttaattttgaagaaccaaaccttcttttttgttgattccaaaaccttatttgaaccccgccccccttattgccccttattttcttccttcaaccaaaagaagaaggcccgaggcattaaggaccgagtacaactattaaag

SEQ ID NO: 21482 - DNA, 382 bp, Zea mays
  unsure (1)..(382): unsure at all n locations
  Clone ID: MRT4577_119587C.1
tcctcctgcgcaccccacccggcgggggagaccttaggttcactcccatgtcgcttcncgccggcgggcagaaggagtactggggtctcgacgacaagcctggctacactgacaagtgtgagcctggatacggccttgagctggacctttaccaggctgttcttggggaagggaagaacagtgacaatgcctcgacgcatgtcaaaattgatgatcagaaacttggcattggaaccctgtctgttgacaagaacccacacatacaatttgatctggcatgaaataaagagattgagccgacgcacacagaacaaactaccagcgtcttgttgactggctacaaggatgagcatgcatactaggaaaatgaaatggaaattga

SEQ ID NO: 21483 - DNA, 502 bp, Zea mays
  Clone ID: MRT4577_119588C.1
ataccatccgtatgaggcggtggatccgcagcttcctccaatgtactccactccctccatctctaatcatggctacaggcaggcgctcatggacccgaaaccacggggagacgtgcgtaaggctaagaagggcgcgttcgtgcgcaagggcggcggaccgacgaataactgtgcgacaaggtccgttaaggccggactgctgttccacgtcggacgtgtctgacggtatctgaataacggtcgtctacgcttcaccgtgtgatgcacagggcgtcccccgtactacctgagctggacctcgagtacttgcccgcccaggtgttgtagctggccgacaaccctggcaatgacaacaagatgactccaatcatcccgagtacacgtgctcctgtccatcctcaacgacgataagctctccatgctgttgaccggcagcaccatcgaccacgttgccgtcatccccaacatcaacccgatgctcctgctcgagatgatcgctcga

SEQ ID NO: 21484 - DNA, 415 bp, Zea mays
  unsure (1)..(415): unsure at all n locations
  Clone ID: MRT4577_119589C.1
ggaaaacttttttatttaatgaatttttaataaataataattctaattaatagtatattgatatagaaaaagggttctaaatgtttttagtatctgtgaagtgaatatataataagatatttataagaactattttattaggtaccttttgtatcaaggctaaccaatccttgcttatttataaattattcgcccgaaatgaaaagattgataatgatatcatttatttgacgtgaaaaaaatatattatataattatagttgttatatgctattcattgnttttatatggggttgtggaataattgaatgtaatgaataattaaaattctattgagggaacgctattactaataatgatttgaatgaaataaactgatggattagctatggggaatgcctataattttttaatc

SEQ ID NO: 21485 - DNA, 277 bp, Zea mays
  Clone ID: MRT4577_11958C.1
gattcatgatcaacgccttcttctttgtacaagaagaatgaccctgcattaataacggacagtggttccaactcatggtacacattggatgaaaattactgccttggatagagctcatgccaatcaaaagtgtgcattaatctatcaatcctagacgtaggagaaggccaaccctcctggagcgcattctattttcaacatcgaattatcttggggagaaccaaatcactaccaccacaggcaagtcattgatgccagccgcctcagatatttttcg

SEQ ID NO: 21486 - DNA, 377 bp, Zea mays
  Clone ID: MRT4577_119590C.1
caatgggacagttcagaggtagtgagggagtacttaagggctgtgctgagtggaaggctccctgccattatgccacagctgtggagtgtcccatttctaggtgaggagatggggttcccttaattaggtaatctccatttattttccatttataatatctttagttatctattttccattcttttgctcatgacagccctactctcctgttggaaaatttgtctgattcaaaaaaagatgtaggcagttattatgcatctgtgtggagatattcaccaaatatgtaataaccatttacgttataaaaaaatctttactagattaaattatagtggtgttatattttaactcgccaaggtttcaaatagaaattgctc

SEQ ID NO: 21487 - DNA, 408 bp, Zea mays
  unsure (1)..(408): unsure at all n locations
  Clone ID: MRT4577_119591C.1
cattgggtacctcgaggccggccgggatgcagcactgcacgctacaccgcttcctttcctcttcggctgctccgcctcgcctcccagttcacagcccctcccaggctccgaatcggcggccacttctcattcctcacttccgtcctcgcgcaccaccccctccatccgttccggatggtgccttcgaaatcccgtccggcgccctagcgtagctcgggctcggccaggctccgggcccgccgcgccgttccgcagtccagctccacctccagcctgggcctcgagatggaactattcagtgttttattaagagggatacatctacccaaatctacagtctgtaccttagntttagntctggcgtgnntgtngaaaatggnaaattncttctatnngnanaaaggaact

SEQ ID NO: 21488 - DNA, 237 bp, Zea mays
  Clone ID: MRT4577_119592C.1
ggccactgcagcagacggaggacggcgacggtggcggcggggaagagccgaagaggaggacgagggatagaacggcgagggagaagctgtctctcttcacgctcgggatcgttaaccgtagctgacaaccgtgcggaaacaccggattgtgagggccgaggagagaggtgcggcgaggcctctcgaggaggcgggggcgggatggcgactccgggtaagggaggggctgttcggatt

SEQ ID NO: 21489 - DNA, 782 bp, Zea mays
  Clone ID: MRT4577_119593C.1
aattcggcacgaggccgtttctctgcactgcgtactctctctctccctcccgagcgtctctcgccttgctgcttcctcctcgaccgcgcaccgccgcctccacgaccacgcgccgcccctctccgcctcctctacggtcacgcccctccgctctgccttcgccacggcacagccaggccggggccgccgcactgcctccttccccgtcgtcgcgccctctccacacacacaacacctaccctattgtcccccgtgccaccgtcgatgggtccctaggtgcgcaacccgtgccaccgtcgatggagtccttaggcgcgcatctgctccacctcgtcaacgcgtacctagagcaggagctagatcgtcgctgccgcttgtactgcttctcggagtcgcccctaaaatctgtgaaggcccatgtcgaggcgcataattggaaagccttgctagagagagattagattactgctggcttaacaaaaaagcaaaaggacctaatgttgaatccagtaaccagtcgtgaaaaggttgtgcacatgtgctggtacgaagatccaaaatttctaacatgaggctgggctttctagcttaacagaaacgccgaccagaccagtttacagtatgttcttttgctactatgttcccgtttattatagaaggtttggatgcatatgtttactttatttgaattgatggatagagaagtatataatgttttttgcatcgtttattaagtgagcaggctatgtgttaaatggatgtgcttaatagtctgcaggcta

SEQ ID NO: 21490 - DNA, 346 bp, Zea mays
  Clone ID: MRT4577_119595C.1
gatatatacaaaatcggaagaggtcaaatgagggcttttggaaaacctattgctgtagaatacacatcatatgccggtgaaaccccatctttatctatgtctgtacaccacaactcgaaacaatatgctatcacaacactaccaactacttttgatcacggctttcctgctctgtcagaccctattacacatactgcgaactctattcataatggtactgggaacaaccatacacatgagaatcattggttgtctcaggatgagcctcactctgcagttcagttcacaggcatttaggcatctgttgatcaatatctatctgtggcatcactggaccaacctatgt

SEQ ID NO: 21491 - DNA, 389 bp, Zea mays
  Clone ID: MRT4577_119596C.1
ggttttggtttttttttttttttttttttttttttttgttttttttttcttttttttttttttttttttggccggatgtaaaattattgaagggttctatagattttttttagcgcccgcagacgatttttttttttttgacacaaacccggggggggcgggtttatacgtacccacacaatacttattatggggcgcgcgcccccccagtacgtgatcgatcgagtagccaccccatgcacacccagatgcgtgcgcccactgaatgcaaccgggctttttgcctttacttggcaaccgcgtcaagggggaggaacgggccctggcccttgaccttgcccggggggtcgtaactgcaaacaatgaaaaccccgcggttgggggggcaa

SEQ ID NO: 21492 - DNA, 350 bp, Zea mays
  Clone ID: MRT4577_119597C.1
gggagtcccaatcgaaacacatttattatttatgttattgctaccacagtatcaaaggcgtttggccctggaaacaacccaactggcccctcctgtgggggggtcctaaacatttgactcgccccgtacaaaaacactgggggttaaggcatgggttaatctggttcctgatccggcccccaaacggggaaaagaaaccgccccctgctaaactaggttttgacccctacaacttggtttttaaccccttggggcccacaccggggtaccctttttgggaaaggagtcctaagaaaaaactggacaccctggaagggaacaaaggaggcttctcccttgcccctggggat

SEQ ID NO: 21493 - DNA, 539 bp, Zea mays
  Clone ID: MRT4577_119598C.1
cccgcatccagttatctacacattttattgcagactacaaagatgtctcgaatacacaggctattctatactcggagctgtacggcaaaaaatggggaacccggttctccgcccagcactgggaatgaaaccggatcaaaaggcgttcaagttggaggggtggagcccactgctgcacactctggatgcctaccaccatgtgttcttatatttagttttaatggtgttgacattggtaatgacggaacagatgctttcacgcatggtgagcgcattggctagagctatgtgtttactcataaatatactgaaaagaaagctgttgataaagctctgggtgattcaatagttcatgaatataaaattgggttagcaactcacatgcggattgatgcggctcatgtgaagggtaatccaccgggcaattacatagctgctgacttagttgctgcatctatctctgcaccatatcttggatcttagtatggaaaagattatgaatatgatgcacctgataaggcgcctgtgaaacatttaca

SEQ ID NO: 21494 - DNA, 386 bp, Zea mays
  Clone ID: MRT4577_119599C.1
catggaacacatttgaggaacgaaagcgggcgttatgataaacggaacacatttttgtccatatattccactcttctttggaacgctaaaatatttgctagcacgaccttgctaaaattgtacactgcacatgacgcgaatggcatatttcacagcacaagggagaccaccctattcttgctcaccaactatgaaccaagttgtgtgctactcaccagcccacacgaatactgaccaaaacaaagtgtgcattatccagaacctactctccgagcttaggccttgcacaatcagatcgatgatcctgcatcaagcccaactaccaaactgagggaggtcgtgcgttaatgtgtgtacaagctcgataacactcgggctcaggaaca

SEQ ID NO: 21495 - DNA, 403 bp, Zea mays
  Clone ID: MRT4577_11959C.1
aaccctgggaaaaaaaaggccctgaatcgagaaacaaaatgctccacatttacaacaagttcatttttgacttttgcccgagcctgaaaaacgtttaaagtagtcatgccccggggcctgcttgctccccacacagggcccttggtccccaaaaactacaagttttaagggaatttagacgagggacaactttaaaaacctatgggtcaacagtcgtcacttggtgccattcgccggccacagttttctttcacagggtcacattgttgttgccgtcaaacacccccagttttttcccagtcagggaccacaacagcctccacacaggggtcctgaaattatacaaaaaccggccttcccactggtcgcctttttttggtggtggccaaaaacaactgttcca

SEQ ID NO: 21496 - DNA, 773 bp, Zea mays
  Clone ID: MRT4577_1195C.1
ccggccggggcctgcacctcagaggggtgggggaagatacccttcgggccactgcgcagcgacgcgattatcgtcgagccccctatcgcggggttaccggtgatctcgtccgctcccagccggatacctcgttccattcaaaggcgcccctggcgtgggtgtctaccgaaggcgatccatacttcattctcgacaacgtcaacgagcgagatgtctgggctgagttccaggcacaggaccattccatcttcccccgccgcgaacggggggtctgggaagcactgcagcgccaccgaaccatgttgcttcgatcgaacgagtagttggcctagaggagcgccgaagtggccaacctgacgtcccggtgcaagggactgaaggaggagggtgtagccgaccgcaaggaggcctgtcgactgagggctgaggtccttggtctgaaggcagaggcagaccaccgtgaggaggtgctacggtgggcgcaggagggcctccaagcggtgacggaggaacgtaactccctcgccaagtccctggaggacgactggtcctcgggtcaagccctggccgcccaaatagaaggccttgagaagagtctggagggcatggcttggaccgtggagcaacagggggccgaggcggtggcagacctctttcaagacctcgatgtggtgggcatgccgcgggttggacccatgcggccttgcatgcaagccctgggcgacttcgtatggggtgagctccgcagggctgtccacctcgggtgaagcgag

SEQ ID NO: 21497 - DNA, 262 bp, Zea mays
  unsure (1)..(262): unsure at all n locations
  Clone ID: MRT4577_119600C.1
atggctagtatactttncccgtttgtttatcgatcacagaatactataggtgcgggaaggctaagaggggtggggggagcacatgctttaaccatggctttgattgattaaactaaagatatttgtagctaattgagccatgaatatacggtctgttgccttataggtggatcatgacttttttttgcagcatatgtacggccaatcctgacatttatgggttaaagaggaacaagtaacttcacctttatctaaatgatga

SEQ ID NO: 21498 - DNA, 513 bp, Zea mays
  Clone ID: MRT4577_119601C.1
cggctcgtgctcatcctgacaccgaggatatatacggagtgctgcatgggttatgcagaaaagctaaggttgaaggttatgctccattgactgaactagtaacaaaagatgtctccgaagaggaaagagaagaaaaccttaccttccatagtgagaagctagcagtggcttatagtgtcctgaagactggtccagggacagaaataatggtttcaaagaatttgcaggtttgcagtgactgtcatgaatggatgaagataatctcaaaggtactttgccgtgttattattctgagggatagagttcggtttcaccggtttgaaagtggatggtgctcctgcaaggattactggtaggcctttcctggagcaatacagatgtgatccagctaatacaaaacgagcagttcctaggggatacatctgacctaattactttctccatctggagaatttggtgcttgttctgctgctgcatatcaatgaaatgaaatatttggacaattggttacta

SEQ ID NO: 21499 - DNA, 427 bp, Zea mays
  Clone ID: MRT4577_119603C.1
ggatgaccatagttcaagtagttctttgttcaaatcgaccgaaactggacacataattgtcaccactactggtggcaagaatggtcaaccaaaacagacagtgagctacatggctgaccgcattgtaggtcaaggttcttttgggattgtctttgtggaattttggtgtgtgttaatctcccacagcaccactctcttttccattatactttaccactttacaaatagacccttcaacttgttcataatacaccaacactccccctcaagatgggctaaatatatttaacattcccatcttgttacatgccaactcattatccttaggacctaaaccttttgtgagactattcacttacctgattacgagatttgacatacttcaacttcaaagccccactatcaatcttctctttgataaagaact

SEQ ID NO: 21500 - DNA, 203 bp, Zea mays
  unsure (1)..(203): unsure at all n locations
  Clone ID: MRT4577_119604C.1
ctcagctccacctctccccaggctgcgagttttcttctccagctgcgcgacgggctccgtggtcctccttgaaaccagcgggtgggggagggactnccatgntcgaacctctgntcctatattaacnaaaacaatacttactcctanttnactggaacaaaaaaattaaatggatctattctcctaaccacccccccccccaa

SEQ ID NO: 21501 - DNA, 1384 bp, Zea mays
  Clone ID: MRT4577_119605C.1
ctggccgcggttcccggccgggatctccgactccgcgcctccgctgcctcccgaaagcattgccagttcctccgcacaacatgacgcgcatccaccgcctccgccccctcttcctcttcgttctcttggcgtcgctgcaatgcggtgcggcgacggcggcggctggatacggaggtggcgccgaggggttctgctcggcggagccgtccagcaagtgctccggggatcagccgctctactggaaggtcacccatcccaccctcgcgcccgcgcacctccaagatttacctggcttcacacgtagtgttttcaaaagggatcatgctttaataacaccagagagtcatgtattcagtcctttgcctgattggatcaatacagtaggagcatatttgatcagtccagctattggtgcacacttcattatgtatctagcaaacatgcaagatggttcaaaatcagccctaccaccgaaagatgttgaaaggtttgtttttgtactacaagggagcatttcattgactgtggggactggaactatccattctctgctggtggattcttatggatatcttcctgcaaacacaaagcattctatgatctcagatgaaccaaccactcttgtaatatttgagaggaggtacaatgccattgaggattcccatcctgatctaattgtgggttcaacagataagcaaccccttctcgaaaccccgggagaggtatttcaactaaggaagctgctaccgacttctctgtcctatgactttaatatccatataatggactttcaaccaggcgaatatctcaatgtaaaggaggttcattataatcaacatggacttcttcttttagaggggcaaggaatataccgactgggagagagttggtatcccgtgcaagctggggataccatttggatggcaccgtttgttcctcagtggtatgctgcccttggtaagaccaggacgagatacttgctgtacaaagatgtcaataggaatccattgatatgatcaagaaaccagaacaaggagggaataaatcaaatgtcgagctgtgccaggtataaagaatttcaatgggagatgatcacaggaatgagaaaaggagatcttattgtatgctgaaaaatcttgaaaccaaaaataacgtgggaagttgaatgtgtacttgtgatgtccataactgtcaatctttggtgactagtgcgactggaattgtgatgtaacgtattctggacagcagatgccaagttggatatgctgtgacatttgtgaatggctaatcccatgaatttaggtgaaaaaaaaaaaaaaaaaagcggcccatatgtaaacggtatgagatccaggggcaatgattacaggacaaacagttttcc

SEQ ID NO: 21502 - DNA, 385 bp, Zea mays
  Clone ID: MRT4577_119606C.1
cctctaaaaaccccccggcccgggaccccctttttttctttatcagggggcgaaaacatggcctcgctttgtaaagacaccaaaccaataaggggcccataaaccagtttttggggtttaaaaattcccccccccagggggcgaaataaaactttaatgcccccccggggcgttggggtggaaacccacttgggtgctttttttacccaccaaggttgaattccccggaaacccctccagtttccattcaatggccagggccaaaaacacaacgggtaagtggtgtttccggggaacccccaaagggccaggtggggtccccccctcccataggagattcctttgggtccagttccccggggggttcttttacttgtcccggacc

SEQ ID NO: 21503 - DNA, 512 bp, Zea mays
  Clone ID: MRT4577_119607C.1
acccccggggaattcgtttcttctttggccatcggggcgtttttgataagacgctggtggcgtcgttcctcctttctgtttgccgccctcaggcgtccacgacctcgtcgtcctgggggggggtcttcaactcctcgcgcctcgggggcggcttggtcccgtctccggggttgggcctgccccgggccttgggcgcctggtgccccgccttctggccggggttctttttggggcccaacgtcgggcccttcctgggggcgccgtctttctcggggacctcctttccggtgtcgttcttgccgggaacgacctcgcgcgggtggcgcccgttctcgtcctcgggggggttcttgttgggcgccttcttccccgggccggggctgttcctgccgttgtcctggagcctcttgaccccggtggccccgttgggcccgtcgtggccgcgggagctgcccccgtccttgggcctcctggcgttggggtccctgcctgtctgcgtgtccgggtttctg

SEQ ID NO: 21504 - DNA, 225 bp, Zea mays
  unsure (1)..(225): unsure at all n locations
  Clone ID: MRT4577_119608C.1
cccacactatactanaacgccctnccttactcttgggaatttctttttgacacctccattaccatatctagggcttggtatttactcttacctcaaacctaatattcaaaaatataaattcaaaaatatctcataactacatgaaataatattatcttgaccttcactccacacaacatcatctacaatcactacctacttctataccttaacatcttaacatct

SEQ ID NO: 21505 - DNA, 282 bp, Zea mays
  Clone ID: MRT4577_119609C.1
cacaagctttttttttttttttttttttttttctttttttttttttttttttttttttttttttttttttttttttttttttctttaaaaccaaaactttattatgaagcatatattataggccatcccacacatgataatgggggccgccttactgcattattacatatatagaaagagagggatggatagaggaaattccccaaatatcatgaatcacaagtagggcggaagggcagcggaaaccccccaggggggggagcgggagctgggcatctggtc

SEQ ID NO: 21506 - DNA, 232 bp, Zea mays
  Clone ID: MRT4577_11960C.1
agctctgcgccctcatcgctgagtaagagctgcgcgcccctcatgctccgcctcgcgagtactccgcggctacgatcgacgcgtcgacgaggaccgactggcacctttctggactatgaagtgcctcggcggaactggctcatggcgccaacgcgtggctggacatcgcggtgcggatgctcgagcctatcaagtaggagttccccaccctctctatgcccgatttctacca

SEQ ID NO: 21507 - DNA, 450 bp, Zea mays
  Clone ID: MRT4577_119610C.1
ggcctggtaccaatgcgactcactccgagatgcccccttcgcctgtatccagtgtcgcttccactatgggttaatttgacgcattaggaggatagaaacccgcgcgagcttagttagcatcagattttggactaggcttatgggtactttcccctaaattgttgtaacccaggagaacttttgtgagtaatgaagtgaatgcaatcatgttattctcgttcgagttgatgttatattgtggcattttctttctatatgatataaagcatattgttcggaattgtgaattaggataacaatggcggcaatctctgttttcatatggcagctaggcagcatcgcgggcagaacaagcaagttccccccccccccacctcctctagctcgcacggtgcaggagctgatggctgagcagaatgaaattctacgacagcttttgcagcactagcc

SEQ ID NO: 21508 - DNA, 409 bp, Zea mays
  Clone ID: MRT4577_119611C.1
aaacccataaaaaaaaaaattttttggggggcaaactgaaaccattgttcaaaaatatccacgggacaccccaaaaataaagggggtaaattttttgggctaaaaagtttaaaaaaaagccctttgggcaaaaatttagtccttttaaaaaaaaaaaaacttttatttttatagggggaattttgggaaaataaaaacaacccttttgggatccaagtaaacaccgctgaaaaccctactaaagggccataaaaacaccgaatttcccaataaggaaaaaggttccccaaaaaaaaacagggggttttaagattttaatatggggcgggatccaccccgggaagggcgggttccaccgcaaggggcaaaaaaagggtggattcctgggaaaacaccttaaagttgaaag

SEQ ID NO: 21509 - DNA, 504 bp, Zea mays
  Clone ID: MRT4577_119612C.1
ggccgggtccgccagtcccccaccgtccatccgtcctccttttgcgcaggcatcgggtgcccggcgcgcggtttccatcgtcggttcgaccgcgttcggatcgccctcacagtaacaggtctaggagacggaagcatgtccgatgtggcggagaacgaccccacggtgacggggaccgatcgctgtgagaaggacaagcacgaggacggcggagacaaggagcacggcggcggcggcttcatggacaaggtgaaggacttcatccacgatatcggcgagaagatcgaggaggacgtctggttcgggaagcaccaccgccgatatgtgcgggatgcacatgaaggacatcaccctccactgctccgagctctccgtgctcgggctcattaagaacgcgaaccaggacctgatcctgctcgtggacattgtctacctcatcgacagccacgatacgcgagctgaccgtggcgctcatctaggacgccgtgaccatgcactcgcacg

SEQ ID NO: 21510 - DNA, 297 bp, Zea mays
  Clone ID: MRT4577_119613C.1
gtcagctaatccttcacagcttacatgtttgacatcggcaacatgtggagacgtgccactgccgtcatacgagggacgaggtctggcatatcgccgacttactacatatcagctagcagttcacaatttacaagcgccgatagtgagtcattatgtaggtatgactcatagccaccagaaaaggctcaagctatcatgcttatagctgcagctgcagcggcagcggcagctccaaaagcagtgctgccctactgtaagcctcaatggggcctcagccactggtgcccacagctggcg

SEQ ID NO: 21511 - DNA, 351 bp, Zea mays
  Clone ID: MRT4577_119614C.1
aaacaacccccccctgttttttgggacctgaaaaaaaaaacccaaaccttcgggggggaagttcccctgaagtccaaccccaaacgttgagaccacctccgttttttggtgctcccaaggcccaaaaataaaacaagggcctcaaaccgaaaattccaagttttttcccaaaacaagggaactcaaaaggctagccttttttatatggcgggaaaaggcctctccatttatttatttccaaaaaaacccttctggcttattttcaacaaaaaaaaaaattaccccaaggttaagccccctatggggggcccaaaaatgtccaccttttttttcccccccccgaaaaccccc

SEQ ID NO: 21512 - DNA, 257 bp, Zea mays
  Clone ID: MRT4577_119615C.1
acggtcgcaccttatagatcactacaccgtgtttttcttggtcatacacgggcttgtggcgctggaggtcttgaagaagggacctacgggtccctgtgacaggccgatcgccgggatctggcttaaccaggtaagcttccaagcctaacatctcggcggctgaactcctgttcctaccgatgtgcctgcactcggtagtgtacttatccaccggaatctgagcgccatgatccttactctcaaccgcctaatcacgc

SEQ ID NO: 21513 - DNA, 365 bp, Zea mays
  Clone ID: MRT4577_119616C.1
acgcgtccggttccgcaggatacttacaagacacctttttttagcagtaactcctcaatcgctatcggtcgccatctctagctactggaaggcctaaggacttagcaatcatggcactcatcaacaataaggctaatatctccgtcaactcacacgatgctgataccatttactacacagaatcaaaacacgacatcaaatccagtcactctatactcatatccaagaccaatgaccctgcaaccaaaagcaagccatattataatgaacgtcattcatcataggcctagaatgctgtctacttacactactaccagagagatccacactacaatgagccgcatctagatgaccacaagctatgc

SEQ ID NO: 21514 - DNA, 250 bp, Zea mays
  Clone ID: MRT4577_119617C.1
aggaacgagcacaagcttgttttttttttttgttttttttgtttttataccgtaaaaaccaaagtggagtatgatgtataatttattggtcataccaaacaagaaaatgtgggaagtcttactgctttattgctttttaagaatgtatggggggggggggggagacgacacacattatcatgtgtggtatgaccagtggtatgtgcgtggtgacaacgtagggggttttaggggatgcgggtcagctgga

SEQ ID NO: 21515 - DNA, 3318 bp, Zea mays
  Clone ID: MRT4577_119618C.1
tcgcggtcgcgaccaagcgacgacggcgaggtagggaatctaagcggctgttacccatgctagcagaccctcccaccgcaatcggtcagcgtttgcgcacgaagattagcaacggggcctctacatttatgaagagtaattacaatcgacgctcgcgtaggtgatagggtcagaggtttcccgtctgtagccagaaaagctcccgctagaagatcaaagaatcctgccccgccggccctgcgtggttggaccccggttcaaggtctgtcaattaggacctgacaatgcgagcaagccgtccgactcaagggtcgacctaaaccccggcggaggagttgttgcttcgttggtggcagcatcgccgcggctgtcgatcggggaagtaaaggcgcgcgtagcatccaaggaccaaggtcgttggctactagtgcccaggtgcatcgagccggagctaggagcttgtgcgtgtgggaagaggtccgcagcctaccggggggaccgccgccgctgagcccggccccgcccaggccgaatcccgcccgaccctcgtcctccgcactaacagtaccgcaggcgccgagctgggtccagccgacggccccaggcaaggcgaccaggtgccccgacctcagccgggacctctgcatcagcccgccgtgccagcatgagggcgacggcgaggaggaggaggacgagctggacctcatcaagcccgccgtcgtcaagcgggaggcgctgcaggccggccacggccacggccacggcctctgcctcggctgcggcctgggcggacagaagggagcggccgggtgcagctggagcaaaggccactaattcctaaggctccggagccccgtgctcgagttggaagccctggagacgaagtgttggaaacgacgcccctacatcctttcttctcgcttggtggtgggcctacgtgatggtacgctgactttggtgtcgcagattcagttaccattagtagctgggcaagctatcaaaaggtgaaaccgtctggtcacgtcgtatccatacaggtcattcatatatagcagtcgcaactcacaactcgcacgtagagcgtagaggttcaaatctgagccttagttcagaatgcagcttcagtttgggagttcgttcgtgcatagcaggccctatagctggggttagtcgtgtgcaaggattctccatgtggacaacacaacacaagcaagcaagctaatataaggttggatttaaaagtcgcagaacaattcatgacgtgcttggaaaacgttggtagcgtcttttaatgcttgatctaaaggctaagttatcatccatgggctaggtttgtttgttagtattaccctgtccagtgcaagggcaggtaggaggtagagagagaccgagcaagtactaacctttcatggccccggtctgcccccccagctccctctttcccttgggggccgctgtgtgctccgtcgccatcgcgggggataaaaggaaaaggctccgaggaaacagtataaaagcgcccccggcacgcacgcacgcacgcaggctcactccacgcagcagttgccaggcgcttgtcactccagccagcggcagcccttttccttggcgaggcttggtttagtttagcccgcctgcggtctgccgcctgccaagtgccacctgacacccgatagccgcaaccgtgagaggctggtagcccgtagccggcatccctcgccctcgacccatttgaacagggcctcgagctttgcctctgctgctgctcgcttgatccgtctcttgccgtggtacgcgtgctcgatcggcggatcgtcggcggcggcggcgggaagctctccgacccgcggccgggatgggtcggcagccgtgctgcgacaagttgggggtgaagcgggggccgtggacggcggaggaggaccgcaagctcatcaacttcatcctcaccaacggccattgctgctggcgcgcggtgcccaagctcgccggcctgctgcgctgcggcaagagctgccgcctgcgctggaccaactacctccgcccggacctcaagcgcgggctcctcacggacgccgaggagcaggtcgtcatcgacctccacgccaagctcggcaacagatggtcgaagattgctgccaagctaccgggcaggactgacaacgagatcaagaaccactggaacacgcacattaagaagaagctgatcaagatgggcatcgatccagtcacgcacgaacccctcgaccggaagacaaccagcagcggcccggctacaacctctcagtcaaccaagtctgacgaggcgaccaaggagcagagcccgcagaacgacgacgccgtgataagggacgtgccggccgatggttgcagcccgacggaatcgagcacgaacaccgtgagcaccggcggaagcagcagcagtggtggcggcggccatgaccaagacccgctggtgaagtggcttttggaagaggagcctgccaccggcgacgaggcgtggctgaacttcactggcagtgtcgacgtggacgagttcagcagcattgccgccggtccggagttgttgccgtgggatggcgcgaccgactggctgctcgactaccaagattttggattgggggactcgagcttggtcgatggctacatggtcaacaacaacagctcaaacggagcaaagttctagctagctagccgaagatgtcatctcatctgcttgtgttgctttgctgccagtgaacgtagatacgtaagtaataaaagcattggtatcgaggttgtcaaaggtggatgaccacatcgcaggaagatcatgaagagtccttgcacgcactcctgtatctcgaaccaactaacggctgggatgcaattgagaaggggaggagcacaggccaatcaatctcaaagagataaaactggttcttgaagatctcgaagaaagatgtgtttcttcacaatcacaaagagaggttgtagaagttcttgctgttgtatacatggttgcgtatatattgctaaattgtaccttgttaggccattttgttcgcaaattgcacgagtcactaattagtcagcaaaaatgtgtgcataaagaagagcagttgaaatcgcctctttgtacgttgtgggtgacgttcttttagttacgttgtggatgacgttgatgcatttatagggtatttggtttgaggaataagttatctggtttgtagaatggaataagttatccatcatcacctcattaatcatggttagtactaacatgagtaattgagtcattccaccaaaaaaaaaaaaaaaaaaactcgagagtacttctag

SEQ ID NO: 21516 - DNA, 1053 bp, Zea mays
  Clone ID: MRT4577_119619C.1
cggacgcgtgggcggacgcgtggggccgcggagcgtctgcgccggttcgaggtgtaccgccagaacatggagctcatcgaggccacgaaccgccgcgccgagctctcgtaccagctcggcgagaccccgttcaccgacctcaccagcgaggagttcctcgccacacacaccatgtccacgcgcctgcatgcgtccgaggccgcgcggcggcaccgggagctcatcacgacgcacgcaggccccgtcagcgacggcggtcgccagtggaaccggcggaactacacgacggacctcgacgtccccgaaagcgtggactggaggaccaagggcgcggtggcgccggtcaaggaccaaggagcttgtggcggttgttggtcattcgcgacggtggcggcgatcgaaggcctgcacaagataaggacgggccagcttgtctccctgtcggagcaggagggcaaatgcaagctcgacaaggcacgcaaccacgtcgccaagatcagaggcaggaagttggtggatcaaaacaacgaagccgcgctggaggtcgccgtggcgcaacagcctgttgccgtgggcatgaatgtacatccgatccaacagcactacaagagcggggtgttccatggcccctgcgacccagaggatctcaaccacgccgtcaccatggtggggtatggtgccgaatccggtggccgcaaatactggatcgtcaagaactcgtggggcgagaagtggggcgagaagggatactttcgcggtttcgcctcgagaggcccgtcaaggacgtcaggggcacctgcggtatagccgagtgggcaaactacccggtgatgtgagctcccgtcccgtgtctgtcgccaccgtgctttacctgcctggcctatagcagtgcggtcgtcttgctttcctgcacatgcgcaagcctatatatgatgatgtgcagaagtcagcttgtagaacaggctgaaataaactcgacgcgcccggcatgtgtactcggcagtgtcgtcgttgtcatttgcctattatctatcatcttaagaactatatagt

SEQ ID NO: 21517 - DNA, 301 bp, Zea mays
  Clone ID: MRT4577_11961C.1
gagctgatttttcggcggccgcccttcttttttttttttaagacaaggtgtccttaatactatcgaacacaaggacaccaatgcaccgtcagtcagcaaccgatgagagtaagtccaccaggaaagaggtctcatgagctacagagaacactggtgggtccggcgacaaacagacggcgttccgtgggagccccataaacacaaacgggagggctgctggtggtcagatattccagatgctaggaaaggcttttgcattataagcatgccaggtaggacattagattatggggcaccccat

SEQ ID NO: 21518 - DNA, 505 bp, Zea mays
  Clone ID: MRT4577_119620C.1
ggccgctttttttttttttttttttctttggtttggggttttcttttaattttttttttgggggggggaccaaggtattttatttctaattgttaaaagactccccaatacaaaaacaatttatattgttaattgaacgtcaaacaaggctttaccctttgttccaaattccctaaaagccttttgggcgggggtgggggcgctccaattttaattaggggctttgaaccttttaattaccctactactgcccttaaaaggaatttcaccttaacaagaacttaccgggtccttaaaaggaatttaaacaccacccccatcagaaagcttcccctaaacaattttggcaacatttccggaatcgatattcccaaaaagcggtcttccaacatttggcaaacaaagtctcccaatattgggcttattaccagtggccctccggtttccaaacttaaggaaaaaatcctcaaggtaactcctttcctaaaatttggagggaaaatcc

SEQ ID NO: 21519 - DNA, 527 bp, Zea mays
  Clone ID: MRT4577_119621C.1
ataccgttgtctctggccccacaggtgagtgccttggttgctcatctggtggatgtatcttacataccaccaagacccatcgggcgctctccgtataaaggagcatgtcatcggcactggatcatggttgacctgctccttatggacgggggaacacaacgagaccacgcacataacgctcgttacctgcccaggcttatagatatcatttcccattaatccacgaacacgttcacggcgaccgttggacgggccggaacaccggcgggctctgaggaccattctatcttgtgctaaacgtgcgcgcggccctggtaatctcatgaggctgggccaggtgtcaaccggccccttaccaccggacatcgcccggactgcgaagcccccgaaggcgaccttggagatccggacgagcttgttctgcgcaagctggagccgactcttattctcatgatgggtccacagggaacacgctttgaactatgaaacaacggaggacaggctattctgcaaatcgaactcggaac

SEQ ID NO: 21520 - DNA, 248 bp, Zea mays
  Clone ID: MRT4577_119622C.1
cttacctcttcctaattttcctggggggaccttcgatcccaagctcatttttttcattcttttatcttactttttttcaaaaagcctcaattttttaaccctttctaaaacttctaaatatcgctcaagatcatctatttataattcactgtatgtgagcatgagtttcctcttaagctttatgataatctgatgtcttggaaacaataccccaattgctcgatcctttagctaaacctcctatctca

SEQ ID NO: 21521 - DNA, 407 bp, Zea mays
  Clone ID: MRT4577_119623C.1
cggacgcgtgggtggaggaggagcaccatatgaaggagcacaatgtggatacccatacaagtttggaggagggtatggatatttgaaaggtgaaggtctagaggagtgtgcattaacgatatgagcttcaatagtaggaggagctgtgatggtaggatttatatagggaggaggttaagcacccatggatggttggtagggatatggaggatgatcatatgaatatagagattggaggttgtggacttagggaacacggatggacagaaacatccgtctaacgacgatttatgggagaaaggtcatggaaaatacatgtcccacattgataggggtgtcacgatgttgtggagattggtcattgaacatgttggtgaaggttttaaagtttgaacttccacctgtga

SEQ ID NO: 21522 - DNA, 306 bp, Zea mays
  Clone ID: MRT4577_119624C.1
acacaacacaccatgtctcgtagcttgctatttctagcggaggctttctatgatgatacttcggtattgaaccagcctagtgcgatgaaagtgacagaaaagagtcttgcagaaacattttctgagataatgaaaagcgctgaaagagaacgagctctaaatatgctcatttcactattgtgttcacattggctagcatggaagtgctgttattaggaaactgccgcaactgtatttctaaaaataaggattatctcaacttaattattatgcaacaaattaatcatttatgacaaatagggctat

SEQ ID NO: 21523 - DNA, 302 bp, Zea mays
  unsure (1)..(302): unsure at all n locations
  Clone ID: MRT4577_119625C.1
ggccccccttggtggcgatttccattggtgccccccncggggttggcttggtttgggacattgctgntcngttcacctctccttcnccacgtcccgcccgctgggggggggctgccgtgtagagcctgcgccccgggccccggcctttccggccggccgccttggcgcgctccccggggttgcggggggcgagctggttgtccttgggcttgatggtgacccgcttggcgtgggtggcgccggggttggtgtcctctaaccggcccgcggggtgggccttggcggcctcctgctccgcggcg

SEQ ID NO: 21524 - DNA, 528 bp, Zea mays
  Clone ID: MRT4577_119626C.1
gagacgaattatattatatttacttaaaatatggaatcatggaatacaaaaaaacccctgcctggggaaaggggggattccgaaaaagggatgggaattaccaaaaggggggaacaggaaaggaaaacgggtcactatttatagggacaggaaaaagcctggggggaaatacaattataccccccaaaaaaggttacaacattgacttaaacctttatggactaaaaaaaattttatttttaaatcgggttgggaagcccaaacttcaagaaaaggaaccttgggccatttaaaaaaaacaggtttagccgaaagccacttttttctaaaaaaacttgggggaaaaaacatattcccaacagggggaaacggggaaaacacttcacgggtattactttggaaattctatctggagggttttgggcaaatttccctttcaaaaacttttgggttcttttctctataggtacctaagggtaagacctaaggatgcccattttaggcattggaagcactaaagaagctgga

SEQ ID NO: 21525 - DNA, 406 bp, Zea mays
  Clone ID: MRT4577_119627C.1
tacgtggtccggcgagacttttttttttttttttttttagaacggaaagacttttatttggtggccatacatatcaaaacttttttgaattcaactataagcatctaaagagggcccccaatgatggtgtggaggaggctgtggtttgcaaacagttggacaagggcacaattgtgtattgaagaggttggggttagccgaaactgtgtaaaagcgaactgttgtggtcaagaagaacacggttgtgcactagctgctaatggatagatttgtgtgaaataacacgggttcagtgcggccaatggtaatggaaaagtgtgtgctgaagtagcatactactggtgatggaatagtgtgctgaataacacacggtcatgttttttgttgatggaaaactgtgtgctga

SEQ ID NO: 21526 - DNA, 949 bp, Zea mays
  Clone ID: MRT4577_119629C.1
gacgcggggatagaaagagtccatgctctcgggttagggttttctcttaccctaagatttaggtttggccaatgtaagagacgcagtgtgtctcggcctcaaaccagggagagcactcacaactgtttagggttagggtttacgacctaaccctaatcggcacaccatcaacagagacggtgcacagggctcaggatccaacgatccacggccaagaaacagagtcaagtaacagaaacgcagatccagttagggttgagccctaactaaattaaccctaaaatccggatcggtcgaagtgcacagagcactgttagtttaatccagtgactggattcacagaaaaaatgctgggaaaccagatccacgtcttagacctccgtactcgatcccataaattacaagaagacacatctaatacatacatcacacagaaaggagggggagaatacatgaggctggatatgagtacaagtgtaaccagaaacggccatgaccaacggtatttttcggctgagttcaagtgatgcagagaccgtgaggcatatggctgtatggccagtggtgtaacgaatgaactgcatgtgctccagtgaactagcggccagatgctagagaacgcacaaaaacaaagacagggaaagaaagaaaagacagaattagagcaacaggtgcggtcggccatgctcatttttttaagaaaaagaagaactggacgagcgcggcaagaaaaaaaagagagaggaagaagcagcgcgcggttggccaggaaccagagttccttggcggctgaagttctgtgcggctgacagaacgaaaacagatgacagaaaagggaaaagggaggctcgccgtcggccaggcgccggtgcttcctggcggccggatgtgaatggcggctggggaggagaatagaaaagaagttagggggaaccggcccggccggcct

SEQ ID NO: 21527 - DNA, 814 bp, Zea mays
  unsure (1)..(814): unsure at all n locations
  Clone ID: MRT4577_11962C.1
gggcggtccccctcgccctcttcggcctagcctcgggtagcctgacgaccgcccggcgcttttgcgcagcttcctgacgatccttatccatcactactgacacaacagcagcaatattccgtccataaggaaacactctgaagtcatgaaccatgcgagatgtaaaaaaatcttcgccggccgcgcgggggatcgaaacattcttaggccaccaacccccggtaaccttcatttttcgcaccgaagactcccggagctcgagcgaagacatccttcccccggtgtcggtgttttgggtccgaccgcacacccggggttgcccctcaaggtgcttataggagtaggacggtgtcaacaactgtagcaaaatggttcgtgccagatgcacgagggacagtggacaatgtttataggttcgggccgcttagagatgtgtaacaccctatgtcctggtgagtatgctgggtgaataaggttacaagagagctctctgggttgataatgcagagagttgaagtgggtggctaagtaatagggtcgatcgttctgaaggggtgccccctaggccttatatacttgaccgtggggcaatacacgtggatatgataactatgtgcacctaaaagatagtgaactgtttgagtttatctctttatagttctgccgacctatcctcgcatggctccggtgcatgggggctccagcgcgggaaagtcgggtctctgttgtggtcgctcgctcaacgttgtgggccgtccgggcttgcaccaatncgggctcatgtcaacctgctttgctgattgtccctccccag

SEQ ID NO: 21528 - DNA, 642 bp, Zea mays
  unsure (1)..(642): unsure at all n locations
  Clone ID: MRT4577_119630C.1
cgcggggatagaaagagtccatgctctcgggttagggttttctcttaccctaagatttaggtttggccaatgtaagagacgcagtgtgtctcggcctcaaaccagggagagcactcacaactgtttagggttagggtttacgacctaaccctaatcggcacaccatcaacagagacggtgcacagggctcaggatccaacgatccacggccaagaaacagagtcaagtaacagaaacgcagatccagttagggttgagccctaactaaattaaccctaaaatccggatcggtcgaagtgcacagagcactgttagtttaatccagtgactggattcacagaaaaaatgctgggaaaccagatccacgtcttagacctccgtactcgatcccataaattacaagaagacacatctaatacatacaacacacagaaagagagggaagaagcagaggctataccaaggatccaactcattgatctcccagatttcagtaggcagctcaaataactaccaatggcatcgacttgtgaatcttggaaactttgtttttgtttggtatacgtaactaatgaccagcagaaatacttgatttttcgattgggaaannnnnnnnnnnnaaaaaaaaaaagtacctgcccg

SEQ ID NO: 21529 - DNA, 788 bp, Zea mays
  Clone ID: MRT4577_119631C.1
cacccatcgctgggtagtatgattactgtaatgtagggtggttaaggtcgcaaactaatacttatattgcatgtgtcgaagatccattctaaaaaaaaaaaaaaaaaagcggccgcttttttttttttttttaaattataacacatctcatacatacattcacacagaagagagggatcgaatacatgaggctggatatgagtacaagtgtaaccagaaacggccatgagcaccacggtatttttcggctgagttcaagtgatgcaaaaaaaaaaagagagagaccgtgaggcatatggctgtatggccagtggtgtaacgaatgaactgcatgtgctccagtgaactagtggccagatgctagagaacgcacaaaaacaaagacagggaaagaaagaaaagacataattagagcaacaagtgcggtcggccatgctcatttttttaagaaaaagaagaacagagagatcactcggtcagccagggaaccgctcggtcaggataaccacgtcgcggtcagctaggagcctccttgcggccggacgagcgcggcaaagaaaaaaaaaacagagaggaagaagcagcgcgcggtcggccaagaaccagagttccttggcggctgaagttctgcgcagctgatagaacgaaaacagaagacagagaagggaaaagagaggctcgccgtcgtccaggcgccggtgcttcctggcggccggatgtgaatggcggctggggaggagaatagaaaagaagttagggtttcccggccggcctcgagggacccaatg

SEQ ID NO: 21530 - DNA, 435 bp, Zea mays
  Clone ID: MRT4577_119632C.1
cccacgcgtccgcccacgcgtccttggactcgtgggttccacgcgtcgatggcctcgggtatttatacaagctcaatgtaggagttgaccttccattacacactcaggcgcgattgggggggcgtgtcggagctagtccatcgctttcggcttggtgcgtaactactaccctaaacttcacatttgatataggagccgacactggtaagggacgaaaatttcctggtgttacggatgccaagggcctccttctcaatcacaatagcctgtctgggccacttccggcggaccttggctattccaaggtgagctacctagctctggctaacaacaggctgacagggccaatcccgcaatcgattggccacctccaggattccctcttcgagatgctgctccttgacaaccagctttccggatgccttccgcacgagc

SEQ ID NO: 21531 - DNA, 462 bp, Zea mays
  Clone ID: MRT4577_119633C.1
aaccaaacagggagctcctgggggggctacaaaatttaccatctgggaaggggtttacattacatccatgtttgaaaacaggggctaacaacaaaaagcatgagctaggggatgagctccaccccaaaatcccaaagccttttggccaactccatgtccttggggttcgcccttggctcgtacagggtacaggcgcaaaagtacttcccgggacaccccctttaaatggggggggggggccaaatagcatggagttgccgcaccctgctaaaaatttttcaagaccaatttacccagggggcgggggaaaacatttaggatactgggggagcaaaaaagggtcgtgataatggaaccaggatgaaaaaaatttgcaggtttgtggacattattttcctaaaaacgggtgggaagttcattaacatgcaatttggttgcaagctttgattgcccatttgcccc

SEQ ID NO: 21532 - DNA, 321 bp, Zea mays
  Clone ID: MRT4577_119634C.1
ccggccggggtgttgctgtgcgctgctcacttgctgagcccagcggccgacacctctgcggctctactttgctcgacgccaggttcgtgcctgacctgcctcacacgattgacggggtgtttggccgatgctccatagctgctcgagggagaaataccagaagagctggccgagcaactgccgacacctgaggtagcgggtgaggatgagagcaatatccgtgctgtcttcgccgagttcatgaccaagcgacatcacgtaaatgacctagctgaatccgcggagccaatgctcgggagattccggcgaggagcttaacta

SEQ ID NO: 21533 - DNA, 640 bp, Zea mays
  Clone ID: MRT4577_119635C.1
agagcctggtggaccgggccaggccgtacctcaagcaccccgacaggctgtacaaggtcatggacccggccctggagtgccagtactcgtgcaggggcgccgaggtggcggccgtcgggcctacaagtgcctgagccagaaccccaagtccaggcccacgatgcgggaggtggtcagggccctggagcccgtgctcggcatggacgacttcttccctgccggcccgttcgtcttcaccatcagcgtggaggaggacaaggtggtgggcgtcaaggtggaggtggaggagcaccggagccaccaggacagacaccgccacaagtaccccaactcgtcgatccacgccggcattgtgttggacagccgggaaggcatggtcggcggcggcgattacatcgccacgctccggcggcagcggagggcgtccagctaccacaaggagagaggggcataagagcaggagagcggaagcgacgagtacatacataggatttaaagcagggcgtgtgcgtgtactctacacatactagagacgtgacacaatgtcacttgggcctggttgagccttcagattgtgattcttgtttcttttcttcttgatagcgatagcgggtgttaggtgatactggtatgcaaaaaa

SEQ ID NO: 21534 - DNA, 591 bp, Zea mays
  Clone ID: MRT4577_119636C.1
tttgttcatgtcgatcccttcatcgttttcgttttccgtcgattgttcatagtacgacgacgacgacgacgcctgtcgttccagaacttgattcccacgtttacatgctacatctgatctctatctacagcgcacagagactaactaggcggccttgtcgccgtacagcaggcagaattcgtcctcgcagttgccggcgccggcgccggcgcgtcctcctcctcctcctcctcctccccgtccccgccgcgtgacgaagggcatcagcgccagcgacgtgacgaagcgcgcggacatggaccgccggtgcgagtgcgacggctgcgggtgcggggtcgccagcggcgcggcgacgcgggcggcgggaggaagcgccagcctcggactggtcggcggcggagggacgtcgccggctgcaccttgctgcttggggatgcccggctgcacctcccacttgaacgggacggtgccgggcctcttgaacgattcgtccaacgtcatggctggcggtggcggtgccgggcctgctctctgccggctgctctccttgctctggcttgtcagcggacgcacacacgagctgtataaata

SEQ ID NO: 21535 - DNA, 683 bp, Zea mays
  Clone ID: MRT4577_119637C.1
tccacagatgcccctcccgggtggcagggtgacacagtacttgtcccgccccacgtgacagcgccgagtccctctcgccttcttccccaccgcacccgggcacccacgcgctcttcacatcagatctgcaagaccaatcccgagtggaggtgcgactcgagcgctcgcgcctggtgtccatatcacagaggaagccgcgtgaccactgtcagcggcagcatgaacgcggaagatgtctttcggaggtcagcggcgattgaccgcccctttcttctgattccttggtgcctccgctgcgctcgtcttctcatgcatggcggcggcgtactgtgtctgccaagagtgccgctggagtgacgtccatgggtgccatgcgcccatagctcgccatgaagaccatcgcgcccgcggtcatggctggtgtgctcggtatctacggcctcatcatcgacgccatcatcagctctgggatcaaccccaaggtgaaggcatactacctctttgacgggtatgccctcctgtcgtgtgtgcttgcctgtggccttgctgagcttgctgcatgcatggccactggcatctgtgatgatgctggtagtcaggataacgctcagcagacaaagctgtttgtggggatgatcctcatccatattttttgctgaagcgcttgtcctctacggtctcat

SEQ ID NO: 21536 - DNA, 373 bp, Zea mays
  Clone ID: MRT4577_119638C.1
gctccggtagaactagaagagagactaacccaggtgcggcccgatccgagtccgggggcccaaggcgcgggaggcgacggcgatggacgcgcgcccgcgacggcggagggcgcgcacggcggaggaggcggcggcgacgctgcgaaaggcgtggtgccggctgcggctgtccgcgcgcgacccggcgcgcgtgccgccctgggacgccgtcgtgctcacggccgccagccctaagcaggccgcgctctacaaccgccagctcgagcgcgcccgcgccctcggccgcttcccggccttcaccgcggccatcgccgtccccgaccccgacggcgcccgcatcggctccggcgccgccacgctccacgccgtcgct

SEQ ID NO: 21537 - DNA, 475 bp, Zea mays
  unsure (1)..(475): unsure at all n locations
  Clone ID: MRT4577_119639C.1
cgggtcgaccacgcgtctatccaatgtcatactatgcttcccctccaactcccctctcctcttgcgcatctccattctttgcatataatataacccacactcccctctaccacccccactcttatctacaacacatcatggtcaaggagacaaagtactacgaggccctcgaggtcgaacccggctgctctgattccgagctcaagaaggcctacagaaagttggctctgaagtaccatcccgacaagactggaggcgctaccgctgaaaaattccaggagatcagccatgcatacgacattctctccgacgcacagaagcgtcaggtctatgatcagtatggagaggctggactctctggcgagggcggagccggtggcggaatgggtggcctctctcncgaggacctcttctcgcacttctttgggggtggtggtggcggcggacgtggaggccgtccctccggcccccgccg

SEQ ID NO: 21538 - DNA, 178 bp, Zea mays
  Clone ID: MRT4577_11963C.1
catggggggggttttttttgtggggggtttttggaaaagccatattgtccatcatagaaaaaaggtcgccgctgtttttgggcaggggttcccctacttttttataaccttaacatgccttgaggccgcctaacatgttttttctttttccacaagttccaacaaacacactttaaag

SEQ ID NO: 21539 - DNA, 221 bp, Zea mays
  unsure (1)..(221): unsure at all n locations
  Clone ID: MRT4577_119640C.1
acctcgaaatccgtttcgagcgcatttttcctccatggtggacacggccctttgggcccactagaattttgccgcactacataaccnaatctaaaatctttaatccaaaaaaacctactcaacaacacaactgggctctttttgaagataaaacaaactgtaatcacttaaccaaaccattaattgctttaacttccaatgataacatcactttgttggaa

SEQ ID NO: 21540 - DNA, 262 bp, Zea mays
  unsure (1)..(262): unsure at all n locations
  Clone ID: MRT4577_119641C.1
gctattgttgccgtcgctgtacctgagggcttaccactggctgtcacactaactctggcttattccatgcgaaaaatgatggccgacaaagcactggttcggaggctttctgcctgtgaaacaatgggttcagcgacacctatttgtagtgacaagactggtnctttaacattaaaccagatgactgtttttccntcgtttgtcctcgttggggggggggggttccctcttcgctcgtgcgccggctccggccgtcgcgggt

SEQ ID NO: 21541 - DNA, 258 bp, Zea mays
  Clone ID: MRT4577_119642C.1
tcgagccggccgggccgggaatatacacccatttctctcgcagcgggtgtcttgttcgttcatcgcagagatgaagaagtatctctgagccgcagacacagcgcagtcatgaaaccacctcgcagctgccggtgggcgaggctgcctcacgtctcacgccagcagaagagcgcaaacaccagcagcggacgaccacgccaactctaggtctacgaggaaggaggggggagggaggagccgcgctccggcagccgaggc

SEQ ID NO: 21542 - DNA, 516 bp, Zea mays
  Clone ID: MRT4577_119643C.1
gccggccgggtcggcgtgaagagaataataggaacctcttctctcttcgagggatatccgaatcatatgggcggctggagcaagctgtcggacgagtgcatagtgccgagggaacgcacgttagttagtgtatggtacagtcactcattaggaacgcgagggtgtacaatgaatgcttaagccctcgcatctctcgtgcgcaatggtcagcggacaacaatatttagacaggagaggagctatgaggtgattacaccctggctgaatgaaacctcgataacctctgccaaaagtgctgcctcgtcgccctacatgagggggcgctttaccaataacgtatgaacctttctggatgaattcatgatcgagttcatgaacaccgacatccgctgcatggtcttgacgactgaagtcgtcctagagtgagttccatgatcagggctcactgtacgttcatgttatgactgcatggactgatagagccctgtacagtacccgagctcaatcgtgcttgac

SEQ ID NO: 21543 - DNA, 322 bp, Zea mays
  Clone ID: MRT4577_119644C.1
cccacgcgtccgcccacgcgtccgcccacgcgtccgcccacgcgtccggggggggggggggggtgcgttgcgcgtgttttccctgtggttttgcggtgtgagaggaatgcggcgagctggacaaggaggatccagagcgcgagatcggaatcggatcggggttagcggctgtagatagcattcgtcaggtttgtgtttgtgataatgagctcgccgtggttctgtggtgtggttatgtatgcatgcatgcatgcatgccgaattgtcaactgatctgaatcctaacactaaataatgcacgtcccggtgtgtgcaattccgc

SEQ ID NO: 21544 - DNA, 761 bp, Zea mays
  unsure (1)..(761): unsure at all n locations
  Clone ID: MRT4577_119645C.1
tggggtaccccggccggccgggaacctaataataagtgagcttccaggtcggggagagggaccgccggtggaaaaactttggaggcgcccaacttccaagatacccactagctcccagcctcctaccttgccctttccacccttcgctgatgctagctaggatgatgggatttttcgagctctaagacaagtactactgatccttgcgcttcacacgccctcttgctccctgcgtgttcttgattcggcctcaaaatttgttgcctgttttctcgtgtttgaggtgatatctcggttctaaaaatctgccagatttcttctccccgtttgtatggacaaatttgggaacgaaccctagtctgtgtgtggagcagccaaagtggtgttcttgcggagcaaagctaaagcggcagcagttggattcggcacaagcacaataccatcaagtgaacaagagccatttggtcttgggcatggagaagcaatccagcacccggcatggtgccctagagaaattgaagagcttccgggggatagagaagcagagaagcttcaagttcttgtccatggagaagcagcagagcttcaaaaggaacaaggacagcccggggaagcggggtgacaccgcactccaccttgcggcgagggctggcagtgttgcacatgtgcagaggatccttgcggagtgtgatccagagctgctggtggagtagctgcccgccagaacccagnacgtgagactgctttgtatgtgtctgctg

SEQ ID NO: 21545 - DNA, 1192 bp, Zea mays
  Clone ID: MRT4577_119646C.1
aacctaataataagtgagcttccggtcggggagagggaccgccggtggaaaactttggaggcgcccaacttccaagatacccactagctcccagcctcccaccttgccctttccacccttcgctgatgctaggatgatgggatttttggagcgctaagacaatttgaggtgatatctcggttctaaaaatctgccagatttcttctccccgtttgtatggacaaatttgggaacgaaccctagtctgtgtgtggagcagccaaagtggcgtttatgcggagcaaagctaaagcggcagcagttggtgaggatacaggagaagatacagaagggcttgttagattctgtaaagacactcttattagctgataccttttccatcaactggggccggtttttcggaagtacgcccctcttggattaaagcctctcaatttcaggattcggcacaagcacaataccatcaagtgaacaagagccatttggtcttgggcatggagaagcaatccagcacccggcatggtgccctagagaaattgaagagcttccgggggatagagaagcagagaagcttcaagttcttgtccatggagaagcagcagagcttcaaaaggaacaaggacagcccggggaagcggggtgacaccgcactccaccttgcggcgagggctggcagtgttgcacatgtccagaggatccttgcggagtgtgatccagagctgctggtggagttagctgcccgccagaatcaggacggtgagactgctttgtatgtgtctgctgagaagggccatgtcgaagttgtgtgtgagattttgaaggcttctgatgtgcagtcagccgggatcaaggccagtaacagcttcgatgcattccatattgcggcaaagcagggccatttggctttggacactgctgcaactcagggccacgttgacattgttaatcttctgctagaaacagatgcaagccttgctaggattgcaagaaataatggcaagacagttttgcattcagcagcaagaatgggccatgtggaggtggtcactgcactgttaaataaggacccggggattgggtttagaacagataagaagggacaaacagctctacacatggcttcgaaaggccaaaatgcagaaattctgcttggagttgtgaagcctgatatctcagttatccatgtggagga

SEQ ID NO: 21546 - DNA, 252 bp, Zea mays
  Clone ID: MRT4577_119647C.1
tcttcccctttcttgcaacttcttatctcttctttggtgccacttaatttcatttctctgtccttctttttacaacgttgtgcctggtaatcccctggtgttccccaactttttcgccttgcatcacttccctttttctcctgttgtcgtatttccttatgtgcctccccctttcgcccttcctaacttttgcccagcctgattggcttttgtgcccctccttgttccgcctctttttccccttcgtttttg

SEQ ID NO: 21547 - DNA, 767 bp, Zea mays
  Clone ID: MRT4577_119648C.1
aagtgagcttcccggtcggggagaggggccgccggtggaaaaactttggaggcgcccaacttccaagatacccactacctcccagcctcccaccttgccctttccacccttcgctgatgctagaatgatgggatttttggagctctaagacaagtactactgatccttgcgcttcactcgccctcttgctccctgcgtgttcttgatttggcctcaaaatttgttgcttgttttctcgtgtttgaggtgacatctcggttctaaaaatctgccagatttcttctccctgtttgtatggacaaatttgggaacgaaccctagtctgtgtgtgaagcagccaaagtagtgttcttgcggagcaaagcaaagctaaagcggcagcagttggtgaggatacaagagatacagaagggcttgttagattctgtaaagacattcttattagctgatattttttttccatcaactggggccggtttttcggaagtacgcccatcttggattaaagcctctcaatttcaggattcggcacaagcacaataccatcaggtgaacaagagccatttggtcttgggcatggagaagcaatccagcacccggcatggtgccctagagaaattgaagagcttccgggggatagagaagcagagaagcttcaagttcttgtccatggagaagcagcagagcttcaaaaggaacaaggacagcccgggaagcggggtgacaccgcactccaccttgcggcgagggctggcagtgttgcacat

SEQ ID NO: 21548 - DNA, 2644 bp, Zea mays
  Clone ID: MRT4577_119649C.1
gaactatcgagattgggaacctcgaggccggccgggagtgagcttccaggccggggagagggactggccggcggaccgccgatggaaaactttggaggctcctaacttccaagataccaactagctcccagcctcccaccgtcttctttccacccttggctgatgctagggagatgggatttttggagctctaagacaaatagttctgctccttgcgcttcagacgcgccttgcgccctgcgtgttcttgatctggcctctaagtttgttggctgttttctcgtgtttgaggtgatatctcgattctaaaaagctaccagatttcttctccctgtttgtatggacaaatttgggaatgaaccctagtctgtgtgcaaagcagccaaattggtgttcttgcggatcaaagctaaagctgcagcagttggtgaggatacaagagatgcagggagaaacaagagaagggcttgttagattctgcagagacactcttattggttgatattttttccatcaactccggccagatttgcggaacctcgcaattttaggagccatttgatcttggacatggagaagcaacccagcgtgcgacatggtgccctagagaaactgaagagcttccgggggatggagaagcagagaagcttcaagttcttgtccatggagaagcagcagagcttcaaaaggaacaaggacagccctggggaagcggggtgacaccgcgctccacctcgcggcgagagctggcagtgtcgcacatgttcagaagatccttgcggagtgtgatccagaactggtggtggagttagctggccgcacgaatcaagacggcgagactgcgttgtatgtgtctgctgagaaagggcatgttgaggttgtgtgtgagattttgaaggcttcggatgtgcagtcagccgggatcaaggccagtaacagcttcgatgcattccatattgcggcaaagcagggccatttggatgtcttgaaggagctgttacatgccttcccctcactagcaatgacaacaaattctgtaaatgccacagctttggacactgctgcaactcagggccacattgacattgttaatcttctgctagaaacagatgcaagccttgctaggattgcaaaaaataatggaaagacagttttgcattcagcagcaagaatgggtcatgtggaggtggtcactgcactgttaaataaggacccggggcttggtttcagaacagataagaagggacaaacagctctacacatggcttcaaaaggccaaaatgcagaaattctgcttgagttgttgaagcctgatgtctcagttatccatgtggaggacagcaaggggaatagaccattgcatgttgcaactcggaagggaaacaccattatggttcagaccctaatatcagttgaggggattgaaatcaatgcggttaatagagctggagagactgcttttgctattgcagataaacaaggtaatgaagagctcgtcaacatcctgagagaggtcggtggaggaactgcaaaagagcaagtaaatcctcctaatccagcaaagcagcttaagcagacagtcagcgatatcaggcatgatgttcaatcacagatgaagcaaacacgccagaccaagatgcaattccaaaaaatcaagaagaggattcagaagctccacattggtgggctaaacaatgccatcaactccaacactgttgttgcggtgcttattgccaccgttgcctttgctgccatattccaactccccggtaattttctggaggacatgactcaagcacctgacccagacatgaccttggggcaagcattgatagccagtgatccagcctttataatcttcttggttttcgacgctttggctctctttatctcgcttgctgtcgtagtagtccagacatctctaattgttgttgaacagaaggccaagaagaagatggtctttgtgataaacaagttgatgtggctcgcatgcctctgcatctcggcagccttcatagcgctaacctacgttgtcgtgggtcgagacgacgagtggctggcctggtgtactatggcaattggcactgttaccatggtggccactgtcggttccatgtgctactgcgttgtcgctcacaggatggaagagaagagcatgaggaagatcaggaggacctccatgagccagtcatggtccatatcaattgactcggaagcagagctgatgaacagtgagtacaagaagatgtatgccctttaggatgatgtccgtgcttgtcggctgagtcttgtatatattggtacccatttgcctgagaccagtccatggcattgagtgggattgactcaatcagaactatattttgtcctagaacatggcacctgtatgtaactgtagtcttgcagcctccagacatgaacctaggggtgaagtctaggtgataggtgtagtcacttttttgttggcaaaatacaaatattgccaagcatgatgtccctgtatcatgttttttgtgggtgtggatggcagtgaaaaatcaaaatcattagattgtatctgtatagtagaatagtatggaataagttgtctttatgtcaaaaaaaaaaaaaaaaaaaaaaaaaaaaaaccttatcgcgtgttttt

SEQ ID NO: 21549 - DNA, 221 bp, Zea mays
  Clone ID: MRT4577_11964C.1
caaacacaacacagacagaacggggaaaaggatcagtaccactcgccacacacccggggggccccctctgccttggttccctctgccaccagcagcccccagccggccatgccgggccgccaccccttcgtgaaggcgcgacgaaggcaggcgcaagggtccagccgtccgaggaggcaacgacgagataagggttgccggtgacaccttggggggggggg

SEQ ID NO: 21550 - DNA, 334 bp, Zea mays
  Clone ID: MRT4577_119650C.1
aacgtcgtgctgatctgagcgacactcactaaaacatatctcccacacatcctcccgccatgacctccgcttcaagaaggagatctttgtgaaaagcctgactggcaacactatcaccctcgaggagtagtgggctgacaccattggcccctgtaagggcaggatcgaagacaaggaggcgatccccccacagcagcagcgggtcatctttgatgcgaaagagcttgaggacgggcgaactgttgatgactacgatgtcgataaagagagtgccgtccaacatgtgctccgactcagggaacgaatgaagatctttgagatcagccggatcggc

SEQ ID NO: 21551 - DNA, 405 bp, Zea mays
  Clone ID: MRT4577_119651C.1
ggtacggctccttgctctatctgcatgtgttgctagcgctacaattttgcctcaatgctcacaagctggtatagcttccctgcttactccataccttccatcaatgatagcttcagtatgtgaaaacccacctttatacccctatatgctccaacaagcaatccacagctagcaacatacctttatcaccctattcggttcaacaatcgccgaccctatctttggtgcagtcatacggtcacaccatcatggcacatcaactaccgcaactcatgctacctgtgatccaccaaactgctctagcaaaccttgctacctactctcagcatcaacactcactatcattcaaccaactgtatacacttaaccctgctgattattttcacaaacatctatatccattta

SEQ ID NO: 21552 - DNA, 174 bp, Zea mays
  Clone ID: MRT4577_119652C.1
cccgcgcgtgcgcagactccaactgcattcttctacctcatgtaaccaacagcaatactgcccataatcagattctgtatgagcaggcacttaactcatcattggtcttagctggcgaaatcatcatgcaccatactcgtatctccattcttcaagtacttgctcttcttctta

SEQ ID NO: 21553 - DNA, 259 bp, Zea mays
  Clone ID: MRT4577_119653C.1
ttgataacgccggcagcgaggcggagcacaggggggagtaaaggcaaatacgcccgctacccccgccgagcggacaaacgggggcaaccgaaccggacagaacagagcgacaaacgggacgacggccccaaaaaaccagaggagggagacgcgacaccaagcgggccatccccccgaaagacggcaagaccaccatgacggaagagcgcaagaacccaacaacaaaccctggagccaaacagaaacaacaccccaaccc

SEQ ID NO: 21554 - DNA, 441 bp, Zea mays
  Clone ID: MRT4577_119654C.1
gcaaactggtagtcgctggctcgccggaatcgtatcctgaaatcagaggggagcagataccacaccactctactgacgcacgacgagcaatgaaacattatccttcagccatggctatagagaagactacatgaacattgtggacattggacatgtctactctggcaagtgaaccaccactgggcacctgatctacaagctaggaggtattgacaggctagcgattgagaggataaagatacaggctgccgatatgaacaagcggacattcaagactgcgcggatgctggacaagctcaaggctgagcgtgatatagagcacaacaattgatatggtactgtggaaggtcgataccaccatagactactgcactgttattgatgccacggaacatcaggacttcatcaaaaatatgatcactggcacttgccaagctgact

SEQ ID NO: 21555 - DNA, 267 bp, Zea mays
  Clone ID: MRT4577_119655C.1
cgcggaggtgaagaccggcatcaggtgtggctcgccgtcgaccgatacgcgccgtggcggtcactcagcgtccacccgttcggactagcacaccacacgtatgcattctatgcactggggcgcactgtacatagctaccaagttgctttcatcatcaacgtatccattgttggagctgttcttcaagaaccaggaaaagtcccacgattctgccacatcctctctctcgggcccttgcgtatctctgggcatgtcgaatatggatgc

SEQ ID NO: 21556 - DNA, 344 bp, Zea mays
  Clone ID: MRT4577_119656C.1
gacatttcgaatttctctctataaataaaacataccacagcaatgtatctacgggctggggacccaaaaaaataaatctataattaacttaatgtactacaaacgtattcctgtaccccctttagtggccatctcgcttatcaatacaatcgcgaacggaaacacctccctttacgctgtccagaacagcctctacaacttctatgtttgtcactcgtccatcttatttaaccgcatccaatagatcaaggacaaggtataccccgacaggactcactttataattccatgttttaaaccaccaatcatttcatgatgtaccgtctaaacccaattattattat

SEQ ID NO: 21557 - DNA, 243 bp, Zea mays
  Clone ID: MRT4577_119657C.1
acactaaaaaacaagggtatgcacacatgcatgggagggacaaaaccctgcaacctgaacacttgtacttgtgaccaaacaacgcactgtacagctaacattacatgcacaaacttacacctactccaaacctggtttcgactgaatatcatttggtccagcctacaaggcaactaacaaactcagactgccggctgatctgtcctcccacaccatatgaagtacacaaggggccaactacta

SEQ ID NO: 21558 - DNA, 276 bp, Zea mays
  Clone ID: MRT4577_119658C.1
tcgcccacgcgttcgcaccgatcctgagtcctgtccaccttgccaccgccgacgccgggccgtcgcagtaattgtcaccgatgctatggcccgtattaaggtgcacgagcttcgggggaagagcatgacggaccctgcagcgcagctcattgagctgaattctgagcttttcctcctacgcgtagtcaaggtcaccggcggcgcaaccatcaagctcttcaagatcaatgtggtgcgcactctttatcgcgcgcgttctcacagtgatctcttata

SEQ ID NO: 21559 - DNA, 292 bp, Zea mays
  Clone ID: MRT4577_119659C.1
gattaaagactcatgcttttactggggtggggtgcctttcgactcaaaatgggtccaagccccactttttttttgtcactgggaaaaacaacccgccccgacacagggaaaaggggtttaccacaacacacgccgctgtgcagaaaaaacaattttttttataaggggcacaaaggggaaaacgagcacacgggggggcccccagaccccaaaatcacaacacagaatttttcccaaaggccaaatttagaaaatactacaaagaaaacctctgtgtccaggaacccacggg

SEQ ID NO: 21560 - DNA, 955 bp, Zea mays
  Clone ID: MRT4577_11965C.1
ggcgccggccgggagtctctcacgttaccagtcttcccgttctcgctctctgtgacggtggcggcgatgggacgagcggcggaggaggagggtgacgtggagtttgctgactacgacctggacgacgaggacgccatggaggaggacggccgcgccgcccgtgcgctccccgtgccccgcatcgtctcccccgccgtggtgcgcacccgcgggcgcttcgttggtcgcagcccctccgttctcacctccagccgctaccgcttcgacttcaccactaacaacggagaccatggtcccatcccactaccgcagcgctctatcgaaggctgggcaattcttgtttctggagttaaagacgatgctgaagaagatgatctttacaatgctttcagtgattttggtcatgtcaaggacttgcatctcaatctagaacgccgcactggatatgccaagggatacgcgctgattgaatacgaaaactttgaggaagcacaagcagcgatcagagcaatgaacgggagtcagctgttcacaaaaactatcaatgttgactgggcattcagcagaggtcctatacagaatttcaagagtgcaaggccatcacgcccaagatctaggactcctccgcgcaggcttgctgccttgacgccatattgactaccgcgggggagcggtggctaggctgtgtcagttctaaaactgatcgtgttttggctgtgagcagccgctagatactgcgacttatcgtttggcgcccgaaccttgattctgctagacctgtatatgcgcttagctggttcagctaacttgggggaggctgctgcgcttcgctccactgactgctattgccgaaggtcctctagtgtgtaaacaatctgtatcatcgatccgtatcaccacggggattaggttttgttgggcgtgctctggacgtaaaaaaaaaaaaaaaaaaaaa

SEQ ID NO: 21561 - DNA, 396 bp, Zea mays
  unsure (1)..(396): unsure at all n locations
  Clone ID: MRT4577_119660C.1
gggncgggaatcccggggcggaccacacccttccgggaggggaggccaccaaggtaaaaaccaattggttgtttccctccgttttagctttggggtgggccaggtgcagcagccagcaggttttttttaaaaaggctggtaggggtttggggccggtaaaagaggtggcccgagattaaaaccgtcgttggcccagttgaattaagcttgccttgcaggaaaggggggggtttgggcttagggtttggccttttgaaaggcgtggtcctttccttttttccccttttcctttttggattatagggagtactccggccgcctggaaacaccgggctggttctgggccgttacctgatggtggggagggggcttggcttcgcctgtgttttgtttttg

SEQ ID NO: 21562 - DNA, 288 bp, Zea mays
  Clone ID: MRT4577_119661C.1
aaagacaacagttaggggaaccagctcattgattcgggagcgtccatggcgggaaatgaggcttgatggacataatctgtggacaagctgcggcatccctctatgggtataaattacacggttgatacagattgatactctacggattcgtgaaataatcaaaagctgtaatggatgtgctaggctgtttggtgtacagattagtgtcacaccggtggaaagctgccgatttgaagcataaagaagacacctgatgtttgaaatttatgggcatgggaaaccccatct

SEQ ID NO: 21563 - DNA, 386 bp, Zea mays
  Clone ID: MRT4577_119662C.1
actctctcctcttcacaaatctcacatcctcactcctcagctcctcaaatcagaatgaatgaatccgcgcaaaattacttttccgtgcaaaaaccttcagagacttcatcagggccgtacacaagtccgccaccaattggttatccgactagagatgcggtggtgggtgatcctccggcagcagcagtggagacaaactccaagggcgtcaaccccgaagccataatgagttgttttagtacttgtatggagtgtatcttctgctgcggcgtatgctccagcctctgtacatcagagtaaatcagcatgatgagacagaagtcgttgcccaaacctgaaaaacaacacgtgatagaaaatctatatatatatatatatatatatat

SEQ ID NO: 21564 - DNA, 144 bp, Zea mays
  Clone ID: MRT4577_119663C.1
cgattctcagaggtaaccgaccttatcctcgatcccactgcgtcgccttacttcgagagctcttcacttcttcgagtcaaaagatagccccagacgtccaagtctttgatcgaccgttgcgcaattcgcgctctctataacccc

SEQ ID NO: 21565 - DNA, 664 bp, Zea mays
  Clone ID: MRT4577_119664C.1
gtccttcaggagaaacctcgcaaatggcagctcgtctaagcaatccctcgagcagcaacaacaaaacgatgatgaagcctcctgtgacaaggcgaagcagacctgcaagagaagcccgctcatcaaaataaacatggacggcatccccattgggaggaaaataaacctctcagcgtacgacagctaccagaagctttcgtctgccgtccaagatttgttctgtggcttccttgatgcagcccagaaggatgaatctagagggcgaggagcagaagagaaaatgttctcagggttgttggatggaactggtgagtacactttagtttgtgaagacagtgaaggaggcaggacactagttgggcacctaccatggaatgtatttgtttctaccgctaagaggctgagggtcatggaaagctctgaacttcctcatggcctgattaaaactgcctccaagagggctgatggctgatatgaggccaagtcgcgcccagccttcgaatcatgcaattgcaagctatgccaatcattggcttcttcggatggccctttttggcttgtagagagaaatctaataagataatgttagcatatcgcagatgccctgaatgcactgtgcaccttttgtaattttcgtcgctctgtttcagatgtggtgctgatc

SEQ ID NO: 21566 - DNA, 321 bp, Zea mays
  Clone ID: MRT4577_119665C.1
attgatgctgtcgtgggagcgcgcgcagacatccgcctttcgcatgcttggatgttgtgtggaatatctctctctcgaatctgcgacacggacgaatctcactaagcggaacttcgcattcagaaaacggctttaggttgaacagctccgccgagaggaagtgcagcagctactgccagcatgaggagaaggagaacaaccggtggggcggcctctggaggagcagctggaactatgctccaattttacactgatgatgcccctggactcaagatctccccaaatgtggttcttgtaatgagcattggctttatagcattt

SEQ ID NO: 21567 - DNA, 120 bp, Zea mays
  unsure (1)..(120): unsure at all n locations
  Clone ID: MRT4577_119666C.1
ttacaatccctaccaccgccggacgagcaaaggcaaggggttaatttaaccaantgcaccgccatcaaaatcccaatccgngaatggggatgaaactggttgacccacatcttttgcaaa

SEQ ID NO: 21568 - DNA, 672 bp, Zea mays
  Clone ID: MRT4577_119667C.1
aaaaaaacaaacgatgatgaaaagctctgtgacgatgggtcgtcacgttgtcaccttctccgatgatacgagcacctctgagcttattcgaccccatccacttctcacctcaatctcgcgagaagcgaagccggaggaggagggtgcgaggagatcgcgagcagccggagccggaggcctagaagatgaagacgttcgacccgtggccggtcttcttccgccgggagtggaagcgcaattggcccttcctcacggggttcgccatcaccggcttcatcatcactaagatgacggccaacttcaccgaggaggacctcaagaactccaagttcgtccaggagcacaagaagcgctgaccaaccaggtgctgtccgaattgcctgtctggacagccagttatgttatgctgtttgaatgaaaaattagcttctttttcttcatctaaatgcgtgcagcctatgctccatttgtaatgtaataagaggcaactgacttgatccaaaagctaccagcttctgattatgaatgatacttcaagtttgatctggttctctgacctgggcatcgatccacttatatgcatgcaacaaatgcttatatctttatgtaggttttttctggatgttgggggttgttggttgaattagttgccaaaataaaggtttttgctgg

SEQ ID NO: 21569 - DNA, 566 bp, Zea mays
  Clone ID: MRT4577_119668C.1
gattcaccgcgctcgccccacaaagagagagagtgactattgtatgaagaaagataccgatgagataacgtctagtatacgttcgcctcctccaccacctctgtcgtggtcttctccagcaaggctggcgacgaaacggacaatgtcctggagacgacgaacattatcaagtacctccatgagatgtaaagcgacctgcaggataaggtcgatgccgtgctgcagcagaagcagttgctgatctccgagtcacgatgatttgacgatctcacgtcccatatccgggaggaggtcgtcttacgccgagttagttgtctggcaccaatcaacagtgtaggacgtcacaatccgtattgaggtatagagcctttatgatctcctagccgcggagaaggatagacatgacgaggagatgtcaaagagtgcaggaatcctggattaactgtatacaacgtactgctagaaagctgctctctactgagagatccagaccctgaagagctctcttgactgccgagattgaggacagtgaaaaaacgatagcgattctattgactgacacgacc

SEQ ID NO: 21570 - DNA, 527 bp, Zea mays
  Clone ID: MRT4577_119669C.1
gggtacctcgaggccggccgggccgggattcgaccccatccacttctcacctcaatctcgcgagaagcgaagccggaggagggtgcgaggagatcgcgagcagccggagccggaggcctagaagatgaagacgttcgacccgtggccggtcttcttccgccgggagtggaagcgcaattggcccttcctcacggggttcgccatcaccggcttcatcatcactaagatgacggccaacttcaccgaggaggacctcaagaactccaagttcgtccaggagcacaagaagcgctgaccaaccaggtgttgcccgaattgcctgtctgctgtttgaatgaaaaaaatagcttcttcttcttcttcatctaaatgcgtgcagcctatgctccatttgtaatgtaataagaggcatctgacttgatccaaaagctaccagcttctgattatgaatgatacttcaaagtttgatctggttctctgatctgggcatcgatccaaaaaaaaaaaaaaaaaaggcccctagggcc

SEQ ID NO: 21571 - DNA, 638 bp, Zea mays
  Clone ID: MRT4577_11966C.1
catgacggagacctggtcccggcccgcagcgctctatcgaaggctggacaattcttgtttctggaattaaagaggacgctgaagaagatgatttttacaatgctttcagtgaatttggtcatgtcaaggacttgcatctcaatctagaacgccgcactggatatgccaagggatatgcgctgattgaatatgaaagctttgaggaagcacaagctgcgatcagagcaatgaacgggagtcagctgctcacaaaaactatctatgttgactgggctttcagcagaggtccaatacagaatttcaagagtacaaggccatcacgcccaagatctaggactcctccgcgtaggctagctgccttgaggccataggcagagtggtggctgcacttatttgtcagttctaactgatcgtgttttggctttgagcaggcgataaacactgtgcgagtgtgactatcgtttagacccaaaccttgattctgctagacctgtatctcactatctgcgcttagttggttcagctaactcgtggaggctgctgtgctccgctgacttaaccattgctgaaggtcgtcttgtgtgtaacgaaccgtatcaccacgggaatgaggttttattgggtgtgctttgggacgc

SEQ ID NO: 21572 - DNA, 679 bp, Zea mays
  Clone ID: MRT4577_119670C.1
cattgggtacctcgaggccggccgggattcaaatcctaaccctaggtgggtgcagtgcaggtcgtcgcagcgccgctacgagggggaggggatcgaactcgaaggagaatttccattcgaccccatccacttctcacctcaatctcgcgagaagcgaagccggaggaggagggtgcgaggagatcgcgagcagccggagccggagccggagccggaggcctagtagatgaagacgttcgatccgtggccggtcttcttccgccgggagtggaagcgcaattggcccttcctcacggggttcgccatcaccggcttcatcatcactaagatgacggccaacttcaccgaggaggacctcaagaactccaagttcgtccaggagcacaagaagcgctgaccaaccagtaatctatgacatggacgccggatggcactggcagagggatggtgtacggtgttgtccgaattgcctgtctggacagccagttatgttatgctgtttgaatgaaaaattagcttctttttcttcatctaaatgcgtgcagcctatgctccatctgtaatgtaataagaggcaactgacttgatccaaaagctaccagcttctgattatgaatgatacttcaagtttgatctggttcaaaaaaaaaaaaaaaaaaaaaaaaacaaaaaagcggcc

SEQ ID NO: 21573 - DNA, 741 bp, Zea mays
  Clone ID: MRT4577_119671C.1
cattgggtacctcgaggccggccgggaatcctaattctaggtggccggacggcaggtcgtcgcagcgccgctacgagggggaggggatcgaactcgaaggagaatttccattcgaccccatccacttctcacctcaatctcgcgagaagcgaagccggaggaggagggtgcgaggagatcgcgagcagccggagccggagccggagccggaggcctagtagatgaagacgttcgatccgtggccggtcttcttccgccgggagtggaagcgcaattggcccttcctcacggggttcgccatcaccggcttcatcatcactaagatgacggccaacttcaccgaggaggacctcaagaactccaagttcgtccaggagcacaagaagcgctgaccaaccaggtgttgtccgaattgcctgtctggacagccagttatgttatgctgtttgaatgaaaaattagcttctttttcttcatctaaatgcgtgcagcctatgctccatctgtaatgtaataagaggcaactgacttgatccaaaagctaccagcttctgattatgaatgatacttcaagtttgatctggttctctgacctgggcatcgatccacttatatgcatgcaacaaatgcttatatctttatgtaggttttttctggatgttgggttgttgttgaattagttgccaaaataaaggttttgctggaattcacatcaaaaaaaaaaaaaaaaaatttgcggcc

SEQ ID NO: 21574 - DNA, 654 bp, Zea mays
  unsure (1)..(654): unsure at all n locations
  Clone ID: MRT4577_119672C.1
aacagtgtcatatgacaactgactttgcttgttagtgtgtttcaagaataaagtagtccattcgtttctatttaccttttacaagtgggtagttctttcttagactatctccagcagtttacccatacccatactcatattcaaactccactccgcgaatagtgcaaaacaatgtttttaggtaaactatggttacactgctgcatgacattataggattctgagaatatgcatcattagaacttcctgaatttccctagtgttttgatgttatggtgtcaataaaaaaggggcaatgacccagtgccaagggtctgggaaagggataaatcgagcccccccggccgccccgcgcgccaaatgcagagaggctgtatgacttaacagtcaaatccacttgatgaggtagcagtagacactacttaattgtcattaatgatcttctagttttcctagttattatttctaaaaagccaactaggtatatgcttctacgcattgcatntgaattttacatcaatttatatctgaagcatgctaatgatgtttcttcacgaggtatgactagacaataaacatgacttttcttggtacacactttggagtttgcttcagttgagttttttgttcaagtgccctctcctttttcttata

SEQ ID NO: 21575 - DNA, 870 bp, Zea mays
  unsure (1)..(870): unsure at all n locations
  Clone ID: MRT4577_119673C.1
gccgggctgcggagtcgtcgcaccgccgctacgagtggcaggagatcgaactcgcggccggatttccattcgaccccatccacttctcagttctcacctcaatctcgcgagaagcgaagccggaggaggagggtgcgaggagatcgcgagcagccggagccggagccggaggcctagaagatgaagacgttcgacccgtggccggtattcttccgccgggagtggaagcgcaattggcccttcctcacggggttcgccatcaccggcttcatcatcactaagatgacggccaacttcaccgaggaggacctcaagaactccaagttcgttcaggagcacaagaagcgctgaccaaccaggtgttgtccgaattgcctgtctggacagccagttatgttatgatgtttgaatgaaaaattagcttctttttcttcatctaaatgcgtgcagcctatgctccatttgtaatgtaataagaggcatctgacttgatccaaaagctaccagcttctgattatgagtgatacttcaaagttaaaaaaaaaaaaaaaaaaaatctcgaaaccctagtcccctgctccattctcagccgccgccaatcccttcccgtgctccgcaaccgctgagtgagaagaagagatggccggcaagggcgatggcccggctatcggcatcgatctcggcacgacgtactcttgcgtcggcgtgtggcagcacgaccgcgtcgagatcattgccaacgaccagggtaaccgcaccacgccctcgtacgtcgccttcaccgactccgagcgcctcatcggagatgcggncaagaaccaggtcgccatgaaccccatcacaccgtctttgatgccaagcgtctcatcg

SEQ ID NO: 21576 - DNA, 306 bp, Zea mays
  Clone ID: MRT4577_119674C.1
aaacaacaacgccggagttttttattggggcggggttagataaaaaaaaaacctaccaccccggtctttgttatggggcagggggtggcttaaaaaaaaactcgggggcgccaaaaattcgggggcgggacttttctagggggggctcccccccgccacaaaataacccacgggcggtttgatcccgccgggaggggaacatatcccccggggggccaacaggagggtatccggtcctgagtaccccctttgtccggcccacccaaaacacaacaccctttccgggttatttcccggggggggggg

SEQ ID NO: 21577 - DNA, 548 bp, Zea mays
  Clone ID: MRT4577_119675C.1
cacattatgtacgttgtgtactatgatacaggcagttttagccatgtcataatccccttgctctaattacccaacccaattattttcccccattagcattataaagaatgtcgttgatcatcaaaggagtgactcgctcgcagtcgtaaaggccataataaagtcgacaaaaaactcctcgcaaaaaaaagcaccatattatatatcccaagaacatgactcatatatagtagtatgtcccattcatcttcacaccagacaccctcgtcttacgcatgcccttcttcatcaaaacatgccgaatagacgatatcctctgcgccggcgggaacatggtgctgtttctgtcctacagaacagcgctcatctcctcaatcgtcgcagggacggtgaccttgccgcaggtgacggtgcgcgaagagtagatctggccgggctgccagttggggttctgccaggtggtgtcgctgcaggtgaggttgagctgcacgccgccctgggccgtgaagcggctgccctcgtcggcgcagtgccacgtctggttgatg

SEQ ID NO: 21578 - DNA, 563 bp, Zea mays
  unsure (1)..(563): unsure at all n locations
  Clone ID: MRT4577_119676C.1
gggccgtctagatgctgctctatcggtcggcgcgtgatggatatatggatatacgcccttacgagtccgagagcgagggactctttcttaacacttatatttcgttattcctatgctagagatctaacatcttttgcacttgaccaagatcttccttttcttaatggattgatagtatctgaaatcttaaacataatcttatgtttttggattgtgtaccctaataatatatgaatattatattacttaaaatacgatatctaaaaatgttgtatataatgagataggaggagtgctacgatttattgaattacgccaatccctttgaataccacatttttggactagaacatttatggattatatatatccactttactttggattccaattcttatacgactttactttctttgtgattaatatactaggatagcatgaggatggggggtgtattcgacatgtcacnaataatactatccctcgtattgaggaatgtattagtaagtgctagggagaggaccagcatcgggacaaaactgatgggagttctatgcatatat

SEQ ID NO: 21579 - DNA, 291 bp, Zea mays
  Clone ID: MRT4577_119677C.1
tccggactagctttagatcacacggggtgccattgactctaggtcgcgaaggggagggctctcaaaacactatctgcctgcaaccgactatgaacaccttcaagctgagatttcaccgtgctcagcgatcaagccaattacagatactcgacaagcttcgcacatctactagacataccactcacgcgcctcagtaaccagactaatagacgctccctggtgtcagtattctacaccgacttatgcatagcttcctgctacgacctaaccggtgacatcgtatgactgcgc

SEQ ID NO: 21580 - DNA, 1767 bp, Zea mays
  unsure (1)..(1767): unsure at all n locations
  Clone ID: MRT4577_119678C.1
tggcgcccggcactacccgcggcgcccgctgcacgaccttgtggacaagatcgatcttgatgtgcctgctggcgaagacagagatgctgatggttggcttgccgaggaccagcncaaggcattggagaggccggaggagacnccattgaggcncaagaagcgtggtgtcaccaaagtgctggatgcaggggaggatgagggcaagatggatagccctgagcatgtaacctcaggaaagcgacagcggaagaggagtaagtacctgttgccaccatacaccagcttggttgtggttgncaagattgccctcaaaccggttgatctgccaagggcattggtgaccgaagctgctgaagatggcagcgatatgtcgccattgccagacagcattgttgtggaagatgtcttgctgctggtgcgaagattaggggaggttcccaggcataaggacgactttccaaaggacgctgagggatttctctgtttgtttagaagcacaacatttgttcacggtgctgactatgagtcttgtaaggcatatgaatgtccactcgtgcgtggctctggaaaagttggcatggaaattgttgtcgctctagcctctgattcacatgcttttctgaatcaaggcagttgtgtgttgaagaggaccaggaaaaaagatgaagctgtgagtggtagcccttccatcaagaagaagcgggagaagacctctcttgccagcgctgatataccaatcgctcctgctattcctattaggcagttgaaagcagaagatatgagaaccctcatgaaggctgaaagtggtctaaggggtataggattaggagttaagaataataagggcaaaccttcacctttgaaagttcctatttcagctgcggatcctggagcagtggaattaggacacgaacatgcccaagcaaatgttctggctgtgtgcaatacgcgtccggaacagcccgcaaaagaaaacgatgctactaacttggaagcaacaaggtcagaaatgaatatgcaaaatggtactgtagatgtgcctatcagaagtgttcagacagaagcaatgaaattgcaagctaataatcccatagatgtgaatgcacaaagcgttgctgtagatgtccctgtaggaagtgtttctaaggaagcaacagagccagaaactagtgtacacaaggacaagaatgtgcaaagcgatgtttcaggtgtatctgacagaattgtttctaaggaaccaacagagttggaaactgatgatcacataaacgagaatgtgcagagtgtcgctgcagatgtgtctgccagaagtgtttcaaaggaagcagcaatgaccgatgctgatattggcatacatgaaaatacgcaaagtgctgcagatttgcctgacagcagtgggccgtctcctatgcatgaagacatgtctcagcctgtggatggacataaggagcctgggagtgtagaagtctgcatagtccagcaatcttacgcttctctggaagctatggtgccagaaatgattaagaaagttaacgctaatggcgcaggcacaatcggtgtgaattatacactcaaagacgagtttcaaaaggatggacaacctgtcgagaaagtgaagctaccagcaggagtggcgaaccattcctgtggtggcggtaccaatggcacttggctggaccctgctaaccttacacctaagaaaaagaagaaagtcgcgcagcacttcagcaatccagcagccgtcatagtggagttcgcacccggtgc

SEQ ID NO: 21581 - DNA, 587 bp, Zea mays
  Clone ID: MRT4577_119679C.1
ccggctagcctcaccaccggtctgtccaccctgacaccgcaccgtcgtctagttgcatcaactgtcaccgagagtatggcccataccaaggggcaccagctccggctgaagagcatgacggacctgcaagcgcagctcaaggagctgaactgtgagctctccctgctgcgggtaccaaaggtcagaaggcgcgcacccaacaaactctccataatgaaagtggtgcgcacctcgatcgcacgcgtgctcaccacgatcttacactagcaataattcgacattgcagcagtcgtactaagaagaagaacctgctcccgctcgacctccatcctaagaagacccgtagccatccgccggcgtctgaccaagcaccaactttctctgaagaccgacagggaaaagaagcgagagaagtacttccccatgaggaactatgctatcaaggcctatgtcagaactgtgagacgctgcgcttagcatatcatccgctgcgttttaatttatggtttgtatgaacattagctgctggtcggaagtacgatgtatacctctgtttacataaatggctagattgccttgactggcaa

SEQ ID NO: 21582 - DNA, 345 bp, Zea mays
  Clone ID: MRT4577_11967C.1
tcgtacccacacatgcacccagagcacgcgcacaggcactacatcacttaggaggtcactgccgccactagggtgcccggcgacagctacctattccacgagcaccacaagaagaagaaggaccacacggacaccgaggaggccagcggctagaagaagcaccaccacctcttcggctgaccgtagtaccatccggcgctttaccgagctaactagctccggcgcacacatttacacacactgtaaattctgtactgcatgcgtgtgtaatttgatggatcacaataatgagtccatctccggaccttggtagctgcatgcttgtgacgagtgagagtgtgagac

SEQ ID NO: 21583 - DNA, 369 bp, Zea mays
  Clone ID: MRT4577_119680C.1
ccggccgggaccagcccatcccatacagcctttctcccctctttccccactggctggttcctctgtcctgtcctgccggccgacgaacctcacccttgtggcacggacggcaccgccgcgatgtcgttgccgtcagcgaccgcaccgtcctcctcgggcgcgacgcagaccttgccaacggagcagcagggagtttcgagggagcggcggatggagtcactggggtggctgacggagtcggcggtgatgccgaagaagcacaaggccatcgagggcgtcggcgccgcctccatcctcgacctcaaggcacagctctaccgcacccaggaagaggcccgaaaccccaccgcccccagcgccgtcgcggcc

SEQ ID NO: 21584 - DNA, 409 bp, Zea mays
  Clone ID: MRT4577_119681C.1
aatgctggctcgcccgcacggaccgacccggaaataacgggtcgtcccacccaaccgttttgttttcctttacgactatacttgatcctacgcaagtactaacacacgagccgctttacttgcttctaactgataatagcacgacctcttacaaggaactccagcatgggcgcaaactgctgcttactggatctacgcgaatgctcacatgcactaaacgcgtgagcaaaaaaacagcccggcaggatcgctgacttgctctgcctactatttccaggaactagatcatgtcgctgagggcacagatgcacgacgatagtttgaattgaacgtagactattgctagccacagacagagggcagtgtggagggcggtacacgcagaagaacttcaaccaacaccactgca

SEQ ID NO: 21585 - DNA, 599 bp, Zea mays
  Clone ID: MRT4577_119682C.1
ctcacgcgtccggaaccgtgtgcgcgcttacacacccaaaccttatccgtgacaggccccagggactctgtagcatgaagtcgagggcacggacacaccgacggcgactccaggctctcggcgaggaagaccaacgctgagaaggacccaaacaagcccaagaggcctccgagcgcgttctttgtgttcatggagagttcacgaaggactacaaggagaagcaccccaatgtgaagcaagtctccctgattggcaaggctggtggagacaagcgtgaagtacctgtctgatgctcgagaaggctcctctacgtgtgataaagacagagaagctcaaggctgattacaccaagaagatcgactcttacaacaacaagcagtctggagaccccactggtgtctggtgattccgacaagtccaacaccgaaggtgacgagtgatgtatgacagatgaaactcctgtcaagagtctgcagacagggaaaaaatatcgtcgatgtctgcctaaccggtttttgtagaaggactttctatatgcagtaaattagagccgtcttctgagtaggttacttgcaagtgtcgaaccgtccctggagaga

SEQ ID NO: 21586 - DNA, 1172 bp, Zea mays
  Clone ID: MRT4577_119683C.1
ggggagaggtacatgtccttggcgagcgagaagctccgggagatgaccttgcgccgcctctccatctccttgctcagcttgggcgacgacgacgcggggaggggggcggcgcccggccggggcaactgcgtagccgccgccgtcttctcctggggcgcgaccacggcgcggacgaactcctggtacgcccgggcgcagccggggtagtcgaactcgtcggagcctggcctgcgcatgcgctccgggtggaactggaggcccatgatgaacctgccctcgccggggctgtacgccgccgggtcgtagaacgcctcgacgagcccgtccggcgcgaacgccatgggcacgaaccgctgcgccaggcgccgcacgccctggtggtggtagctgttgaccatgagccgcgcgccgtcggcgaggtcgcccgcgaaccactcgtgcagcggcgtgccgggcacgacgcgcaccgggtggcggtggtcgtcgtagtcggcgtagttgatgtgctggacctggacctgctgggcctcagccagctcgtgctccacgtcctggtacagcgagccgccgcaggccacgttgagcacctgcgagccgcggcagatgccgaggtaggggatgttgcgctccaggcagcggcgcgcgaggcggagctcgatggagtccttctcgcggtcgacggccgcgtcgctcgcgtgcaggcgccgcacggcctccagctgctccggagagagcgagggcgtcggcggactcgtagagggacgggtccacgtcctcgccctcgcagaggagcacgccgtggatgggctcgaacgagtccagcagcgcatgcacgcccgccacgcgcggcacgatcaccggcaccgcgccgtagcccacgatgaggtccaggtggtactcaccgacgaagtcgacgaacttgttcttgcggacagtgcggcgcgagacgatgagaacgcgggggaggacgcaggagaggtctgctggggaggaagacatggccggagcgcctctcgcagcgcgcgcgcgaaagcaatcgcgatcttttttttttctctcgtggttagctagccggccggccggccctctagcgagagattaattggctgtgggctggctgattgagagttcttggatttgatcccggccccggcggcctcgagaggtaccca

SEQ ID NO: 21587 - DNA, 825 bp, Zea mays
  Clone ID: MRT4577_119684C.1
cctgccctcgccggggttgtacgtgtccgggtcgtagaacccctcgacgagcccgtccggtgcgatcgccatgggcacgaaccgttgcgccagccgccgcacgccctggtggtggtagctgttcaccatcaactgcgcgccgtcagcgagatcgcgcgcgaaccactcgtgcagcggcgtgccggacaggacgcgcaccgggtggcggtgcccgtcgtagtcgccgtagttgatgtgctggacctgcgcggcgggccgaaccagttcgtgctccaggtcctggtacagcgacccgccgcaggcgacgttgagaacctgcgagccgcggcagatgccgaggtaggggatgttgcgctcgaggcagcggcgcgcgaggcggagctcgatggagtccttctcgcggtcgatggccacgtcgctcgggtgcaggcgccgcatggcctccagctgctccggagagagcgagccgtcggcgtcgtcagcggactcgtaaagggacgggtcgacgtcctcgccctcgcagaggagcacgccgtggatgggctcgaatgagtccagcagcgcgtccacgcccgccacgcgcggcacgatcaccggcaccgcgccgtagcccacgatgaggtccaggtggtactcaccgacgaagtcgacgaacttgttcttgcggacagtgcgacgcgacacgatgagaacgcggggggcgacgcaggaactcatggccggcgcatctcgcagcgcgcgagcgcgatctttcttgtggttagctagcctagcgaggttggtttcttggatctgatcccggccggcccgagggttacccaaaaa

SEQ ID NO: 21588 - DNA, 487 bp, Zea mays
  unsure (1)..(487): unsure at all n locations
  Clone ID: MRT4577_119685C.1
ggggttttgggaaaaggagatctgagcatttcagaactcaaaaaacaaaattacagaatcgccacgctctaggggacccaaatattccttcctgcgacagcaccagactggggaacccaaacaatccaaatattatctctgggggaggggtccaagcgaaatgagggcgtgaagaacccacatcttcaccggggctgtgatcctcctctatgcggggggcttgtggattttctccaccatcttcctaaactcttcctgggtcgcgcagagcgctgccgcctgagtgtggagcggggaggcnttgttcgggtctccaagcangctctgggaggaaaggaggatggggcgcacgtgntaggcgggggaccacttgtgcctggggaggtgcaggcanatgtggccgtgcacgtgnacggtagggggggagcggggggtgtgnaaccgcgccttgggcggggtgtgcggggactcggtggggaaggccaac

SEQ ID NO: 21589 - DNA, 833 bp, Zea mays
  unsure (1)..(833): unsure at all n locations
  Clone ID: MRT4577_119686C.1
attacagctccacctcagtgctgcagagactgagggccagccaaaccgctcaccgcacacgcggaattcaagcagcatgtacgccgacgccgggttcgccttcgccttcgccgccgcctactcccccaccctcacttcctcgcagccccagccgccgccgccgccgttcgactacgccttctcctccgagccacccctcctctccatgcccgccatggaccacgacgcctacctggggaacttggtacagccatccatggtatcagaatatgacctgggaggagaaggggacctgttcaaagctccagaagccatcatcgaggaaccgctgctcagcctcgatcctgtcgcagctgccttttcaatgatggctggcaatggaagtgctgtcatggatcaaactattaaggacgcaggcaccggcaccatccaaaatgaccccctcctgagtgaggtgctgtacgagtgcgagaaggaactcatggagaagtccacaatcgaaggagagcttacagcaaatgtttgtgtgaccatcagtgacctcaagaccgaagaaaggaagcaaaagctttccaggtataggaagaagaagatcaagcggaactttggcaggaagatcaagtacgcgtgcaggaaggctctggcagacagccagccaagagtgcgagggagatttgccaagatcgaagaatgcgacctgctgaagccaagcaagtagatccaangtatgcnttggttttggcnttctagctaggcgccgctccatcgtccttaccttgtgcgctggagaggcgccgcgatgcccgtcggattcattcaattgacctctcctg

SEQ ID NO: 21590 - DNA, 1083 bp, Zea mays
  Clone ID: MRT4577_119687C.1
ggaaggaatacaccgggaaaatttgttaatcttcatgagtctgtttttactcttgttttcagtaaggcacaaggagtgcagtgccaagcaagcagaggggagagctgagttttattgccatcttcattcaagcctttgtacaggggctagctaaccaactagactaccaccactttcagctcttaactccctcggctcgcaccaaaacggctgggtagaggaggtggattttgaacagctgaatgatcgattgaacctccatctaagtgcttgaattcagcagcagcaggtcgcattcttcgatcttggcaaatctccctctcacccttggctggctgtctgccaaagccttcctacaagcatacttaatcttcctgccaaagttccgcttgatcttcttttttctatacctggaaagcttttgcttcctttcttcggtcttgaggtcactgatggtcacacaaacatttgctgctggtcgaggcgtgttggctccaaggttctgaatgtctccttcactgtaagctctcctcagcccaaacgctgcctcaaagtccagcccttggaagtctagaaagtttggcctgacagctccattcatccaatctgccgagttgaggcatccagaactaacacttttctggagcgagcattcaggaatggaacgcttctcattctccatggccgggagttgttcagcttgcagcatagggatcttaacatccataagttcagaaattgtctcttcgattgcagacttttccatgagttccttctcgcactcatacaacacttcactcaggagagcgtcgttctggatgcctgcatccttaatagtttgattcatcattgagcaggcagctgcgacaggatcaaggctgagcagcgcttcttcttggatgatgacttgtggagctttgaacaggtccccttctcctccgaggtcatattctgataccatggatggcacggcggcgtaggcttcgtggtccatgacgcccatggagaggaagggtggcggcgggggctgcgaggaggcgagggcgtcatgcatggcacggcggcgtaggcttcgtggtccat

SEQ ID NO: 21591 - DNA, 1455 bp, Zea mays
  Clone ID: MRT4577_119688C.1
taggggcctttttttttttttttttgccaagcaagcaagaggggagctgagttttattaccatcttcaagccttttgtacagtacaggggggctagactaccataccaaattttcagctcttcactcgcacccaagggcccggaggagattattattacacagcatgctgcccgagagaaacaggagaggtcaattgaatgaattccgacgggcatcgcggcgcctctccagcgcacaaggtaaggacgatggagcggcgcctagctagaagccaaaaccaagcatacttggatctacttgcttggcttcagcaggtcgcattcttcgatcttggcaaatctccctcgcactcttggctggctgtctgccagagccttcctgcacgcgtacttgatcttcctgccaaagttccgcttgatcttcttcttcctatacctggaaagcttttgcttcctttcttcggtcttgaggtcactgatggtcacacaaacatttgctgctggtcgaggcgtgttggctccaaggttctgaatgtctccttcgctgtaagctctcctcagcccaaatgctgcctcaaagtccagcccctggaagtctagaaagtttggcctggcaggtccattcatccaatctgctgagttgaggcatccagaactaacacttttttggagcgagcattcaggaacggattgcttctctttctccatggccgggagctgctggttctgtataagaacctgttcagcttggcttgggatttcttcaacttgcagcataggaatcttaacatccataagttcagaaattgtctcttcgattgtggacttctccatgagttccttctcgcactcgtacagcacctcactcaggagggggtcattttggatggtgccggtgcctgcgtccttaatagtttgatccatgacagcacttccattgccagccatcattgaaaaggcagctgcgacaggatcgaggctgagcagcggttcctcgatgatggcttctggagctttgaacaggtccccttctcctcccaggtcatattctgataccatggatggctgtaccaagttccccaggtaggcgtcgtggtccatggcgggcatggagaggaggggtggctcggaggagaaggcgtagtcgaacggcggcggcggcggctggggctgcgaggaagtgagggtgggggagtaggcggcggcgaaggcgaaggcgaacccggcgtcggcgtacatgctgcttgaattccgcgtgtgcggtgagcggtttggctggccctcagtctctgcagcactgaggtggagctgtaataagtttgtcttgtcctgtggcggcggtttgttaagcagcggccagcgggggtgagggggcaggttggttggcgttgtgttggtggtgagcgacggtgtttttacctcgtcgggatcggaagagtcccggccggcctcgag

SEQ ID NO: 21592 - DNA, 728 bp, Zea mays
  Clone ID: MRT4577_119689C.1
tttttttttttttttttcctaaaggtgtcatcgatattctttcgaatatgtctaccaaataacagtatctccaagagttctcaaaacactaaaaatctaggattttaggcaagattgaaaaaaacacatctccaacgactcccagccatagctcccaacactaaaaaaccgagcctcccgtgtggaaaaatacgcactcgtggtcacccgtatccactactcccgcggccaccggaatgccatcgtggccgtcgtggtgtccggagaactgcatcaccgagatgcagctcccgagcatcctgtcgctccacgtccacgacctgccgtcattcctcgccgtcacctccgaggacaacccatttgcgttcgtgctaccggagtttcacgagctcgtcgacgcgctcaaacgagatgatggctcctcaaagcccccgacatacgtcctcgccaacatctgtgatgccatggaggccaacgctctcgcgtcgctgaggccacacatggacatctttgtctttgggcacatgctgtcgttccagcatgaggcggatgatggcaggtgcgccccacctccttgcaatgtctttgaccacgacaagagcaggtactcctacctcagttggctggacaccaagccggccaagtcggtggtgtacatctccttcaggctcgtcggggctgctcctggcgcccaatggcaccatggacgttgtgatcgaaatgtaccc

SEQ ID NO: 21593 - DNA, 409 bp, Zea mays
  Clone ID: MRT4577_11968C.1
aatacacatagttctgtattattacaaaaggcacgaacaaacggggagcaccacacaggaacacggacaagagaggaggtaatacgaggacgacccgcacgtaaaagggcacaacactgaaacccacacacacaaacaaccaccacggtcacacggacacaaaaaaagaagccagtcaaacagcatccaacaaaataaacgcaaaaccagggggtggcgcaaacaaccaggcacccgcagatgcagcaaaatcagcagtatccccaaaaaaccaaacatcagcatgaactaatataagcaaagccatagctgaaactgaaccagggggggacaccgtaacaacagaagcgaagccagacaccgaaccaaccggaggggggggaaacacaaaaactataggggacgcggg

SEQ ID NO: 21594 - DNA, 147 bp, Zea mays
  Clone ID: MRT4577_119690C.1
cttttacatacggtgacgccatgctaccctacacgggtgatttttgaacgtaatgggagttcaaccccgcgtcaataatagtgacagtctaaaaataggtcataatataagcaatgtaattaatgagctaaagtgagtatatgttat

SEQ ID NO: 21595 - DNA, 348 bp, Zea mays
  unsure (1)..(348): unsure at all n locations
  Clone ID: MRT4577_119691C.1
gcgtgttttttttttttttttttttttttttggagggtgtcataaggaacatccatccgtggggacagatttaaagggggtgtgcgaggaaccaccgtacatggaaataaataaagaccggatgaactcaaaaataaaccaaacagccaaaagggcatgggcgggtctccatctcctctctctctcacacacacaaacacaagggcgacgtgcccggaaagggtttttattcantantagtagtaaacatgcaagtcgggatcatgcgtagggagatatgggcataacgggcccatccccgggcgccnacgacggggggatanatatggatcggcttcaagggggcgg

SEQ ID NO: 21596 - DNA, 789 bp, Zea mays
  unsure (1)..(789): unsure at all n locations
  Clone ID: MRT4577_119692C.1
ctgccatgtactgaagaagagaatgaatttgtgtttcactgttccaatcacaagaattggtccagaccatacgaggtcagtacctcgaagcttatcgagcgtaattcatgtgtgtttcaatctgcaactttacagatatcatgcaccttcttgcctactttacaaactacacgactgaacttgcatcgaacattacatttttgcaatgagctcatactgctctgatatttttcaatgtcctttagtgcctgctttagtttgccgctgacatcacccaatgcccacaccaacgatatatgtggccgtggattcgtgtaaaattcaggaagaccatgcaatcgatacacttcatctaccataagtatctgcctcgttatctctggcaaaccagttcttgtaacttctagtgaaacaaatgaccgtgtacaatcatcattgacaaagtgctcccatttattgaactccatccagtactgttgttgtggctggaacttctggcgaagcattgcaataaatgagtcaatctgatgcacctgaactgcaacaggtcttcccaagcttacatgaaactccctgctcagaagcactttctcaagcttctgttcatctttgcacaattcagaaagtgcatagtctgcatcaacggcatagagatccggcacaagagatgcagctcttttcatagaaagagccagttgtttccttgcatcagaaggtatgacgacagggatataaacatgtacagcatagttgccttccacatgnggggaagctccgcccacgcgtccg

SEQ ID NO: 21597 - DNA, 428 bp, Zea mays
  Clone ID: MRT4577_119693C.1
gcgtacgaagacgactgatcctacacaatctacatttaactgacaggcaccaacctccaccaatagtggcgtaccaccgccggcgggttcgccactaagccctctagcaacaacccatccgccagcgtcggctgtagcaggtacggcaagcactccgatgaaggccccctcaactactgcgagtacggctcctccaggaacgactcggagaagtacctgaaagaggagaaggagcacaagcacaatgagcacctcggcaacataggcacccttgccgtcggagccttcgacctgtacgagaggcaccatgcgaagaatgacccggagcacgcgcagcatgcacaagatcgaagagggcctaactgctgtggctgccctgggcaacagccgcttaacgttccacgagcaccacgacaagaagaggccaa

SEQ ID NO: 21598 - DNA, 245 bp, Zea mays
  unsure (1)..(245): unsure at all n locations
  Clone ID: MRT4577_119694C.1
gcggggttttttatccttcnnannactccaaactctctaactttttctacatcaacnnactcaacaccaggcagaccgtcaaacatatttctccagcccccacaacaacaacaaggccacctatatcacacaatactcttactactcccaactccaatacatttacaaccccatcaccaaccacatacatatctcatatcatcacaaccaaaactttaacctcctttatcctaatcttaaacaat

SEQ ID NO: 21599 - DNA, 272 bp, Zea mays
  Clone ID: MRT4577_119695C.1
gcaggcaggtcggcgaggagggcaggaagatcgtaaccgagccgtgcgggggctcaggaggggaacttgacaggacccttggatctcacatacttcctgcacgccctcccgtgcccgtcgacgcgtcattcttgcctgccgcgccacacctccgacctcatcttcttcagagagatcatattcgccacaagctccgccatgaacctgtcgttcttcgtctacacctccatcaaccccaactgcgacttgctcatcatcgactccatcaacaa

SEQ ID NO: 21600 - DNA, 249 bp, Zea mays
  Clone ID: MRT4577_119696C.1
gccaggcagatagcggccggccagggcccgcgcatgatctgggaccaggactatgcctggaggcacaagtactacgccttgtatctctctgcacatgcccgatacttcgcttcttgcgggcagcaatgagatgtgttaaggaacgatgctttcacaggcaagacaggcctagacctgcccgtgatgagtgcgaaggacccttcatacatatggatcgaatgcctattcccccaagaatcacattgagct

SEQ ID NO: 21601 - DNA, 370 bp, Zea mays
  Clone ID: MRT4577_119697C.1
agacaattaacgtttggcgtcgctaccagattatacaaaatggtgatggaagcaaattggatctgtaagggtcaggatgtggagaatagatgaccacctccagtgctactaatgagttgtcctctaaaattaagaatctacgtaatcaaggcatatgttcgacgaaatttaaaactaaaaaggtaattagtcagccaacctgctacacagtggatcaggcacacttaggtaacgcaattaaactgattgcgacgcatatattaggtaaaaaccttatggtaaggcagagacacatcaaggactccctgttaattagtgtactcaccttgctgccagggtggctcagtctgcacagaccaggagtaggtgg

SEQ ID NO: 21602 - DNA, 370 bp, Zea mays
  Clone ID: MRT4577_119698C.1
gtggcaggaatgggatttcaatcgatggtgattcaaagctgaattggtgtaaataaaaagacctaaaaaagaacggcaactgattggttttcatcgtatatgtacctctagggtcagaatttgagagagcttcgttcttgccctcactttttttttgctaatccatgtctaaatagtcagcaggtataaaatactacttgacttcataggaaacacgtgcgcttcacccacatcctgcaaaaaatacattcaaattgcacaaaggcaagggcggatctaccctgtaggtgagccgactagagagaagcagtcctgcaacctccatccgattacttacacgtgtgcacaaatcaagagaattttcattttt

SEQ ID NO: 21603 - DNA, 772 bp, Zea mays
  Clone ID: MRT4577_119699C.1
taaaacacgagggtcatggatatattccctgcatggcttgaacacctggtcaatgctagatgatctgttggttgaaagactagcaagctgtccaagtggaactacgacggatcgagcaccggccaaatcccagctgacacggtgtggacacgagttctgcgctactcctgtggtcattgtttggagaagttttcctaaagcttctttatactgaagagactgctttgatatctgatgttgttgcaaattcaccacaacaaggttttcatagtgggcattgctggagtgatctcatctgagatggtccattaaccagactaaagtagtgcatattttaaattgaatatttttcttcttttcggtgagaagtgaaaagtggaagacatttcagttctgcactttgtagttgaagttatcttcctgattggaagataaggaaggtttgaggagctcatttctgaagttgtagctggaagggagaagagctcatgttaatggtattttgactgctccaaaacactttcgacttgtgatattctttaacctatatgcgttgaagaatttttggagacaaagcatgcaagcacagagtctgctctggtggtaagataagtgaggtgacttctgaagaagcctacagagaatgtaaaaataagtgtgttattttcactgctttgacacagtctcaattgtgcaatgatttattatcacattgtaatttgacatatgctacatgatcctaaattatgttgtaatgaatgttctactccct

SEQ ID NO: 21604 - DNA, 2071 bp, Zea mays
  Clone ID: MRT4577_11969C.1
cctcgaagaaaaaaccccaaactcctctgcgctcttgtcctccctccctctccagccgccgccgccgccgccgccgccgcccagagccgagcatgccgggtgccttccactccctcctccttcccctcaaacggaagcgcaaatccaaacgccgcagcagacgcggtcaccgaaaggagaacaaccccaacatatccaagaaccacctcgccgccgctggagacccgtccttccacctgaaaagctgcacctctgtctcccccagagacatcggactccttgtccagccgctcggcaacctcttcctctccgccaccccgcgagctaacctccgggacgcggggctcggcgcgctccggcctcttccagacgacctgctcctcgacgtccttggcttgctccccgcgcgcgacctcgcggcgctctcggtggcgtccaaggcgctctacgtcgtcgcctcccacgacccgctctggcgggccctcgtcctcgacgagctcggcggcgccttcgacttcgccggatcctggcgcgccacctacatcgccgccgcctccggcggccaggcctacctcatcccccctcgcgctctgaaaatcaagggcttctactccgactacctcttccagagctggctctgtgccaacatggagatgcggcacgagtggcttgcgcgcgacaacatcgagcgccgccgcggcttgtcggtggagcagttcattgccgaggtcgaggagcccaacaggccggtgttgctagaggggtgcattgatatgtggccggcgttacagaaatggaacagagactacctgctggagatctcagcgggtaaggagttcgcggtcgggccagtgagcatgccattagataggtacttccggtatgctgacaatgtccaggaggagaggccattgtacttgttcgatgcgaagtttgctgagagagtaccagagatggggagggactatgaggttccggtgtacttcagggaggacctgtttagtgttcttgggaaggagaggccggattacagatgggttatcattggaccagctgggtctggttcatcgttccatgttgatccgaactcgacatccgcatggaatgctataatcaagggggctaagaagtgggtgatgttcccaccagaggttgtgccgcctggtgtccacccgagtgctgatgtagcagaggtcaccagccctgtgtctatcatggagtggttcatgaacttctatggggcttgtgagacctgggaaaagaggcctatcgagtgtgtgtgccgatctggggaggtggttttcgtgcctaatggatggtggcatttggtgatcaatcttgaggagtcaattgccattacccagaattatgtgagcaggaggaatttgttgaacgttattgatttcctcaagaagcccaacgcaagtgagcttgtctccgggactgaagacagagtgaatctgcacaacaagttccgtggtgccatcgaggcagctcacccgggcatgatcaagcagctcgagcttgaggctcagcagaaggccgctgctcggaagaagaaagcgtcgttctgggattctgctgtcgatgccaagaatggaggattcaagttctccttttgagtttcacaacaaccaggtctctgattttcatgtttggttggatccagttttcttggtagttaagaaattttgtatgcccatttttccttgagcagcctgcagtaccttcctggtggacaatgatcatgggtggcacggcgctcactgggaatccagctaactgattgtctgatttagtttgtacaatgagctgctacattaatgtaatcaaaatttttgatataattcagcgcaagaacgattgcattgtcgttgtaaaaaaaaaaaaaaaaaaggcccctagggcctgtatccttgtacaatttagtgtgtttttgaagaatttagctgaaaacaaatatactgtttggcataacatgtaacttagtatttaagtactaagtgatgtaatattgcaattgataattggtttccccaggaaaagagaaggaaatgttgcatttgccttc

SEQ ID NO: 21605 - DNA, 637 bp, Zea mays
  Clone ID: MRT4577_1196C.1
cctcgagccggccgggaatcgagacagtgcatcttcggtctaaatatctcttgtatctgcatctacgacctcaccggcgcccgctgcagtattatcatgtttgctcgctgctggcgcggcgaatcgcgtttggatagacggcaggtaggcgagtgcatcgccatcgagatgttcgaatccgcctcatcctcggccaagtgccttgcgtgaaagctgccgtgtctgcagaatgcgattccatctgatgcaagcattgctggccgaactgccatagaggagaggtgatgatgatatgaacttgatcttacagagagactgtatgtgggaaaacttgacccgtggtaggatgtgtcgaacattagccgagtgtcatctaagaggagaggaatgggaactatcgccagatcttccagtcctgagcaggtcatcggtggcaaggagagatgcatgcaacaactctcactcgtggtcactacagcattgactaaggagattgttgacctgtgactagaccgcatcgagaagctagcagataattgcagtgcgctccagggcttcctcgacttcaacgctgtaggtggaggaacgggctctgggcatggatctctcctcctggagcgtctgactgtgtgactat

SEQ ID NO: 21606 - DNA, 190 bp, Zea mays
  Clone ID: MRT4577_119700C.1
ttcgttcgttccctcacttacaatatcccaacaaaaagcattggtgctacttctggtgaatagaacgtccattatgttaggtgggagaatgtacctcaaagacaagttgttgcgaggaggttttaccttgggttttgagaatcgcctttactcctgatcatcaaactagctgaagaggcgtttcttttta

SEQ ID NO: 21607 - DNA, 266 bp, Zea mays
  Clone ID: MRT4577_119701C.1
ctactagcaacgctattcattcgtctgtctgctctcgcccttgctcgcactcactccgatctcctcccacgctttccggtctatcaaccgattgtaaaatatttgcaatggcttatatcagcaccatttctatgatgagctctcctctttccagggctttggttatgtctcgctatgccgctcgtccattgagcagcatgtgcttaaacgctagccaagctaaaatgtctgctgccatgccaactgtgcaaactcgtgctttgcaa

SEQ ID NO: 21608 - DNA, 319 bp, Zea mays
  Clone ID: MRT4577_119702C.1
aacacaggaggacaaaacggggcctttaaacacaaggaagccccaaccaggatttgtgaaacacaacccacagaggtttattaaaggaggacttccatatagggggacaccagaggggcccaaaagaggaaaatacccagggacaggggggggggaaaggacccggggtttaaggaccaccggggagggggaacaccagggggaaagggctttctttggggaggggggaggggggtgggggggggccattctcgagttggtggccggggaaataaaaggggtggggggcggggggggggagttttttgggcggggtttt

SEQ ID NO: 21609 - DNA, 556 bp, Zea mays
  Clone ID: MRT4577_119703C.1
tgggaccctcgaggccggccgggggctttgtgattttaggcgtagcaaccaggaaacatgcaaagaaacggttgcggtttcctgactcggaggctgctgctgctgcttcttctgatcctggtcgtgttagtgattcaagttagctgtatggaagcagcttcgaataaaagggccggtcccggtgatcctcccgtccaggggaccccattctgctgttcatagacgtacgtacgcgctccttctggtcttgttatttctagtttcaattccgcacaaagcgctcaatatgtacacgtttattgaagttttcaacgaggtgttgtaaaaaattacatcttcatcagataccaataccactcgcgctacaggaatcgtttcgctcgcctacatgcatgtgtgggcaacgagtcagctagatctctgatctccaaattttcgttctgtttccgtgtaatctctatggtcactgtattattatagcttattcttccaaaataggacggagattttcccgacaaaaaaaaaaaaaaagaaaaaaaaaaaaaaaaaagcggcc

SEQ ID NO: 21610 - DNA, 394 bp, Zea mays
  Clone ID: MRT4577_119704C.1
tttgttgtttttttaaaatttctttggtgaatttataatttttttttttttttaaacaaaccgggcttccgcatttattcaattaaaacctcacaggaaacatcccccaagcaaactcctatacccacaccaccctttttccccaaaatccttttactttgggcccctgcaaatttccagcacacacatcaatgcaatgcaatgcaaatgcccggcccaaaccagtcacccccaaaaaaccaggttttatccaggggcccagccttccaacccgtaaaaaaccgccccttcaccactccgctcactttaagttaggctcttgcaagtagtgaaaccgaaacccccggggcccgtcaaaaagggtccttccgggaggggggtttccattcccccc

SEQ ID NO: 21611 - DNA, 365 bp, Zea mays
  Clone ID: MRT4577_119705C.1
tttttctcgcgcggggcgcgccttttggttggcacctaggatacatactcaatctctattgaactgtcagcgagagcgggtattctatctgagcagattgccgttaatttgtagggcatgtaaaacgagatcgcgaggtctgagtgattaataaaggaattgacacggtctggcttaggcgttagtagttgtgtgccttcttggctgacgtaatctgatagcgactggtacactactagcttgcacatcggttggacccatctgggggatgcacgtgctactaagtgttactctgattgacaaacgattgaatactttacatgggctgattagtgcctgcatccttcacaccgatgcaatggtat

SEQ ID NO: 21612 - DNA, 2162 bp, Zea mays
  Clone ID: MRT4577_119706C.1
gtgcaaatcttcttatagctccatgtcatatcagatacacttgggttactatagcttaagtcaataaaatataagagcagtagcagtttacttgtgtatcttcaaacaatgagaaacatgcattttccacacactctgtctctctcttaaaaaaaatccactaactacaactacagctacaaccactaattctgcagccataaacatctcactgaacatagcttttatttgcgactaatatttttctatgataatgaacaataaactaatacaattcggacaatgatgagcccaacacaagaatattgtacaattccaacaatagaaacaattgcaatcatcattcacgtatagtatgtacccaaacctttaggtgcacttgccgatgccacctagcaaaaaccgccgcataaacaaactcttccgagctatagcgcgcacctacataacgtgctcgccttccgcttcctccggccgatacatacgccaacgccgatgccgacgacgacgagcgcatcgacgacgggggcggcgcagcgccgccggagaagctgcaagggtccaccgccacgccagccatggtgctgctccttaggcctcgacccctccacggtcgccgccaccgccaccgctgccggccggagccccctccccgcaccgccgcaccaggtcgcgccgccgctctcccgccgcatccgctccccgggacgcgtatcccccatcgacgacccgaccttgcctgcctccgtgggttcgtctgtttccgtgcggctgtcgtccgtcaccgaatgcccgcctcctgctctgctgggtccgccgccgggcgctgtggagaagccgagggaaattctgaacctgaggctggtcgacaaaggcgtgatcttggaggtgaatgagttggagagggtgcgcggggagagcgaggtggtgaggaaggttgttggggaactaggcggcgagttgacggtggaagggatggtggaggtggaggccttcagggaagcggtggacatgatgttggaagacgaagacgaggccgctgcgatgaggcggctcgctcgtggtggtgtcgcgcgagccatcgacgtgctcgaggtgagctctccgctgttatattacgctgctactgcttgcttactgatttgtgctcaaattttactctttgtatgcctgttaactaccaagttgtctgaaaatgtgtactggttttatgctaactagtaaacaaattttactatcaaattttactctttatatgcctgttaacgagtaaacaaatttctcaggtatcattgtcactcgtgtttgacagaggggttaagagctgtgtaaggtacctggacgctgttccgtggagcgaatctgaagaggagacaatcaagaggctgatgtctcagcatccttcgtacaaggcagctttgagaaacctgctggcggcgaggctgcagcccgccgagaggcctgcctcgtcggcagaagcagaactggtcgttgaactggccgactccatcacgaaggggaccaacaacaacgcccggaaagagctgcggaaccgcatctgccattcgtgcctgaactctctggcgcgattgctgggagaagaatccccggagccggatcagacgtccttgccatcagttggaagaggaggagtaccggtaccgccacctgagactgagaccgagagcatctacaggctagtcgaggacatcaactggctgctgcagattctgatcgacaggcagatgggggaggagttcgtcgagctgtgggccgaccaaacgagcctcagcggcgtgcacggacgggcgtcgccgatggtgcgccacgagctgagccggatctcggccacggtcttcatcgccatggggagcggcaggctccagtgcgccggagccagacggttcggcgtcttccaggcctggttcaggccgatgctggcggacttcggttggctccggaggtaccccaagggcctgaacgtgacggccctggaggaagggatcgggcaggcgctgctgacgctcacgctggagcagcagcaggcgctgttcttggagtggttcggggctttcggcagccacggccgggagtgcccggacctgatgagagccttccaggtctggtggcggcggtcgttcgtgagatgagatcattaggat

SEQ ID NO: 21613 - DNA, 195 bp, Zea mays
  Clone ID: MRT4577_119707C.1
tccgtcggcataccacggcaaggttgttacagtgaccaagaacagggctccctcaatggtgcggacgacggtgcaggatctggcggcggccgtcgaggagccgccacggcagtacgtggtgcacgagcgagaccgagaccacctgctggccgctgacgagatgccggatcccatccctctcatcgaccttggccg

SEQ ID NO: 21614 - DNA, 422 bp, Zea mays
  unsure (1)..(422): unsure at all n locations
  Clone ID: MRT4577_119708C.1
gttggaacctttgggctgatttatgtgcttggtaagcatggtcttaaggctattccttattccgaaaaggggcgtggttttaatcattcggtgccgtcagctaagcatgctgatggtgatggcgataccgcggtggcggatgctaaggaaaagggtcttgatatgcatgagttttctaagtatcttcggggtgttactcggaggaaggatagtgataaattgtccaagggattttctattgcttgttctatcattgagggaggtattaagattgctcatgatgacgctactttcgttaatcggaaggttaatattgntcatattgntaaacaaccaatcccagcgtcgataacatcccaagctggttcacgtcagtcacatcagaccgggccggactttaagtaacgtaccatatacgtacg

SEQ ID NO: 21615 - DNA, 630 bp, Zea mays
  Clone ID: MRT4577_119709C.1
tcgctggctttgaaagcgtgactgcaagaaatgatagtttgcctgttaaccactcatctgacattcaaattatcaatcagtgacatgaaaactatcatactgaaactttcagagaaggaaccaagactgctgcttagtgtactaaagtctgtaattgaaatgatcgacgccaaggaagagctggcggataaagatgaatctcattcgtgtctgccagctgggccatccaaagcgaaaggattatgctctttaatgtttgtgacaagccatagaaccaagggacataaggattcaggctacattggacttgttcacgagaaaggggtactttcttcagacaagaatgcaatccctcatttttgccttgcaaaacttctgcagaagttattgaatctatccactacaagtgaaagatatctcatagacgcagcatggttgttgattgaaatggtcaacgatagtaatacgaaggagaaattgaggaaacttcctgtgttgtctctgggaaggatggctaaatcttcttccctcccagattcaagaaccatatgcaacgaacagggatcagttgaaaacgcaacagagacactcgaattattcaaagtgcagttgaagaggcagaagaatggt

SEQ ID NO: 21616 - DNA, 292 bp, Zea mays
  Clone ID: MRT4577_11970C.1
ctcttttatttatttttcaccaacacccaaatgaaggggctttcagacaatgggacgggttactccaccattccctcaacatacttacattacatattcttggtacactactcaagatacttggaggtcgctttaaattcaaacccccctcacgaaaagataatcattatataccaaccacttattcacaaacccaatccttaacttgtggcacttaatccatcgattccgaagatattccttaccataatcctccttataaaaattttattccaaccataaactttttcca

SEQ ID NO: 21617 - DNA, 413 bp, Zea mays
  Clone ID: MRT4577_119710C.1
tcggccaggcagtccgctaatccctgccattagtagtattgctgcaagatagcagtgttagatgggtgccaaccacacggtgttcatggatgtcggcatagtatgataccacgtgcattaatcgcgctctgctgtatacaccgtgttgacgtgcttgtgtttgctgatcctaaggtacatcggccgtgtgattaacaaggtcttggcctaactcaacgagatggttaagtgtgtgtacgcgtttttacgcactaaggatatcgccagtgctctaagtgctccttgccaaataggaggatatatttattaacagacttttatgatgacagacatggttatgtttagatccatgggactaaggtttgtagcttttataatatttttaaatgatgatgcaggtatgttttgccatg

SEQ ID NO: 21618 - DNA, 619 bp, Zea mays
  Clone ID: MRT4577_119711C.1
cggccgggccatcttcttcgcctcctccacagaagtccacctcccgactctaccaaaatcccaaaccctagcagtgtaaaagcggcggcacgaacgaacctgcgcctgcaagggaagacgacgagggtaatcaggcaaaacatgcttctccgggtcagaaggctgaggtcgatgagggtcatcatgatgacaccaccaccaaccagaccgccactgcagcctatggtgatacgtctagctgcgaagatgacatagcagggacgatcgccggcgtggatgaggggagcagcgacgacgacgacttcgatggacttggtatctctggccacagcatgaacgggaatggcgatcccaaagctagcagtggtgatgtcaagacgaagatcccgtggaagcggtggaggaagcccgtgaaggcgcggtcgctcaagtccttgatgtaagcacctacgttacgttacgtaacgtacgtgcatcagcgacgacgtcgaagaaatgctagctgcaggtacgtgtgtacctttgcttaattagtcggtctgttctggttttgttgttgttgaccagctgtacaagctgtgtttgacttttgcataaaaaaaaaaaaaaaaaagcggcc

SEQ ID NO: 21619 - DNA, 220 bp, Zea mays
  Clone ID: MRT4577_119712C.1
ggagcgagacgcaccgatcagccggcttcactctacgcggccaccaagaagggtgtagaggagatcaagcacacgtacaaaaacatttacggactctacatcactggtctacggttcttcactgtgtatgggtcctggggacgccgcgacatggcctacttctccttcaaccgcaacatccttcaggggaacaccatatccctttactgcggaaaggacc

SEQ ID NO: 21620 - DNA, 307 bp, Zea mays
  unsure (1)..(307): unsure at all n locations
  Clone ID: MRT4577_119713C.1
ttacaaacttcatttttttcgcagttattctcacgtctgactaccactttggcgacacttttcataccaacgaccgtcccacataatnatncatcaccttaacttccacttatcatgctgcttaacccatttgattagcttgttgttgacaacaattatttttatctcactccactgatcaactttattgatgctatcaccatccctatagttgacactttttacaagaacccttacaaccacccatacctcatgaaattcttacaaagctcatcccccaaagctatactctttttaaacttcttca

SEQ ID NO: 21621 - DNA, 189 bp, Zea mays
  Clone ID: MRT4577_119714C.1
cgttcttcgggcgtttacttctttattttttctaaccttaacaacattgggtttataatggccaacaaaggcgttggcccaaaggtatttaactggggtcagggccgggaaccggttgatacatggacacacttttttggccgccaggcaattaaggcacactttatgacaatttagcatattttatat

SEQ ID NO: 21622 - DNA, 541 bp, Zea mays
  Clone ID: MRT4577_119715C.1
gatcaaacttaaaactatttgttggcaaactcaaaaccacaatggtcacattacttaacaatattcctactcgttacttagcaatattgtggctggaaagtcatagctgaaattactgttggctgatttattgtgagaaaaacactactggctggcagaaaaaatacggctccgcagaggcatctatcaaccagaatggaaaaacgaagaccgtggcatggctctcttctgtctagcatcacctcgtcaccgtggcatggcgacgttccaatcgtacaccttcacatcgaaggtggcagactcttcaagtgcccgtctaagttctttagcgcagctcacattcttggcaagcagcaacgcaaagccaccgccaccggctccgaccagcttgtaaccacagcagtaagggccagcgaaagcaaacagcttgtccacgagcttgttgctgcagaaagggtctagctcctggtgcagcctccaggcctccagcaatattccgccgagctcgtccaattcaccattcatcagggcttctctcccg

SEQ ID NO: 21623 - DNA, 451 bp, Zea mays
  Clone ID: MRT4577_119716C.1
ggggagggggggttatcccccaagataaaaggggccctccgggggaaaggggcagcccagggggctttggggtagatcaaaaaggtaagccctttttttttgaacaaggtcaaaaaaaccgggtaatttttttttttggggggaaaaatacttggccatccccactcctaaacctaaaaaacaagatcccccccaccggtgggcttttttggaattttttttttaaccctttcggggggggccccaccaaagggggttgaaaaaaaaaaagaaaagggtttttaaaaccccccccccaccaagaaagggggggcggtgaaaatttgcccgccaaccccgatgggaccctttttgaaaaaaaaacaaacctggggaaagggcttggccatcccaaccttaaaaacaaaggtttaaaacccccttggggggaaattcttaaggggggggggaa

SEQ ID NO: 21624 - DNA, 301 bp, Zea mays
  unsure (1)..(301): unsure at all n locations
  Clone ID: MRT4577_119717C.1
ccgcccgcacacgcccgtcgccttcgccaaatcgttcattcgccagtcttccaatgtgcaacctggcgggctcgcagcaggccggcagggggcagccatcaaggcctcaagggctccaactccaaggctccatcgnctagctccagccgcgccaaccgncagggntcgcgntgcccccccccntgccnccccccccccccccccccccttggggaaagcgggggnnnnccccctncccctcccctcctctccccccccctccccccccccctccccccccccccccccccccccccccccc

SEQ ID NO: 21625 - DNA, 1017 bp, Zea mays
  Clone ID: MRT4577_119718C.1
acggccgggctcccttgatcggccacctccaaccttcctcgccaatactctctccctcgccgccggccacctccgcctcctcccacgcgccacctccgcctcctcccacgcgccacctccgcctcctcccacgcgccacctccgcgacaaaccactgaaggagggagaggactcgctcatatcgtccgatggaggaggactcgatcaaggggatgatctccgcgatatcctgggtgcccaggggcgccgccaagagcgtgcccgtcgttgccgacccgcccactcaggaggagatcgccgaggccatgaagaccttcgacctgggcagagactccgggagcgacgctgacgaggatgatgatgctgccaccatggaactcgacggtgcggcggaaacggtggaggaggttgatgaggctgcccgagccaaggccgtagccaaggcgctctgcaagggctctagcaaggcggacgacgtcgctgatgagctccgcgaactcaacatggacgcgtacgatgatgaagatgaagaggtcgatattttcggctctgggctgggggacttgtactatccgagcaacgcaatggacccatatctgaagaagaacaatgaggatgatgaggaggacgacgatgatgatgaggaaatcgaagataagatgatcatgcctactgattttgttattgtctgtgcacatagtgaggacgatatcttctctcttcaggtcaacattcttgaagaaacaaatgatggtgaacaaaatatctttgtgcatcatgacgttcctctcgctgattttccgctatgcacagcttggatggattttaatctgaaaggtggtgaaaaagggaattttgtagccgttggaaccatggatcctgccatagaaatatgggacttagatatggttgatgaagtgcaaccgcacatggtgctaggaggactttcaaccatggatcctgccatagaaatatgggacttagatatggttgatgaagtgcaaccgcacatggtgc

SEQ ID NO: 21626 - DNA, 270 bp, Zea mays
  Clone ID: MRT4577_119719C.1
aaactgattggcaccaggccccaaaagcggacgtatctgaaccatgcgaaacaggtccccgtgaggatcaagctgatgaggaggatgattctccaatatgtctcgttgaatacgacacagaaaatgcacattcggtcacctactgccagcatcattggcatctctggtgcatactctcatggatggacaggcgcgtgacatgcccagtctgtgaccagataactctgacagacaggatgtacgaatagcactctaggctgatgatcctgc

SEQ ID NO: 21627 - DNA, 489 bp, Zea mays
  Clone ID: MRT4577_11971C.1
gggcaattcgaggttctatttccttgggccgacgggcttttaattcctcgtttgaaaaaaaaaaagcggctgattggtaactactaccgttttaatactaaatcaaaacagaactaaaagtttggaaaaaaacgggggaaaaatttgcttggattccaagagggctaaaaaaaaaggaaggcaaatcatatcccccgggggagatccccgacgaccacgctaacattatcggcgctccgccgggccagggccagttttgccagaagcatggccgggtcggaccaccccttggcggaatcctccaccctcacccccttgggggccggggatccgtttttggttgcagggagggcccccccgttcgcccgagcggccggcgccgggggaccgtttttgtggaagcacccgcggacaacctcgcacgccattttgttggtcacgacgtcccacaggccggtgttggccaggatcaggccctcgtcggcgggg

SEQ ID NO: 21628 - DNA, 274 bp, Zea mays
  Clone ID: MRT4577_119720C.1
cgagcctctgcctgagaagccaggcgctgttcccccaccccagaagaggatggcaaaggtggctaaggacctcaacccaggagttaaaaagatgtccctgggccagctgcagtcagaaagaggtgtggcatgtttgggatgcaaggggacgtgttcgggcttcgatccacattcatggaggaaaatatgcaagtcttgcaaatgcagccaagaggaccactgcctaacatctgacctagaagacgatcggaaaattggccgcttactgatcgac

SEQ ID NO: 21629 - DNA, 515 bp, Zea mays
  Clone ID: MRT4577_119721C.1
aactctatccttaattccttatctgtattggtattcagtattctgcatttcgtactgaccccacatacaaaatattgctatgtatatacgattatatatatacagtcctagtattgcagagcaaaagcatgttcctatatgccagtctggagataataactagttaaataacacacatcttcttatcatggaaagagctggacataaccagttatgacagcaatagctagaatggcgaaaggcgggacgagcacaaacgccccaacagtcgcgaagaacaccgagtcattccgcccactgacctgggtaagcagggcctgcctcttgatgttcctcctctgtgacacggtgagtttgttgaggctcttcaggccttccttcagcttcctgcccagtgggagggtgaactcgtcgaccaccttaccattggctagtgctgacaattgctgacggatagtagcacgctgacgcgattctgtaggcacgccattctctaagccagcaatgccatcagg

SEQ ID NO: 21630 - DNA, 914 bp, Zea mays
  Clone ID: MRT4577_119722C.1
gagcgaacaacgaggccggaggggggaatcgctccccgggggccgtcggccggcgaccggcgacttccgcagtagaaccaactccacccacccatccacttggccagcagcttcttgcctgcatcaattgccatggcggcggtggaagcgaagaggagcccacactttgttctctttcccttcctggctcacggccacgtccctgccttcctccgcctggctggcctcctccgcgcgctccgcccagggctcgaggtcacgctcgtctccaccccgcggctcctgggctccctcacgctcccgcctgcctccccacccgtgcgcctccacgcgctcccgttcgtccccgccgaccacggcctgcccccaggcgctgactccctcgccgatgtccagatccaccagttcatcaccttcttcacggcctccgagtcgctccgccctgcgttcgagaagttcgtctccggcatcggttccccagtctgcatcgtcgccgacgccttcttcgggtggacggccgaagtcgcgcgcgcgcggggcgcgtcccacgcggtgttccttcccggcggcgcgttcggcaacgccgtgttcttctccgtgtgggagcacctcccgcacgcccttacggccgccgacgagttcccgctgccggatttcccagacgtcgttctccaccgcacgcagatcccgaggttcatcctctctgccacgggggcggacccctggacggccttcttccggcgcgtcatcgcctcctgccgcaagaccgacgctctccttgtcaacaccgtccgggaactggaaccctccggcctcgacatgctccggagaagcttcggcgtccagccatggccaatcgggccagtcctcgcagagccgacggccccgtcgtcagacttgcgggacgacgccag

SEQ ID NO: 21631 - DNA, 447 bp, Zea mays
  Clone ID: MRT4577_119723C.1
caccctcattccagaaccttctacatcataaaaagtgagacatttaacatcattaaatgtcattcatcatcatcatgaactgcacttaaagagaaccgtttgaaaccctctaggccaacaacatcttacaaacttaatcaatcaacatttaaacgatggttgattcaacacacagaccgacgacggcccggatctcagagtgacgaccatgcggaacttggggtagcgccgatccccggctactgagagcgccgacccttggatcctggctggagagaccattacgcccacgccggacacggtccaacaggaacgcccccaccaggacaaaaagaacctgggcaacaccaacaaaagaggttaggccacgccccttgttccagagatggcccatgccttgttgttaaaatggggggtgccctcgtcttagatttaacagcatgcgcc

SEQ ID NO: 21632 - DNA, 735 bp, Zea mays
  Clone ID: MRT4577_119724C.1
ccggccgggttgtttattttctaccagtgttagttacaaacctgaatcctaggtactgtttgaagtttatctaagtgagttttcaagctggttctaacttaatcaagtctactttgagccaagcgtagatttggctggaaggttagaaaagaatagttgatagttgggtactcgggttgctcttactcctagttgcacaggcctcagtactcctttgtttttttggtttagtttctttgatattttggtcaagagagtttatctaaatatctgagagagttatctaaatatttgatgatattttgcatcatcaaagtttttttttaaatatctgagtgcgtataaatatgttcattggaaacaaactggagagtagtgaaaatcatgattgctggcctgctggggtttaggtgctcctcatggtcatgtacattagtggcttctactgtttttataatctgactgcatattacagtcacaatcccaattgtacaagaactggacatgtccaaatatgtcttctccttaatttagaattgtttcataatatgtatctggtaactaattatattttttgcctgaaaattgttccagggtggagaacaagaagccatttgctcctccgagggaggtacatgtccaggttacacattcaatgccatctcacaagactgaaattttcaagtcacttgatgattgggctagagattatatcttgacacatctcaagccagt

SEQ ID NO: 21633 - DNA, 559 bp, Zea mays
  Clone ID: MRT4577_119725C.1
aaaaaaaaaccaaaaaaaaaaaaaaaaaaaaaaaaataataaaaaaaaaaaaaaaaaaaaaaaaaaaaaaaaaaaaaaaaaaaaaaaataaaacaatagaagatttgaaatgttgtgcccctcgcgggttcaatggaaacttcccatgtcggttttgggtatttccccctttggcctttggggattttgccccctctcaccctccgcttggtcccccccctcggggggggtgacccccgccctttccagggttttcaagggggcgatcgggggttttaaaagggacttttgttattcgagggggcggtccttaatgaacgggaggagccttaaagggttcaccgttgagcttttgatatggccaattttgaacctggagatttatagttccgggtcttcggggcctgtgggcccggactttgtttccttggtccgccgggggttccttcacaccgtgagcgttggttccttcaaggttacctcccctggcctttttatggggtcgggctcttgcgtttgcaaggactccctacccgtggtcttttggatcccccccttt

SEQ ID NO: 21634 - DNA, 391 bp, Zea mays
  Clone ID: MRT4577_119726C.1
aaggcatacaaagcgcaatacagtgactacaattgcagccaaaatatattacctacttgagcgccttaatctatgagcgagtgctacttaccgcgactatattccatcaatgctcacaaggtcatatagattcactagtttacccgtacatcatcaccaacgagtgtctgcagtatgtaataacacaaatcttcaaacctatataatctaacagacacactcagctatgatatcacatctatcacacttattcttccaacaatgacaacccctataacaccacatacatcagctgcatatatagtgacacaacatttgggaccactaattacaacaacttgtgctacaaaaccttgctgaatactctcagatacaccagcgtcttccatac

SEQ ID NO: 21635 - DNA, 103 bp, Zea mays
  Clone ID: MRT4577_119727C.1
ggtgccgatgcctcgcctatccgagctgccacctcgtggccgtctgcgcacgtggctcttcccaatctccgctagtgtagctctctcgcgccggcgcggatcc

SEQ ID NO: 21636 - DNA, 607 bp, Zea mays
  unsure (1)..(607): unsure at all n locations
  Clone ID: MRT4577_119728C.1
gctctctctcttttcccgcagccgcagcaaggccccagcggcggcacggcgcagtggcgcaccctctggagtcaccttcttcctgcccaatacggccagcggcggcaccccgaccaggttgaccccgccccggcaacgaccagcgggtcgtacagcacgccgatccaattcctccggtgagttcccctgtttctgcaccccttccggcttcggttcgcggcgtcgtgttatatcgggccgctgtgctcggaagtggtggctggctgagatgggagatcgcgggagtggttatcgaagcacaaccagctgcgctgcgattcgcttctcgttattgtttccgatcagtctacatggaaccccacggagcagggatacatcatccggccatacgcctggaattgaacttgatactaaattgccagcaacactgagcgcgattagcacaacatttggttgaactgctggaagacgctggtgtacactanatctggattgggaagaggagaagaacagcttttcaaacttaggaatatatccagntgccattttttaccagttcgcaactatcttcttcaacttaatctatttagaagaacccttaatatgt

SEQ ID NO: 21637 - DNA, 802 bp, Zea mays
  Clone ID: MRT4577_119729C.1
ccggcggcgctccaccccgaaaatgtctccgctagtcagagtcctcgcaccgcacgcaacaagtacgcaggcagcgcagcctcgagccgtcgccatggcgagcaagcacctcgtcctcgccgcatgcctcctcctcctcctgcccaccgcctcggtcgccaccgacgtcgactactgcagtaagaaggactacccggtgaaggtgagcggggtgcagatcctgcccgatccggtcgaacccggcaagcccgccactttcaagatctccgcttctactgataaaaccatcgagaaggggaagctggtcatcgacgtaaagtatttcttcttctacgtgcactcggagacccgcgacatctgcggagagacttcctgcccagcgaccggcgacttcgtgctgtcccaccagcagacgctgccaggcttcactccgccgggctcctacacgatctacatgaagattgtcggggacgacaacgaggagctgagctgcatctcgttcgggttcagcatcggctttgtcgcgtccagctgaacgcttctgagcctgggcacgagaggcagccagcccatggatgtacgtaattacgtgaagcacactctgtatcctatgactttcaagtgtctaggtccatgtaagctttttgtgggtgtctgtgttcaactgagacgtttttatccggagttgaacatcacaataaagcaaagtcactgataccatgcttgatggggcccgtgttttttagactcacaataaagccggtttgtgtttgtgcctaaaaaaaaaaaaaaaaaagcggcc

SEQ ID NO: 21638 - DNA, 331 bp, Zea mays
  unsure (1)..(331): unsure at all n locations
  Clone ID: MRT4577_11972C.1
ctttgacaccaggcgtcacggtaaatgcgacgctgatcttctcctcacccgtctccacgcggcggtcttcttccgcgccaagcgcaagcacgttctccatgaactccgccgtgtacaggctccccctgcttcgcgtaaaacatcctgacaccaccaccaccacttttgttcgactccgaacagcctgccatcagcacccgaagcgcccacacggacctcgcggccgccgcgaacgcgcgngtaaaccgcgtcttcgggtgcccgccgcgggacacgaaagccctgtggtccaagtttcggcacgcggccgcctccgnctccggcggcacgg

SEQ ID NO: 21639 - DNA, 156 bp, Zea mays
  Clone ID: MRT4577_119730C.1
cgtaacatagacttcatatatttctgtgaattcattatccatctcctttctataaatttggatctttagtttgatgtcaaccctgtaattgctctctgcatatgcttacgattcgcttcatccaaattgcactatcactataaaatgcgatatcat

SEQ ID NO: 21640 - DNA, 857 bp, Zea mays
  unsure (1)..(857): unsure at all n locations
  Clone ID: MRT4577_119731C.1
gtacnncctcgacctatgggcgattgggaacctcgaggccgccggccgggagtcagagtcctcccaccgcacgcaagtacgctgtacgcaggcagcgcagcctcgagccgtcgccatggcgagcaagcacctcgtcctcgccgcatgcctcctcctccttctcctcctgcccaccgcctcggttgccaccgacgtcgactactgcagtaagaaggactacccggtgaaggtgagcggggtgcagatcgtgcccgatccggtcgaacccggcaagcctgccactttcaagatctccgcttctactgataaaaccatcgagaaggggaagctggttatcgacgtcaagtatttcttcttctacgtgcactcggagacccgcgacatctgcggagagacttcctgcccagcgaccggcgacttcgtgctgtcccaccagcagacgctgccaggcttcactccgccgggctcctacacgatctacatgaagattatcggggacgacaacgaggagctgagctgcatctcgttcgggttcagcatcggcttcgtcgcgtccagctgaacgcttccaagcccgggcacgagaggcagccagcccatggatgtaattacgtggagcacactctgtatcctatgactttcaagtatctaggtccatgtaagctttttgtgggtgtctgtgttcaactgagacgtttttatccggagttgaacatcacaataaagcaaagtcactgataccatgtaatggaactctgagctcttgatggggcccgtgttttttagactcgcaaaaaagccaggtttgtgtttgtgctgaaaaaaaaaaaaaaaagcggcctcgagctccgctttgt

SEQ ID NO: 21641 - DNA, 817 bp, Zea mays
  Clone ID: MRT4577_119732C.1
cattgggtacctcgaggccggccgggagtcagagtcctcgcaccgcacgcaacaagtacgcaggcagcgcagcctcgagccgtcgccatggcgagcaagcacctcgtcctcgccgcatgcctcctcctccttctcctcctgcccaccgcctcggttgccaccgacgtcgactactgcagtaagaaggactacccggtgaaggtgagcggggtgcagatcgtgcccgatccggtcgaacccggcaagcccgccactttcaagatctccgcttctactgataaaaccatcgagaaggggaagctggtcatcgacgtaaagtatttcttcttctacgtgcactcggagacccgcgacatctgcggagagacttcctgcccagcgactggcgacttcgtgctgtcccaccagcagacgttgccaggcttcactccgccgggctcctacacgatctacatgaagattgtcggggacgacaacgaggagctgagctgcatctcgttcgggttcagcatcggcttcgtcgcgtccagctgaacgcgtccgagcccgggcacgagaggcagccagcccatggatgtaattacgtgaagcacactctgtatcctatgacttccaagtgtctaggtccatgtaagctttttgtgggtgtctgtgttcaactgagacgtttttatccggagttgaacatcacaataaagcaaagtcactgataccatgtaatggaactctgagcgcttgatgggggcccgtgttttttagactcacaataaagcctggttcgtgtttgtgcctaaaaaaaaaaaaaaaaaagccccta

SEQ ID NO: 21642 - DNA, 809 bp, Zea mays
  Clone ID: MRT4577_119733C.1
agcggccggtccctcgagcccggccgggagtcagagtcctcgcaccgcacgcaacaagtacgcaggcagcgcagcctcgagccgtcgccatggcgagcaagcacctcgtcctcgccgcatgcctcctcctcctgcccaccgcctcggtcgccaccgacgtcgactactgcagtaagaaggactacccggtgaaggtgagcggggtgcagatcgtgcccgatccggtcgaacccggcaagcccgccactttcaagatctccgcttctactgataaaaccatcgagaaggggaagctggttatcgacgtcaagtatttcttcttctacgtgcactcggagacccgtgacatctgcggagagacttcctgcccagcgaccggcgacttcgtgctgtcccaccagcagacgctgccaggcttcactccgccgggctcctacacgatctacatgaagattgtcggggacgacaacgaggagctgagctgcatctcgttcgggttcagcatcggcttcgtcgcgtccagctgaacgcttccaagcccgggcacgagaggcagccagcccatggatgtaattacgtggagcacactctgtatcctatgactttcaagtatctaggtccatgtaagctttttgtgggtgtctgtgttcaactgagacgtttttatccggagttgaacatcacagtaaagcaaagtcactgttaccatgtaatggaactctgagcgcttgatgggccccgtgtttttttagactcacaataaagccggtttgtgtttgtgccgaaaaaaaaaaaaaaaaaaagcgggc

SEQ ID NO: 21643 - DNA, 435 bp, Zea mays
  Clone ID: MRT4577_119734C.1
atttactctgtgcctcaccttcgagtgagtacgtggtacttgatcctgttagtggcctggtcggactagatccgagggactgacggtttattcccatttaagtgtggtctagcctctaaggcaggacctaggcacttaagttggaataattcggacggttccgccacagctggtatcggagctcgtaccaccacagaggaatcaataaactataaataccatcctttttcaaagtaaaacttgatagaaacaaatgttggatagatcttaagacgatcaggatatacctaggacgtgaagtcgtatgataatagaagggtagctaggtggctatttgagtaagccctacaagctactataagggatgggagttctttcctaatccctctaaattgaaataagtcgtttaggacgaacatgcatgcattcttactt

SEQ ID NO: 21644 - DNA, 546 bp, Zea mays
  Clone ID: MRT4577_119735C.1
ttttggacctttataatcactgttatcatgtaacttcctatctttgctgtaatcatccctttattgtctttgacatatgcgcaaggaaattggaactgcaaaaactccgatgatcctacttatagagataatccaatgatctataacagtgctccctatggcctttgcgtaaatgatgctggcttaggtttattagcccaccgatgcacttctagcaatccctgtaaaactaacaacaacggctgcattccaatcaatagttacgaagctcactgttcttaagcctacctacaatggactggaacacttggcatacttcgatgggatcttagtgctgtttagaatatagatgaaatggaagtaatacaagacttctagtgttgatcttattgttggttggttttcgcagatagagtgacagggtgcagacgaggacagtaacgtgcaagtagaataactctctgtattatacttgtactcacaaaactgaagttgaacacatcgagccataagggctcaatgcctatactatatactaagggagtg

SEQ ID NO: 21645 - DNA, 1359 bp, Zea mays
  Clone ID: MRT4577_119736C.1
cgcgccggccgccaccgaacccgagcaccgctgggggttctcctccccgcccgcacccaccgccacaccgccgccacaggccccaccccccgccgcccacgcccgggcgagcacgcccctcgtcgccgccgcaggcctcctcctcccccccccccccgccccccgccccggtcgccccccccgctaactccggacctacgacggcttccccggcgaggtggacggggtgccggacctcgccggacccggccgaacccgcgaagccctgacactttcaagatctccgcttctactgataatcgaccatcgcgaaggaggggatggtcatcaaggttccgtatttctacctcgacccggccgggagtcagagtcctcgcaccgcacgcaagtacgctgtacgcaggcagcgcagcctcgagccgtcgccatggcgagcaagcacctcgtcctcgccgcatgcctcctcctcctcctcctcctgcccatcgcctcggtcgccaccgacgtcgactactgcagtaagaaggactacccggtgaaggtgagcggggtgcagatcgtgcccgatccggtcgaacccggcaagcccgccactttcaagatctccgcttctactgataaaaccatcgagaaggggaagctggtcatcgacgtaaagtatttcttcttctacgtgcactcggagacccgcgacatctgcggagagacttcctgcccagcgaccggcgacttcgtgctgtcccaccagcagacgctgccaggcttcactccgccgggctcctacacgatctacatgaagattgtcggggacgacaacgaggagctgagctgcatctcgttcgggttcagcatcggcttcgtcgcgtccagctgaacgcgtccgagcccgggcacgagaggcagccagcccatggatgtaattacgtgaagcacactctgtatcctatgacttccaagtgtctaggtccatgtaagctttttgtgggtgtctgtgttcaactgagacgtttttatccggagttgaacatcacagtaaagcaaagtcactgttaccatgtaatggaactctgagcgcttgatgggccccgtgtttttttagactcacaataaagccggtttgtgtttgtgcctaaaaaaaaaaaaaaaaaagcggccagtaagctttttgtgggtgtctgtgttcaactgagacgtttttatccggagttgaacatcccaataaagcaaagtcactgatcccatgtaatggaactctgagcgcttgatgggacccgtgttttttagactcccaataaagccggtttgtgtttgtgcctaaaaaaaaaaaaaaaaaaaaaaaaaaaaaaaaccccaccaccc

SEQ ID NO: 21646 - DNA, 502 bp, Zea mays
  Clone ID: MRT4577_119737C.1
gggccttgttctcgggtgctttacatcaagaacaaagcaacacaatttttaatgattagagaccatcgtccttcataacattatctcccttcgggtataagggtcttcataccaaggttatgaaggacataccttcatcatttcagtaaataaatttaaatgaagacccctgaaacacaaaagaatgtaaataatgatgatatatcgataaattatttacattctcatttcataaacatgaataaatattcataatattcatattttattgataccttcggcttgtcaaaaggcgtgaatgtgaaagtgacccgagagctattacagtgcaacgtgaacagtacggggtactgttcatttatttatagacacgggacgtagcccggacgaaattatatccatgtccctgataactaattataatcataatgcgaactatcaaggactatataggcttttcctctttaagggagtatcggccttcgcctttatcataatacca

SEQ ID NO: 21647 - DNA, 1858 bp, Zea mays
  Clone ID: MRT4577_119738C.1
attgggacctcgaggcggcgggatgggagtagacctcgtcctcgccgcatgcctcctcctcctcctgcccaccgcctcggtcgccaccgacgtcgactactgcagtgagcatcgccgcctccacgccgcccgctccgtcgtcgggggagggcggagctgcagatttcgtagacctgtaactgcagatttcgctttttgatgtggcctgcaggtaagaaggactacccggtgaaggtgagcggggtgcagatcctgcccgatccggtcgaacccggcaagcccgccactttcaagatctccgcttctactgataaaaccatcgagaaggggaagctggtcatcgacgtaaagtatttcttcttctatgtgcactcggagacccgcgacatctgcggagagacttcctgcccagcgaccggcgacttcgtgctgtcccaccagcagacgctgccaggcttcactccgccgggctcctacacgatctacatgaagattgtcggggacgacaacgaggagctgagctgcatctcgttcgggttcagcatcggcttcgtcgcgtccagctgaacacgtccgagcccgggcacgagaggcatccagctcatggatgtaattacgtgaagcacactctgtatcctatgactttttgtgggtgtcttccttcaggcgattgtttatctcgaggccggccgggtaaagtatttcttcttctacgtgcactcggagacccgcgacatctgcggagagacttcctgcccagcgaccggcgacttcgtgctgtcccaccagcagacgctgccaggcttcactccgccgggctcctacacgatctacatgaagattgtcggggacgacaacgaggagctgagctgcatctcgttcgggttcagcatcggcttcgtcgcgtccagctgaacgcgtccgagcccgggcaagagcgggtccggtagtcagagtcctcccaccgcacgcaacaagtacgcaggcagcgcagcctcgagccgtcgccatggcgagcaagcacctcgtcctcgccgcatgcctcctcctcctcctgcccaccgcctcggtcgccaccgacgtcgactactgcagtaagaaggactacccggtgaaggtgagcggggtgcagatcctgcccgatccggtcgaacccggcaagcccgccactttcaagatctccgcttctactgataaaaccatcgagaaggggaagctggttatcgacgtcaagtatttcttcttctacgtgcactcggagacccgcgacatctgcggagagacttcctgcccagcgaccggcgacttcgtgctgtcccaccagcagacgctgccaggcttcactccgccgggctcctacacgatctacatgaagattgtcggggacgacaacgaggagctgagctgcatctcgttcgggttcagcatcggcttcgtcgcgtccagctgaacgcgtccgagcctgggcacgagaggcagccagcccatggatgtaaattacgtggagcacactctgtatcctatgactttcaagtatctaggtccatgtaagctttttgtgggtgtctgtgttcaactgagacgtttttatccggagttgaacatcacaataaagcaaagtcactgataccatgtaaaaaaaaaaaaaaaaaaaaaaaaaaaaaaaaaaaaaaaaaaaaaaaaaaaaaaaaaaaaaataaaaaaaaaaaaaaaaaaaaaaaaaaaaaaaaaaaaaaaaataaaattaaatatttaaatataaaaaaaaaaaaaaaaaaagggggggcccttttaaaagaaccaagttttcctccccggggattccaatttaaacatttttattaggggcccccaaatt

SEQ ID NO: 21648 - DNA, 245 bp, Zea mays
  Clone ID: MRT4577_119739C.1
gcgggccgccttttttttttttttttttttttagcctagtagccatttcccatgggcaaccgagaacggtttaccctgggcccacctgttacttcctgattcaatcctcaattaattccaaaaaccggagccttcctcctaaagagaaaccccaaatttacccacctatggcaattgccgaacccaacccccccaacttagggaactacgaaagacccacaaatagcacccattttacccatgcc

SEQ ID NO: 21649 - DNA, 462 bp, Zea mays
  Clone ID: MRT4577_11973C.1
atggctgtagctggctcctgcgcgtaattctaaagcgatcgcggacctcaggccatgttttttttatcctttttctctccactctagaggggcattagcgaggagatctaactcgcgtactccgagtccgcgttcacaggattccctggatcctcaaaacaggcaaagactcctctattaccgaatccttcaaccccaagtgccacgccgcctgcctctagaacatctcttgctgggttctctctgactttacggcggcgccacggggaacctcaagaacacccggatatggccgcaccacatccagctttatgtgttctccgaccactagctgacaaaactgttgaggacatccaccatcccgagcggtgctgttatgcctaccatccatcagcctctgctctccagtaatgctgactcctccaacgccagtgacaacaaccacaacaactgcgactgctt

SEQ ID NO: 21650 - DNA, 201 bp, Zea mays
  Clone ID: MRT4577_119740C.1
cccaccctaaacctcaaaattcgtttaaaccttttttttatacccaaaaaaaaaactttacgggggggtttaccattttctgagaaaaggtaccctaaaacacactctccacatttcagtttcctatggaaacccaaaattttctgtacccaccgtttcttccaccccagacccttttttaacaacaccttctatttttct

SEQ ID NO: 21651 - DNA, 186 bp, Zea mays
  Clone ID: MRT4577_119741C.1
gattcccgctctacccacttcttcctgagacccctccactaggctaggtatttaagcctcggtccctcttcatcatccatgacttctttcctgactcctgcctgcacttccttctatcgctcgtcctcattccttaccccctgttcctcgaatctccttagtacagctctaacgtcttctgccttt

SEQ ID NO: 21652 - DNA, 688 bp, Zea mays
  Clone ID: MRT4577_119742C.1
tttaattcggcacgaggaatatggggggggggggtaggatttctgaagtgtgctatcttgacaaaacctcagtcatatggtgtgttgctgcagttaccagctcctcaacttgagaatgccttgagtaagaacccgacactgaagacgcccttggctgagcatgccgagcagccaaatattcggtcgacacttccaaggtctactttggtggttctgggtcttgctgaagatcaaccacagcaaccagcagtaacacaggtgcagagcagccaaaaccaggctgcggaaaccagtagctctgctgctgatacggctacagaagtaactcaggaatcttctggtgctagctaacatcttttatgccgaaatgggctaatgcttgcaggttgtaagccatctatcattttcatctctggagtgatgttggtgattgatgaaatgggctaacgcttgcaggttgtgtaccatatgtctcttgagggtctaagatgtgtttttctgtgtgatgcgtctcattggacgggtgttagctgctgcatctggacgcctaaatgagaactaagttatttagttgctgggggtaattctaattttcggtggtgcacagggaccattgtaaagtaaagaggttaacattatatatcatccttaaataggaaaagggcaaacaagtgtttgttgaagctgt

SEQ ID NO: 21653 - DNA, 353 bp, Zea mays
  Clone ID: MRT4577_119743C.1
agcaaccagcagtaacacaggtgcagagcagccaaaaccaggctgcggaaaccagtagctctgctgctgatacggctacagaagtaactcaggaatcttctggagctagctaacatcttttatgccgaaatgggctaatgcttgcaggttgtgtaccatatgtctcttgagggtctaagatgtgtttttctgtgtgatgcgtctcattggacgggtgttagctgctgcatctggacgcctaaatgagaactaagttatttagttgctgggggtaattctaattttcggtggtgcacagggaccattgtaaagtaaagaggttaacattatatatgatccttaaataggaaaag

SEQ ID NO: 21654 - DNA, 3614 bp, Zea mays
  Clone ID: MRT4577_119744C.1
aatcaagattgggagggcattaatataacaaagtttggggggtcgagacccattacaatatagacattacaatagcacgctaacaagaaaacacacctaaatggatgtaggtattacgctattcagcagcctaatctagtataattcaatgcctgggttcatcaaattggcctatattgaacccactttcatcgactcattgacctttctttaaaaacttcaccggcttcattatctgaagtatctactctgccatccagccaatcctgtatttgattctgattataaacaagcattctgtaatcagattcaacagagaatataccacattttttacgatgtcgggcaaaaaaaaaatatcttgccgacatatataaaggaatatatcttagcatccatattatataagtacttttgaatcacgtcaagtcgccatttcatagatataccatcttctattaattcactaacacatctgggggggttggccataaagctccatcccttggggttgctgaagaacgtcaagtccatcaagtatagctctccacatttgtggcggtctaattcatagggctacatcaagaaaacgtagtcccctaaatttagaatctcttcccttccttactgctccactaaaattttcgaatcattgcattggttgcttgacatagccagcccccttggtagcctgaaacaactcatggaataagtagggactgtttgagctacagcttcaacaaacacttgtttgcccttttcctatttaaggatgatatataatgttaacctctttactttacaatggtccctgtgcaccaccgaaaattagaattacccccagcaactaaataacttagttctcatttaggcgtccagatgcagcagctaacacccgtccaatgagacgcatcacacagaaaaacacatcttagaccctcaagagacatatggtacacaacctgcaagcgttagcccatttcatcaatcaccaacatcactccagagatgaaaatgataggaaaccctaatcctaatcaagattgggagtgcattaatataacaaagtttggtgggtcgagacccattacaatatagacattacaatagcacgctaacaagaaaacacacctaaatggatgtaggtattacgctattcagcagcctaatctagtataattcaatgcctgtgttcatcaaattggcctatattgaacccactttcatcgactcattgacctttctttaagaacttcaccggcttcattatctgaagtatctactctgccatccagccaatcctgtatttgattctgcaagcattagcccatttcggcataaaagatgttagctagcaccagaagattcctgagttacttctgtagccgtatcagcagcagagctactggtttccgcagcctggttttggctgctctgcacctgtgttactgctggttgctgtggttgatcttcagcaagacccagaaccaccaaagtagaccttggaagtgtcgaccgaatatttggctgctcggcatgctcagccaagggcgtcttcagtgtcgggttcttactcaaggcattctcaagttgaggagctggtaactgcagcaacacaccatatgactgaggttttgtcaagatagcacacttcagaaatcctacccataacttgggatatttccaaatctgcttgctcacaaggcgtgacatgatctccatcacaaaatccaccaatgcaggaaaaacacctattgcttgcatgacagtcctcatgaatagcaaaggaagaggaatctgttcaaccagttgatttagtgcttttgccagaacttgctgggtaaatattgttctttgctcaaagcaagaagagcatgcatccataacctttttgagtggtattccttccttatcaggagctattacatgaattgcaattaaaatttctgatggatcaagtgaagggccattccgaggtgatccctgcaagattcgggaaatggcactttgaaacttgtctattggaagattaacaatactggggaacacaggcaggacctcatcttttggtagatgaaccaagattgcaaaaaggaactcaacatcctttgttttagaatataagatctttatggaagaaatcagatctttagatggaaccgcagcatcagtgagggtttgtaaaacctgcatgaggaggtcccggcagtcagctggtggatctgagatgattccaagaagatcagaggaggagcctatagtgcgtatcagaattggtacttgttgatgaactgcctgcttggcagcttgcggtagattaccatatattgcaaatacatgtctgagaagggaatgtttcttggtgcacaatgcaaagtatagagacatcagagtctgcatgcctgttactgaagctgttaagttttctaaaccaatatctttgtgtgcttcaggtgtagccatttcagtagttacacaatcaccagatggagtcatttccagcactgaattaagtttttcatttgcaaaatcttcaatctttttggaaatgcttgtcataggaaataacttatttgccaccaaacgtattgccttcatgcggacctcctctagatgatgagttgaactctgcaaagcaatctccagacatctgtcccgatttgaaggtcttagcatgataaggttccagacagcactgagaccttgagttaccctatcaccactctgaatatccttgtcctgcctctcattacttccaggagaacataaactttcaagcagtttcagcacaccttctggtaagtatggtatctcacaaagcaatttgccaagtgacttatctgaagctggaaacatgtctcgaagattttcagctatgtttagaagaaaggattcgtaaactgatgtagcagttctagatgaaaggaaatcgtgatcctgctctgcctcatgatatagccggttcaggatgcatatagtcaactcgtgcccctcattattcgcataatcagagagaatgtgcttttgaagaatcacccaaggatcaaattccagaggaaactcaacacccaggtgagcaagcaacggaaggcgagcaattgaaccaccagatgcttctttcttatcactctcaagaatccgcacaaacgcctctttttgaaggagatctttggcctcatcactgagatcaatattattgacaaccaactttggaagaacatattgtgaactaagggatgaaagctgtgagtggtttgcttccaatgtagaagagcttgggctgcgagtttctgacgattgtgccaaactaaatccaactgagaaattatcagcaggaaatggaccggcaaaagtgctagcatgctcttgggttccctggggctctgttgaggcatgggaagcttctgatgattctggaatatcaatcgaactattgccacctgcactggttactttggcctctgttgtttctatacataatggaactgttggactgttactgttctcttcgataggtagatttactgagctaggaacaggtgaattagcaggaagtatcattctgtcatctgcaactgacgacaccagcgcaggttctttagctggagactgct

SEQ ID NO: 21655 - DNA, 615 bp, Zea mays
  Clone ID: MRT4577_119745C.1
agctcggtaccacgcatgctgcagacgcgttacgtatcggatccagaattcgtgattctttttttttttgataaattttttttattatctccacataaaaaggcaatcacaacatcgtgtgattgccttttatttaaaaacgaaagtccgcttccgcttttctttatgtccagctctgcctcctagccccttctgtctaagaaccttccccacgagaagataaaatgcatcttctgtgggaaagaaccttagccttcgggactaaacagtcggctccgcttttctttattgtccagttccagcggctagaatactcggtggcttcgcgccttcctccgaggcaaagtacacctctctgtcaggagctccatccccctcctattctaaacgagccgcttccgcttttcttcattacattttttctggtgcagatactcctacgattgctaatgcattttgaagtgtagtgcgtactgctttcattaactcataacgagctttacttaattctaagttatcttgggttaatactttttctgcattgtagaagctgtgtaatgttgctgctaattcaaatgcatagtttgtatacgggttgtagacgtttttgtgctg

SEQ ID NO: 21656 - DNA, 381 bp, Zea mays
  unsure (1)..(381): unsure at all n locations
  Clone ID: MRT4577_119746C.1
tgtgatcttatcttactttaacacagtgtttgtgtcaactagatatgcgagctgatccatnaatacataatactctcagagacaatagtaacactgtgatacatagtatccaagcaaatgtaaaatgccacatcttatctaacaaaatacatgcaaacttcacaatttaattataattaacattacactttcatacatgattgctaaatattctatataccttatgaagattaccttcaaaacttgccactctcaacatatgatacgatctataccactttgttaaagtgatctaactatctaaccttctttagtatttgaacaccaatatgtataaataaaatatgctattattatttacataaaatctgatctgttttt

SEQ ID NO: 21657 - DNA, 1621 bp, Zea mays
  unsure (1)..(1621): unsure at all n locations
  Clone ID: MRT4577_119747C.1
gaggctcggccgggaattcgagttcantcgaatcgcacactcaccccacgcaggtagggttttccttcctttcggcctcgccgcgtcgatctccgtcaatccacccgcccgccccctacccaaaccctagggcttccaaggtccaagcttgccgttgatggggcgcaagaagaacgtcgccatcgacgacgacgagtacttctttccgcaggacgacgcggccgacccagccccgcccccgcccgcccccgccgccgccgacaaagagaagtccaagaagggcggcaagaagggaaagaaggggggcaaggctgccgcgcccgacgacgacgactacgagccccctcccccgccgccgccggccgccgacgaggacgatgacggcgagcccatcaacctcgtcttcaccggcaagaaaaagaagaagaagggcgccactcccgccgctcccttcagcgccttcagcgccctcggcgaggagggcgaggaccaggatgaggaggaccccgccccgtctgccgcagccgagccggaggccatcaacgatccggcggaggacgacgatgacgtcgtcgatttcgatttcagcaaggccaagaagaaaaagaagaaggacaagggacctcgctcggcacctgccaaagacgaggatgtcgagcctgctccgccacccccacctgtggctgaggaggaggatgaggagcccccagtgattgccgcagcagctgcgaagaagccgcagaagaagaagaaaaagaagggtgcgtttatgatggatggtgagaacgtcgaccagatccttgcggggatggaggatcctcagctcatggatgagcctgaaccagaggaggtgaaagctcaggattctgtggctgcccctgatgcggatgatgccacgggaaagaaatcaaagaagaagaaaaagaagggagggtttacgatggatgtggatggtgaggagtttgaccagatccttgcagttatagatgaccttccgcctcctgaggaggagcctgagcccaaggaccccaaggatgagggtactgcagctactgctgcccttgtggatgatgctgaagggaagaaatcgaagaagaaaaagaagaaaagtggaaggacagcgaaggaagaagaggagttggacaagattcttgctgagcttgatggagtccctccagtggaggaggacaaacccactcaggcaccacaatctgctgctttggccaaggaggacgttggtgctgcagaggatggtaatgtggaggacaaagctgaggaaggaggagaggtggaatctgctgctgccaagaagaagaagaagaagaaggaaaaggagaaggagaaaaaggctgcagcaaagggagcggagtctaagaaaggggaggagcaagaggcacctaaaggcaaggttgacatgaagaagctccctaaacatgttcgtgagatgcaggaagcacttgccagaaggaaggaagctgaggagcgacaaaagagagaggaggaagagcgattgcgaatggagcagtggctgaggccggagaggaagaaacacggaaaatgttggtaaggacatttagctatgaccgcttcatatcccaatcacgatgcagttcgtgggatt

SEQ ID NO: 21658 - DNA, 329 bp, Zea mays
  Clone ID: MRT4577_119748C.1
acattcccttcgcttcccttccctgagcaaacagaagtaaccacaatcatttcaggcatcatcgacacaagttactatacactccacatcgtgggcgaccaccaggatgagcaccagcacagaatgggccaggagcaccacactaagggccaggaccaccacaataaggaccacggggagcacaaggagggcatcatggataagataaagacaacatgacctgcgagctaccgaacttctccggcaaccacaaggacaaaaaccatacggagaagacagttcagaacacgtagacatagacgatgcacggcgaaggccaagaccatggt

SEQ ID NO: 21659 - DNA, 245 bp, Zea mays
  Clone ID: MRT4577_119749C.1
gttctagggttgaaaactagaagccaaggggggataaaagggatggcgacggctagcgacagaccatgtcccggacttaagtcactcggccgggcccgcgccgggcattagcgtcgcccctgcctgcgttatgctgcgcgccgcggtttgatggccagtactgctggctgggcgtgttggtcggccagtcgcagccctccacaactttcttcccggtagcattttgcgttaagtctggggtgccc

SEQ ID NO: 21660 - DNA, 299 bp, Zea mays
  Clone ID: MRT4577_11974C.1
cttggtttttttattttattatcttttttagtaggcttttttttttttttggaacaccaccatgatgttttgaaaagattggtgatggcaaagccgagcatgtagtttttacttattcaagggggtaaaatactttgaaagaaagggatgcctatgtttgggaagtttgaaaacatgggttttgggatgtcaaaccaaaccaaagatgtctgggaaggatggctacctgggttgtggggtttcaaaccaaaaaattaaatttgtttcgtggttaattttgttttaaaccctttttggtt

SEQ ID NO: 21661 - DNA, 166 bp, Zea mays
  Clone ID: MRT4577_119750C.1
accttatatcaagcccaaggtaaaaatgtaattcaatattatacttatttatcaaggattgtatactacttattaaagctctaaaggtagtctgccttttatggttctgtcatccgagaattttgaccgtttcgtttaatccaaagcgatccgaccgtgcttccga

SEQ ID NO: 21662 - DNA, 446 bp, Zea mays
  Clone ID: MRT4577_119751C.1
aaaaaacattgggacccaagattggtgggtttcacaacggtacaacatatatataatatatgcatggacagggacaatgcctttccaggagcaccagcaaaaagggggggtagcagcagggactttaaacaacagagtaccatccggggggatagatttttattactggaaaattgatccccggaacactaccggtagttgcgggaaacgggagggtacatgcagttctttggatatttaaccaggtcgctggggggagggaaacgggtcgccaaaccgagctcggaggcttttgcaaccacgggtgcaacgatgggcccaaaaatctttttgatgctggggaagggggggaaaaaggagcccttttcgaagttggcctggggggcctgatcagctagggctttcgagggggggaaaaacatgtcctcggggacacgggcgggtcc

SEQ ID NO: 21663 - DNA, 287 bp, Zea mays
  Clone ID: MRT4577_119752C.1
gggcacaaaacaccgggctttattggtttttttgttttggggtatgtacagacccttttctacaggtcccggcaagccctatgttgggggccctctaattcacatatcctacaattttaccccccctccagctgggctttatagcttaatttcctggggtcatgggctgttccattttgccaggaggggtgcttgccctttttcctcataagacttgactgaaacgggacctttggggcccttggccttcatccctgggttaagcttctcctgcagggactagccgg

SEQ ID NO: 21664 - DNA, 353 bp, Zea mays
  Clone ID: MRT4577_119753C.1
atcttgtggtttttttttttttttttgggggaagcactcggcgcggatcatttaccggttgcaagggaaaaaaggtggtgttggtctttaggacagggccctcctaattaacccactttattgtaagaacctaccttcgttttcacgggaaccccggttttgttaactgggcaaaatttcagggccagttaagaagtaagaacctaccctccccttgtggcccggacccatgcaccacaccagccgcttgggcttctgcacggggttctcctggccggcctccagcggcttccttttggtggccacccaagttattggcattgtcgatcttaaagttccccaggaggggcaat

SEQ ID NO: 21665 - DNA, 315 bp, Zea mays
  Clone ID: MRT4577_119754C.1
agcagtggtaacaacgcagagtacgcggggattactcaaaaatatcttgaagagcattgtgcgcatattttcctagtttgtaagagtatatttgttatggaggaaaagcaggaagcaaacagattgagagcccatagccaggagaggttttctataaatcttaggaaccttcgtgtttcatgcgcgcaaccaacgggacgggatgccgacggcatcgatagttccaagttccatgacatgttcgatgaaccgtaccagttcaaaaaaaaaaaaaaaaaaaaaaaaaaaaaagtactctgcgttgttaccactgct

SEQ ID NO: 21666 - DNA, 496 bp, Zea mays
  Clone ID: MRT4577_119755C.1
atcaatccgagctcggatggatctgcgttgcacgcgggtacagcaccgccagcgaggatgacgacgacggcagcgagatggtttctgggcgatggcgcgaggccgcggcggtgcttcgggcgaggaacgcggtggcggggagcaggacgcggcggcacggcaaccggtggcgttatttgggcatggctccatggatctagcaaccagcgagccggacagccctcacctccctgtggcactgcgccctgcttcctgcctccctccacggtccgtcgcgagcccatgctgttcgcccctcgccggcggctcggctcctccacagcggtcgacatcgtcaccaactattttattgtcccattgcttcggtgatttgtttaaattcaagtgctgatgtttatgaagctattagaggcgaggaaggagcaaatcatctttaattagtcggtcacctttgtcatgcagggcaccaggacacgaacaacgacgacgtataaac

SEQ ID NO: 21667 - DNA, 789 bp, Zea mays
  Clone ID: MRT4577_119756C.1
cctcgagccggccacttgcgtctgcgcgtatggcggctcacctagcgtggcggctggcgttctcatgccgctgcttgctcgaaggcaagtcgtcggtgcccactaaaaggtgttcggatttggcttatcaagtactactgatccaattgccgaacaaggaaaaaacaagtcgtgcaagcaaaagacaatacgttccttaccattaaagaaagaaatcaatccgagctcggatggatctgcgttgcacgcgggtacagcaccgccagcgaggatgacgacgacggcagcgagatggtttctgggcgatggcgcgaggccgcggcggtgcttcgggcgaggaacgcggtggcggggagcaggacgcggcggcacggcaaccggtggcgttatttgggcatggctccatggatctagcaaccagcgagccggacagccctcacctccctgtggcactgcgccctgcttcctgcctccctccacggtccgtcgcgagcccatgctgttcgcccctcgccggcggctcggctcctccacagcggtcgacatcgtcaccaactattttattgtcccattgcttcggtgatttgtttaaattcaagtgctgatgtttatgaagctattagaggcgaggaaggagcaaatcatctttaattagaggatcacgatggaaatgcagaatcacgtcaagcactaattcgtcagtctccagtcggtcacctttgtcatgcagggcaccaggacacgaacaacgacgacgtataaacgggaggccaaggggactgtgcgacg

SEQ ID NO: 21668 - DNA, 308 bp, Zea mays
  Clone ID: MRT4577_119757C.1
agacaactggtttcattgaatcttgtagagatcgagcttgttttgcaccacaaggacatggatgtcttgctgctgcggatcaagttcccgcctgagctcaagctgcaatgcgcggaggaagtaccctgcactcgtatagaagagcacggcgcgccaggccaccacaagtactagccttgaccccgtacaagaagggcagtcccgagttcttcaaggccagatgagaatccggatagagcggccacaggtgcagctgcggtggcaactgtatgtgcgacccctgcaactgctgatcacatctatcgacg

SEQ ID NO: 21669 - DNA, 362 bp, Zea mays
  Clone ID: MRT4577_119758C.1
aatttacgactaaactcccccaagaaacgtggataatcgaacggcgaaattatataatcatacagacagaacaattcatacaaatagaatatcagaccacttatgtaccctacagtataccagactacgcctatataactttcatcatcttctcttacgacactcgtgacgatgtcgtatttgtcgtcttcgttgtatttgtcgtaaatgtactattcattgttgtcgacgttggtgtaactcttcttacagttgtatcacttgtccacaatgtctttgttgttagatttgtattcatcgattacgctatcaacctctctggcctcgatagcaccgtcaatggcgccgtaagctcccacaac

SEQ ID NO: 21670 - DNA, 321 bp, Zea mays
  unsure (1)..(321): unsure at all n locations
  Clone ID: MRT4577_119759C.1
ctttttgtggaaaaggaacgaggtctttttttttttttttaaaaaataattaatttttttttttttattttaaattattttttttttattttttttttttatgtttagttctttggttgttacctcttttggggcaatttttgggggggggggggaaggtgccggtcgttcggggctgcttttggggggcccttttgggcctttagtgggccggtttgccgttcggtggccggcttttttcagcgggcttgttgggcttaccgtgcgtgcccctttcttcagctgggggggtnctcccccgtcctctcggggggggctttc

SEQ ID NO: 21671 - DNA, 302 bp, Zea mays
  Clone ID: MRT4577_11975C.1
aaataatctgtaatatctagatgtagtcttattagtgaaatgttagtacctgaactgcttttgtacaacaaaattaagaagggagatttaggacttacacacacataattggtataacagccatgcttcgggagacttacccaataacccaacccatggtgggggtggactgttttttttagataggcccgtacagtctcacattgttgctgccaaatttgaatataacctctgttttgttggtttacctggagctgtttgtgcatggagagtatattagaccatgtccactgttaccttaa

SEQ ID NO: 21672 - DNA, 371 bp, Zea mays
  Clone ID: MRT4577_119760C.1
agcctccccagcatgcatggatgtgacgacgtctcctcctcgctgtctctctgcagctgcaactgcaagcatggcaattacttcagacaagatctgcgccatggcggcaacgacgacggggatgcagatgatgcacgcggcggcgttgccgctgtgcctggctgtgttggcagcatctacgcgggtcgcgctgggcaactgccgcgacgactgcatggctgcatgcaacggctggaccaacgtctgccagctcacctgtgccagcgcatgctacagagaactcgggatcagaaccttacgtacctcggctgtattagctaaagcagaatgccctgcatcagcaccacatgcaacacaagagcgaagcgccg

SEQ ID NO: 21673 - DNA, 531 bp, Zea mays
  unsure (1)..(531): unsure at all n locations
  Clone ID: MRT4577_119761C.1
gcgactcatacacggtcctacccagtctccatcgacaatcgaggatctcgacgtctcacaaggactgatgctgcagtcggtctgaacactggggagctggtagtcttatgcaaggcagaatgaccacaggtagaacacatgagaagtattaatgctcaacaagcatgctgtccgtacactatgtcggctacatctgtcgagatttatggaaantgaacgcctgatggattgaggcttgacagaatgatggtagctaaccatctgatcgtgagactcacagaaggaataggataaatgtgtatggtctagaagaccatccactcagacaagaccatanttccgttcctgtaatatgggttagattgatccccgataagactagaagccatggcgaatttagtatggagttaacataagaacagctacgttgatacttagataccattgcgcttcaggagtattgactcacagggttaagtgcaatggtaagtagcatgagaaaacctaactgagggattacaaaatgacatt

SEQ ID NO: 21674 - DNA, 211 bp, Zea mays
  Clone ID: MRT4577_119762C.1
aaaaccaaatttttttaaaaccaaagcttaattaagaccacgcacaaaaaatgggaaagaccacacatgaaaaggggggtcgccttactggattaagacagatggagagaggaaaagacggaaagaggagatttcccaaatagggggaaacggcaggggggaggaaagggaccggacacgccagacacctggggggaaggccagtaagggg

SEQ ID NO: 21675 - DNA, 429 bp, Zea mays
  Clone ID: MRT4577_119763C.1
tttctttttttctttttttcttttttttctttttgtttctaggtttatggtgtctttctcttcgattgcccatcagaaagccgccgtcacgcccgtcgagctcgtacggccagcccgtcgctgccagggcgcaagcgccccgcgccggctacagttacggggacttccacccctatgatcactacgacaacctcagcagcaggaacgtgccctcccgaccgccgagctcgcacggtcacgcgccggcctgctggttacgattaaaacccctaccagcactacaagaagatgagcgccatgtacatgccgccctcccggacgacaatctcgcacgcgaacacccacgcgccagcgactgagccctaacaaaggacgtaccatcaccagcatccggaccccgggcacgggcaccaccgccggaccgggagc

SEQ ID NO: 21676 - DNA, 404 bp, Zea mays
  Clone ID: MRT4577_119764C.1
gggaagcaccaatataatatttttttttggggggaccccgatgggaagagagactcccatatatatatatagcccattgggcatggggcttataaaacagtttatatgcctagctagcaggcacaaataaccatgcattattattaacggcccccccacacgggctataggggatattaaggctaaactcgatccaaggctgggggggaacttaaccttgccgggaacggtcctttaccttgcgggaacgtacaaaaaaacaagcttgacactttaatgatcgataaatggggggatcgaccaaccaatattatcgggggccgaatgccagcaggggggtgccacacaggcacttgttgggcaggaacctgtgggcggtaaacttgaccatgctccctccgggg

SEQ ID NO: 21677 - DNA, 1535 bp, Zea mays
  Clone ID: MRT4577_119765C.1
cattgggtacctcgaggccggccattccatccggcaatggcctccgccgccggtgctgcgttcgccgccatcaccctcctcatcctcgtacccctcaccgccgcttcggactccgaccacaagtaccaagcagcggagcctgtgacgctctgggtgaacaaggttggtccgtacaacaatccgcaggagacatacaactactacagcctcccattttgccatgcgtcagaaaaccatgtgcataagtggggaggactcggcgaggtccttggtgggaatgagctcattgacagccagatcgacataaagtttggaaagaatgttgataaggccacaatttgttcgctagacctcgatcttgtcaaggctaagcaattgtcggatgcgattgagaactcatattggtttgaatttttcattgatgatttgcctttgtggggttttgttggagaggcagacagaaacaatgataacaaatatttcctattcacgcacaagaatattgtcatcagatacaatggcaatcagattatccatgttaatcttactcaagaaagcccaaagcttattgatgtgaacaaggcattggatatgacatattctgtcaaatgggaaccaacaaacataacatttgctcaccgttttgatgtgtatctggactatcctttctttgaacaccagattcattggttctcaattttcaattctttcatgatggttatctttctcactggactagtgtcaatgatactgatgcggactctaagaaatgattatgcaaagtatgcccgtgatgatgatgatattgaaactctggaacgagatgtcaatgaagaatctggatggaagcttgtacatggtgatgttttccggcctccttgcaatctagttcttctttcagctcttgttggtattggtacacagttggcagcactgattctactagtgattttgttggcaatcattggaatgctgtacattgggcgaggagctattgtcacaacattcattgtttgctatgctcttacttcattcatctctggatatgtcagtggtgcattatactcacgacatggagggaaaaactggatcaaggcaatggccatgacagcatcacttttcccatttatgtgctttggaatcggcttggtgcttaacactattgctattttctatggatcgttagctgccataccatttggtacgatggtggttgttttcatcctgtgggccttcatctctttccctcttgcacttttgggaactgttgtcggtagaaattggagtggtgctccaaacaatccctgtagggtgaagactattcctcgccctattcctgagaagaaatggtacctcacaccatctgtcattgcgcttatgggaggactgcttccttttggtagtatctttattgagatgtactttgtcttcacatcgttctggaactataaggtctactatgtttacgggttcatgttgctggtctttctgatactcatcattgtcccatatgtgtaacaattgtcggtacatat

SEQ ID NO: 21678 - DNA, 278 bp, Zea mays
  Clone ID: MRT4577_119766C.1
atcttttttcttttgttttttctttgagagcgaaatagaagaaactggagttggacgcaaacagtacaaataaaccttctgatgcacccaggtacataggaaacctgagattggcctattacaaagattcagctacgcctatcgcaaagaggacaccctaacaagagccttgttatcttgcacacctgtaaggtggtcaagttactacacaccacccgggctcataaaataattacgcttgacatatcaacttcttatactccagatttggccccaaa

SEQ ID NO: 21679 - DNA, 2032 bp, Zea mays
  Clone ID: MRT4577_119767C.1
cctcgaggccggccggtccggcaaaaacctcgggcttcccctggcttccatgcagcagtccccccttcgtgtcgcactcgcacagtcgcactccataaggcaaggaggaaaacagagagacgaccaccgctccgcgccggccggccattccatccggcaatggcctccgccgccggtgctgcgttcgccgccatcactctcctcatcctcgtacccctcgccgccgcctcggactccgaccacaagtaccaagcagcggagcctgtgacgctctgggtgaacaaggttggtccgtacaacaatccgcaggagacatacaactactacagcctcccattttgccatgcgtcagaaaaccatgtgcataagtggggaggactcggcgaggtccttggtgggaatgagctcattgacagccagatcgacataaagtttggaaagaatgttgataaggccacaatttgttcgctagacctcgatcttgtcaaggctaagcaattgtcggatgcgattgagaactcatattggtttgaatttttcattgatgatttgcctttgtggggttttgttggagaggcagacagaaacaatgataacaaatatttcctattcacgcacaagaatattgtcatcagatacaatggcaatcagattatccatgttaatcttactcaagaaagcccaaagcttattgatgtgaacaaggcattggatatgacatattctgtcaaatgggaaccaacaaacataacatttgctcaccgttttgatgtgtatctggactatccttgaattgaacacctatagttctataaggtgctcaatgttttcaatccttttggaggaggagcagggaaaaactggatcaaggcaatggccatgacagcatcacttttcccatttatgtgctttggaattggcctggtgcttaacactattgctattttctatggatcgttagctgccataccatttggtacgatggtggttgttttcatcctgtgggccttcatctctttccctcttgcacttttgggaactgttgttggtagaaattggagtggtgctccaaacaatccctgtagggtgaagactattcctcgccctattcctgagaagaaatggtacctcacaccatctgtcattgcgcttatgggaggactgcttccttttggtagtatctttattgagatgtactttgtcttcacatcgttctggaactataaggtctactatgtttacgggttcatgttgctggtctttctgatactcatcattgtcaccatatgtgtaacaattgtcggtacatatttcttgctaaatgcggagaactaccactggcaatggacttcattcttctctgctgcttccactgcggtgtatgtttacctctactccatatattattaccacatgaagaccaagatgtctggattcttccagaccagcttctatttcggctacactctaatgttctgcctaggcttaggaacactatgcggtgccgtcgggtatcttggatcgacattgtttgtgaggaggatctacaggaacataaagtgtgactaagtgaagataatatcgccccattttgggtcagcgcagagaaaatgtatggcagagccttatttgattgagcgatcactgattctaaaaccaagaacgcaggtcattttgtgaaatatgatcattgcttggcgccgagctgaaagccatgtttttctattcttgtccttctcgtttctctctgatttcttctggacttggacaggcaacaaattttcatgttgaattagttatatatatagcggtggttgtagttgttgagtagttctgtagtatataccacaattgttatccttggccccaatgatacctcagattgatgggtataaactgtaacatttacattacctgatgtttgacgatgaacacagttccaaataatcatgttcggtactggaggatcgagatttttgagaggcaaagtcatcaaagaaaaaatgtttgatattacaaaaaaaaaaggagg

SEQ ID NO: 21680 - DNA, 542 bp, Zea mays
  unsure (1)..(542): unsure at all n locations
  Clone ID: MRT4577_119768C.1
gtttgtattaggaacgagatgtcaatgaagaatctggatggaagcttgtacatggtgatgttttccggcctccttgcaatctagttcttctttcagctcttgttggtattggtacacagttggcagcactgattctactagtgattttgttggcaatcattggaatgctgtacattgggcgaggagctattgtcacaacattcattgtttgctatgctcttacttcattcatctctggatatgtcagtggtgcattatactcacgacatggaggtatgtgcttatttatcatgtaaaattgaattgtgtacctatagttctataaggtgctcagttgttttaaatccttttggaggagcagggaatatctggatcaagggcttggccatgacagcatcacttttcccatttatgtgctttggaatcggcttggtgcttatcactattgctattttctatggntcgttngctgccntcccatttggttcgatggtgggttgttttcctcctgtgggccttcttctctttccctcttgcgcttt

SEQ ID NO: 21681 - DNA, 934 bp, Zea mays
  Clone ID: MRT4577_119769C.1
aagaacaatccggcaacgttccggcagcataaatctgaatcctcagagcacagcacaagaaacacatgcaactgatggtcagataggggtatacaaaggaacacctgctttgatgctcacgggcactgcagcgaggaggtacagccacaagtacaaagcacgattagacaattttttttgaccccattgcaacatttcacaaatttgctctcatcaagcaagaggggtattcagtcggccccaaactatggaaatgttataacatcacatctgaaacaacacttggttacaatgccccacttgcatacaggcgagtccactccttcgctgtctcaaaagcttcagcttcatttgatttccagtgtttcgcaatgttgtctgagagaggatcatctggatttggggcactcagaagtgcctgaatgctgagcagaactgtacgtatctgaagagcgggactccatttgtccttaagaatgtcgaggcatatcctaccaagcttgtcaatgttcggatggtaaattttggtgagaaacctaactttcggggcagccattggatattcctcaggcaagaatagctcaagcttgaaaactccaccttcatagggtgactgtgcggggccaaggatcatgacattgaagtaccgcatgttctcttccgacggcgacgcgctaatccccggcgctggttcgctgaggagccgctgcgtctccttgatgattcggcgcgggaggttgctgttggccatggaaccctgactgattgcgcagggccgctagacggagcggggattgcctcaagcttcacgcgcacgcgccgctggggaggtggacgagacgagacgagacgagacgagggggtgggtcgagggaggtcgaatgggccgctgggcatggatggacatggacacgaatgggccgatcccggccgg

SEQ ID NO: 21682 - DNA, 741 bp, Zea mays
  unsure (1)..(741): unsure at all n locations
  Clone ID: MRT4577_11976C.1
gacgcctgcggtaccggtccggaattcccgggtcgacccacgcgtccgggagcaggtaactgccggcgagtggcggtgggctccgggcaaggaaggacctggggacccggaccctcgggaaaaaaaagcaagtgagccccgagagctctacgagaagagccggcgcttggagggggaggggcagctgcagcgggctgccgggcggtcccgcccctggcctgggtcaggacccggtctccgcaggagccggatctcgagagtagcttttgctattccctcggagcactgagagtggtgtggtttctggtggacttgcagaggaccaagaccttgggaagatcgcggttgctcttcagtcgccacccagagctaaggttcccgaggagactttccgaaatggatgccactttaacagcacgagagatccgagagcggtttataaatttcttcagacgaaatgagcacacctatgtccactcttccgccaccatccctctggatgaccccactctgctcttcgccaacgctggcatgaaccagttcaaacccatcttcctaaacacaatcgacccatctcaccctatggcgaagctgagcagagctgccaatacccagaaatgcatccgagctgggggcaagcacaacgacctgnatgacgtgggcanggatgtctaccaccacactntctttgagatgctgggcttctggtcttttggggactatttcaaggaatgggcatgt

SEQ ID NO: 21683 - DNA, 152 bp, Zea mays
  Clone ID: MRT4577_119770C.1
cggctcgaggcaagtatgacatgcacaactgaatggtaatttaccacagaatgccgtacctacaacaccgcaacaagggtttacatatctacataattgattaaacatggtattgtcctagtacgatttgtaatttaggtagaatttctttc

SEQ ID NO: 21684 - DNA, 544 bp, Zea mays
  unsure (1)..(544): unsure at all n locations
  Clone ID: MRT4577_119771C.1
aattcggcacgaggcgcgtgtttccccgtgatccccgccgacaaactctcgtgcgatacccgtgcgcatgctccatcggtagcaccgccccctaccttctcgcctacctccccgccctcctcctgctatcgctcctccccgctgtcgcctccgtctacaccaagcgcaacactctcaccttcccacgcgtcctctccgtcgtgccccatgcctggcggaggctcgccgccaagttcctagctgccttcgcgctcctctttgcctaccacaccgctgttgtgctcgtctccatcggcctcctcattgctggggacaacggctctagcctctcgggcctgcaccgccctagcgccccctccccggccatcgcacatcgtgcaaccgcctccgcaatagacaacctcccaaccctcgcccccgcccattgctccaccacctcgaatgccttcctccaaagtcgtcgccccccccccctcgtgcatcgtctctgtcccaccaaactcgtgcaaactctggttcctgcctccctccacacncgacacca

SEQ ID NO: 21685 - DNA, 241 bp, Zea mays
  Clone ID: MRT4577_119772C.1
aaagggatcaccaaatgttgctttccaagaataaaagagtcccgggccctgtgctttaaaataaaatcatcaaagcccgggagaaaggggcccaaaaaaaagtttaagaagagaagaaaaagagaaaaagccttcctgcccaagttgctgatgtgaaacaagagcaatttcgatccctgcaaagaactaagcaattttcattcactgggattgacacagtacctgtgatgggggatcaggg

SEQ ID NO: 21686 - DNA, 596 bp, Zea mays
  unsure (1)..(596): unsure at all n locations
  Clone ID: MRT4577_119773C.1
cctgctccttgtgcacttcgnaanactccacttcgacatgaagcttggaacaatttctaaagttccaacctggatgggatcacttgttaatctccaagaactaagcttccgtatttgtgaaatggctcaagatgaccttgatatccttggagatataccggctctccgctctcttgccttcttcatgggaacttgctccagaactgaccccttctgggtagatccacacgattattggcttaggatcagaaaaggtttgaaagtttgaactctttccgcttcgaatgcggcgagtacatgtgcctcatatttgaagctggatcgatgccaaagctcgaaatacttgacctcgaggtttcatctgttgaggactacatgattcagaaacttggttttgattttggcatcaataacctatcctgcatctccaaagctactcttagatttagtaattggggatgcagccaagaagatgaagttgccatcaggaaagcagtcagcacacatcgcaacagacctgcactggaaataataagaaaaaaacttcgaagttaataggcaaaaggaaaatctggatgggatttttcgttcaaaaa

SEQ ID NO: 21687 - DNA, 288 bp, Zea mays
  Clone ID: MRT4577_119774C.1
cccaggcgtactcgtacatgtacaagtactttagcactaccaacataccttgggcattgtgatagagctgatcgccaatacctacagaccgatgcgaactatcgaatatcattacatttacaagtctgatccgatatactatgatccaaagaaagtttcagaccgtgcatcctgtcatcatccaagatcgctgacctgtatattcagaagaagatgaacaccaagctgaactcgaagctgatgagcactgttatcgaaatgaatacaataatagtgcaatgcgtcatt

SEQ ID NO: 21688 - DNA, 407 bp, Zea mays
  Clone ID: MRT4577_119775C.1
cgcgaacgaaccactgatgcacctggacctgtagcacgccatcatcctactcgacgacgagggggtgagcatgatcatcgaccacacgctggacaggatactaccaaagcccatcgacgaacacacgccccacaggatgaaatccaccgacgggacgttctactacatggaccgacagaaccataagacttagattgtgaacaaggagtgcgcctcaatcttcttcggcaccgtgaagctgacgatcctcatgcccaagggcgacttggtgctcgcgcatctcctggagacaggcctagaaagaggtgacctgaccatacatgctcaaagcgaatctagatccaatacactgacctaaaagaagtttcataatcatccaaattggatcgagaatctacgcgttgaca

SEQ ID NO: 21689 - DNA, 641 bp, Zea mays
  unsure (1)..(641): unsure at all n locations
  Clone ID: MRT4577_119776C.1
aaagaatannnnggggggagccagaanaatnngantgnaaaaaaantaagcggatggagtggttgggttttaatgcaattttaaaagtgaggcttggtttggttaattttggaangnaaaaaaaanaagagtngttgggggggagattaccaaananagaatataggggttgtgtttttagaatgaaagatgaaagagagatggaagggntgngttttaattganttttgaannaaatatttaggttgtttgttgggggttggtggggntgtaatgnggttgggggtggggnttngaaagtatttttntttttatagattggagntgggggagtgnaaataggtgggagagggttgggttgtaggcaggcgaacacgcccactaacggggagagacacttggggggattttcgaagcgattatctggggcattttttttacgtaccggaaccaccgcgccattggcattggcattggagctgagcttgctggggggcagatgatggggtaccctggctgtgactggctatgcggggggggagtggctacttggttgggggtgcgggcgcgggggggctggggatgcgccctaccggtgctggccttggcgggggggtgcgtgccgggggggccgccggggc

SEQ ID NO: 21690 - DNA, 246 bp, Zea mays
  unsure (1)..(246): unsure at all n locations
  Clone ID: MRT4577_119777C.1
ccggcggggagcgcgcgccacancancagcatggccgccacccaccaccaacccagcagggcggcgggccctcgtgcagtgtcatgtgaactatcatacccatccatncatntcccnccttttttggtttgttngggggccattnaccnncctcntntttcntctcttggaaagaaagaaataaaaacttantttaatttcctgaatataatgtattcgttttagtgtgtatgcctcctatatatt

SEQ ID NO: 21691 - DNA, 387 bp, Zea mays
  Clone ID: MRT4577_119778C.1
ggggggcgcccaaaacaagccattcaaccccaaataagggggcccccaaaaacaaaccccactggggggaacaaaaactaacctttaaaaacgcggccccccccctggtttttcccaaacaaaaaacccaccaacccaaccctaccacaaaaccaaatccagggggtaaccccggaacataaatatattggaaacaaaaaccctggcccccgcaattaaatctaatttacaacccccaaaccccccagcaggccaaaattattttctcacccggccgtaaccacctcttccacaaagtcccaaaaagccggcccactggccctgattttatataaaaaaagaaaacctcccttccaaacccctttgacatttgggtccctggccccc

SEQ ID NO: 21692 - DNA, 291 bp, Zea mays
  Clone ID: MRT4577_119779C.1
gtctggaaaagtttagacccccgtgcagcctgttctttacacgccaagttggcctttcgttttcatcgatcgacgtaaacgtctagcggatgctcctgcgcgtgtattcaaccgtacgacgagttccaaacctgccgacgatcgacaagcaacgagctgcgttctattcatcagactccagagacggagttcagacgtgcacgtgaggctacccaccagagctttgtttgatcagatcaatgtctcgctctcacgcgctctgaacttgtcaaatcggctgcacacgcgttc

SEQ ID NO: 21693 - DNA, 1309 bp, Zea mays
  Clone ID: MRT4577_11977C.1
ctcaactctcatagccaagacgacgacagacggttcaacaactgccactgtcctctatctctcattctctctctctctctgcgcgcgcgtgtctctctcctgaacagcagagcagactgccctgctttcccagcttctatctctgcccagcgccgcctgccctgcctccactaaaaagagctccccagctccaacactcgtagactccggcactccgcgagccagccgccgccaggaagcagcagcagcaggtggctaccaaccaaccagttagcacgtagcaagcccaatttggcagcaaccataatatactccaccggtcgggtctctggtaggcctccagttctccactcccattcgccgatcgatgagggacgccgcggtggtcgtggcggtgcccgggcccggggccgcgacaggaggaagaggaggaggaggagggaagccgggggccgccggggcggcgccgtgcgcggcgtgcaagctgctgcggcggcggtgcgcggccggctgcgtcttcgcgccctacttcccgcccggggagccgcacaagttcgccagcgtgcacaaggtcttcggcgccagcaatgtcagcaagctgctccaggagatcccggcgcagcaccgaggggacgcggtgagcagcctggtgtacgaggccaacgcgcgcgtcagggacccggtgtacggctgcgcgggcgccgtctcgtcgctgcagcagcgggtggaggcgctgcaggcgcagctggcgctggcgcaggccgaggtggtccgcctcaggatgagcaacgactacgtcctgcgccgcctcaaggcggccggcgggggcagcagcagcagctacgccggctcgccgtcgtccatgtcctcgctcaagacggctgcggcagcggcggcggagccggacgcgcgatgcagggccactacgccggagctgctggtgctggacatggtcgtggaccagcccggcatggacgacgacgcccacttctggtcctactagctaaccgcgccgcgcgttccactcaagctaggttgtttttagctgattttagtcgtgccatcgaatcgggtgctgtttttgggtcacagatggtggtacggtagttggtatatatatgtggtatcagggtttaaggatttgtaacagcgtggcacgaccgcacgaggaaggtggcgcggtacttccatgagaagctggaacgttgtcacggatattggtgtgcatcatgctatgcatcgcaaggacctttctcttgcccagttaaacaggtgaagtctgctatggaaatgcaggtaccttttacct

SEQ ID NO: 21694 - DNA, 306 bp, Zea mays
  Clone ID: MRT4577_119780C.1
ctgatccacaacgtaaccaggggcgggaagactatgcagtgtagggtgcaacatttaagggtgttgggaatgagaatccatcaacccttatgtgtttccctcaaagacaactaatgctggacacatcacttcaaagttgcatgttatcgaactgggtgcacagccagagcaacctctgttttctaagaaacaggcctatctcttctgttccgcagattttcaggatgatttttctgtacctatgcagggtttacaaaagtgtggtcttatgtatgtacacactaagcctgtccttttgttagtatt

SEQ ID NO: 21695 - DNA, 445 bp, Zea mays
  unsure (1)..(445): unsure at all n locations
  Clone ID: MRT4577_119781C.1
ctccccttctctctctctctataaaactctctctccctgcttcccccctctgagagcttttgtagagaggggcagccggagccgcacaagcgcacagccaccgccaccgaccgcgtccgtccgtcctcttcttctcctgctgtctccgccattgctgccgccgcttcctcctcctacgctgcgctccggatgagaagcagcgcaaccggggcagcgactgcgcggtcggcctgaggccggagaggcaggcaggcaggctgcaagctcagctcagaggaggcttcaagcacacagactgaaagcgagcccccatgggctccctggaggcgcggtaccggccggccggagcagctgatgacacagctaaaagaaggacccagaanagtaaaagtttcnaagaggttgaaaagtttgatgtatttgntctagggaanagctccggctg

SEQ ID NO: 21696 - DNA, 345 bp, Zea mays
  Clone ID: MRT4577_119782C.1
atataaaatatctttataggtggctatttatattcgaaaaagcgaacatggtacaatcaggcgtacatacactccatcgcttgcggtgcctcaagtgggattaatgaagaggaaacaccacaaacctttatatactctcgtcggtctttataattaattacaagaaattctggttcatctaaatacatataaattatgatctagcacaaatatgtgcataataaaaacgacatatctggaaaaatcaaaacgacttataaattaaaacagagagatgataacaaataccatcaggatgattatcattattataattattatgattgttgttgaaataattgatag

SEQ ID NO: 21697 - DNA, 846 bp, Zea mays
  unsure (1)..(846): unsure at all n locations
  Clone ID: MRT4577_119783C.1
ctcgaggccggccgggaggcaactccgctggatgtgggagacagcctgcaaagcgctctcctccgagcgcaggtcatcgttgatgaggctatgggacggcacatcgcaaaccaagccatgctccagcagctagacatgctgagagacgccatgcaccgggcctgctacgtcctcgacacctccaggtgccagtcccacgacgaggaggacgccgaagatcaggttgtgaatcattctctgtcgctgcaaaaactaacttctcttaaaggaataagctttgcttccaatagaaagacgccgccgcttctggaacagctgcaagagtcgcttcagaacttgagctctatgatccttgacgcgagagagctagtggtgttcttcagaagctaccctcctcgcctttactctcagccctacagcatgcatctcctgctaggtaactgcatgtttggcttccagatggaaactgagctcgtcatcaacttcctactgcacgcggaaccacctcctggttctgaagaactagacgtcctaccgatcattggccctagcaaagttggcaaaacaacccttgttgctcatgtctgtaggaaccagagagtgcgcgaccatttctcgggaatcctgttgctgcacgatcacgattttgcggacgacggcgacgacgacatctcaacgacgttcggacagcgatgtgcaacgaagcttcaacttcgcatgccagattcaaacaaggatgggagactgctagtcgtcgtcgacttggttggtgaccttggcgaagctgcatgggatgtgctgtactnccacgtgtaacagcgcagcatggcaagcagaagcaagatc

SEQ ID NO: 21698 - DNA, 439 bp, Zea mays
  unsure (1)..(439): unsure at all n locations
  Clone ID: MRT4577_119784C.1
aattcggcacgaggggacacacgcagtcgttactctatcggaaggtgtaccgatcctncctagggcgacaggcgtatgctctgcggcttcgctttccgcttttcgattcgatagagcacaagacgcgaggcgaagacaggcactccgcgaggagagccactagatacaggaggaactgagggatggcttacatactgactggtgtgcagccttcaccaggaggactcactcggacgaggagcgaccagcgagctcggatggcgcagagatggtctgggtatgcggagcctccatactggagggctatcgctggcgaacctagtcggagtgacgcatgcacctgagggaaggcgtgccgctaaggatatgaagtgcgggtatcccaagaggggcagcagtcggcatcgcaggtgcacgagaggggcagcagcaggaccct

SEQ ID NO: 21699 - DNA, 431 bp, Zea mays
  Clone ID: MRT4577_119785C.1
gatgccaaccaaaccaatccattactgcccgcttaatcaaagtcaggatatccgacggggcggcggctgattcctatctcatattctcagagcagtaaactaccagcagtaaaataacaaaggtagcaggtagtacaaggcgaaggcgaaggcgaatctggaacgagctcgtgcaccgcctcgagccctcgactactcgccacgtgtcgcgagcaggcccaccaggacctgggtggagccggtgcaggagacgagggcaagatgcggagtaccagtgctactgctcggctctccattaaaaagcagtaaaaaaaatcgggtaccagaggtccagaacaagtcgtacactcgtactacagtctacagtcatggcgcgcacagcaaacggcgcgggtcgccacattatctgatccccgccccggtctcggcac

SEQ ID NO: 21700 - DNA, 338 bp, Zea mays
  Clone ID: MRT4577_119786C.1
ggataaggggaggctagccctgcatcacaaaacgcatacctacaaaattcaatatttttcccgggcgaccacactgaatggactaaaagctagctacgtacgtacgggcctttggcgaccgacctgtttatttaacgaccaattgatcggggacagaacacccacctacgtaccgggggggtgggggggggccacccggggggatcggggggcctataaaagggggggggaatgaaagcgttagggggggccgggcgggcaactcccatctccttaaaaaacaacacaaaaaaaaacccgcgaaaaaaaagagaaaaacctgggggccccaaaaaggg

SEQ ID NO: 21701 - DNA, 149 bp, Zea mays
  Clone ID: MRT4577_119787C.1
aggcccctcgagcgcgcgcattcatagccagggggaccacaacaatagaaaggcagaagaggagcccgagctaccgcaacgaacgagaggccgactaggcgccgacgccacccagggggagggtgacgacgcgatggaagagagcgact

SEQ ID NO: 21702 - DNA, 111 bp, Zea mays
  Clone ID: MRT4577_119788C.1
cccacgcgtgcgggaacacacgcggtcagcaacgtttgcttcctgcttcgatcaatgctgcttgtgcactctctactcaccaaaactagtcagtggcgtatactcgacaga

SEQ ID NO: 21703 - DNA, 704 bp, Zea mays
  Clone ID: MRT4577_119789C.1
gggaacttgcctagagagttgtgcgctgagaatccccaagcaaacaaacagggtagagggagaggagaggagaggagaggagaggagaggttgtcatctgagacaccatggctcctatgaagttgtacggggcgtgagatgtcgcggaacgcgactaggtgcgcaacggcgctggaggagggtgactacgactacgagtatcgtgctccatgaactgggggaccggcgagcacaatagccccgagcacctcgtgcggaacccgtgtggtcaggttccacactctgcacgatggggacttgtacctttccaaatcacgagcaatctgcaagtacgctgctcgcaaaaacaagccagagctgttgagggaaggaaacctcgaggaggcatcaatggcggatgcttggatcgaggtggcggctaaccactacaccgttgcactgaattccatcctattccaggccctcatcagttctatgcttggggggaccaccgaccaaaaagtggtggatgagaaccttgggaagctgaagaatgcgctagaggtgtacgaggcacgcctgaccaagtgcaagtaccttgctggagacttgctcaggctcgccgacctgaaccatgagtatgttactctctgcctgatcgatacgccctacgcatgtgtgctcgacgcctacccgcatgagaaggcctgctggtttcgtctgat

SEQ ID NO: 21704 - DNA, 1134 bp, Zea mays
  Clone ID: MRT4577_11978C.1
gcataatatatcctttttattatcaatttggtattcaatagttgtagtttcactttcatcagccattgctccagcaccgacccttgttctttgttcttcagggttgtggaaattgttcgccaccggaacagggtagaggttactgtaagcagtggccaaacattcgttgcggacgcagcagtggtcactgttccgttgggtgtcggttggagtcgagaacaaaattgttctgcacttcggccaggttttctggcctaacgtggagttcatcggcgtcgtttcctctagcacgtatggttgcagctatttcctcaaccttcacaaggcaacaggccaccctgtccttgtttacatgcctgctggccgacttgctcgtgacattgagaagatgtcagatgaggctgctgcgcggtttgcattttcccagttggagaagatccttcccaatgcagctgagccgatgaattacctggtgtcgcactggggctcggacgagaacacacttggctcctacacgttcgatggggtgaacaaaccccgcgacctgtacgagaagctgcgcatccccgtggacaacctgttcttcgcaggagaggccacgagtgtcaagtacacgggcacggtgcacggcgccttctccactggtgttatggcagccgaggagtgcaagatgcgagttctggagcggttcagggagcttgacatgctggagatgtgccaccctgccatgggcgacgaaagccctgtctctgtcccgttgctcatctctcggctctaagcagacgagcggttgtctatgggactgattggcacctgacagtacgctggacgtcccactgattgccggagggaaagctggcagtacagggagaaagaaactccccttgcttctccctcttcggcatgaggaatgtgctggcattacttgtgtggcgtttcatgttaaaacctatattgtgtattgtggccttgtgggtctgtgtgtgttcagggttatcatgtcatcttggtagaaaaggatgccccgtatgtattatgaacactagtaataataatacatatatgtaacttaactgtttggagtattgagttatttggcatgtaacacgtcagctgcttaccgttaggggtagt

SEQ ID NO: 21705 - DNA, 466 bp, Zea mays
  Clone ID: MRT4577_119790C.1
accgtcgacctcaagaacaatatatgacatgggcctacaacagcttcaatccgtatctccagatgtaccctccttttgtttgccgactatggaaggaacgctccggcgccgaccttaaagaagggggcgaggaggacgacgaggtgcaacaggcggagctatggaggcaccagggtaaaaatgtcagcaagctgtacggggagggaggacccggcggtccatgaggtggaaggggtatacggggagtcatggttacaggacatgaggacaacgaggcggagcactgttaaagtcaatccactacacgatgcttttaagaccaatggacaataggacgatgggatgttttcctcatcccgttcgcacgtcgtctggaaccatctaggctatttcaagattagaagagttacaactagtatactcatgagtacttcttgaacatgagttttattcaagacgattacct

SEQ ID NO: 21706 - DNA, 817 bp, Zea mays
  Clone ID: MRT4577_119791C.1
gggtatgtgatagagatggagaaaataaataccgagatagataaactagaattgcgaggccgcaagcaagggacgacgacgtgcgaacacaaaaaaaaacgaaaacaaaatacagatataccttgacaaaaaaataaaatgagcaaccgccgcttcgttggaggagccgagcgttcgctaggataaatcgagtaaaccaccgctcatcgatcggggattgggatagatagagacctcacctttggtggcgccggtgccggagcccggtggcacgccgtacatgactttcctgcggtgaaagcaacccgtcccgcagtaaaatatgccttggagtccggcaattccgtgtccaactttctgaaacgagagcagaatgtgcatgcagtaacagtagcgagcactactacgactcgtcgtcctcgatgtggtagcgcgatgggacgtgtacctcgaatataacctgcatctggttcccgaaagggtcgtccgcgaggccgccgtagaaccgctgcggcgcctggacgaagccgctatggacctcgtcgtcgaagcccagcaggaggcacatggcgtggagggccgcctgcgggttgttggcgaacatgtcgcagtccacgttcagcatgatcggcgcgttggtcagcaccgcggacaccctcgtcaggacgttcatggccccggccttgaagtggtggggctgcgtgcggctcttctccctcgagacgtatatgaggctgggactccatcccctgccgcctgctcatcgctctcgctcttgctgctgtcgtgttcccacaggacctgtattcccggccgg

SEQ ID NO: 21707 - DNA, 149 bp, Zea mays
  Clone ID: MRT4577_119792C.1
ggctcgcgtggcttagaggagtatgcaccaagcaatgagattaaggatgcttgatgtgacggtgcgaaatctgacgcgacgtctgctgcaaaggttcaaaacaaaggcctctacaaagtagacaagtttcatgacctctcttccgatga

SEQ ID NO: 21708 - DNA, 334 bp, Zea mays
  Clone ID: MRT4577_119793C.1
acatcgcgagccgccgtcggcccacgcgtccggaccgccgtggcccccatgggccatggaagatggtgatctcgtcaccaagcgcttgttgctcgtgcaacggcgttgacgttcccgccgcaccccactttctcggtgggcactgggcagggggggcaaggaaagcgaggtagcagaagctgctggcgcgacttctttttagtatgtgtgagctgcactcaggcaggatttgagattacgttgtaccttttagaattcgttttctagcacgctgcttttgttgagtggattgtggtttgtggacacccacttggccactgtcttctgaatgaga

SEQ ID NO: 21709 - DNA, 288 bp, Zea mays
  Clone ID: MRT4577_119794C.1
tcaccattaaccccaccaccagcaccagacaggtggggcattattccttgggcatgcacacttctcacattagactacttaccatccttccacatgacacctcaggaaaccttagccatacacaacaacctcacctacaaggagcatacccatcgccttagtcaaccagtctcgctctagaccgaacctgaaaaatcttttcccaagctcaacagggaggacctccctgttctaatattctaccactgacacctactgactcgcacctttcgaaacctgacctgcaac

SEQ ID NO: 21710 - DNA, 354 bp, Zea mays
  Clone ID: MRT4577_119795C.1
ggccgcttttttttttttttttttggagagtgctttgtttttttttatttaatatgggcgtcccggacattgctcacactgttactcacaaacgcgcagacgcccagacaggtgacataccacagatagtcgcagacaaacccatggctaggtagctggacaggggcgtagttaccgcccatagggaagaggagagcgtactcctaacaccagacctggagggatatggagtagggggcggtataaatgccgatggacgacagtagccgcgcgagttccgacgtcacaggccacgtaccatggacacactaccgctgctaatgcgtcgcggaatgcaataccaggcttaatatc

SEQ ID NO: 21711 - DNA, 388 bp, Zea mays
  Clone ID: MRT4577_119796C.1
acctcgtcggccgagcccagccccagctcgcccagtctccatctcctttaatctgccgttctgcagctcggtctctggtgctctgcacacgtcgagttccttgccgcgcgctgagctgtgagctctgtgtcgtgtccctggttccagcgtggagctcgtgagcgtcttcctgtgctccttttgtgcgatcagctttggtctctattacccgctaaactactgtcgcgccgggttatgccctgatgcgcgcatcattagtcttcatcgtgcgtgtcgtgacagctgttgtggccgtgaagcagtccgcgccatagagttcgtccgaccgcgacctcgctttactcctcgcgtcatcgtttgccgtcgagtcgtcgaacacgtcatcctc

SEQ ID NO: 21712 - DNA, 2226 bp, Zea mays
  Clone ID: MRT4577_119797C.1
gctcactcgcgcaatccgtcgaactcgaacactgccatggccaccgccgctgccgacgacgatgtcaagctcgaatccttcctccaatggctccagtccaacggcgccgacctccgcagctgcacgatccgcgcatgcggcggcaagggcttgggcgtcttctccaccgccgcccccgagccgggctccaacgacggggtggcgatggtggtaccgctcgatctcgccatcacgcccatgcgggtgctgcaggacccactcgtcggcccgcgatgccgcgcgctcttagaggacggagtcgtcgacgaccgcctcctcgtcatgctcttcctcatggccgagcgccgacgccctggctcactctggaagccatacttggatatgcttccgagcacctttgggagctccctttggtttactgaggaagagcttgccgaactggaagggacaactttgcaccgagctacgttgattcagaggaagtcattgcaatcctcatttgatgagaaggttaaagggctcgttgaggagcttttgcatgtcgatgaatcagcaagctcagttgaagttttgtttgaggacttcctttgggcaaactcaatcttctggactcgagcactgaacataccattgcctcattcttatgtttttctgggctcatgtggcgatcaacaggccagggctgacaatgatgcccaccaggaaattgatattacagctaaggattgtagtgctgatgagaattctaaaccaagtaacacagagtcaatttgggttgagggccttgtcccaggaattgatttctgcaatcataatgtaaaggcactggcaacatgggaagttgattctgtgggaaatgctaccggaattcctgcttcaatgtacctcttgcttgctgataaaagtcctgctgagactggagcagagatctgcataaactacggcaacaaaggaaatgaggaactactgtacctttatggatttgtggttgacaacaatcctgatgattatctcatggttcattatcctttggaagctcttagacagatccagtctgctgatataaaaatgaagctactagagatgcagaagggagaattgaggtgcctcctacccagaagtttgcttgataatggattttttggtatccgttctagtgaagataaggatagcaagaaaaatactggtccgttttcaagttttagttggagtggtcaacgcaaagttccatcatatcttccaaaaattgttttccctcatgaatttatgagtactctacgtactattgccatgcaagaacatgagcttgaacaggttgcttctttacttggagaggttggatatagtgaagacagagaaacatcttgtgcagcgatccaaagtgctatttgggaggtctgcggtgatcagggtgcactgggtttgcttgtggatcttctcggggtcaaaatggctgaacttgaagagggctctggaacagaagcatctgacgccgaactgctcgagcagttcgattccattcagccagaagactacgcgagtgaaagcggcgagaagcacgaaaggaagtcaaagacaaactaccgttcgtgtgtagtgtaccggagagggcaaaagcagctgacgaggctgttcctgagggaggtagagctttttttggagctttctgcgaaagaacagagctaagagactctcatctggtacaagattgatttccttctctctgttttccgagtgaaattcctgaggtttctatgttttactagcctgttgtttatctacgatcatgacattgacaggccctgcctgcatcaaggttagaactgcagggttgtgaaaggaggcacacccgttgcgaaagtagaataccgccttcgtttcgttcccttgcgaaagtactactactccgttccaggactacgatttcgtctcccgaggattccggattgcccgttggctgggcatttgtggaggagacgtcgtcttgcactttgctgccacggctaggctgtagctttacctgattcagcttgcagcggcggagctgcagcgaacagccatctagagacagctccagagctctggttttaccaaaatgcgtttcttttctagatgactttgccttcgtcagagatgcatctcctggtctcacgagtcacagttccgatccgagacggtcaaggaggtttgctatgttttaatcgatggacagatttgtcttacatg

SEQ ID NO: 21713 - DNA, 960 bp, Zea mays
  Clone ID: MRT4577_119798C.1
gggtacctcgaggccggccgggcccgctctctcgcgcaatccgtcgaactcgaacactgccatggccaccgccgctgccgacgacgatgtcaagctcgaatccttcctccaatggctccagtccaacggcgccgacctccgcagctgcacgatccgcgcatgcggcggcaagggcttgggcgtcttctccaccgccgcccccgagccgggctccaacgacggtaacgctcctctcctttcccccgagtcgacgaggctcatctggacgatgcgccggcgctgtgcaggggtggcgatggtggtaccgctcgatctcgccatcacgcccatgcgggtgctgcaggacccactcgtcggcccgcgatgccgcgcgctcttagaggacggagtcgtcgacgaccgcctcctcgtcatgctcttcctcatggccgagcgccgacgccctggctcactctggaagccatacttggatatgcttccgagcacctttgggagctccctttggtttactgaggaagagcttgccgaactggaagggacaactttgcatcgagctacgttgatccagaggaagtcattgcaatcctcatttgatgagaaggttaaaggactcgttgaggagcttttgcatgtcgatgaatcagcaagctcaattgaagttttgtttgaggacttcctttgggcaaactcaatcttctggactcgagcactgaacataccattgcctcattcttatgtttttctgggctcatgtggcgatcaacaggccaaggctgacaatgatgcccaccaggaaattgatattacagctaaagattgtagtgctgatgagaattctaaaccaagtaacacagagtcaatttgggttgagggccttgtcccaggaattgatttctgcaatcataatgtaaaggcacttgcaacatgggaaagtgattctgtgggaaatgctaccggaat

SEQ ID NO: 21714 - DNA, 389 bp, Zea mays
  unsure (1)..(389): unsure at all n locations
  Clone ID: MRT4577_119799C.1
cgaaggcagtcataaaacacagatagngctcagtctttcatggtccagatgtgacaagccactgccggccatggggtgtggatcagtgctgcaaaaatatattggaacgtaaggaaacatcggaacttcaggaaatatatataacagggttgcttctatgttattacatcgaaggcgtcaggtgtatgcttcttcagcaaaaggatatatatgatacagattagctacaggcttcactcaaaaaaaaaaaaaaaaataataaaaacaacatataaaaaaaataataaaaataaaataaaaaaaaaacaaaaagggcgctccattttaaaggaatccgggggcggggggcgggcctgcaacacgatagattttttataggggcacctaaa

SEQ ID NO: 21715 - DNA, 2044 bp, Zea mays
  unsure (1)..(2044): unsure at all n locations
  Clone ID: MRT4577_11979C.1
ccggccgggtaatacagaccaaggnacactacattggcccaaatttagttgttgagaggctaactgaaaatcttaaactgtcctgtcttacctcaccatcattgttctgagacaggggaacatgcctcactactaaccctccatggtggagggggtagaggagggttgatgtgagaacaacaggcgatctcggcaatttcacaacttggtaggcttctttatgttacttctgtatgaactggtcttttatcatttggaggtactctgctctctggagcaaaatatcagtcttatgctaaacccatccatattagcaaccacacaattgcatcaaaatttgcagaagattaaacttgagcaggttttgtatgtcatccaaacactacagcagtaacggacatgtgaatgtttcaggaagtttcttttatggatatagttaaaaaagcaggagtcatccacctttatttccttcatttctctgtgtgcaaatcgtgatactgctggaataacaaatttgattagaaatgtctttgaaccttacctttccttctcaatacgatcaatagaactaaacttgttcttctgaacacattttgtacttaaacattntatttnctgtgttacatgtactgagataaagcatattttgtccatgtcattgcctcggggggacttatacaggcagcgggagcgtcgcgcgcgggccgggaccacatcgccccgaccaaagcttccccagacggcaggagacagcagcaggccggacgccggactcctcctccctcccccgtacgcatccactgagatccttcctgtgcgaaggaaatctccagttcttcggccccggccaggttttcaagtgttgcttgccccgccggagttttcctctaacccgcaagtccaattggctaagaagttgatgggatcggggggacactggaaggctgtgtgagatcgcgaaggggaccgtgaattccttgcagggctgcggcgattcggctgcgctgctgtatgaactgtttcgtgaacctgggactcaactcgaactcgaaccactacgtcgcctgcctcctcatcttcctgctgcatttctccccccagttgttaaatccatccaattctaattcaaatagtaattgtgaaggagttcaacagagctgcacagatggcgaacaacagctcatatggtgaaaatgctaggagaaagccacacacaccatctgctattgttattggtggtgggtttgctggtcttgctgctgctgatgctctcagaaatgcatccttccaggttattctactggaatcccgtgataggattggtggcagagttcacactgactactcttttgggtttccggtcgatttgggagcatcttggcttcatggggtctgtgaagaaaatcccttggcaccaataattggaaggcttggacttccactgtaccgcacaagtggtgatgattctgtgctgtttgatcatgatctagagagttatgcactctatgacactaacggacgccaagtaccacaagagttggtagaaaagcttgggaaggtgtttgagaccatactggaagagactggcaaattgagggaaggaaccaatgaagatatgtctatcgcaaaagccattgcaattgttatggatagaaatccacagttgaggcaagaagggattgctcatgaagttcttcagtggtatttgtgccgtatggagggttggtttgccactgacgcagattcaatttcactacagggctgggatcaggaggtgctgcttccaggtggccatggcctcatggttcgtggatatcgtccagttataaatactcttgcaaaaggcttagatatacgcctcaaccataaggttttggaaattgttcgccaccggaacagggtagaggttactgtaagcagtggccaaacattcgttgcggacgctgcagtggtcactgttccgttgggggtcctgaaagcgaacaccatcacatttgagccgaggctgccagagtggaaagaataggcaatcatagaactgtcg

SEQ ID NO: 21716 - DNA, 522 bp, Zea mays
  Clone ID: MRT4577_1197C.1
cccacgcgtccgcctgcacctcagaggggtgggggaagatacccttcgggccactgcgcagcgacgcgattatcgtcgagccccctatcgcggggttaccggtgatctcgtccgctcccagccggatacctcgttccattcaaaggcgcccctggcgtgggtgtctaccgaaggcgatccatacttcattctcgacaacgtcaacgagcgagatgtctgggctgagttccaggcacaggaccatttggcctagaggagcgccgaagtggccaacctgacgtcccggtgcaagggactgaaggaggagggtgtagccgaccgcaaggaggcctgtcgactgagggctgaggtccttggtctgaaggcagaggcagaccaccgtgaggaggtgctacggtgggcgcaggagggcctccaagcggtgacggaggaacgtaactccctcgccaagtccctggaggacgactggtcctcgggtcaagccctggccgcccaaatagaaggtcttgagaagagtctgga

SEQ ID NO: 21717 - DNA, 374 bp, Zea mays
  Clone ID: MRT4577_119800C.1
ggaaattgccaacgacgggtcccatggaagaaggccaagcttttaaaaaacagaggcaaaatttggtttcgggggccttttaggggggtatacataagggccccggctaaaaccgtttacatgggggccccatttaaaacggggtgagggccccccttgggtacaaacttgggagggggccccaatttttttgaacttttacaaatttacaggagcatttattctccatcaggtccccccattttatttaaaaaaaaatgggtagagggaaaaaaattgcccttataaactcatttcaggtttttatcaaggggcccctttattccaaaattttccattgggttggaattagacatgtcaaacacccaaaggca

SEQ ID NO: 21718 - DNA, 1892 bp, Zea mays
  Clone ID: MRT4577_119801C.1
gctcgaattccgttgctgtcggagactgaaggtgaggaggagcttgatgggtatgcacagggggatggagaggagcagggtactgaagaggaggagatggtcgaagagacgactaagaaacagcttagagggcttcctgcagatgggagaaaggaatttgtagaggcatgcaagagaatggatgcagagacgctggtcgagttcgtgatctgtttcagcatctccagtaagaagttgctgtccgcaatgcaccatgccccagatccggcggcacttgtccttcaagtggtcaagctactcgtatccaacaagaacttcaggtgctacaaggtctgggtgcaatgtatcacactatttcgttggttgtctatgaaatctgccaaacattctgcagacacaacagagcaggccaagctggtggcgaaggattggaagaaaatgattgacaacacagtgtgttgtagggaacttgacacgctgtctaggggtcttctccaattccttatcgcatataacattgtatctgaattcaatatccatgatatcatcagtatatttgctatggttcgcaaaggttacaagaataacaacattgccaagctttgcgaggatcttgggcttgcagacagggccacaggtttaattgactatatgattggaaatgggcagcatcccgaagtttttcatttggtacaaaattttaatttggaggacaagtatcctccattttctcttctgaagggatacattcagaaggccaagcagacttttgtggagatgtttaaaaagagtcaaacacacgagtccttggtatgaactaccccttctgactctaaaatcaagtatttcattgacaggaattatatggctgcatggcgccctgggtagcacgaacactggacatccaggccacattatgctgtagacagaaatttgaggccgctattcttctgttgacagattttttttagggtgggaatgcatacctcttccaggatgctgaggtcattctttcccataactgggctataccaaaggaactatggattgcacattatctagctgagcagaaactcactgattctaagcaacgcagtgctatcatggcagaaattaaatatttgatgagtggatatgaaaagaaacaaaggtcagaaaatctctcaacatgggcttcacagcatccgccaacggaatctaaaaggaggaacaggaagcgcaaggaggaggagcaggagcaccatgaagcacaatacaaccagcagcagcaggaacagaatgaaaacaagttaattcaaggaaagcggcatcagctgcatcaagaaaatatggcgcaagtgacacagcagcagcagcagcatatgcaaccgacaacaaggccagctactcttaagcttccgacgcctgctattcctctggttctgaatgcagctcagatccaaaactttgcgcgtccagcttacgccgctgtgcctggagttcacaattaccctgcccagccaggttggtctgcagctcaaggaagtccattcgtaccacagttcatgtcaccgcagtatatgggcctgccatttaatccctttggccttcatcctacttgctatcccagacgcagatagcgtagagagttctggcgttccgcgtccatttgctgagtgaaactgtggtgaagcgtacaagttatatgaaacagaccggtatcggttaactggttttgtgttcgtttgttatgctgtctgatggttccttttcgcgacatggtgattgatcactttgcattgatttgttgttcagccaagtggtggaatgcttggtgcttgcaatctgaaatgtacgcacggtaacaagaattgtagtacttttcaatcaattacataatggcatttcgaaat

SEQ ID NO: 21719 - DNA, 1443 bp, Zea mays
  Clone ID: MRT4577_119802C.1
gactcccctcctactcctgctctcccagcctgcctttacttctcccgaatgctcgaggcctccaaagctccagcccatccaatcgcacgccactccctgctgctctctgctgagaggtggtagatctcggactcgccgttgatttgattccaagttaaagactgcgagcaatccatagattgaccggtggagagcgagagaaagcgagagagagagagaagggaattggttggtaggtggagaccggaggcagagctcagctcaggagattgatgcttgcatggtgatgcgggcgcggcgtgtacgcgcgcgcgggcaacgtgtggatcgtgggcaggcccaacctggtaacctaccgtggccccaccatgctgaccaccacgctgcacgccatcgccgtgctgctccgcctccgccgccgctgggactggttcatcaacctcagcgcctccgactacccgctcgtcacccaggacgatttgatggaggcgttcgccgggctgcccagggacctcaacttcatccagcacacgagccacctgggctggaagataaagaagcgggcgcggccggtgatcctggacacggcgctgtacgaggacgggagggcggagctgatccgcccggtgaacatctccaccaacctcaggaggctgcccacggcattcaagctcttcacagggtcggcgtggacgatgctgtcgcgggcgttcgcggagtacgtgacgatggggtgggacgacaacctgccgcggacgctgctgctgtaccacgccaacatcgtctcctcgcccgagttctacttccagacggtggcctgcaactcgcgccggttccgcaacgccacggtcaaccacgacctgcacttcatccgctgggacaccccgcccaagcagcacccgctctacctcaccgccagggactaccgccggatgcctgctcagcggggccgccttcgcgcgcaagttcagggacggcgaccccgtgctggaccgcatcgacagggacatcctccgccgccgggaccccgccgcccacttcgcctacgggcggctggtgctccgaggccggcgaccaaaacggcggcgccgcgctctgctccaacccgaggaagacccggggaagggcggggggccgtcaagccccggcgccgggtccaggcggctcaaggccatgctcaggaagacgctgtcgccccaggaatttcaggcggcagcagtggtagtaagggggaaactgttttctgttctgatctgatcaaacaaacaggccgttgactcaattttgtatgtatagaaaaggcagatctgaaacgcatcaaagcgggccaaagcaatttttgtgcagttgattcgcccaagtttgaattgaattgtagtagggagatactcctggtggttgatcatctcatacccggaataataatggaaggggcattatgcc

SEQ ID NO: 21720 - DNA, 1406 bp, Zea mays
  Clone ID: MRT4577_119803C.1
cagaagcggtctctcaagctaggtcgacgtagagctggaatgtgggctccacaattgttgtggtgggaatgatatcggattgtttggagctgtaatgcattttgtatgtttaattattgcttagccatcatttgaacttttctcactgttttcatacgcagctagacttaaatacattggcctctaccttcttaacattttcaatttgattttgacagaactgtcggcactcattccacacctgttatctcattcgcaatgcaagggttcaccttcttattaatgtgtcttcttgccttcatcttttctgtaggattaattgactatatgattggaaatgggcagcatcccgaagtttttcatttggtacaaaattttaatttggaggacaagtatcctccattttctcttctgaagggatacattcagaaggccaagcagacttttgtggagatgtttaaaaagagtcaaacacacgagtccttgaactgggctataccaaaggaactatggattgcacattatctagctgagcagaaactcactgattctaagcaacgcagtgctatcatggcagaaattaaatatttgatgagtggatatgaaaagaaacaaaggtcagaaaatctctcaacatgggcttcacagcatccgccaacggaatctaaaaggaggaacaggaagcgcaaggaggaggagcaggagcaccatgaagcacaatacaaccagcagcagcaggaacagaatgaaaacaagttaattcaaggaaagcggcatcagctgcatcaagaagaaaatatggcgcaagtgacacagcagcagcatatgcaaccgacaacaaggccagctactcttaagcttccgacgcctgctattcctctggttctgaatgcagctcagatccaaaactttgcgcgtccagcttacgccgctgtgcctggagttcacaattaccctgcccagccaggttggcctgcagctcaaggaagtccattcgtaccacagttcatgtcaccgcagtatatgggtctgccatttaatccctttggccttcatcctacttgctatcccagacgcagatagcgtagagagttctggcgttccgcgtccatttgctgagtgaaactgtggtgaagcgtacaagttatatgaaacagaccggtatcggttaactggttttgtgttcgtttgttatgctgtctgatggttccttttcgcgacatggtgattgatcactttgcattgatttgttgttcagccaagtggtggaatgcttggtgcttgcaatctgaaatgtacgcacggtaacaagaattgtagtacttttcaatcaattacataatggcatttcgcaataaaaaaaaaaaaaaaaaaaaaaaaaaaaaaaaaaaaactcgagggggggc

SEQ ID NO: 21721 - DNA, 361 bp, Zea mays
  unsure (1)..(361): unsure at all n locations
  Clone ID: MRT4577_119805C.1
aattcggcacgaggacccagtgagccctcgccgtttcgtcgcacccaccaacacgagagatgagctccggcggcgcggtcaagctcggctgctcccgtacccctgccatcggcgtgagggtcgggagcaacacaccccaccgccgccgattttcttggtctcgcatcgtgttggggggggggtgcaacnccnccccnttttanaaacccaccnccttcgccagggaggtgctgtctcagtctcggcccgagggtctgggtgccaccgttcgtgggagtattgggaggcgcgagctcggggacctgagccggttgcttcgtgtgagcaagttggctggctggccgggcaccgtgttgcccgt

SEQ ID NO: 21722 - DNA, 365 bp, Zea mays
  Clone ID: MRT4577_119806C.1
tggagccgggtcgaggaaaatcttgacccactatggcgcggattccagggggagatacttgaaggtgcgtcgcgacaaccctgctattatgccgcgggcagatagggtctctcctttgaagatagagcctgcttcatcgcctgctgttaatccactcgtgcatgcttctagagcaaaaaaacctagacaaaacgttactccaccttcacttgaatcatatgtgatcacaaaagaaggtgcaaccaaagtctaaatcgattcaggtcaaacacaacaccaataatcgggcttgccagggcaggagcagattacctcgctgtacaacctgactgaaagcgctgattctgattctactgttcaaaagc

SEQ ID NO: 21723 - DNA, 184 bp, Zea mays
  Clone ID: MRT4577_119807C.1
acagcattgaaagtgactgttcatcatcagaaatgtcaagaagttcgatatgcacgagatgttttggaatgccacagaggctccgctttctgcgggatgactgacgccgatgtacacaagcatatccagcacatggtgaagttcattcctcagtatgtcaaggacatggtgcattatatcgaag

SEQ ID NO: 21724 - DNA, 596 bp, Zea mays
  Clone ID: MRT4577_119808C.1
ccggccgggtacagcaagtttatattaactgtgcgctggccggcgtggtgcccacatcgctgacacatgaagctcttggcctgctgctgcaaggctgagcaagctagcctcggatttcttgctgggtcttgcgcccgtccagggttatgggttccggaagcccgtcgaagagtgatgccgcggcggcaatataatgttctggatagcgcggagaaaacacggaggtctctcgtcgtcttccaggatccgcttgtgaacatcgcgtgccatggcgcatgcgcccaccattgcctcgaagatgtgcgggtggcaggcccgtgtccgtgtccatccctcttatgaccgttcgaggcgtgggggcagaagctgccacgggcatcaacatctcctctagtgtctctcctaagttgtccatactcgagttgcgaccttccgggtgttagccacgaagcattcgcacgtaggactttggctcgctggcttgttgggttatttttaatccatatagattggaggggattatatagattgagagatattttaactgcaaaaaaaaaaaaaaaaaggggcggccattcaatccatatagattggag

SEQ ID NO: 21725 - DNA, 414 bp, Zea mays
  Clone ID: MRT4577_119809C.1
ggtctctcggttgagacttctaggagacaatgtacattccacaaggatggctgttgttgagtttgttcatgctgagggtgccatcatggctattaattggagcgggattatttttggcaactctgcctggaaggcatgacctcctaccacccacctcttctattactgtctatttatgtatctagactgaaattttgaattttgggtcggagtctaggagagtatttgctaacactgatggcattgtgcattgttcagggtgagtccttctaagactcccgtgaagccacgtgtaaatcgaatgggatctaactgactctgcctaagctcaaccggaaggcatggtcataagctgaaggctttcgcggtcctgtgcatcatgatgcatttgcttacattcttacaaacactctg

SEQ ID NO: 21726 - DNA, 643 bp, Zea mays
  Clone ID: MRT4577_11980C.1
ccggccgggtgattctgtgctgtttccgggcggacccaagagttatgcactctatgacactaacggacgccaagtaccacaagagttggtagaaaagcttgggaaggtgtttgagaagatactggaagagactggcaaattgagggaagaaatcaatgaagatatgtctatcgcaaaagccatcgcaattgttatggctagaaatccgcacttgaggcaagaagggattgctcatgaggttcttcagtggtatttgtgccgtatggagggttggtttgccaccgacgctgattcaatttcactacagggttgggatcaggaggtgctgcttccaggtggccatggcctcatggttcgtgggtatcgtccggttataaatactctcgcaaaaggcttagatatacgcctcaaccataaggttgtggaaattgttcgccataggaacagggtagaggttaccgtaagcagcggccaaacgtttgttgcggatgctgctgtggtcactgttccgttgggtgtcctgaaagcgaaaaccattaaattcgagccgaggctgccagagtggaaagaggaagcgatcagagaacttacggttggagttgagaacaagatcgttcttcactttcggcaggttttctggcct

SEQ ID NO: 21727 - DNA, 690 bp, Zea mays
  unsure (1)..(690): unsure at all n locations
  Clone ID: MRT4577_119810C.1
aattcggcacgaggcgctcgccccgtcaagccgtcgctcctccaccacgcttacccggcgttccgctcgccccgtcaagtcgtcgctcctccaccacgcttacccgtcccacgccgcgtcggcctcctcgcccgccctcccgttcccccggggaccgaagctttccaggggcctcgatgtgcccaacctaaagaagcgatgcgagaggttcgtctccaccatgccctgccccaggcgcttcgacctccactgcgagcacgaggcgggcaagacggagccaccgccgccgcaggcccacgtcgtcgagctcaccgctcacgaccgcctctatggagcctgtggccagtcataggccgacccaaacctgtggcccgccgtcgtgcaggtgcgccagcaccatgccagggtgccctgtgctgctggaaaccgagtgaagccggcagccgtcgccaaggagggtgccgctgccactgcgccgtagtctctggccagcacatccctggggacccgtccacctccttctttgtcttacgggaggagtgtcccgtcgtgctcccacatgcgcttgctgcagcgttcgtcaagaccgantaaatattctaggctatggggtaagtatatttgacaataacgacgacatgttntatagaaatacttcggccctaaacatgcatataataaacatgcata

SEQ ID NO: 21728 - DNA, 503 bp, Zea mays
  Clone ID: MRT4577_119811C.1
ctctccccgcacttcattggcgacgatcccctcccctcaccgccgcacggagatttgatccgatcccattctatccgtctgtggttgtgctgcacaacaactgacaagtaaaaaacaattcatgccctgccacagcgcaccgccgaaggatgccatcctactcctcaactgataatgaaaggggagctccactagctccaacctatcttccatatctacctaccttgcccagaattccactgacccatagctgcactaaatgactaccaagacaactgcctgtgccgatagtacctctgacataaaagacacgctaaacctctcgtgaacgaagatgaaggacaccatgctctgcgccatacttgaacgaaacccctcccagcatccacaaaaaaacgaatgggctcgtatcctgtgctaagcttgcatatggcatgagcaatgcatatcaaagaatgcgacttacgagtacggcctctcaatgtctcaccctatgaaaggca

SEQ ID NO: 21729 - DNA, 394 bp, Zea mays
  Clone ID: MRT4577_119812C.1
gagtgtggtggtgattctgctgctgcgggaggctgcacttgcggccggggctgcacaacctcttcctggtggcgctgaagacccgaaagaaaaaaaaaaaaaaaaaaaaaaaaggggggggccgcgaaaagaggcccccgggcggtccggacgcggcctagcgaaggactgagccttgcgttggggccgcctggatcaattccctgggccggggcttgacaccgcgggggcggggaaaaaccgggggggacccaaacccatgggcctggcggcccctccccccttggcctgggggattaaccccgattgggcccgaaccggtggccctgcccacagtgcgcgcataccgatcgggtgtcggccccccccctgtagggggccctttaagcccggc

SEQ ID NO: 21730 - DNA, 780 bp, Zea mays
  unsure (1)..(780): unsure at all n locations
  Clone ID: MRT4577_119813C.1
gacccgccattcctccacggtcgcattccctcggggccggcgcaccgcgctccaagcagcaatggcgttcgccgcggctgcgcggagaagcctcgcctcgcctagaatctccgattgcctctcccgccgcttccatccggcgctccctcaactgctcccatccaactccatcggcgatccccggaagccctcgccccttcctctcccacccgcaccgcgtccgttgcgtttctcgttctccccttgcgggacagctcaaaccctagacctcctcccattcggcatccacctcctcgccgggccaccccgccgcgggttctcctcctcctcccgcgacattgacttcgccgacgtcctcaccggcgccgccaatgcctggccgcccgtggctgccccggcgagcttccccggcgaggtggcgttggccgcgggggactcgtcgattgccgtcgcggcggtgcagcatctcatcgacgcggtccattccttcactggtggatttccattgctctacccacagtgctcttacggtctgtgtcgtgcccattgtggatgcttgccaggaaacgagtatatgaggtgtcaggagatgcaacaaaccagcaagttggtaaataatgctaaggacgatgtatcaagagaagaagctgagcgtgcagcatggtcttcactcaaaaagntaggttttgcgtcatatcttccactaattgtgacaccgtataccttgataactcttcacatcgctgtatcaaacatgggtgacaatgtcccatctttaaa

SEQ ID NO: 21731 - DNA, 234 bp, Zea mays
  Clone ID: MRT4577_119814C.1
tatatttttttctcacttgttttttttcggccaggtttttttaattttttgagcgttttcttaccacactaaagcgggaccagccccccaatacaatttggactttgttttctgttccaaacacaaatactcacaccccataaaaagggatgctggtacaaagcccacaaggatagcaacaccgtgggggggacttgaacacacgctaacaaacaaaggacgccgatgacaaaa

SEQ ID NO: 21732 - DNA, 269 bp, Zea mays
  Clone ID: MRT4577_119815C.1
tcagagccacccgtactgttccaagtctcatggaaagagtccgtcaccgactaacacgactgtgctcagtaagcagaggcgatcagcttagcatcagcgcaggaagaccctgccgggaaagacgatcacgctctaggtggacagcatcgacactgtcgaccacgtccaggccaaaatccaggactaggaagggattcccccagatcaacaattactgatattcgctggcaagcagctggatgattgactcacgctggcttactacaaca

SEQ ID NO: 21733 - DNA, 440 bp, Zea mays
  Clone ID: MRT4577_119816C.1
ctcttcttttaccgatggccaacgattccctcgcccaccacctgctgcttcctctcggcggcggctgctggtccgacgtggaggaggaggagccgagcaacgtctccttcccctcgttctggccgcccttccccgctctctcgccggaccccgactccgacgcagacagcttcgtgcgtccgcgcatggaccggccccgggagaccgccgcgtcgtccttcttcgggctcggcttccacgacggggaagacgacgagtgggcaccacccgacgaggatggggagctcgggctgcccctctgctgggactgcctgcagctggaggaccacgacgacgacgaccaccgaaggtgggacgtcggcgtcagcgacgcggacgagtgggagcaggtcgccggccgggaggaggaggctgacactgcggctgcgtctgcggcgccc

SEQ ID NO: 21734 - DNA, 2003 bp, Zea mays
  Clone ID: MRT4577_119817C.1
cgcataccccgtgttgccccggccggccccgcatacccatggaggccaccgcggtgccgcgggctctgtccctccttgggccatctctgtcgacggcgcagctgctgccttggatgcgtatgaactgcttgcgcgtagccgttggaggaggtgtcaggcggcaggggggcgtagtctgggcgaagaagacgagaaggggccgggacgacgtggcggaggagcgggtggacacgcacagctttgcgccaaaggccgtcctgcttagaaagaaaatggtgagagaggatggccaagtgtcaccagaatttgctgatgcaaatgaagaaaagctgtatgattttcttaatatccagctaaaaagcgatatgaaaagaaagaattcaaaggaggaatgtgctgtcgacaatgctctccgcttggacgatcctgctcttgagtccgggtcaggtcagcttagcagagacaaccggtggcgcattcagggagtatatcgacacgtttgacggctacaccttcctgtacccgaagaattggatccaggtccgtggagctggcgcggacatattcttcagagaccccatggtcctcgacgagaacatgtcagtggagatatcgtcgccttcgtcgtccaggtacacgagcgtcgaggacctcggcccaccggagaaggctgcagagaaggtcctcggtcagtacctgacggagttcatgtccaccaggctgggcgttcggcgtgaatccaacgtcttatcggcgtcatccaaggtcgctgacgatggcaagctctactacgaggttgaggtgaacataaaatcctatgcgagcaacaacgagctggcggtgatgccacaggacagggtgcagagcttggagtgggaccgccgatacctgtcagtgctcggcgtcgagaacaagcggctctacgagctccggctgcagacgcccgagcaggtgttcatgcaggaagaggaggacctcagaagagtcatggactccttcagggtcatcaaggcggcgtagtttgtcgatagtagagtgcacatgttttgtttttgtttgcttgtttgtttcttttgtacccgcagaaatgttcatatcacttgtttcttctgcagagcgcacatgtttccattcatgtctccaaagggatgtttacactttaaaataagtaagccaactatcagaaggttggtcactatgaagttttatctaattcatgaggaccgtgttgaagaattgaaatgttgtatcaaaagtacaagattttatcagggagaagaaaggaaggatatggaggcttaacaattgggggctgcgcaggcttgcttacaaaataaagaaagcaacacatgccaattacattttaatgaactttgagatagagtcaagatacatcaatgacttcaagaccctgctagacaaggatgagaggatcatcagacatctggttatgaaacgggatgaggcaattactgaagattgccctcccccaccagtatttcacactctgcgagctcaacaatattttgatgatgaatatgaagatgagggggaagaggaagaggatgaggatgctaggagtgagccaaagtctgccaattatgatgaggatgatgttgaagctgatgatgagcctgaaattatttatgtcgatgaagctgatgaggataattacgaagacactagaagaaggaacacaaagctaaaggtgaagaagtatacatcagagaaggtattgaggcagcattagtgtatggttttccacttagtttaagtctttttagctcttatagaaaggactatctgtgtctgtatgatgaggaagtttcacttaggtgtttttttctgatgccaaggaccactgcatgataatgagataggtatatgtgctatggttggtacagcccttgtaaatgctttctttagtgcacctttgtttttgtgcaactttattttccaaggaaaccaaaagcttaaatactatattattagtttgaataccc

SEQ ID NO: 21735 - DNA, 298 bp, Zea mays
  Clone ID: MRT4577_119818C.1
aaagaaaatgggcggtttacaacaccaccctgaaacatatttccatggacctcactaagaactaaactgatccgcccatcaacctatacactgaacctcatcaacaaatccatttaaaagcccgccaacaagaatagtgcctaaaactgcacacttgctatccattaacagactacccctcacatgcgcatgcaaagggctcactgccgttcacaccccaggccgtatagcccccaatgtcccgcacatcctttgggaccagccagacaggaacccccccagagggctcactgaaaac

SEQ ID NO: 21736 - DNA, 1154 bp, Zea mays
  Clone ID: MRT4577_119819C.1
cattgggtacctcgaggccggccggattttgtggcgcgtcggcgtcgcatacccatggaggccaccgcggtgccgcgggctctgtccctccttgggccatctctgtcgacggcgccgctgctgccttggatgcgtatgaactgcttgcgcgtagccgttggaggaggtgtcaggcggcaggggggcgtagtctgggcgaagaagacgagaaggggccgggacgacgtggcggaggagcgggtggacacgcacagctttgcgcgaaaggcgggcgagtctgccgagctgttccccgaggccgtcctgcttagaaagaaaatggtgagagaggatggccaagtgtcaccagaatttgctgatgcaaatgaagaaaagctgtatgattttcttaatatccagctaaaaagcgatatgaaaagaattcaaaggaggaatgtgctgtcgacaatgctctccgcttggacgatcctgctcttgagtccgggtcaggtcagcttagcagagacaaccggtggcgcattcagggagtatatcgacacgtttgacggctacaccttcctgtacccgaagaattggatccaggtccgtggagctggcgcggacatattcttcagagaccccatggtcctcgacgagaacatgtcagtggagatatcgtcgccttcgtcgtccaggctgggcgttcggcgtgaatccaacgtcttatcggcgtcatccaaggtcgctgacgatggcaagctctactacgaggttgaggtgaacataaaatcctatgcgagcaacaacgagctggcggtgatgccacaggacagggtgcagagcttggagtgggaccgccgatacctgtcagtgctcggcgtcgagaacaagcggctctacgagctccggctgcagacgcccgagcaggtgttcatgcaggaagaggaggacctcagaagagtcatggactccttcagggtcatcaaggcggcgtagtttgtcgatagtagagtgcacatgttttgtttttgtttgcttgtttgtttcttttgtacccgcagaaatgttcatatcacttgtttcttctgcagagcgcacatgtttccattcatgtctccaaagggatgtttacactttaaaataagtaagccaactatcagaaggttggtcaacat

SEQ ID NO: 21737 - DNA, 1464 bp, Zea mays
  Clone ID: MRT4577_11981C.1
aaaccatccggctacagcaagcaaccgtagcagtcgtagatgtgcagcgcgcgcagccaattccttcttactcccccgggccttccctctgtctctctcctcttctcttcagatcgacgtgctggttgcagagtgcaaactgcgtatataatatacagttcgttgttcttccagctccgcacataaagatagatagatatacagggaaaaagtgtagtagctggagcagaagctagctagcatggggctgcgggacatcgagctcacgctgccgccggggttccggttctaccccagcgacgaggagctggtgtgccactacctgcacggcaaggtggccaacgagcagctcgcaggcgccggcgcagccatgggtggaggtggatctgcacgcccacgagccgtgggagctccctgacgtggcgaagctgagcaccaacgactggtacttcttcagcttccgcgaccgcaagtacgcgacggggcagcgcacgaaccgcgccaccaggacgggctactggaaggccaccggcaaggaccgcgccatgcgcgacccggccgcccgcgccgtcgtcgtcggcatgcggaagacgctcgtcttctaccagggccgtgcccccagcggcgtcaagtcatgctgggtcatgcacgagttccgcctcgactcgccgcgtacgacgacgacgccaccgaaggaggactgggtgctgtgcagggtgttccagaagcggaaagtcgacggcagcgagcaagacaacggcgtcttcccctcgccgccggtctttgccggcacatcgcagtcgcagggggtcgtcctgccgccggaccagcccagcgtggtggacgcgtacgtcgtagtagaccagccgggctcttcttccgtcggactcgcgccgccgcaggagaacctcggtagcggcctggacgcgttgctgacgaacggagcgatgtggcagtacacctcgtcggtcttcggtcacttgttgccgcaggaggcgaccagctccccgccggtgatggacctaggctccaggggaggaggaggaggaggagactacgggtgcagcttcttctacgacagcagcttcgaggacatggccaacatcgggttccgacaagggtggatgggctgatccaggaccaggaggcacacgtacgtgcgtgcagtcatgcgatatggaatgtgcatttgtgaaggaagtgattgaattgattccattagtagtagcaccctctagtgttgtacagtaggtacgtatagtgtgagattggattattgggaattgttagagtgcacgggcctctcaaatccaaagaagtaacagcggaaagaaaagctagtagctagagcacacatgtatatttgcacaaggtagatggtttgatcaaccgcatgacacggcaattgtatatatctctccacccctactaccatgtttgtaaataaattaatataaatcaatc

SEQ ID NO: 21738 - DNA, 287 bp, Zea mays
  Clone ID: MRT4577_119820C.1
ctgggaagctcgcagaatgccagaagacaatctgcttctctggtatcgtgaaatcaaatcactgacagatctcgacagtgtggagctagagcctgaaaggcttgaatccagcagggacatgccactgccactggacttcataaatggcgatgctgaatctgctatgtggtgcggatgacttgtactactttgaccttgcaaacaacgacactagcttcttttatccactcgcgcactgcgtccagccctacactccacactctgagatggctgaatttgcatggggg

SEQ ID NO: 21739 - DNA, 793 bp, Zea mays
  Clone ID: MRT4577_119821C.1
aattcggcacgagggtcaggcggcaggggggcgtagtctgggcgaagaagacgagaaggggccgggacgacgtggcggaggagcgggtggacacgcacagctttgcgcgaaaggcgggcgagtctgccgagctgttccccgaggccgtcctgcttagaaagaaaatggtgagagaggatggccaagtgtcaccagaatttgctgatgcaaatgaagaaaagctgtatgattttgttaatatccagctaaaaagcgatatgaaaagaattcaaaggaggaatgtgctgtcgacaatgctctccacttggacgatcctgctcttgggtccgggtcaggtcagcttagcagagacaaccggtggcgcattcagggagtatatcgacacgtttgacggctacaccttcctgtacccgaagaattggatccaggtccgtggagctggcgcggacatattcttcagagaccccatggtcctcgacgagaacatgtcggtggagatatcgtcgccttcgtcgtccaggtacacgagcgtcgaggacctcggcccaccggagaaggctgcagagaaggtcctcggtcagtacctgacggagttcatgtccaccaggctgggcgttcggcgtgaatccaacgtcctatcggcgtcatccaaggtcgctgacgatggcaagctctactacgaggttgaggtgaacataaaatcctatgcgagcaacaacgagctggcggtgatgccacaggacagggtgcagagcttggagtgggaccgccgatacctgtcagtgctcggcgt

SEQ ID NO: 21740 - DNA, 745 bp, Zea mays
  unsure (1)..(745): unsure at all n locations
  Clone ID: MRT4577_119822C.1
ccccatcgccggctgtgggtcaaggaccggtcgcaggcgtggtgggaccagtgcaacagccccgacttcccggaggcagagtttcggcgcgccttcaggatgggccgggagacgtttgacatgatctgcgaggcgctcggctccgcggtggccaaggaggacaccatgcttcgcgcggccatccccgtgcgccagcgcgtcgccgtctgcatctggcgcctcgccaccggtgagccgctccgcctcgtctccaagcgcttcggcctcggcatctccacatgccacaagctcgttctcgaggtctgcggtgccatcaagtccgtcctcatgccgcgtttcctccagtggcccgacgaggccgccgccggcagattcaaggagggcttcgagagatccttcggtgttccgggggtcatcggagccatgtacaccacgcacatccctatcatcgcgcccaagatctccgtcgccgcctacttcaaccgtcggcacacggagcgcaatcagaagacatcctactccatcacngctccagggggtggtcggncctgaccgcgccttcaccgacgtctgcatcggctggccgggttccatgccggacgatcaggtgctcgagaaatccatgctgcaccagcgcgccgcggcgggtatgatgcacgacgcttgcctcgtcggcggcgcaagctacccgctcatggactgggtgctcgtgccgtacacgcaccagaacctgacatggacgcag

SEQ ID NO: 21741 - DNA, 1160 bp, Zea mays
  unsure (1)..(1160): unsure at all n locations
  Clone ID: MRT4577_119823C.1
ccttatccttctcctcgcccgcatttcatttcgttcggcgtccccacacggccacaccggaaaaaagaccccggcaagaacctcgctctccggcgtctccggccaatacccatggaggccaccgcagtgccgagggctctgttcctattcgggacatcgccggcgccgtatcgtatgcgtatgaactgcttgcgcgtagctattggaggagatgtgaggcggcagggggccgtggcagtgtgggcgaagaagaagagggggagggggcgggatagcgagacggaggaacgggtggacacgcacagcttcacccccaagccgggcgaggctgccgggctgttccccgaggccgtcctgcttagaaagaaaatggtgagagaggatggtcaagtgtcaccagaatttgctgatgcagacgaagaaaagctgtatgattttcttaatattgagctagaaagtgatttaaatctgaaaagaatgcggcactatgaagtagtttatctaattcatgaggaccgtgttgaagaagttgaaaatgttgtatcaaaagtacaagattttatcagggagaagaaaggaaggatatggaggcttaacaattgggggctgcgcaggcttgcttacaaaataaagaaagcaacacatgccaattacattttaatgaactttgagatagagtcaagatacatcaatgacttcaagaccctgctagacaaggatgagaggatcatcagacatctggttatgaaacgggatgaggcaattactgaagattgccctcccccaccagtatttcacactctgcgagctcaacaatattttgatgatgaatatgaagatgagggggaagaggaagaggatgaggatgctaggagtgagccaaagtctgccaattatgatgaggatgatgttgaagctgatgatgagcctgaaattatttatgtcgatgaagctgatgaggataattacgaagacactagaagaaggaacacaaagctaaaggtgaagaaatatacatcagagaaggtattgaggcagcattagtgtatggttntccacttagtttaaagtcttttagctcttatagaaaggactatctgtgtctgtatgatgangaagtttcactangtggttttttctgatgccaaggacactgcatg

SEQ ID NO: 21742 - DNA, 833 bp, Zea mays
  Clone ID: MRT4577_119824C.1
ggcgtcgcatacccatggaggccaccgcggtgccgcgggctctgtccctccttgggccatctctgtcgacggcgccgctgctgccttggatgcgtatgaactgcttgcgcgtagccgttggaggaggtgtcaggcggcaggggggcgtagtctgggcgaagaagacgagaaggggccgggacgacgtggcggaggagcgggtggacacgcacagctttgcgcgaaaggcgggcgagtctgccgagctgttccccgaggccgtcctgcttagaaagaaaatggtgagagaggatggccaagtgtcaccagaatttgctgatgcaaatgaagaaaagctgtatgattttgttaatatccagctaaaaagcgatatgaaaagaacaactaatatttctgcagttcaaaggaggaatgtgctgtcgacaatgctctccacttggacgatcctgctcttgggtccgggtcaggtcagcttagcagagacaaccggtggcgcattcagggagtatatcgacacgtttgacggctacaccttcctgtacccgaagaattggatccaggtccgtggagctggcgcggacatattcttcagagaccccatggtcctcgacgagaacatgtcggtggagatatcgtcgccttcgtcgtccaggtacacgagcgtcgaggacctcggcccaccggagaaggctgcagagaaggtcctcggtcagtacctgacggagttcatgtccaccaggctgggcgttcggcgtgaatccaacgtcctatcggcgtcatccaaggtcgctgacgatggcaagctctactacgaggttgaggtgaacataaaa

SEQ ID NO: 21743 - DNA, 1191 bp, Zea mays
  Clone ID: MRT4577_119825C.1
tagagtaagtgtaaaaaattaatgcatcaatgccaccaatatcactgttagcagaggctacggaggcagagggaagagcagggaagcacaggtaggagagaagcttagagaagaagatggtggtaaatgagtgttctcttttcttgttctcgtctcgttcggatacaacgatacatatagaagctcatgggcttagcgagatacaattctagcgcacccattctgggcccgtaacacggctactgggcctagccgtcctcttaggccttgaaacctgcacttcctctgctcccatgtctccatcagtagctgaaggcgtagatgtctgaagtgtattgtcttgagtgctgacattgcccccgccttgagcgccggcttgcccccaagcaggcgctaatgggaaacgttgccgaagtgcttcgagatcttcccaggtggctagcgacggtgagagtgacgaccattggatcaatccttgctgcacagcacgtaatccgcgcgacaccacacgacgctggagaacagcaacaggaatctggaaggggtcagatatatctggtaaatctgaggatacctgtgtagctggttgaaccacccgtttcaactgtgaaacatgaaatacagggtgaactgatgaagaagaaggcagctgcaacttataagctgtggcgccgatcctggacaagatgcaataaggtccaaagtaacgaaaacccaatttctgattagcacgggaggaaacggaggactgcacatagggctggagcttcacaaataccaaatcccccacctggaacgtacgttcagagcgttgcttatcagtttggtgtttcatacgctgtttagcacgtagaagatgttggtgcagcagttgatgaatgcgttctttctcctggagaaattcagtcaggtctgtggaagatgaatccaatgcctgtgccccaaaatgtttgggctgatacccataaagggcttcgaacggtgatcgaccaatggaagagtggtgactggtgttataccagaattctgctgcagcaatccaactagcccacttagtcggacatgcatgaacaaagcatcgaagataagtctccaggcactggtttaccctttccgtctggccgtctgtttgagggtggtatgagctgctcatgcgaagactgaatcctgcgagattgaaaagctgcttcc

SEQ ID NO: 21744 - DNA, 518 bp, Zea mays
  Clone ID: MRT4577_119826C.1
attgaaacgagcaaagtatcacccactgcaggatagtcatacaagtggaactatcaatgagccacgtgcaaagaggaagaaactgaaatgagccatacggtttgcctccggactcaagattggacagcgcagcgaaccggcttcatccttggtctctctgtccatgcgcgcacatgaagtcacgaaaggtgctatattatgatataggaccaggaggcacctcggctgtgcaattctttgccatttttccaggcacgaaggtgctgtgctattatgaggaagcacctcgggtgtttccatatattgctgaaagtgtccacggatgctgtacaccgtccaccgcccagatagttccgcagcagaaaggtgccgactattcctatcgtggaattgtttatcctccacgaagctgtgggctattgctgaagcttaccagatttgactttgaaaaccactactagtagcttctagcttgtacacaactaggtactccctccgttttctttttattagtcgct

SEQ ID NO: 21745 - DNA, 137 bp, Zea mays
  Clone ID: MRT4577_119827C.1
taaatataaataaaacccaatggttgagcacagaacacttcgcaacataatagcattatagcatatacaccgaaattgggcgaatagcgttgtaaaccacagaaggtttttttgaacaggggtggccaatagggggc

SEQ ID NO: 21746 - DNA, 548 bp, Zea mays
  unsure (1)..(548): unsure at all n locations
  Clone ID: MRT4577_119828C.1
gcgggctggggttgggggtgtgttttaataataataaacatctcttaagggatgagatgagttcacaatagttagcgtggggatccaccatagcattccacatatgagtacagtggcgtgggtgcgaacaagcttcaactacttactantgcnaaacctaaggcgggagagaccgagtcatgagtaccaggacatgggtccaccatgagttggcttcatggggtaataggctgcgtaccgagtgagtttgagtgagcaaatgagagagctgaggggcctggatgcgaaatgaggcgtctacaggatcttataacctttaagagagtgcgcagtatccatctcaacagaatccgcgcgcgatctggtaggggagataacttcagtgaggcatcattcaggcgccagaaaattaccagaaaaatgagtggacacagcgacacagagcgaggatgaaggggtctagtgcgaaatcttgcggcgggcgtccttctgggtggtgtgagaagggttctccttgggggggatgatatccttgggtgcgtcaacca

SEQ ID NO: 21747 - DNA, 477 bp, Zea mays
  Clone ID: MRT4577_119829C.1
catttacatgcagcatccgttaattcattaacgtgcaaggggcttcgcttttagacccaaaactgaagctcagtgcgtagagcatgtagttttgagttctctatttgtttaaatagtactagtggattaagatagttcgtttgcctatttgttatatccatttgtatgcagcctgcactaattcatctagttggaaggggttttgctcttggacctgatacatctgaagatcaacatgtatttgttgtagttcagtgtcccacaagagctatgtaattggtcactcgtttgttttaatggtgctagcgacctggattaagctttagagaaatcttaaagctgtttcatgtgtatgctatagtttgattgatagactgtgttgtagttcagtgtcccacaagagcatatgttgctcctttctttaagaaaataatactagcatatttgatctggtaacagtgatgcacctttgcacct

SEQ ID NO: 21748 - DNA, 2776 bp, Zea mays
  unsure (1)..(2776): unsure at all n locations
  Clone ID: MRT4577_11982C.1
cattgggacctcgagccggcggggcccctcgtctagtggtcaggaatctctctttcaaggaggcagcggggattcgacttcccctgggggtaccaaacatcgccccgaccaaagcttccccagacggcaggagacagcagcaggccggacgccggactcctcctccctcccccgtacgcatccactgagatccttcctgtgcgaaggaaatctccagttcttcggccccggccaggttttcaagtgttgcttgccccgccggagttttcctctaacccgcaagtccaattggctaagaagttgatgggatcggggggacactggaaggctgtgtgagatcgcgaaggggaccgtgaattccttgcagggctgcggcgattcggctgcgctgctgtatgaactgtttcgtgaacctgggactcaactcgaactcgaaccactacgtcgcctgcctcctcatcttcctgctgcatttctccccccagttgttaaatccatccaattctaattcaaatagtaattgtgaaggagttcaacagagctgcacagatggcgaacaacagggaacatgcctcactactaaccctccatggtggagggggtagaggagttggcagatgtgagaacaacaggcgatctcggcaatttcacaacttggctcatatggtgaaaatgctaggagaaagccacacacaccatctgctattgttattggtggattggtttgctggtcttgctgctgctgatgctctcagaaatgcatccttccaggttattctactggaatctcgtgataggattggtggcagagttcacactgactactcttttgngtttccggtcgatttgggagcatcttggcttcatggggtctgtgaagaaaatcccttggcaccaataattggaagtggactcactgccaagtggtgatgattctgtttgatcatgatctgagagttatgcactctatgacactaacggacgccaagtaccacaagagttggtagaaaagcttgggaaggtgtttgagaagactggaagcctccgctagactggcaaattgagggaagaaatcaatgaagatatgtctatcgcaaaagccatcgcaaattgttatggccttagaaatccgcacttgatgtttgaagcaaaaggctacatgtggtctgtggacgctggccagcgccacacataactggaaggcttaactttcgcttgcaccggagaacaaaagaggacaccatggtgattgactcttgtctggatcgttacgctcgttatgactgtcacatgcgacaagtacgtttgcagtccgtacgcaatcttgcgaaggcacttgaggagttgctggcagagactggctaattgagggatggcttccgatgatgagatgtcattcgcagaagcctgtgccttatttaatgctactgttgacgggatgtaggaggtgcggcttgctcatgaggttcttcagtggtatttgtgccagtatggagggttagtttgactcggacacgggttcaatttccctccgaggttgggatgaggaggtgctgcttccaggtggccatggcctcatggttcgtgggtatcgtccagttataaatactctcgcaaaaggcttagatatacgcctcaaccataaggttgtggaaattgttcgccacaggaacagggtagaggttactgtaagcagtggccaaacatttgttgcggatgctgctgtggtcactgttccgttgggtgtcctgaaagcgaaaaccattaaatttgagccgaggctgccagagtggaaagaagaggcaatcagagaactgacggttggagttgagaacaaaattgttctgcacttcggccaggttttctggcctaacgtggagttcctcggcgtcgtttcctctagcacgtatggttgcagctatttcctcaaccttcacaaggcaacaggccaccctgtccttgtctacatgcctgccggccgccttgctcgtgacatcgagaagacgtcggacgaggctgctgcccagttcgccttttctcagctgaagaagatccttcccaatgcagctgagccgataaactacctggtgtcgcgctggggctcggacgagaacacgcttggttcgtacacgttcgatggggtgaacaaaccccgtgacctgtacgagaagctgcgcatccccgtggacaacctgttcttcgcgggagaggccacgagcgtcaagtacacgggcacggtgcacggcgccttctccacgggtgtcatggcggccgaggagtgcaagatgcgggttctggagcggttcagggagctcgacatgctggagatgtgccaccctgccatgggcgaggacagccctgtgtctgtcccgctgctcatctctcggctctaaaagcagacgagtagtagttgtgtatgggatggatcggcacctgagagtaggctgggacatcccactgattgccggagggaagcagggaggaagaagctcccctcgcttcgcttctcctcggcatgaggcatgtgcctggcgttacttgtggcgtgccaagtgccatatttccctaaacttattctgcgtgggaaccctctattatgtatgtatactgtgaatttgtgactgttcaggtaacacgagttatcgtgacatcttcgtagagaaagataccgtatgtatgatgtatgtatgatatacatatgatattatgatcaacaattgtagtagtagtaataataaataatacatatatgtgacttaactgtttggagtaaaaa

SEQ ID NO: 21749 - DNA, 162 bp, Zea mays
  unsure (1)..(162): unsure at all n locations
  Clone ID: MRT4577_119830C.1
aaatgtgnncactcgtacgnnnngctcggnattcggctcgagggnccancnagcangntggnaggtagcanccattnntcnnnactanngcnacantcagcgatngaggcnantttnccnncntgtgctccgnggncttnctncatgtgttgctaactngcg

SEQ ID NO: 21750 - DNA, 249 bp, Zea mays
  Clone ID: MRT4577_119831C.1
gcacgaggtttttttatatataatttggaccggagtagatgcttgtttactttctaaggttgacatgtgcataatttgattgttcaatgggccatgggcttcatcccgttgccacggcccgacggcaagcgagcccagaccaaaaccctacacgacggcggatggctccgacgcctacaaatacacgaggctggatggcggaccctctgccctccactcaaattactctgccgccgccaccttcgccac

SEQ ID NO: 21751 - DNA, 1323 bp, Zea mays
  Clone ID: MRT4577_119832C.1
ctcgccggggcggccgtttggtatcctgtggatacggggctgtttgtacagcatcctttgaccagcttgtcaaagtttgggatacaaattcgactcaagtcgtcatggaatttaagatgcctggaaaagtgtacactgcagccatgtctccaatcgcaacaacgcacgtgctcattgctactgggagtgcagatgttcaggtccgtctatgtgacattgcttctggagcctttacccacacgttgtctggtcatcgtgatggtatcatgtctttggagtggtctgcctcaagtgaatggattttgatgagtggtggctgtgacggggcaatacgtttttgggacattagaagagctggatgctttcgggttctggaccaatcaaggtctcaacttggaaaaaggccccttgttaaaagtgctctatataaggatcacacagattccttaggaccttcaccttccgcaaggagaaggacaggcatttctaagaagagttcatcagctttgcgcaaaattcaaaacccgacacatggacacatgcaacagagattgcatcctggtttgtcatctagtcaaaaccgtgctactgctcattatggtgctgttactggtttacgaacaactgcagatgggatgtaccttcttagctcaggatctgattctcgcttaagactatgggacatcgattcaggctgcaatacgctggtcaattttgaagctatgcgattgcagacagtttgccatttgcggaagcattcttgaggttcacatttcaccgttgttatatatgcttaggcatacaatttatggtctggtaaaacatttcaaacattccgggggcactatgaacttgtgaattgctgctactatagtgaacaggaccaagaactttatactggcagcaacgacaggcaaattcttgtgtggtctccatcaactccagcttttactaaaatggaagatgatgacaagatcctttctgcagctgatgaggataactggagcgactgagaaaccctggagccgggaggagtgtgtcttgtatctactcacatcgatgttagtgatgttaacaaataacatgtcgaggttgttaggtcttgttagcagcccctaaatgataatattgtcttggtgtattttcaaaaatatgtacattaccatgtgtaaatttgacagatcattgaataatttgtagatttatctcaggaggatagagggatgtttgaggttcgccaaaatgttgtttggccctggagccttgttttcttcactgtctattaatgctttacccgaaaaaaaaaaaaaaaaaaggccccta

SEQ ID NO: 21752 - DNA, 228 bp, Zea mays
  Clone ID: MRT4577_119833C.1
ggcatatcaccaaaggggtttttatgtcacttattaccattatgtcactccccccaagctggattactggaaatccaaatgaagggtgagtaacccttaaaaggttttactggcaacacatttcctggaagcctgggttcagctcccaacaaccatggggggcccattacttccactttttgaacttgccccccccaaacatgcccggccccggcttgccatgcttga

SEQ ID NO: 21753 - DNA, 593 bp, Zea mays
  Clone ID: MRT4577_119834C.1
gggtacctcgaggccggccgggctcagtctctccacgcgcgcgctgtgcgcaggccagcacacgcacggacgacgacgcagcgagaggctcggaaggaggaaagagtcgccggcggagaccccaatcgatcgaaggcccccggtcgcttcgcccgcgaggcatatcagtgcccccttggccaccgggtatcttcggacttgaatcagaaagggagaagctcaaaagatacgaaggttgacacagtgccgaagctgtgaagcaggaaagcttcggcatgttcgcagaaaggggaaccgacttaaagatgaaaaggccatttagacctcgatagaatgctatagaattatcaccaaatgtaaagggcatgtatgtaattttgtatgggttgtaccccgagcctataaataggtgaacagtacccccgcactgttcacgctaacttgtcatttgctttcgcatcacgcttgtacttttgccttccgcaggaccgaaggtacatttgtgattcaaagttatttatattcattagtacaagtagagataattctacgacaatatttaattgtttaaaaaaaaaaaaaaaaaagcggcc

SEQ ID NO: 21754 - DNA, 503 bp, Zea mays
  Clone ID: MRT4577_119835C.1
ttgtctctaatgctagctgcacaaccaaactgccttgctccgcttgctaaggtcatcaatgacaagttcggtattgttgagggtctgatgaccactgttcatgccatcactgctacccagaagactgttgatgggccctcatctaaggactggaggggtggaagggctgctagtttcaacatcattcccagcagcactggagctgctaaggctgttggcaaagtgcttcctgtcctcaatggaaaattgactggaatgtctttccgtgtcccaactgtcgatgtttctgttgttggtctgactgttaggcttgagaagtctgccacctatgatgagatcaaggctgcggtcaaggccgaggcagaaggtagcctcaagggcatcctgggttacgttgaggaggaccttgtttccaccgatttccagggtgacagcaggtctagcatctttgatgctaaggctggcattgtcttgaacggcaacttcgtgaagctcgtgtcctg

SEQ ID NO: 21755 - DNA, 2290 bp, Zea mays
  unsure (1)..(2290): unsure at all n locations
  Clone ID: MRT4577_119836C.1
gctaccgcataacaggacgtctctcccacttccggtgggcccgaaaccagcaacggtccagggtttccaaggtccaacgttccgaccaatgggaagcttctcgaaaccatcgaccgccccggtcgcgtttctcctccgggccccacttgtcacccgcacgtcctcacgtttccgccccaccatctcagccgaaaccaggttccgcgacttcgggtgggcctaaatgtggatggcgcgtgcctctgggtcgccaggttcatgatgagtcagtccccagtcccttttatatatggccccttcgatccattggccgcattacacactcgcgaaccccgtctcgatctcgtttgaaatccatccatcctcgtttcctccgtctcgcagcatctcaaccccatggccaagatcaagatcgggatcaatgggttcggcaggatcggaaggctggtggccagggtggccctgcagagcgacgatgtcgagctcgtcgccgtgaacgaccccttcatcagcaccgactacatgacctacatgttcaagtacgacaccgtgcacggacagtggaagcacagtgacatcacggtgaaggactccaagacccttctcttcggtgagaagccggttaccgtctttggcatcaggaaccctgaggagatcccgtggggtgaggctggtgctgagtatgttgttgagtccaccggtgtcttcactgacaaggagaaggctgcagcacatttgaagggtggtgccaagaaggttgtcatctctgctcctagcaaagatgcacccatgtttgttgttggtgtcaacgaggaggagtacaagtctgatgttaacattgtttccaatgctagctgcaccacaaactgccttgctccccttgctaaggtcattcatgacaacttcggcattgttgagggtctgatgacaactgttcatgccatcactgccacccagaagactgttgatggaccctcagccaaggactggaggggtggcagggctgccagctttaacatcattcccagcagcactggagctgctaaggctgttggcaaagtgcttcctgtccttaacggaaagttgactggaatgtctttccgtgtcccaaccgtcgatgtttctgttgttgatctgactgttaggcttgagaagtcagcaacctatgatgagatcaaggctgcggtcaaggccgaggcagaaggtagcctcaagggcatcctgggttacgttgaggaggaccttgtttccaccgatttccagggtgacagcaggtctagcatctttgatgctaaggctggcattgccttgaacggcaacttcgtgaagctcgtgtcctggtacgacaacgagtggggatacagcacccgcgtggtcgacctgatccgccacatgaacagcaccaactaaatgaacaaactgatgaactcatgcaaggtctggtgaaagcatgcaaagagagttgtgtttcttccccggaagtgcttccgagaataaannnnncttatctgattgtctaaaacctataattggtgtaatggtatcgtagtggttggttgagcattgagtgactcatattttgtcaggtctatgtgttatcgttaaacttttaacggtcattctatttcaaaagttttgcattttgctctctttgacgctccattgccgtgctaannttttgctgctgtcgagggaaagggcctctagctgagttggttaggtggtctgagtagcactcctcaggtcctgggttcgactccccgtgggagcgaatttcaggctgtggttaaaaaaatcccctcgtctgtcccacgccaaagcacaggtctaaggtttagccccgatcggggtcgttctcacatgagcttcaatgtcgctgtgtatggggggggcaaaggttcgggggttttcttgacctgtgtgaaaaaatcttcttcttaatacaatacccggggttgtcttaccccccgcaggtaagttttattctgctgccgtcgttcacaagcgccgaagcgcgccctcctgcacacgcggggggcctggcgcagggtctgcgcgggttgcttccggcagcagcaaccacaggcagttaatggttgaagctgcagccgcagccggtgatgatcagggttttcaagtcgtcgtccgaagtcggtttctgtagcccgattaggtgtcctggtccctcgtcatattttttatggacagttttgtattattttttaaataaagtttgcctctaaataaattatgtcttcaccaccgtaaaaaaaaaaaaaaaaaagcggcc

SEQ ID NO: 21756 - DNA, 622 bp, Zea mays
  Clone ID: MRT4577_119837C.1
cttttattgaaagtggagggttcaagatttgtcctcttaagtgtcgcaatggaataccccggactcaggttcagcaccttatgcagattgatctgaagggatggttcttgaactactctacccggtttcaggttcattcccttatgcagatactgaactgtgttgccgatgatattcatataactccaaggattcctgcaatggagagcatggctgatgtgaatttagcacaaaaggacgagaagcttaaagaagttgactccaaaactaaaccagaagatcaacaacaagcagaaaataaaaatatgggaacaattgatgaagaatcagatgacgatgaggactatcatgttcctgaagctgatatagaggaaatcactaacaaatctgacaatgaagctaaacacacagatgagcctccagaaaaaattgatttatcttgcttttctgggatacttcatcatgatccggatgagaaaagccgcaactgttggacagtacctgatagcacgcttttcaaaggttcgtagcaagaatttcccaaatgacaaatcgaagatacctgctgccagtaatctcatggagcttgcagccattgattgttctaggacaccaagcgtat

SEQ ID NO: 21757 - DNA, 2097 bp, Zea mays
  Clone ID: MRT4577_119838C.1
gggtaccgcggctctccctcgagtttttttttttttttttttttttttttttttttttttttttttttttttttgggggaaaatgcaaaacttttgaaatataatgaccgttaaaagtttaacgatgacacatagacctgacaaaatatgagtcacttgatgctcaaccaaccactacgataccattacacccgttataggttttagacaatcagataagaaaaatttattctcggaagcacttccggggaagaaacacaactctctctgcatgctttcatcactctttgcatgttttcatcagtttgttcatttacttggtgatgttcatgtggcggatcaggtcgaccactcgggtgctgtatccccactcgttgtcgtaccaggacacaagcttcacaaagttgccgttcaaagcaatgccagccttcgcatcaaagatgctagacctgctgtcaccctggaaatcgggggaaacaaggtcctcctcgacataacccagaatgcccttgaggctaccctctgcctcggccttgaccgcagccttgatctcatcataggtggcagacttctcaagcctaacagtcagatcaacaacagaaacatcgacagttgggacacggaaagacattccagtcaactttccattgaggacaggaagcactttgccaacagccttagcagctccagtgctgctgggaatgatgttgaaactagcagcccttccacccctccagtccttagatgagggcccatcaacagtcttctgggtagcagtgatggcatgaacagtggtcatcagaccctcaacaataccgaacttgtcattgatgaccttagcaagcggasaaaggcagtttggttgtgcagctagcattagagacaatgttgatgtcagacttgtactccttctcgttgacaccaacaacgaacatgggggcatccttgctaggagcagaaatgacaaccttcttggcaccacccttcaagtgagctgcagccttctcctggtcagtgaaaacaccagtagactcaacaacatattcagcgccaaccgaaccccatgggatctcctcagggttcctgcagccaaacacagtaacctccttctcaccaaagagaagggtcatggagtccttcaccttgacctcatggtgcttccactgtccgtgcacagtgtcatacttgaacatgtaggtcatgtaatcggtgctgatgaaggggtcgttcacggcgacgagctcgacgtcgtcgctctgcagggccactctggccaccagcctcccgatcctgccgaacccattgatcccgatcttgatcttggccatgagggtgagaggctgctagacccttctctttggtgagaaggaggttgctgtgtttggctgcaggaaccctgaggagatcccatggggttccgttggcgctgaatatgttgttgagtctactggtgttttcactgaccaagagaaggctgcagctcacttgaaaggtggtgccaagaaggttgtcatttctgctcctagcaaggatgcccccatgttcgttgttggtgtcaacgagaaggagtacaagtctgacattaacattgtctccaatgctagctgcacaaccaactgccttgctcctcttgctaaggtcatcaatgacaagttcggtatcgttgagggtctgatgaccactgtccatgccatcactgctacccagaagactgttgatgggccctcgtctaaggactggaggggtggaagggctgctagtttcaacatcattcccagcagcactggagctgctaaggctgttggcaaagtgcttcctgtcctcaatggaaaattgactggaatgtctttccgtgtcccaactgtcgatgtttctgttgttgatctgactgttaggcttgagaagtctgccacctatgatgagatcaaggctgcggtcaaggccgaggcagagggtagcctcaagggcattctgggttatgtcgaggaggaccttgtttccaccgatttccagggtgacagcaggtctagcatctttgatgcgaaggctggcattgccttgaacggcaactttgtgaagcttgtgtcctggtacctc

SEQ ID NO: 21758 - DNA, 1771 bp, Zea mays
  Clone ID: MRT4577_119839C.1
gcttcaggggtcgaggatgccaagtggcagggctattttagcatgtggacggttcaagatttgtcctcttaagtgtcgcaatggaagaccccggactcaggttcagcaccttatgcagattgatctgaagggatggttcttgaactactctactttctttcagtatcattctttactgtagatactgaactgtgttgctggtactgaaatactgtttttcttatgacacaaccattaacaactttatatttactatgaaagaacaaatgtaatttttaaattaactactcagcccgttgtcctgccaattcattctggtccttatggctctaatctacacttactcccagggctgcgtgaatatttttcccaaatagatgatattcatatcactcccacgcgtccggattcctgtaatggaaaccatgttcgatgcggattcagaaccaaaaaatcgtaagcttcaagaatttgacactaaggcaaatagaaacatgggaatgattgacgaagaatcagatgatgacgatgattatcaagttcctgaagctaatatagaggaagacgtgaacaaatctcatcatgatatcaagcgcacagatgagcctacagaaaaaattgatttatcttgttttttgagtattcttcatcgtgatcccgaggagaaaagtcgcaattgttggacagtacctgatagcaagatcttcaaagttcgtagcaaaaacttcccacaagacaaatcaaagatacctgcagcaagttatctcatggagcttgcagccattgactggtttaaggacaccaaacgtatggataatgttgccaggcagaagggttgtgttgctcaggttgctgctgatcgagggatgcatacatttgttgtcaacatacaaattcctggatcaactcagtacagcttggtcatgtattttgtcacaaataccttgagaaagggatccttactacaacgcttttttgatggcgatgacgaattccgcaatagcagactaaagcttataccatccgtccctaagggctcctggatagtgcgacagagtgttggaagcaccccttgtttgttgggaaaggctgttgattgtagttatgttcgaggtcctgcgtacttggaggtggacgttgacattgggtcttcggcggtagcaaatggagttttgggtattgtgtttggtgtggtgacgacgttagtagttgatatggccttcctaatacaggccaacacatacgaggagctaccagagcaggtgataggcgcagctcggttggctcatgttgaaccggccacagcagtagttcctgatcttagcaacacatcaaacgacagtagcaacagcaacaatgacaacaacaacaacaacaacaacaatgggtcctcagaggatgatttgtccaagaaaacaaactaattttattttaatctagtatcagagtgttgtgttgaacatctctttaattaatcttctagctagtcactcagtggaatccagagagccaataatatatgcttctctttgtaccagctttcttgtttatatattagatccaagtattatatttgtagctagaggcaacaatatgaatagtaaccgtggttatcctaaacttgtttgccgactaggaccgggagatggtttgtttgttttaagcttttactttttacaagacatgcctatctttattttccctttgcctttatctttgaactgctgctactcaagttgacaaggaaagcatgcatgcagtttggattagc

SEQ ID NO: 21759 - DNA, 428 bp, Zea mays
  Clone ID: MRT4577_11983C.1
acaagctttttttttttttttttttttttttttttaaacttaaactatatctcggccagggcggttttttgatataaaaatgactgtcggtggaccatgggtttggatggcgggggccctcttttctatagagagcgggctattaaaaggccgtgggctttttattgaaagagttgtaaaaaaaaagcgtttgccaaaacaaatcaattgcggaaaaaaaaaatttttttttgcgggggtatttagatagggcacgtgaaaaaaaagcttcccaatcccaaccccccctcaatgaaaaatgaaaaggccctcgcattggcaattcaccttaaccggtggggggggtaggtacactctgaggggtaccttctctttcgccctaacccaaaaacccgcccttttctttcgtttctttttttgccgcccca

SEQ ID NO: 21760 - DNA, 351 bp, Zea mays
  Clone ID: MRT4577_119840C.1
ggtcgatacacaactctacaatgagtcgtactacgcctgggatcacggattcacatccatcagcacagaatcgatcacatatgactgcatttgtccagaacctccttgggaagatgcaaacaacgttcaagtcgatgtcacatgacattgtgtcaaagataaatgatatgggaaccaatattgatgagctcgatgagagcatcaacgatctgaacgctgagatgggcaaggatactccggtcaagaagcctgatgagccaacgcctgctgacgctgcctaacatgggtgtaaccctgagattgttgtgttaggatttgataatcgtgtgacgaatttcagcaggacgtgat

SEQ ID NO: 21761 - DNA, 1499 bp, Zea mays
  unsure (1)..(1499): unsure at all n locations
  Clone ID: MRT4577_119842C.1
cctcgaggccggccgggccgggatcacactcgccaaccccgtcatcgatctcgtttcaaatccatccatcctcgtttcctccgtcccgcagcatctcaaccccatggccaagatcaagatcgggatcaatgggttcggcaggatcggaaggctggtggccagggtggctctgcagagtgacgatgtcgagctcgtcgccgtgaacgaccccttcatcagcaccgactacatgacctacatgttcaagtacgacactgtacacggacagtggaagcaccatgaagtcaaggtgaaggactccaaaacccttctctttggtgagaaggaggttgctgtgtttggctgcaggaaccctgaggagatcccgtggggttcggttggtgctgaatatgttgttgagtctactggtgttttcactgaccaggagaaggctgcagctcacttgaagggtggtgccaagaaggttgtcatctctgctcctagcaaggatgcccccatgtttgtcgttggtgtcaacgagaaggagtacaagtctgacattaacattgtctccaatgctagctgcacaaccaactgccttgctcctcttgctaaggtcatcaatgacaagttcggtatcgttgagggtctgatgaccactgtccatgccatcactgctacccagaagactgttgatgggccctcatctaaggactggaggggtggaagggctgctagtttcaacatcattcccagcagcactggagctgctaaggctgttggcaaagtgcttcctgtccttaacggaaagttgactggaatgtctttccgtgtcccaaccgtcgatgtttctgttgttgatttgactgttaggcttgagaagtcagcaacctatgatgagatcaaggctgcggtcaaggccgaggcagaaggtagcctcaagggcatcctgggttacgttgaggaggaccttgtttccaccgatttccagggtgacagcaggtctagcatctttgatgctaaggctggcattgccttgaacggcaacttcgtgaagctcgtgtcctggtacgacaacgagtggggatacagcacccgcgtggtcgacctgatccgccacatgaacagcaccaactaagattatgaagaactcaagtcaaggtctggtgatacgagcgagttgtcttcttcccccccgggagaaaagtgcttccgagaataaattttttccatcggaatgtctgaaactatgttgggtgtatcctagtggttggttgagcattaatggctcatattttgtcaggtctatgtgtcgccgtgaaacttttaatcaaatcagttcactcttttgcctcttgtcattgcgagttatttgaatttgtaacactatcgtcgcgcggcttcgccactttgtaactccgcagccgcgctttgccactttggtattatggacgaaacactcgtgccatttaggtacctccccgncggccgccgaagggagaatccagcacacggcggcc

SEQ ID NO: 21762 - DNA, 2344 bp, Zea mays
  Clone ID: MRT4577_119843C.1
ggcaaatgatttatgttctctgcgtttataaccagaaagagaaggagcatcaaatcacgatgggtgcacatgatattgaagatgcattggcctggaaaaagaaaatagatctcctcattgatcagcaaccagactctgcagttaaaacccataagtcgttcgctacaatagactttgacatggaccttggagggcagttctccttgtcagatcatgacagtgcatatgaagatgaagaggaacgacctaatttagttcgcaggacaattatagggaatggtcctcccgattcaatacatgattggaccaaagatgctgattttggtatgtccggtcagaatgagcccactcaactctattctaagaagaattggcgactacttcgatgccaaaatgggttgcgcatttatgaagaacttctggaagttgaataccttgcaagaagctgtagccgagctatgagggctgttggagtagtggaagccacatgtgaagccatctttagactgatgtttagcaaggatggaacaagatatgagtgggactgtagctttcgccagggtagtttagttgaagaggttgatggtcacactgcagtactatatcataggttgcagctgcattggtgtccaaggttgatctggcctagggatctttgttatgctccatattggcgacgtaatgatgatggaagctacgttgtgctattccggtctacagaacatccaaactgcatccgtcagcgaggatttgtgagagcatttattgaaagtggagggttaagatttgtcctcttaagtgtcgcaatggaagaccccggactcaggttcagcaccttatgcagattgatctgaagggatggttcttgaactactctacttcctttcagtatcattctttgctgcagatactgaactgactcgccgggctgcgtgaatatttttcccaaacagatgatattcatataactccaaggattcctgcaatggagagcatggctgatgtgaatttagcacaaaaggacgagaagcttaaagaagttgactccaaaactaaaccagaagatcaacaacaagcagaaaataaaaatatgggaacaattgatgaagaatcagatgacgatgaggactatcatgttcctgaagctgatatagaggaaatcactaacaaatctgacaatgaagctaaacacacagatgagcctccagaaaaaattgatttatcttgtttttctggtatacttcatcatgatcccgatgagaaaagtcgcaattgttggacagtacctgatagcaagatcttcaaagttcgtagcaaaaacttcccacaagacaaatcaaagatacctgcagcaagttatctcatggagcttgcagccattgactggtttaaggacaccaaacgtatggataatgttgccaggcagaagggttgtgttgctcaggttgctgctgatcaagggatgcatacatttattgtcaacatacaaattcctggatcaactcagtatagcttggtcatgtattttgtcacaaataccttgaaaaagggatcattactacaacgcttttttgatggcgatgatgaattccgcaatagcagactaaagcttataccatccgttcccaagggctcctggatagtgcgacagagtgttggaagcaccccttgtctgttgggaaaggctgttgattgtagttacgttcgaggtcctgcatacttggaggtggacgttgacattggatcttcggcggtagcaaatggagttttgggtcttgtgtttggtgtggtcacaacattagtagttgatatggccttcctaatacaggccaacacatatgaggagctcccagagcaagtgataggcgcagctcgtctatctaatgtggaaccgtctacagcagtagttcctgaccttgaaaataacagcgacggcaacaaagataacagcagtaacgacgctacgtcctctgaggatgattcgtcaaagaagaccaactgattcgacctttctttaaagatttcgaaagaccaactgattcgacctttatttgaagatttcgatgagagccgcaggttgtctagttcattttttctccttttaacctctgtgctgtgcacgtatcttcgcgggcttgcaccagattgcagtctggtacatctcctttggcgccttcaattgagtccagaatttcacatgatctcctgtatccttctccattacagtccgctcttgccttatccatgtacatgctgctaccagacttggtgtagatagtactatgtgatgaacacgttcaactcagtaaaaaagggccggacgtttcgccccagcttttttgtt

SEQ ID NO: 21763 - DNA, 599 bp, Zea mays
  Clone ID: MRT4577_119844C.1
aattgattgagaatatcgaacatatgtcggtaacttggctgtcttaacctcaaggtattttagttcttttcctaaagtcatgtactttgttgtccaatttgtttggtaggtttttacttgccttgtagggaagaggaaaaagaacatggggatgatgaggcatctgagaggacagatccacgtaaatcccttgaagaggaatatctagaaacagaaaagaagggtatactcagtcaccttactttaacttggtctcatacatggttcttaaagcgggaaggcgaggtaaggcattgaaccaccgctggacgcctaggcgccgccaaaggcgagcaaggcgacaccttatcaacatgagaaccagcaaaacagcagcatggaggagggacaaaaagaaaaaaaaagaaaaaaaggaaatggaaaaaggagaaggggttggagccccggccaaccggcaagcccatatgctcactctgtttgcctctctctcccccgattgagctgctgctttccttctcccccttttcagccacggattgcttctctcccccagattcagccgctgccactcatgatttcgccgccgccacccccgattt

SEQ ID NO: 21764 - DNA, 430 bp, Zea mays
  Clone ID: MRT4577_119845C.1
ggcggccggtcggcgggggcttcgccacaatcactgcgtctctggctcggcactcggacgtgcgcctgctgcataatgcaggaggaggacatgagcctgacacaagtgcacattgccggtcttgcggccatggagcatatccttgccctgaacagcgcgcacaaaggatcatacatctatgagtacaacagtacaacctccacagaggacgaggaccctgcagaggaccagggcagaaggaaacctatccaagatacggctgacatcaccgctgaatctttgggaacttcattgagatgcaacagtgggccatcatgcttgtgaagggcaatgcgccagctgaccacaccatcgctactctggaaagagactaggagcacggcgactgctttataaggggtgaggaacaagtggtaccagaacacgaaaa

SEQ ID NO: 21765 - DNA, 484 bp, Zea mays
  Clone ID: MRT4577_119846C.1
gacaaaaatcccgtatcacgttgcatgggaaaaatgggcgtcgtccctcagaacatcacattcctaaacactggcagtgagtggaactccccaatatcacatcatcctaagcgggagctagctagacttcaaacacaaatccggcagacgagacaacgcctacagctcgtccttgtcgtaggacggctccgactcctccttggtggactccttctcttcgatctcgggctgctcctcggcctcgtcttcctcctccacggtagcgtcggggctcaggtccaggctcttctgcaccgacttgtagatgctggacgcgaactccttggggtcggggaggttgaacccgctctccatcagggccgtctggtacaccagcctcgccgtgtgcttcagctcttcgctctcgttgtcctgggcgaccttgtcacgaagctccttgatgatggggtgcctggggttgatctcgagcaccctcttgccacgc

SEQ ID NO: 21766 - DNA, 2040 bp, Zea mays
  Clone ID: MRT4577_119847C.1
cattgggtacctcgaggccggccgggatggcccccacttgtcatccgtccatcctcacgtctctgccccaccattttaccggtagccaacaaaactaggttccgtggcgtcgggtgggaccagcaagcagccgccgcagccggcccccaggcgcctctatatacggcactccgactccgatacattggcgacatcacagatcacacacactcgagaactccatttcgatctcatttgaaatcaacccatcctcgtttcctccgtctagcagcctctcaccctcatggccaagatcaagatcgggatcaatgggtttggcaggatcggaaggctggtggccagggtggccctgcagagcgacgacgtcgagctcgtcgccgtgaacgaccccttcatcagcaccgattacatgacctacatgttcaagtatgacactgtgcacggacagtggaagcaccatgaggtcaaggtgaaggactccaagacccttctctttggtgagaaggaggttgctgtgtttggctgcaggaaccctgaggagatcccatgggggttcggttggcgctgaatatgttgttgagtctactggtgttttcactgaccaggagaaggctgcagctcacttgaagggtggtgccaagaaggttgtcatttctgctcctagcaaggatgcccccatgttcgttgttggtgtcaacgagaaggagtacaagtctgacatcaacattgtctctaatgctagctgcacaaccaactgccttgctccgcttgctaaggtcatcaatgacaagttcggtattgttgagggtctgatgaccactgttcatgccatcactgctacccagaagactgttgatgggccctcatctaaggactggaggggtggaagggctgctagtttcaacatcattcccagcagcactggagctgctaaggctgttggcaaagtgcttcctgtcctcaatggaaagctgactggaatgtctttccgtgtcccaactgtcgatgtttctgttgttgatctaactgttaggcttgagaagtctgccacctatgatgagatcaaggctgcggtcaaggccgagtcagagggtagcctcaagggcattctgggttatgtcgaggaggaccttgtttccaccgatttccagggtgacagcaggtctagcatctttgatgcgaaggctggcattgccttgaacggcaactttgtgaagcttgtgtcctggtacgacaacgagtggggatacagcacccgagtggtcgacctgatccgccacatgaacagcaccaagtaaatgaacaaactgatgaaagcatgcaaagagtgatgaaagcatgcaaagagagttgtgtttcttccccggaagtgcttccgagaataaatttttcttatctgattgtctaaaacctataattggtgtaatggtatcgtagtggttggttgagcattgagtgactcatattttgtcaggtctatgtgttatcgttaaacttttaacggtcattctatttcaaaagttttgcattttgcaatctttgacgctccaaaaaaaaaaaaaaaaaaaaaaaaaaaaaaaaaaaaaaaaaaaaaaaaaaaaaaaaaaaaaaaaaaaaaaaaggggggggccgaaataaaggggggccaagtcttaagggggggcgggatgcgaaagggcaaaagctttttctaaagaggggcccttaaaataaaaaaacgggcccgggggattaaaaaagggcgggaaggggaaaaaacctggggggtaaaaaaaatagaagggggggaaaaaaataacccctttaggaaaggggggtaaaaaaaaaaagggcccaaaacaaaaggcgctcccaaaaagggggcaccccaaaaggggaaagggaaaagccctggaggggggcaaaaaaaggggggggtgtgggggtgacccccaaagggaaccctaaaatggggaaggccctaagggccggggccttaggtttcttcccttttttttttgccaagtttggcgggtttccccgggaaggtttaaaaggggg

SEQ ID NO: 21767 - DNA, 621 bp, Zea mays
  Clone ID: MRT4577_119848C.1
gcttcaggggtcgaggatgccaagtggcagggctattttagcatgtggacggttcaagatttgttctcttaagtgtcgcaatggaagaccccggactcaggttcagcaccttatgcagattgatctgaagggatggttcttgaactactctactttctttcagtatcattctttactgtagatactgaactgtgttgctggtactgaaatactgtttttcttatgacacaaccattaacaactttatatttactatgaaagaacaaatgtaatttttaaattaactactcagcccgttgtcctgccaattcattctggtcctggctctaatctacacttactcccagggctgcgtgaatatttttcccaaatagatgatattcatataactccaaggattcttgcaatggagagcatggctaatgtgaatttagcacaaaaggacgagaagcttaaagaagttgactccaaaactaaaccagaagatcaacaactagcagaaaataaaaatatgggaacaattgatgaagaatcagatgacgatgaggactatcatgttcctgaagctgatatagaggaaatcactaacaaatctaacaatgaagctaagcacacagatta

SEQ ID NO: 21768 - DNA, 310 bp, Zea mays
  Clone ID: MRT4577_119849C.1
cttcttttttttttttttttttttttttttggggtttttttttttttttttggggttttttaaacgggcaaggggtatgggaccaaatggggccggccggaccgggggtaaccccccgccaagctttttttggaaaaaaagaaacacctttgggggggaacccagtttgtttatttttagagttattcaattatttgaccccgtaaaaaaaaaatcttttatttagggtttaaatgcttatttcgggccagagggggttgcacaatattatcagcggattggccggaacttgggacttgcccaaagcccc

SEQ ID NO: 21769 - DNA, 404 bp, Zea mays
  Clone ID: MRT4577_11984C.1
ggtgaggagggtgtggatcaatcgaatcgaatcctaagctgaggatggcggcggtgctcaaggtgtatgcggaccggctgtcgcggccgtcgcgcgccatcatcatcttgtgcaaggtcaaccggatcgacttccaggagctcaccgtagatctcgccaagggacaacaccgcgcaccagaattcaccaaaatcaaccccatggcacaggtcccaacaatcgtcgatggaagattcaaactctttgaaagccatgccattctgaggtatcttgccaccgtcttccccggggttccagatcactggtaccctgctgacttatttaccagagcaaaactcgagtctgtcttggattggcatcactctaatctgcgccgtggtgcagcaacctatgtactgcacacc

SEQ ID NO: 21770 - DNA, 249 bp, Zea mays
  unsure (1)..(249): unsure at all n locations
  Clone ID: MRT4577_119852C.1
ttttttttatatgtttattttttttttaattatgagaacaaactattattacactgaggagagacgcgtacacaaagcctcatacgagaattcggagagggacggggatggtttgaccgaaaccatccacctcgctgctgattattctttcaggtaaaggaggacccgacaccagaacccatggaaaatattctatcaaaactttatcacatgccaaaaggcgctatgganattcaaactatggaatgg

SEQ ID NO: 21771 - DNA, 280 bp, Zea mays
  Clone ID: MRT4577_119853C.1
gtggagtaatgcagatgttctttaattaggtggtagtaaccgttgcacagctctgaatatacaaaaaaaaaaggggggggacacaactgtgcactttaggagtgattttgtggatgtaaatcacaactcaataaagctattaaaaagaaatataagaccattttataatcttacattgataatatatgttaaagtatagataggaaactcagaagcagtataccagtttgactccataaactttaaaatcttggacatataacaagtcactcaaaattta

SEQ ID NO: 21772 - DNA, 314 bp, Zea mays
  Clone ID: MRT4577_119854C.1
aaaaccgccgtaggccattgttggtgtaattttagcccggtgtttttgtttctgaaaagaagcttacaccactttcaactaaaaccactatttgcggtttttacttacaccgattttagtatcccttgaaacaaaaatggcaactttactttaaaagcccccaccgggctttggtttcttggcttggcatataggaaaccggaatggatgaccccaaccaccttttgtgggttttccaaaaagttttcaaaaaacagaagcccttgttcacaccctttttttttatccccacaaaaggtgggggggggagcccc

SEQ ID NO: 21773 - DNA, 736 bp, Zea mays
  unsure (1)..(736): unsure at all n locations
  Clone ID: MRT4577_119855C.1
aagtactggggcttcaatctttcttgatggaacattttcactgaaccaaacagggactgcgaatcaaggtgctcgagataaaataattagtttggctaacaggtacatgactgaggtgaggcgattaaaccttccacagaaccaaacagagaatgtctaccgtggtttccgtgaacttgaggagaaattactatctccttattaggcaatttttcagttgttcttcaagattgtaaaagaagagtcgaaggctctggattcactgcagcatgatctctattgttctgtacatacccacgcgtccgcccaaggcttctttaatcattattaattagaggttattcatgacggtgtgcagccttcttttatttgacttagagccagtatggattacagagctgttgttgtggaaattgtctagctgtcttcattacttaataatcttttggtagatgctgttgatcctgttttacctgaattcaggaaacagctggagaactcaggcaggactttccaccagaaatacaagttggttttcatgttggaaatcgaaatttagtatgtaccatgacattgtacagttcgatagtagattatttagagtgttgtaagccttgtagcttatgtttttgttggcatcaaggtatcattcctgtagctgaaaaataaacgttatattgtcagaaatatggaattctaggttgtttttgttccnnnnnnannaannnnnnnnnna

SEQ ID NO: 21774 - DNA, 379 bp, Zea mays
  Clone ID: MRT4577_119856C.1
cccaccatacaacacaccctggggggggggggggagcctctcacacaacagcaaaccggaggagagagggctgaaccgcatcccttcgagtacacctccgccttctcgacagcgctgcaaccggcgtctaagctacgtgctcctgcttttcatcccacccgcctaaacatacagggaggggggggggggggatcaatcctcactacatgcatacaaaatgcatgggtatgtccgtcatgagcaataatacatgcatgaagagcaatctctacctgctgcaagcggaagcaataggggttgaaggccatactcttgcagctataagccattggaataagactgtgtatggctgagattatccctctatctgcactgcata

SEQ ID NO: 21775 - DNA, 514 bp, Zea mays
  Clone ID: MRT4577_119857C.1
aaaaaaaggccccgtatgtatttcccccctttggacccaaatccccccggggggggcccaaaaaaaccccggggatccacccaacaaacccgtttttttttgaccccacccaaacccccagagggcccccccctaaaaaacaaaacccttaccttacggggggtaaattcccgggcggaaaaccccccccccccctcgttgaacaggcagggcccaatcccccccagaaaacaccaccccccacctgacctgaccccaaggggaaattgacccggggaaaaaaaagccccccatttttttgcccccccggcccccaaggggggaggcaaggttccccaacggccccgggccggggtcccccccctggtggacccaaaaccccacaaaggcccccatggggaggccgcccttcttgacccccttgagcctgacccccccaaacttgggggggcccctggaaaaccccaacgggtcaaaagcccccccggggaactttttttttccggggcccctc

SEQ ID NO: 21776 - DNA, 184 bp, Zea mays
  Clone ID: MRT4577_119858C.1
gccactcgttcgatgaccctttagtctggaggccgggggtactactacctgcctagggggccaaatcgcctcaataacgttcacacgtaaacccgtacgaactacgggatcctaacctcggcctaccgctgtgacagtgcagatatttggacataagagttagcaccctttgacagtctaccgc

SEQ ID NO: 21777 - DNA, 209 bp, Zea mays
  Clone ID: MRT4577_119859C.1
cgtccgagcacgcgttagctgacgcgtttgctctcacatctatacactcgtactgaggcataggctcatatatagagcctgagcggtcaaataaaaacccgattctatagcaactctacacactcgaacatggccggtctaaggattaacaacgaaatcgtcatcgtaataggcaactaactactaatataaatgggatgcatttaaat

SEQ ID NO: 21778 - DNA, 416 bp, Zea mays
  Clone ID: MRT4577_11985C.1
ctagccgcctgcctctcctactcagagctcgtctctcccgggcatcgccaccctctatcacgccgcccgtcgaggtaaggtcagcatggcgtatgccaatgcgctcaacgatgcgctaagtcctgtcatcgctgcaggattgcgcgaggcaggtatgatcatgccgtatacaggtcatatcaaggtcctgacggtcatgcactgtcatgcgtacattggatagttatgagtgcgtcgatgaccaccgttcgtacaagattgtgtgcgaactcatacgggaggctgaacaagtgcggcgtaatcagccctagctctgatgttggcgagaaagacatagagggatggactgcaaggttgctccctaacaggcagttcggatcatcgaactcactacttcggcaggcatcatgcaccac

SEQ ID NO: 21779 - DNA, 675 bp, Zea mays
  unsure (1)..(675): unsure at all n locations
  Clone ID: MRT4577_119860C.1
ggccgcttttttttttttttttttggagtatgcactggacaacaaaatgtctgaagggtggagaatccacatgacagacaaagatgaacactgagcatggctgatcaaacccatccatgatactgcatagaccaggtgatcaccagagcgctcaacggacttccagagggaacggatgacccggacatatagtggtggcactgaagaggcgaccccccaggggccctacttgatgtatgtgggacgcacccaataggctccacttacggagcaccagtatagactagcaacactgcacatgtagaacttaagagggtcggacagcacaaagcttcatagaggcgcactcctgggcttaccggctgcgatgctgatgaggcctaagcgcacccgcagctcttcttgacaggcagaccacggcttatgaattgtgagggcagggacgaaaagaggaacatccgccaaggcactatgtgacagcgagagcgtccagaacagttttttcacctagagacggactccttatgcatgcgcatctaccagggatactactagcaactagctatgggtactaatgcttgcagacgccgngcgaaaatctgcaggccaccgaggacgaaggccttactctcgatcttggaaagctgagttcgtcctgaaggggcgctgctttga

SEQ ID NO: 21780 - DNA, 418 bp, Zea mays
  Clone ID: MRT4577_119861C.1
ggaaaaccaacccgaaaagcttccccgggggttttacggaaggggggcgaaaaccggggaaaattaacccggttttgggcccaaaaataaaacccaccccccttccccccccccaaaaaaacggaaaagactaccattaactgtacatgggggacggagggggcaacccccagggggaccaaccaaaagggacgggggcaaggcaccagccccgaaaaaatccacccctaccatatcttcaaatctaaggaaccccggaaacgccggggggaaaaaaaaaagggggcacaaagggcccgaggttaggaacataaaaaaggccccattggacccaccaaaggggtttttaaagcccaaaaggatcccaaggcccgtcttttcctttccggggaccaaaaaacctttctgggcaaactga

SEQ ID NO: 21781 - DNA, 418 bp, Zea mays
  Clone ID: MRT4577_119862C.1
aacctgggaaaaaaacataggggaaatagctttattattccgccctcgttggacccaacccaagaaagacccaaaaaagcggggggaaaccccaattaacaaactttaatccacgaccataggctggggggcaaacaataaaggggcgcaattcacaggtacttatatagggaccccgtttttattaggggacccactccttggaaaggtggagcgaactttcaacaggaacgaacgcatttaaataaggaccaagcggggtattggaggaaagggttgtaccccccgaagggatcctttgaaacccccactgggaccctgggggccgcctgcccgtcaatgatgccatcgagcttaatggccacgctggcatgcttcacgggggggaggccggtggcgttaatccccacgggggggg

SEQ ID NO: 21782 - DNA, 428 bp, Zea mays
  unsure (1)..(428): unsure at all n locations
  Clone ID: MRT4577_119863C.1
ttcntttttttttttttttttttttttcttggggggtttttttgtttttttgggggccaaaaagagctgcaaagtttgtcattagggaagaaacaaatttacatgttgggtcctcacaacccggccaagaaggttgggcccaacacattaatccctcaaaaaggaaaagaaagttttttcccaatgttgcattggcgggccagaatgttattggggcccatccccaaaagtaatggggcctggttgcaagggccaaagacagctcatgccgggggaatttccccccgctttttgggatacctaaaaccccttcaatgccgttgaaactccagacctaaagggcgaggggcactttgtcacaccgattacccaacttgaggcgcaaatccgcaaggttcacttgggcttaaaagggttttgccctcgtg

SEQ ID NO: 21783 - DNA, 547 bp, Zea mays
  unsure (1)..(547): unsure at all n locations
  Clone ID: MRT4577_119864C.1
caggatgatcttcagatgactcgtgtcctcgctctagtcgtagcaatacaaacatacatggtatagataaaattaacatcacaccaaacataagaacatactgcataataatgatatactcgttgctacgagactaacgcaacttgaacggatcaaatcggagttaaaacggaggagatacgaatttccaagggttttatgtatttgatacgagattagttaagaaataaactttagtgtctttttcatgttaaaacagagacacagtgtgataaacaacattattacaaaggtataggaactagaaagaattaatttggtcgcaatatgaattttccagagattaaatacaattctgaaattattttcatatttaaaactatatcttatattcctttttcccattatcacacggctctggactgcgcgcatgaaatctgagaaacgcaggggcctctgcgcanagatcctaagacacagtgcacatcgacaagggatggnncgggttgattttaatgaattataggnnggctcttttgtataatgc

SEQ ID NO: 21784 - DNA, 256 bp, Zea mays
  Clone ID: MRT4577_119865C.1
atcaaaacaaaaaaaaggctttttcttatcccttaatacagagatactagtgcttcaagttcaattcgccgtacttgtggtagcctgtaagaaaatgttactagcaaaccattacaaaagttacacaaagggctcttggaaactttagattgttgttggtccggttcttgtaaccatggatcattctccggatcaagggttgacagaatctgggtcattgacattccaccatatcacaacgtttttttttgccttc

SEQ ID NO: 21785 - DNA, 1875 bp, Zea mays
  Clone ID: MRT4577_119866C.1
gaccctcgcggcttgccggggcgcgcgctgtcactctagcgtgtctttctccccttcctgctttccctctccagctctcatacacaaacacacggagctagcagcacggatcgagagaacaatggaggaaacaagcaggatccctgggtacttcaagaacaagggcatcctgatcacgggcgcaacaggcttccttggaaagatcctcgtggagaagatactgagggtccagccggacgtaaagaggatctacctccccgtgcgtgcgccggatgctgcatcagccaagaaacgggtggagactgaggtgatcgggaaggagctgtttgggcttctccgagagacgcacggcaagaggttccactccttcatcgaggagaaggtggtcccgttggccggcgacatcatccacgagaacctgggcgtggaggggccccagctgaggcggatgactcgggagctcaacgtcatcgtcaatggagctgccacaacaaacttctacgagaggtacgacgtggccctggacgtgaacgtgatgggagtgaagcatatctgccagttggccaagcagtgccccaatctggaggtcgtcctccatgtgtccacggcctatgtggtgggggagaagcaggggatgatcctggagcgggcgttcaagcagggcgagaccctgcggatggagacggagctggacatggacgccgagctgcgggtggccagggactaccagcagcaggtcgtccccgccgtgatcgtgcggcccagcatcatcacaagcatccataaggagccgctgccggggtggatggaagggaccaggaccatcgacgccatcctcattggctacgccaagcagagcctctcctgcttcctagccgacctccagctcaccatggacgtgatccccggggacatggtggtgaacgcgatgatggccgcgacggtggcgcacgcgtccgcccccggcggccacaaggaggagtcgccgacggtgtaccacgcgacgtcttccctccgcaaccctgcgccgtacgcggtgctgtaccggacgggaatccgctacttctgcgaccacccgcgcgtgggcaaggacggccgccccgtgcgtacccgcaaggtgcacttcttcggcaccgtcgcagccttcaccgcctacatgctgctccgctacaggctgccgctggagcttctgcgcctgctcagcctcctctccggcggcctcctcttctcgcgcctctacgccgacctggaccgcaagtacaggttcgtcatgcatctcgtcgacctctacgggcccttcgcgctcttcaagggcatcttcgacgacgccaacatggagagactcaggatggccatgcctgtcgccgaccggctggagttcaacttcgacccaaacaccatcgactgggacgactacttctacaagatccacattccaggggtcatgaagtacgtcctcaagtagcagctacatgcactgatcgccgtcgttcgtactacctacatgtacatcatgatccatccagaatagtactattaattaattaaatccaccaattggcgcgcgtttgtatacacattgctatatattgttgctacgctcgacgtggatcccacccatcctctctattcctcatcaaaatgtatccagttattagcagctctgctttagctaccactacgtacttctgctctggcttgtttatttagtgttaatttagcaggacctgatgatgatatactcatcctgtgtgttgtcatgtcagtcactgttggttaattgattatacttaagcaggtcgttgcataatcattgtggagaccttcattccaaagatagttctcctatatatacaacatgcatttttgtggttc

SEQ ID NO: 21786 - DNA, 109 bp, Zea mays
  Clone ID: MRT4577_119867C.1
agtcgccgtccggttagatcgatggatccaacgatgacgtcgaccagcgcgcgattggcgacgctggcctgactgaggaagacggctcgcaaatcgttcagaggtaatg

SEQ ID NO: 21787 - DNA, 517 bp, Zea mays
  Clone ID: MRT4577_119868C.1
gggaacaaaccagggccaaggcacaaataaaaccagacatataggcgaacactaataactctaagtgggaaaaaacaaaacaggggggcagcacggatatggggggggaaataacaggcttaagcaggaaagcaagcaagctgagggccgacccatgcacatgaataaaaactggggagagaagccgaaaatgggcgggctgacctggggggccttctccggctggacaaaggggccggccccggggatgacaacaaccctctggagcccggggacgggggcctgaaacccggcctggggggggtagcccggggagcccggggggggggaggggggggcgccccccccccccagcaaccggggggcccccccggcccggggggggggcgggtgaggcggggggcggggggggggagaggggggggggggggggggcgagggagggggggagaggggggaggacgggtggaggagagagggggggggggggggggaggggggggggggaggggggggg

SEQ ID NO: 21788 - DNA, 711 bp, Zea mays
  unsure (1)..(711): unsure at all n locations
  Clone ID: MRT4577_119869C.1
agcatatctgccagttggccaagcagtgccccaatctggaggtcgtcctccatgtgtccacggcctatgtggtgggggagaagcaggggatgatcctggagcgggcgttcaagcagggcgagaccctgcggatggagacggagctggacatggacgccgagctgcgggtggccagggactaccagcagcaggtcgccggggacgacgccgagcagaagaacgagaggaaggccatgaaggagctgggcctcgccagggcccgggagttgggctggcccaacacgtacgtcttcaccaaggcgctaggggagatgatgctggcgcgggagctgggcggcgtcgtccccgccgtgatcgtgcggcccagcatcatcacaagcatccataaggagccgctgccggggtggatggaagggaccaggaccatcgacgccatcctcattggctacgccaagcagagcctctcctgcttcctagccgacctccagctcaccatggacgtgatccccggggacatggtggtgaacgcgatgatggccgcgacggtggcgcacgcgtccgcccccggcggccacaaggaggagtcgccgacggtgtaccacgcgacgtcttccctccgcaaccctgcgccgtacgcggtgctgtaccggacgggaatccgctacttctgcgaccacccgcgcgtgggcaaggacggccgncccgtgcgta

SEQ ID NO: 21789 - DNA, 562 bp, Zea mays
  Clone ID: MRT4577_11986C.1
ggccggccgggccggggaacagcaaaatatacatctgctgcctatctctctatcgagagagagataggaaagctagctacgtagcatgtagcgctgctgcaacaacgcagcaggcggtgtgttggcgctgctgcttctccagctggtgttagctccgacgacggcggacgacccgcctcctgcaggcgtatacctccaccgcgtgtgggctgcacatcatcgcgagggagcttggccatccagcgagaggcatcctctgagctgaaacctgtgtcttcctaccatgctatacggcagccatggcgttgccaatgcattgggcaaactcatgcatgatagtgatatctggactatcgctatttgtaatttggggtggaagaaacaccaggacggaacggaggagtacaacttattgcatgggcatggcgatctaataagtaaagacataatatgaaggatatatgctgaatgtgtagtagaaaagaaaatgaaaaaaggtacctaggtgcctcgagttccagatatagatccctttgaagaggtgtaaatgcgccctctgatt

SEQ ID NO: 21790 - DNA, 354 bp, Zea mays
  Clone ID: MRT4577_119870C.1
ccggccgggactaagggtcgtgtgcatctcgccgagtgagaggctggagagggcgccgtgggggagatccgccgccatgaccgtgaggtcacgagtcacctgaagagcaagttggtacctgaaatctcaagtcccaggtcaagaacaggtaccgcaggatgaggtgcaaggaggatgctgtggcgatttcgtgagaggtctaggccgtcgtctcccagtcaactttgggttgctggaccattgtctccttataatgtaattatttatttattctatacagaactcctattatatagtaaagatgtgacattcgatcttgtgccatgacgaaaaaaaaaaaaaaaaaaagcggcc

SEQ ID NO: 21791 - DNA, 676 bp, Zea mays
  Clone ID: MRT4577_119871C.1
atcttctctgtctctgctacatctcccgcccagccaaacttctctctcgccttcgaagaagaagccgcagcatccatggcccccaaggctgctgagaagaagccggtggagaagacccccgcgggcaagaagcccaaggcggagaagaaggtgccggcgtccaaggagggcggcgacaagaaggggaagaagaaggccaagaagagcgtggagacgtacaagatctacatcttcaaggtgctcaagcaggtgcaccccgacatcggcatctcctccaaggccatgtccatcatgaactccttcatctacgacatctttgagaagctcgccggcgagtccgccaagctcgcgcgctacaacaagaagcccaccatcacgtcccgcgagatccagacctccgtccgcctcgtcctccctggcgagctcgccaagcacgccgtctccgagggcaccaaggccgtcaccaagttcacctcgtcctaggctcctcgtgcattagttcttgtgtttctttcctgttcctcgtctgatgagttctgtagctagctgtgtgtgttctgacagtgtcatcctgtaacaatggtgctgcctgaataaatagtcgtcttgctgcttgaatggacgactgtcgctagtatgcttgactgccacatgtttaatcagtttcttctcgggc

SEQ ID NO: 21792 - DNA, 466 bp, Zea mays
  Clone ID: MRT4577_119872C.1
accttcctccccaactcgtcgcttgctttctgcgactcgattgcgtgctctgctccttggaagttcaatctcacctccaaccatgcccaaacacaagtagcacacatcaacattgtggttattgtccatgttccacttctcattagtctaccaccacagggacaccttatctacgagcttggagtgctattgtactaccgtgtgatcgagaggcttgacaaagaggctgctgaaatgaataacgcggccttcaagaacgccggggtggtctacaaactcaaggctgaacatgagaaaagtattccccctgataatggtctggggaagtttgagaacaccaagcactactgcacggtcatttattcccctggacacccggacttccttaagaaaatgatttctggtaactcccaagctgactggagtggtcttaaccatgacttcaccaccgggggccttgaaggtg

SEQ ID NO: 21793 - DNA, 664 bp, Zea mays
  Clone ID: MRT4577_119873C.1
gaaatctcccgtccccaaatcgaccgagcgaattcaccacagcctcaccgtcccgaatccgcaccaccgatggcacccaaggcggagaagaagccggcggcgaagaagcccgcggaggaggagcccgcgaccgagaaggcggagaaggccccggcggggaagaagcccaaggccgagaagcggctccccgcgggcaagtccgccggcaaggagggcggcgagggcaagaaggggaagaagaaggcgaagaagtccgtggagacctacaagatctacatcttcaaggtgctcaagcaggtgcacccggacatcggcatctcgtccaaggccatgtccatcatgaactccttcatcaacgacatcttcgagaagcttgcggccgagtccgccaagctggcgcgctacaacaagaagcccaccatcacctcccgcgagatccagacctcggtgcgcctcgtcctccccggcgagctcgccaagcacgccgtctccgagggcaccaaggctgtcaccaagttcacctcttcttaggttcgtagtagtgatggctgggtggtgctggtagacatggctcggtttatctggtagggcaagcgatggatgttggtgatgatgatctgcgtgtaattgtgttgttaagaattgtgaaacactgttccacatc

SEQ ID NO: 21794 - DNA, 214 bp, Zea mays
  Clone ID: MRT4577_119874C.1
acgcgaattaataagcatggccgcatgcagctgcctgtgctatacatggtgctaggagagggctggaaggttcttgcatggcaagtattttctgtaacatttgtgatgaacattgatactatccacttaattttagaataatcaaagaacttggttaatgatgctacatattgctttaagctttgaaatcattaatttatgcctcttttttgta

SEQ ID NO: 21795 - DNA, 541 bp, Zea mays
  Clone ID: MRT4577_119875C.1
aagcagggaagctagctattagtctttgttcccgaggagaacatcaacgatttctgagcacatacatagggggagggaggaggagaggacacaacgaagaaccctcctagaaagggagacctaacaaatccgtggacgctgcaggtcgctcagttgctggtgaacttggtgacggccttggttccctcggagacggcgtgcttggcgagctctccggggaggacgaggcgcacggaggtttggatctcgcgggaggtgatggtgggcttcttgttgtaccgcgcgagcttggcggcctcgccggcgagcttctcgaagatgtcattgatgaaggagttcatgatggacatggccttggaggagatgccgatgtcggggtgcacctgcttcagcaccttgaagatgtagattttgtaagtctccacgctcttcttggccttcttcttccccttcttctcgccgccctccttaccggaggacttggaggcgggcaggcgcttctcggccttgggcttcttttctggaggcgccttctccgcct

SEQ ID NO: 21796 - DNA, 638 bp, Zea mays
  Clone ID: MRT4577_119876C.1
ctcgaatcctccagtcctcccctcgcgccccaaacaacccgatccctcgtcctctccacctccgccgaaaccgccatggcgcccaaggccgagaagaagcccgccgcggagaagaagccggtggagacggagaagaagcccaaggccgagaagcgcgtgcccggcaaggacggcggcgccgacaagaagaagaagaaggccaagaagagcgtcgagacgtacaagatctacatcttcaaggtgctcaagcaggtgcaccccgacatcggcatctcctccaaggccatgtccatcatgaactccttcatcaacgacatcttcgagaagctcgccggcgagtcggccaagctggcgcgctacaacaagaagcccaccatcacctcccgggagatccagaccgccgtgcgtctcgtcctccccggcgagctcgccaagcacgccgtctccgagggcaccaaggccgtcaccaagttcacctcctcttagattgctgccgtccgtccgagtctgtttagtatggtctggtctgaatttgttcccgtgttaaaacatattacagggggttagattcccctatcgaacagtgtaaaatgagtccgatttgctgaatcaaagaatcatccagtggttgtctcagt

SEQ ID NO: 21797 - DNA, 513 bp, Zea mays
  Clone ID: MRT4577_119877C.1
gtgcggcgctcgaggcggccgggtgcgcccctctcccaccaccatctctcacttacaccgaacaacatgctccgatccgtcttccccactcttcgcacttccgtcatcgcacgacgatcgtttgtctcgacctccctcgcccgtgaggcgtctcctctcgactcggtcaagcaagctgccgagaaggccaacaaggtcgctggtgacgccgccgtcaagggaatcgagactgtcgagagcgccgtcaacactgcgaccgatgccgtcaagggctcaactggaagcctctccgccgaggcacaaaaggccgcagctgatgtcaagaacgagggccaaaagttgggatctgacgctcaagccgcattcaacaagggcaagatcgaccttgaccaggccgccaaggacaacggactcaagaactgagttccctcgaaaatcgcaaattgtatacagcccttctccttcgcagtagtagtttaagcagtcaatgccgtacaatgatcaaggtcttcg

SEQ ID NO: 21798 - DNA, 668 bp, Zea mays
  unsure (1)..(668): unsure at all n locations
  Clone ID: MRT4577_119878C.1
atcgcctctctctttctactactccagcccagtcaaacttctctcgacctcgaagcatcagccgccgcaccatggcccccaaggcagccgagaagaagccggtggagaagacccccgcgggcaagaagcccaaggcggagaagaaggtgccggcgtccaaggagggcggcgacaagaaggggaagaagaaggccaagaagagcgtggagacctacaagatctacatcttcaaggtgctcaagcaggtgcacccggacatcggcatctcctccaaggccatgtccatcatgaactccttcatcaacgacatcttcgagaagctcgccggcgagtccgccaagctcgcgcggtacaacaagaagcccaccatcacgtcccgggagattcagacctccgtccgcctcgtcctccccggcgagctcgccaagcacgccgtctccgagggcaccaaggccgtcaccaagttcacctcggcctagtttcctggtctgattcttgtgttcccttcctggtccttgtctgatgaattctgtaggtagctgtgttctgacagtgtcatgcgacattgtcatcttgtaacagagtttctgcttgtggntttgtggctgttattcggtctggttaaatagtcaacttcacctcatcctagtattctcatctaatgtggt

SEQ ID NO: 21799 - DNA, 654 bp, Zea mays
  unsure (1)..(654): unsure at all n locations
  Clone ID: MRT4577_119879C.1
accattcctcccaccttcaagcgcatctacacacacacacaccacagaccacctctccccgcccaagcatccccatccgcatcctcatccatggcccccaaggcagccgagaagaagccggtggagaagaccccggcggggaagaggcccaaggcggagaagaaggtgccggcgtccaaggagggcggcggggacaagaagggcaagaagaaggccaagaagagcgtggagacgtacaagatctacatcttcaaggtgctgaagcaggtgcacccggacatcggcatctcctccaaggccatgtccatcatgaactccttcatcaacgacatcttcgagaagctggccggcgagtcggccaagctggcgcgctacaacaagaagcccaccatcacgtcccgcgagatccagacctccgtccgcctcgtcctccccggcgagctcgccaagcacgccgtctccgagggcaccaaggccgtcaccaagttcacctccgcctgattcggtcctgtccctgtgtgtgtcttcctggtggatggatcgatgtcgccctgtagtttcctgctcggactttgtcctcttgtaacttgtgctggctgtgtcttgtgtgngatcatatttcatgatctggagaaatagtagcggtgcttattg

SEQ ID NO: 21800 - DNA, 336 bp, Zea mays
  Clone ID: MRT4577_11987C.1
tcaagacacttcttaaagatgcgagggaggtgcataggttagcggacgggctcacttcaacgcctgctgtgaggaagtaagtgtcggatgagcttgctgtggtggctgagtctaaagatgttgctggggaatttatcacttatgctgtgcttgatcaagttcttggtgataaggcattttgaaaattatggaagtggttcatctcgcttcgtttttcataccatttggcaggatcttacataaaggtcctttcattcaagtttgttttgccagatgcaattcaaatgttatagatgacaatataatttgcttcttgtccatactaacattatttgt

SEQ ID NO: 21801 - DNA, 165 bp, Zea mays
  Clone ID: MRT4577_119880C.1
attctccgttcgacccactcgtccacccacacgtcctcacccttctaccaccctattatcattccattcacacaccttgtgactccataggcaagtttcatctttcacctggggctcatacactcacatctgctcacacctctcattatgatataccttctctac

SEQ ID NO: 21802 - DNA, 556 bp, Zea mays
  Clone ID: MRT4577_119881C.1
actcctcctcccacctcccagtgaaacaccaccgcaccccacaatcccacggctctccccggcgaagtagcagcggcatccatggcccccaaggcggagaagaagccggtggcggagaaggccgagaagacgacggcagccaagaagaccaaggccgagaagcggccgccggcgtccaaggagggcggcgagaagaaggggaagaagaagtccaagaagagcgtggagacgtacaagatctacatcttcaaggtgctgaagcaggtgcacccggacatcggcatctcctccaaggccatgtccatcatgaactccttcatcaacgacattttcgagaagctcgccggcgagtcggccaagcttgcgaggtacaacaagaagcccaccatcacgtcccgggagatccagacctccgaccgcctcgtcctccccggcgagctcgccaagcacgccgtctccgagggcaccaaggctgtcaccaagttcacctcctcctaggctaggatggttttctgtaatagtcagctgttcagaccatgtcttcctgtaacttgtg

SEQ ID NO: 21803 - DNA, 610 bp, Zea mays
  unsure (1)..(610): unsure at all n locations
  Clone ID: MRT4577_119882C.1
cccggggngtgacatcctcctcccaactttacctgcctttctttggttcatggctgcttagggaggatgggaggttctactgcgaggactgataaggatgtccacccctacgagtgggacatggcttagtgccacccatctcaaagctctggagagtagccttcttcttctactgggtaggacattgtactacacatgtcatgatcaaggcgctccactgcttatgaccctgactggtactacatctaccttgtatttgtagaactgcatgatctacgctatacaagaacttgacgttggtggcttccacaacattatagtggccgtcacaagaatggatcacgcccacctcacttgtgcaagagcagtggagccatttcacgcaacatcctccagcagctgctggagatgggcatcattgatgtcgatcccaagggtggacggggcatcaccttccaggcaagcgtgatctggaccatacggctgcaagggttgctgctgaagcttgagcaatctcatatttggtttctatgatgtcatgtttgattgttgagtatggctacactatatttgcactcttgattacgatttttgagttaagagaactcaa

SEQ ID NO: 21804 - DNA, 629 bp, Zea mays
  Clone ID: MRT4577_119883C.1
agctaccagcaccacacctctccccgtccaagtagcagcaaccaacggcatccatggcccccaaggcggagaagaagccggtggcggagaaggccgagaagaccacggcggggaagaagaccaaggccgagaagcggccaccagcgtccaaggagggcggcgagaagaaggggaagaagaagaacaagaagagcgtggagacgtacaagatctacatcttcaaggtgctgaagcaggtgcaccccgacatcggcatctcctccaaggccatgtccatcatgaactccttcatcaacgacatcttcgagaagctcgccggcgagtccgccaagctggcgcgctacaacaagaagcccaccatcacgtccagggagatccagacctccgtccgcctcgtcctccccggcgagctcgccaagcacgccgtctctgaggggaccaaggccgtcaccaagttcacctcctcttagatagcctgctcttgtgtcttctctgaatgtgttgacttctcgtggctgtttgatgaatccattgtactctgtagttagatgttcagaacgcaccattttgtaatttgcgaggacacaaatgtttcaggatttggaggaaatagtaatggtgttgctttg

SEQ ID NO: 21805 - DNA, 172 bp, Zea mays
  Clone ID: MRT4577_119884C.1
cccaaacctctttttccctaaaaaataatcccttcccattaaaagggggcattcaggggattgcccaccccgccccccaggggggggggggacactacgtaacccatcgccgctaaaagagaaaaccaccgagctagggagctagcccggggccccattaaataaaaacaaa

SEQ ID NO: 21806 - DNA, 1053 bp, Zea mays
  Clone ID: MRT4577_119885C.1
ggccgcttttttttttttttttttggatagtactcgaagaaagggaactcccaggaaacctaatctataagagccgtgttcgtgctgtggatttcaaagtgaagttcttaggtggaggcgagttctgttctctttttttttttttttttccctcttcagcgcttctggacggttctcaactgaaaagtaaactcaattcgttaataacccgctttgcaaatttctttttcaagtgcaaaaacgatgaaaggatcaaggtccctttctttaacgattgtggccttttttgaactaattttcggacttctatccgcgtcttttagcctcatcttcatatagctggaaaatccgtgcaaataactccgccatcaacggttccttcctcggctaagaataatgctatgctatccggaattgcaattagatagttgtagataaggtaaggcccttcccctctatccagttcaaaccaatggcatgaaatagcactagcgaaaaggctaagcacatttgatagaggtatacctcaccaaagcaaagaagaacaaaacctgggacgaggacggtcgcgaatgcaaatgcttatggttctaatcaagtgaagccaatgctaggaggttgaaactagaggtcacaaggcatgacgctggagaaagagaagcgtgatgttgtcagcaatcaaattatcgtaaatagatagtatagtatagtatagttacgctttcctgagtgactggattcctagctcttcggccgcccgggcaggtacgaacttcatcagcgcatgagaagcaagcggtcttagtggagtggcggacttcccctttcaaggaaaggaaagttttcggattctcgtcaaagaggagagctgagcctaaagaaaatcacatcaagctaagtgcaaacaggcgcaatcaagatcacaagaagaagagaagaaacaagaagaaaacacaccaaggcattaatcaacagcctaagccgaagccaccataggcaatagatcacaattcaaggaaaggagtagggtcactaatattgtatggataggaa

SEQ ID NO: 21807 - DNA, 740 bp, Zea mays
  Clone ID: MRT4577_119886C.1
ccggccgggccccctcctcctccccatccccagtccccacacccacccacccggacccggtgccgcgctctgcaggcggaggaagaccagcgacgggcggacgtgcttcatgaggagtgtgccgtgagacaactctgcgagtcaagaacaactggtgaggcgaagtgagaagctcaaagaagccgaagacatctacatctatcagggtgacaaatccttttgcagcgtggagtgcagggaaaatttcatgatagattatgagatggaagaagcatatcatcctgcgtctcctaggagcccaccctctgacggtggtcggattttccaactgatacgttgagtcagcatcagtaacaactcgatatggtcatatctgaagtgctgtctgaggttaataagttgcagccatggatgtgatcatgtttgcagtagttgttgcccggagattttgtttgtcgcggcactgatgaatttacctcacctattgatttctttcgttttgcgtacttggatcctcgaatttttggaggagtccaaaaaatgactacctccggtcataatattatcttgatcggagatgagtgtgtgtgtgtgtgtcctcgcgtctcaacttgagttgtttgcttggaccgcattttcagtggctcactcatatgtggacgcctcttattaatatcatgtatctgaacctatgttttgatattttctgaaatgaaatggttaagaataaagttttatgt

SEQ ID NO: 21808 - DNA, 746 bp, Zea mays
  unsure (1)..(746): unsure at all n locations
  Clone ID: MRT4577_119887C.1
acctaaagaatccaattccccaccagccccctcgcaccttccggcgaatcaccgcacctctccccggcgaagcagcagcgtccgatggcccccaaggcggagaagaagccggctgccgcggagaagactccggcggccgagaagaccaccgcgggcaagaagcccaaggccgagaagcggccgcccaagtccaaggagggcggcgccgacaagaggaagaagaaggccaagaagagcgtggagacgtacaagatctacatcttcaaggtgctgaagcaggtgcacccggacatcggtatctcctccaaggccatgtccatcatgaactccttcatcaacgacatcttcgagaagctcgccggcgagtccgccaagctcgcccgctacaacaagaagcccaccatcacctccagggagatccagacctccgtccgcctcgtcctcccgggcgagctcgccaagcacgccgtctctgagggcaccaaggccgtcaccaagttcacatcctcttagataggctgttctctgtcttcgtggttgatcgatggttctctgtaatgctcgttagctgttcggaccatgtcgctgtgtaacttgtgctggtgttgtggcaacatactgtttcatcatctcgtgaatcagtaactttgcttannaannaaaaaaaaaaanaaaaaanaanaaaaannnnnttggatggctgattctccaccggtacatcccgtcaccggtaaaaaaacttattc

SEQ ID NO: 21809 - DNA, 1082 bp, Zea mays
  unsure (1)..(1082): unsure at all n locations
  Clone ID: MRT4577_119888C.1
gccggcccggaannnaaaanaaaaaaaatgactgagtatgagaacatgaaaaaacctttctcttttctctctctctcgctctcctctgcgcctctgcctctatttcttctcgtcctcccaggacctcaagtccccccctcctcctccccatccccagtccccacacccacccacccggacccggtgccgcgctctgcaggcggaggaagaccagcgacgggcggacgtgcttcatgaggagtgtgccgtgagacaactctgcgagtcaagaacaactggtgaggcgaagtgaagaaagccgagaggggagaccaaatggcaactgattcctcagctctgcaggcttcctctgagtcgattgcgcaaaagatggggttcttcagagtccctgaccttcttgtaaaactgagcgccaaatgtttgagcgaactggatgtggttcgcagcccaacatcgcccttggacctcaagtttttcactggccttggcaacaaatcacccggatcatcctccgttgacgccagccagaaccagaagatcttgcttggtgacagggttgggcttggacttgtggattccctcactgatgacaaccccgcaccactgggtggtagaaaggttctttttcttggatctgagatgaggattattgataacctgtctcgcaagaacagctccaccgctcctgatcaagctggggaagttgaacagaaggatgataatatgtctgacgaactgatgggcagtgccatgtcccttggtgacatcatcaactcagaggattacactcgtgttgtctcccgtggccctaatcctaggactacccacttttttggagatcgtgtttttgagcttcaagctgagcagctgatgcctgttgagatgagaagctcaaagaagccgaagacatctacatctatcagggtgacaaatccttttgcagcgtggagtgcagggaaaatttcatggtagattatgagatggaagaagcatatcatcctgcgtctcctangagcccaccctctgacggtggtcggattttccaactgatccgttgagtcagcatcagtaacaactcgata

SEQ ID NO: 21810 - DNA, 754 bp, Zea mays
  Clone ID: MRT4577_119889C.1
ggccggccgggccgggactacccacttttttggagatcgtgtttttgagcttcaagctgagcagctgatgcctgttgagagtaaggtcgatcagagtacgtctcctgtggaagacggtctgatgagcttctgttatttttgcagtgagaagctcaaagaagccgaagacatctacatctatcagggtgacaaatccttttgcagcgcggagtgcagggaaaatttcatggtagattatgagatggaagaagcatatcatcctgcgtctcctaggagcccaccctctgacggtggtcggattttccaactgatccgttgagtcagcatcagtaacaactcgatatggtcatatctgaagtgctgtctgaggttaataagttgcagccatggatgtgatcatgtttgcagtagttgttgcccggagattttgtttgtcgcggcactgatgaatttacctcacctattgatttcttttgttttgcgtacttggatcctcgaatttttggaggagtccaaaaaaatgactacctccggtcataatattatcttgatcggagatgagtgtgtgtgtgtgtcctcgcgtctcaacttgagttgtttgcttggaccgcattttcagtggctcatatgtggacgcctcttattaatatcatgtatctgaacctatgttttgatattttctgaaatgaaatggtaaagaataaagttttatgttacttgtgcaaaaaaaaaaaaaaaaaaggcccctagggcc

SEQ ID NO: 21811 - DNA, 247 bp, Zea mays
  Clone ID: MRT4577_11988C.1
aaaaataagtttcaggccgtttagaacaaggtaaattttgtctaacagaaatagaggctatttgatcgggctactgggacgttatatgataacagtcgattggctgaaacaaaagccccacggattcgggaatttcatatgtcagcaaagtaccaacgcaagctaaaatttgccttaaagggtatactacgggcccaggagggctgctgcctatcagtaaggggatcatttttggacagctggggcg

SEQ ID NO: 21812 - DNA, 430 bp, Zea mays
  Clone ID: MRT4577_119890C.1
ggcaggcccaacaaaaatccattttcggacaagagcgggtttatacatcaattgccccggggggggtggcccaaccccccaaggggaattgttcaggggaaacagagacccctttcccaccgaaagacccccccacataacatgggggggaagcgcttctccctgaaaatggccagccccgggaaaaccgaaaaaacattggcttcctatttattcagcccttcaggggggatttctttcctgggaatgctgcaaattttggggctttttttttgggcccccctggttccttttcaggggccttttggggttggctaccaccaaagccaaaaacaagttttcctggggccttacccgaagaactgccctgtgatgtgggggctgttgaaggcctcccacccttgggcgcattggcttgtccctttgcagg

SEQ ID NO: 21813 - DNA, 1598 bp, Zea mays
  Clone ID: MRT4577_119891C.1
gggtacctcgaggccggccgggcccctcctcctccccatccccagtccccacacccacccacccggacccggtgccgcgctctgcaggcggaggaagaccagcgacgggcggacggtgagtcctctcccccgtcttgttcgattccttcgggcttctcagacctgcattcccctccggctccgggagaggactggttcggacgcgttcgttacggtcccggggggttttattaatctgcttctggttcttcggttttgtctaccggccgctctgcttcatgaggagtgtgccgtgagacaactctgcgagtcaagaacaactggtgaggcgaagtgaagaaagccgagaggggagaccaaatggcaactgattcctcagctctgcaggcttcctctgagtcgattgcgcaaaagatggggttcttcagagtccctgaccttcttgtaaaactgagcgccaaatgtttgagcgaactggatgtggttcgcagcccaacatcgcccttggacctcaagtttttcactggccttggcaacaaatcacccggatcatcctccgttgacgccagccagaaccagaagatcttgcttggtgacagggttgggcttggacttgtggattccctcactgatgacaaccccgcaccactgggtggtagaaaggttctttttcttggatctgagatgaggattattgataacctgtctcgcaagaacagctccaccgctcctgatcaagctggggaagttgaacagaaggatgataatatgtctgacgaactgatgggcagtgccatgtcccttggtgacatcatcaactcagaggattacactcgtgttgtctcccgtggccctaatcctaggactacccacttttttggagatcgtgtttttgagcttcaagctgagcagctgatgcctgttgagagtaaggtcgatcagagtacgtctcctgtggaagacggtctgatgagcttctgttatttttgcagtgagaagctcaaagaagccgaagacatctacatctatcagggtgacaaatccttttgcagcgtggagtgcagggaaaatttcatggtagattatgagatggaagaagcatatcatcctgcgtcatgttagagcccaccctctgacaagcatcggatcctgcgtctgatacgttgagtcagcatcagtaacaactcgatatggtcatatctgaagtgctcactgaggttaataagtcgatacggtcatatctgaagtgttttcagtagttgatgcccggaagccatggatgtgatcatgtttgcgaattttgttgccctatgattttctttgttgttgcactgatgagatcacctcattttttgatttgtcctaaaaagtgactatcgatggtcataatattatcttgatccaaaaaaagtgtgtgtgtgtgtcataatattatctcgatcggagttgattgtgtctgcattttcagtggctcatcaacctcatatgtggacgcctcttattaatatcatgtatctgaacctatgttttgatattttctgaaatgaaatggtaaagaataaagttttatgaaaaaaaaaaaaaaaaaatttgcgggc

SEQ ID NO: 21814 - DNA, 440 bp, Zea mays
  Clone ID: MRT4577_119892C.1
cctgccggctgcctggctggtggctgctgctactcgagatgttgaggcccggctgccgtgggccgtcccgtatgctgaatcagatgccagcgtatagcctagcctagcctaggtagccccgagtgcgaatagatatcttgttgttcccaaagacagaaaaaaaaagagggaactcatatgtagcaacggtgtttcagtcaccccaaggatcctctccagaataaagtgatttttttttttgcattttttttctagtcgaaatccttcttcctcatatatatagatacataggtttggctttaaggagatctgtccaaacaggtgacacatcatgcttctttgtaataattaatcttatggattggcctctagttcatttggcttttatgatacttggaggagatgtgttcttggtgaaaaaaaaaaaaaaaaaagcggcc

SEQ ID NO: 21815 - DNA, 483 bp, Zea mays
  Clone ID: MRT4577_119893C.1
atactgcggatgcgggaaaacaacagcgcacaagcgccctccctccatgttagcctccaccccgtccggcagcagccaaaccctacataggcgccgccgcaggcggccccccgcatcgccgccaaagatgcaaacctccgccaaaactctcacggccaaaaccactcactatgaaggcggagccctcgaacaccatccacaatgcgaaggccaacatccagcacaaggagggcatccccccggaccagaagcggctcatcttcgccggaaagcaactcaaggacaaccaacttcttttttactaccccccccccacggagcccaccccccacctggtgctccgcctccgcggcggcgccaaaaaagcgtaagaagaagacgtacaccaagcccaagaagatcaagcacaagcacaagaaggtgaagctctccgagctgcagttccataagggggacgacaccactagaaaggcgacccgcctc

SEQ ID NO: 21816 - DNA, 279 bp, Zea mays
  Clone ID: MRT4577_119894C.1
ttgtgcattctccgagatctgcaaggaagaggctgctggagctggaaaagacctgcacaccagctggaacgagggctacggtccgctgttgcacttgcaccatggtcacgggggtcgacgacagccaccgtagccagtacatgttttaacagccggagctgcaactgttgcggtggagataaaggaggaggagaggcagtactctgctgagcaggaagcaactatgcaaggcgcacatgcatgcaggcggtgaaccactgaagtagctcagtatggaaa

SEQ ID NO: 21817 - DNA, 662 bp, Zea mays
  unsure (1)..(662): unsure at all n locations
  Clone ID: MRT4577_119895C.1
gcaaaaaaaaaaaacactttattctggagaggatccttggggtgactgaaacaccgttgctacatatgagttccctttttttttttctgtctttgggaacaacaagatatctttgtagcacaggcaagaaaaatgaagtttaggttgagcttcgaagacgagataccagcagcatgatatgatagtagcagtatcgcacattcgcactcggggctacctaggctaggctaggctatacgctggcatctgattcagcatacgggacggcccacggcagccgggcctcaacatctcgagtagcagcagccaccagccaggcagccggccggccagccctcgctcgctggcctagatccgggaccgggagggcgtcgccgtcgctttcgccaaatctgaatccatccatccccgtcaaaagaagaaagaagatcgatccatcctctgatcctcctcactgatgtagtgatattaattgtctccccgactcccctccaaagctgacaagcacagcgggtcaaagacggaggcggagatccatgacggagccagagccaggcacgcacgatgctctccagtctccactccacaccacacccttgtccttgaatatgattggattncctcgccnacaacgcacaccatggtaaaaaaaaacaatattn

SEQ ID NO: 21818 - DNA, 113 bp, Zea mays
  Clone ID: MRT4577_119896C.1
gtcccattcgcttgtagtttccttgcttggagtttcgccgagggtccttccgcctcacctagattcaggaccgagatggcgtctgagctcacctaccgcagcggctttacggc

SEQ ID NO: 21819 - DNA, 650 bp, Zea mays
  Clone ID: MRT4577_119897C.1
gtgtccaacgtccggtccggaacgtgcggatagtcgactccgacaacggcgtccggatcaagacgtggcagggcggcgccggcgcggtgtcggcggtcgagttcgccggcgtgcagatgcagaacgtgaagaactgcatcgtcatcgaccagtaatactgcctcggccacgggtgcgccaaccccacgcgtccggtgcgcgtggccggcgtcgcgtacagggacatccacggcacgtacaacccgcaggccggcgcgcccatccgcctcgcgtgcagcgacgccgtcgcctgcacggacatcaccatgtctggcgtcgagctgctgccggccggcggggacgacggagcactgctcgccgacccctactgctggaacgcgtacggggtcatggagacgctcacgctgccaccggtgtactgcttgctggagggcagcccggagtctctccaggatccgctcaccagttgctgagatgagatcgttttctttactaacaaagatttctctcctgagacagtcaacgctaatacactggacattctacaaaaaagaaaaaaaaaaaggggggccccccaataagtgaccccttcccccggggatttattccgggccggttccctgggggggaacaattttccccaaaatggg

SEQ ID NO: 21820 - DNA, 493 bp, Zea mays
  Clone ID: MRT4577_119898C.1
gggttactttttttttttttttttttttttttttttttttttttgtgttaacaatcttcctctttttggcgggtttaaggaaaccaaaattggcggggggaagggccaaagaaaaccccagggggaacgggccagaagggacccgaacagcaaccggccagaattggaacaccccaaaggcgcccgagaaggaaacaccccagaagaaccacccggggaagacaattgagagccacagagaaaagaggcgcaaacagaggaaaaacagggaccctaaaaggagcgggagcaataaggttcacgacatgaaaaaagattgaacgggagggggaggcccccggggggaaacccgcctaaagcgggcgcgcagggaaccccactcaaaccggcggggggccccagcccatagcatcttgaagcttaacgcaagcggaaagtaaacccaaactgaacgcggggggcacggcacacaatgaaaacccgggggaacaaa

SEQ ID NO: 21821 - DNA, 263 bp, Zea mays
  Clone ID: MRT4577_119899C.1
ttttggactaacactcccacaagggcaacaaagttttgcttccccttaagctaattgattctcacccccttaccattcccgcctatgggtcccccttgcaagtgcctgcacattccagggtaacaagactcacgggctttcgggggatcaatcttgagtcaggcccgggggaccttacaacctgccctataatgcgtgaaatgaaccggggggcgcccccaacaaaaaaaatcccccccgtgccccctaggcccccccttttg

SEQ ID NO: 21822 - DNA, 193 bp, Zea mays
  Clone ID: MRT4577_11989C.1
tgcacccgtcggctcttgcgctggcatgtgttcgtgtcattcctgctgcgaaggctcatggtgcgtggagcagccatttacagccatcggtctctgcttctcgtctctctacgggcgcctgggtatgtgccattaggctcagtgatcagggctatcggttcgtcatctcacttgtacacatcatcatctggct

SEQ ID NO: 21823 - DNA, 421 bp, Zea mays
  unsure (1)..(421): unsure at all n locations
  Clone ID: MRT4577_1198C.1
gttntntntttataggttttatttttttttgtacctggtttaacctntaggggggaacccattcggcaccggcacggaaaaaaaaaaaaaaaaaaaacgcagccacaaaacgccgccgcgaggcaaagaagcacaagcgcttaagctcggcgtcttaccaaacgccggcgaaaactctcgcccgagcccgacagaacttaaattcccaagtccgccacccgatcaaccttaacgcaagtcacggtctcttccaatggcgtcgcgcgcggtagttaaaaaggaaaagaaaaaaaaaaggaagtgcatctccgtcaccaacgggcaggccggcatccaagtcggaaacgcgagcaggaaacttaactgcctcaagcaacggaatccagcctgatggccaagtgcctgaagaaaaaaccgcgga

SEQ ID NO: 21824 - DNA, 309 bp, Zea mays
  Clone ID: MRT4577_119900C.1
ctagacttggcaacaaaatgctgccttctgctgactggcaccagtaaattagacaatgtgaatacatggacatacataaaattttgttggtcctttcatttttgcagaactgacatgattttcactgcctacttctcaaattcgtattgtatctacactgcagggtgtagctattctaatctcgtttctggtttcagctgtattccatgaggtactttaagttcttcagaagcctttttcatgatcggttcaatttctgtttttcctaagacatgctattgttcgaattccactcagcacattactaac

SEQ ID NO: 21825 - DNA, 285 bp, Zea mays
  unsure (1)..(285): unsure at all n locations
  Clone ID: MRT4577_119901C.1
agctagtccgacaacattagcttcactgtctgggatgtccggggtcaagacaagatcacacctctttggaggcattacttgcagaacacccagaggcttatttctgctgtggacagcaatgaccgcgaccgagcggttaaaaaatggctgcttcaggggggggaaccgaacaaagatgagctacctaataacaagctgctnggttgtgccaacaagcaagatcttctcactgccatgagtgctgcctgagataactgacaagctgggactacactccctgctcca

SEQ ID NO: 21826 - DNA, 327 bp, Zea mays
  unsure (1)..(327): unsure at all n locations
  Clone ID: MRT4577_119902C.1
aaggaangccccggccgacccacacgaacaagtctaaatcactagcaactcattctacattatccaagctcacgaactcttccatgcgacggcttatttctcttatagcgtcacctaaaaacactacacattcccctcaattacaacaacctcacatagcaaaccctctccccacacaccttacatcaatgatagctcaaccaccttaaaacacatctcttcaaccctataagctccaacaagcaatctcttccaaccacatacccatatcaaacttgtaataacaatcgccatccctatcttcattacacgcattgatacaaacca

SEQ ID NO: 21827 - DNA, 209 bp, Zea mays
  Clone ID: MRT4577_119903C.1
cccacgcgtacgatataaaataagtgctggatagcccactatgtccgacgtcggaggcgaccggccggagactgcggaagggaggcgtgacgccgtccgcccgttccaaacaacggccgtccgccttaaaggacccatgtttacgtccgcgctcatccaactgcatagctcttcgaatagggtctcctaagttcaatacacgggccact

SEQ ID NO: 21828 - DNA, 1374 bp, Zea mays
  Clone ID: MRT4577_119904C.1
caggaccggctgaggatggtgctgggagtagtaacatctcccttcttggacgtgctctccctcgtctctaggtaagagaccctaataaggaacatatatagacttgttctgattttggattttagccaatttcccctaaaattctgttactgatttatatgcccatctagggatcatttttccccacacctattacatgatcttttcttctagaatagaatccacggtctatcttctgaaccaccactaaattcatgagtattctgcgacccacacttttccaccttttgaataatagaacttcacttaagttgtgagctgtgacaagtgacatactatttatattcggatctgatctattacaagtattagtttccttttcgaggatagaaaacatggggctagaactggacattgacggcaaataccaagtatgtgaagaatgtagacctcctaattagtttctaatatatttatttgactttgggttaggtatggaaaatgggaagaatataaagctgattagtaacatctagctacttcaaattatgagtttccctttaaaattctccattcttaacttgtttctcttatagactgcatgattatgtgttggttattattagataaataaaaacacttagttttgacaatttttgttcctttgatatctcaaatcggccaaacaaactaggagtgatggcaggaaaagatcggtatgtttatgctaccatattttttagacgtttttattttctagcttttctttaaacttgcactgtaccatctatttttcagattttgcaatataattatcattgaagattcatgtagttctcttataatgctatataattagcacaatacagtgcactcactttattatttcctgatgaaaagtgagtgatatagccaccttatttggaggtttttacacaagatagcatgtaactgaaatactaagatagtatgaatcaataaatgcacatactgaattggcttcgttgtttaggtttggctacaaatggataagtcatcaaatctcctgagacagtacttcagcaacttgcacgatcaactgagtacacgtcctttttccacagtcaggttgcaaagaaatggcttgatttttaggatagaatgagacggcatgggcaatatggtgaagcggatattaactccatggtcgttgcgagttgcatcactaccaggcacaacaaagggtacagaaacaccatgagaatagctacactggaagagatcctgcacaagcttctgcggagcatcagtacactccccctaaggcaagacaaagtcaatgggatcgaagtggaccaaatgtgccaagccaggttccatcatatgttggatcga

SEQ ID NO: 21829 - DNA, 627 bp, Zea mays
  unsure (1)..(627): unsure at all n locations
  Clone ID: MRT4577_119905C.1
cgggtgcattaaaccttgtgctacttggtctaaagcgttaaaaaaaaaaaaaaaaaaaaaaaaaaaaaaaaaaaaaaaaaaaaaaaaaaaaaaaaaaaaaaaaaaaaaaaaaaaaaaaaaaaaaaaaaaaaaaaagggggccctttatgagagggattgggggatttaaaaggcgggaaaacgttgggggaggggaatatggaatggttggcccttttgaaattggacagtggcccggaaaaaaaggttggttggaatagaaacacgttagtatacaaaaggggaatgggattggttggaaaggtaataaaaggggggccccggggggcccataagcctatggaggggtatcccgggtttttggtaaatttggggaagggcaagtttttatgcaggaaaaagggttatcccgcaaaattttgggaaaaaggttgggggcaaaaaaccagggacactggcgaaacaaccggggggcaaccatttttggttggccttataatttgggatcaaaaaccggccgctgggaatttaaaaaaaaaagtaggagcccttgaaaagtataacaaaaactcgatgctcagcataaaagaggaaaaatcctgggggaaatataaaaaatnngggggg

SEQ ID NO: 21830 - DNA, 205 bp, Zea mays
  Clone ID: MRT4577_119906C.1
tttcagaggtttagggaaaaggagaaagaaagggattgagatcataaccgcagaagggagatcctgaagcaggaagattagagcgatgaccaggataataggaaaaggaaacgaaggagtattagctcacttgaagataggaagaggaagaggcaacgtgaaaaggaagaagatttggcagataaaataagggaagaagaggaaa

SEQ ID NO: 21831 - DNA, 513 bp, Zea mays
  Clone ID: MRT4577_119907C.1
attcggctcgaggcagttttagtgggtacaagatctacccgggacacgggcggcgctacgccaggaccgatgggaaggttttccagtttcttaatgccaaatgtgagtccgcattcctttccaaaaggaaccctcggcaaattaactggactgtcctctacagaagaaaacacaagaaaggacagtcggaagaaattcaaaagaaaagaacccgccgtgcagtcaagttccagcgggccatcacaggcgcttctctggctgatataatggccaagaggaatcagaaaccagaagttaggaaagctcagcgagaacaggctatcagggctgccaaggaagcaaaaaaggctaagcaggcatcaaagaagacagcaatggctgctgccaaggctcccacaaaggcagcccctaaacaaaagattgtgaagcctgtgaaggtctctgctcccagagttggtgggaaacgctaatttagtagatgagagtttaaaaataaagatttgtctctaggtg

SEQ ID NO: 21832 - DNA, 232 bp, Zea mays
  Clone ID: MRT4577_119908C.1
ggcctcttgttgagagggcttggcaaatgctggggacacaatccaacggtgacggagatactgaactctccatctactgacattctgattgacaactatgatacctttactcgctatatctatcaatatctggccctctaaggagctataataacggagtatcagacagaccagatttcgctggtgggactatgcctcaacaaacccagccagatagctacctgacgtggct

SEQ ID NO: 21833 - DNA, 316 bp, Zea mays
  unsure (1)..(316): unsure at all n locations
  Clone ID: MRT4577_119909C.1
gagcactcngcctctgatgtcagcaccgcttcctactgtgactgcacatttaggatccgggcaatggggcctccggtggtgctggttcctcactctatgatgccttcatggtcgactgggcctgtatatggaggcagagagggaggtcattttgttcctaaggggagggtccatggaggtggcctactggcacttctcgggggcagtttcagggacgccgacgtggaaaagctttgaaaattttgggaggttgtgtggacataaacaggccacgatcccggctatagaattgttataaggccttttctctcgctag

SEQ ID NO: 21834 - DNA, 277 bp, Zea mays
  Clone ID: MRT4577_11990C.1
gagagggacttggaggccccacctgtgaggaccctgacctagccatcttgaggggttttctaacccccaggtctcccaggccgaaggtcagccttgagtcccgttttacagctgatccagaagaccttgagagtaggcgtcctctaaccacgggggagactggctgtgcagggctggggggtggtctgtgcagacacctcctcacccaccaccccatgcatactcttgggaagcagcttcctgggagattagaaattctacttccctgactggagct

SEQ ID NO: 21835 - DNA, 350 bp, Zea mays
  Clone ID: MRT4577_119910C.1
acgtcaagcccgcgttcacggctgttttcttcaacgtccactaccattactccaccgggggtgtgtgcccctaggcgtcggcgccgccctctctttaatagacccccctcaccctcaccttctctacctcccgtacatcctcatcctaaagaacctcgatggcacccctgaccatactgatctcatgcctggcctcatctttgacaaaaaggctagccatgctactgggggcccaactcaaatggagaatgctaaaatcgctgtcatacaactacaaatctgaccacccaatactgacattgaccagagagtcattttattcgactactcacacatggaccgcattctac

SEQ ID NO: 21836 - DNA, 174 bp, Zea mays
  Clone ID: MRT4577_119911C.1
gcgaaggtggcatcgaggacgtcaagtacgtcggcagggccccgacggctgctaccgcgaagggcttctactcggtgcagtgcaggagtcgcaggcgctggtgcagaaggcgctgcaggaaaatccctcaactaccctttctgaaagacacgaagcccctgtagattcttggaa

SEQ ID NO: 21837 - DNA, 273 bp, Zea mays
  Clone ID: MRT4577_119912C.1
ccacccggaatgcccgggggggggctcacagaacggaccgggggggccacaccccgacgcaatgcaggcgccagcacgacaaacgccaaacccggaggggcggacatcgcggccgtccagaagaccgaggaacctccaaaactgtggaaggaacactcaccacagaaggcgggcacggggcaaaccagatctgagcaccccgacaacgaggaggccacagatcccaccatggcggccgcagaagagacgaacattgaccacggcaagattcac

SEQ ID NO: 21838 - DNA, 286 bp, Zea mays
  Clone ID: MRT4577_119913C.1
gaccgccgtgcattagcggagctcctcgccggttctctctccgccgtccaatagggtcgaggcctgataccacgctgggggcggttgtattaggagattagcgatggctatgtggcggccggcagcgctgctggtagtggctctggcgggcggtctatcggctgcgtcgcgggctgatgcactatctgttactgggacctacacctggtgcatccactatttcgtgccttattatggcgacaccgtgtccgggaacttattctttgttgaccatcacattttttgg

SEQ ID NO: 21839 - DNA, 396 bp, Zea mays
  Clone ID: MRT4577_119914C.1
atattttttttttttttttttttttttttttgttttttttaaatttttttgggttttttaaaaccaatttccacttgaaatcaaaaaactggagaggttacaggaaacacacctgaccaaagcaaaaggaaagccaaaaaaaattggccaaaacacaaaaacctccccgaggaaaggaagggacaaaatggaaaaaaacaactgacacttccaaacccccaatgggattcaggcattggcaatataaaccccgatatcccaccttaaaacctcaaaaacttcaaaaacgctcagcctctagcgcaactcctccataaaagcaaggcctgaggaacggaaacccccttttatttcttcaaggtctcccaaatccaaaaactcgacccacacaaaaac

SEQ ID NO: 21840 - DNA, 1250 bp, Zea mays
  Clone ID: MRT4577_119915C.1
ctcgaggccggccgggatctttgtgcttggggcaatgacgcagcttatgaggtcataccgaggcgcgtcaattgctggttgaaaactatttccaaaccccctctttggcccactgggccactgagaatttctggaagggctccttttcctcggagaagctactgataaaagagtcccgtggctcgcaagaagcaatcttgagtcctgggtcttcgctgccagcacgcttcacgcttgtggccaagaaacgttgggggcagtttggacctcggagcagcagcatccatggcgggagaagaggccgggaggaggggcgttccctctctgctgaacccgccgtccgcttccagcgaggggcagcaggagcacatcgcctctgatgtcacacagctcatcggatggacacctctggtcgagctcaagcgaatcgccgccaaggaaggggtaggcgcgcgcatcgtcggcaaggtggaggcgtaccagcctctgtgctccgtcaaggatcgcagcgctctgagaatgatcgaagacgcagaggagagggggctgatctcgcccggcaccacgacgctcgtggagccgacgagcggcaacctggggctgggcctggtcctcgtcgccctccgcaagggctacaggttcgtcgcggtcatgccaggccagtactcgctcgacaagcagatcctgctgacatacatgggcgcagagctgtacgtaacagatccatccctcgggttcccgggcataaccgccaaggtcgaggagctcaagaaggagctgcccaacgtgcacgtcctcgaccagttctccaacagagcgaatcctgaagcgcatgttagatggactgggcctgagatctggaaggacaccgccggcaaggtggacgtattcgtggccggttcaggctcgggaggcacggtgtctggcgtcggcaagtacctcaagacgcagaaccccagcgtcaaggtcatctgcgttgagcctgccgagagcccagttgtttcaggcggggaaccaggcagccacaagatccagggaatagggccgggattcataccggaagtgctggacacctcggtcatcgacgaggccgtcacggtgaccaccgaggaggcgatggcgggcgcccggaggctggccagggaggagggcctgctcgtcggcatctcttccggggccaacctggcggcctgcttgaaggtcgcggcgcgagaagagagcaaggggaagatgattgtcaccgtgtttcc

SEQ ID NO: 21841 - DNA, 418 bp, Zea mays
  Clone ID: MRT4577_119916C.1
ggaaacagcgtccttgcagtagcgcaggactcgcgcttgggaggagacgttggcaaggcaagggtatgcctcgccttggggctttgcacatcaaatccctgctgcttgctgggggtgaggccactgatttttagacgatccattaccggcggccgggggccggaaaaccagtaggttgaatcatccttcaagccgcttcgggggaggggattaccaagtggtacaagtgctggacgtggctttgggaacatgttcaccgcatgaggagggctacattgcgctcctctccggtgcaaggcgtccgaacgtatactgcactgtcctctgtggggcgagatcctcctggagcagtctccttcactccggcggctgatcaacaggctctggtgcattcgccgtctgaggggccctcagttgt

SEQ ID NO: 21842 - DNA, 254 bp, Zea mays
  Clone ID: MRT4577_119917C.1
ttttttttttatcttttttttttgggtttttttcttttttttttttttttttttctgggaaccgcctaactgggtttcatttttgcaagaaaaaaggctcatgtctcaaagctccaatatacctcagcattgtttttaagtttttatggcaaaattggccgttggaacagcttaaggcccaggtacctgcaaattttttagggccccaaataaacttttaaaggctggcctaattttgcaacctggcaccggcc

SEQ ID NO: 21843 - DNA, 337 bp, Zea mays
  Clone ID: MRT4577_119918C.1
taaaaaaaaaaaaaaacgaaaataaaaaataaaaaaaaaaaaaaaaaattaaaataattaaaaaaaaaaaaaaaaattaaaaaaatttttaaaaaatttttttaaattataaaaaattattaaaaatttaaataaatttttttcttttagccctcccccccttagggggaatttttctaaatttccttcacttttagggcggttctaggtttcttttagggggccccttttcccttttgtggggggatttaatattttattggccggtttttataaccctggggttgggaaatattttgattttccccactttatcctctttctaacctgtctcatt

SEQ ID NO: 21844 - DNA, 383 bp, Zea mays
  unsure (1)..(383): unsure at all n locations
  Clone ID: MRT4577_119919C.1
ggggcgcacgacgaggggaaagaaagagcgcacccagccgaacgcaaacaccagcaccaacgagccacgaaggaccacccccagaccacccacaccgacgagcacaccaaggagcgcgacaaccacagcggcagcacgcacaagaacgacgacgagaccgacgccgcccccgaggagcgcgcccgcggggccaccaccaacaccgccaccggcgaggacnaagaccccgagaccgcgaccaccaccgcagcagccgaggaccagaccaccggcccacggccagaccaagggacaaggaacacgcagcacccggcgccgcgcagacggacaccgccagcctcggccccgacgccgccgacggacccatgccgcagaccaaaaag

SEQ ID NO: 21845 - DNA, 1023 bp, Zea mays
  Clone ID: MRT4577_11991C.1
atggatcctatgggcaagaggattgtgattaacgacaaggagaaggagactctcaacattgacgagccgaaaggtgataagcccaccgactcaggctccaacaacaagaggaaggaagggaagaagaggtgtatcaagaagatcatgtactatgacagtgacacttcctcttcttcaccaaaggacgatgacgacgatgattcctctacaaagaaaaagatgggcgatcaaaattattcttttgaatattcttgcatcccatataattccaatgctcatttactgtatattccacttggcaagcccctcactttgatggggaagattattcattttggagtcataaaatgcatagtcatttattttctgttcatcctagtatttgggaagagggatgaatacaacaaggttagtggcttagacaatgcccaagtagcaggtttggattttgtggagacttttgctcttgtagctaggcttgagcccattcgaatactattagcctatgttgctcaccattcttttaagctctaccaaatggacatgaaaagtgcctttcttaatgggccaatcaaggaggaggtcgggaaagctaatccaactcttttcactaagacttggaatggtgatttgtttatatgccaaatatatgttgatgacataatatttggttctactaatcaaaagtcatgtgagaagtttagcagggtgataacacagaaatttgagatgtccatgatgggagagttgacttacttcctcgaatttcaaataaagcaactcaaggaagggacattcctctctcaaacaaagtacacacaagacatactaaagaagtttgggatgaaggacgcaaagcttgctaagacgccaatgggaacttataaacatttggacctcaacgcaagaggtaaatccgtagatcaaaaggaatgtcaccttgtggctatgaagcatattcttcgatatttggttcatatgccatgcatcgggctctggtatcccaaggggtcttacctttga

SEQ ID NO: 21846 - DNA, 246 bp, Zea mays
  Clone ID: MRT4577_119920C.1
tgagtgtacgcacaccctagctgagtttggcgcgaccggggttgccattaccgtccttttgttccattctctgtcgaacgggacggcccagcctacatgtgctactccatcccgttgcgccgggaggagcttcgcgggtgtccgcctgcagggaagtgaacccgctcctccgggaagcaatggcaccccctggcattccccgcaccgccgggaagcaggtgccacgtgaccaggctttgctacagg

SEQ ID NO: 21847 - DNA, 322 bp, Zea mays
  Clone ID: MRT4577_119921C.1
acggccagtgcgcgcacccaccgccgccacggtccagatctcccatccaaactgctggggccagcatcaagagcgcgggtgctacggcgaccgatactcgtctgacacagctggtggttgcctttgcgactatcacacacctaatccatctgctgctctcctggctataccgcttcacaacccagcgcgcgctcatcgatatccctctgatattattgcccaagcttacaccagagcggatgcgcacggcatgtccattgatcactcgctagctgtcgctctaatgagctactatcctattataccgtgacttgcgacatct

SEQ ID NO: 21848 - DNA, 280 bp, Zea mays
  Clone ID: MRT4577_119922C.1
cggtcctaccttccacgggtcgacgcacgcgtccgaccacgcgtccgaatcgccagccctatctttggtgcagtcattggtcgaaaccatcagggtacagcagctgcagcaactcgtgctagctgtgatcacccacgtagcactggcacacctttctccctactctcagcgacaacaatttcttcaagtcaagcacatgtccacttttagccgtgtctgcgtacttgcagcatcacttatgaccatacaaccagctaactactgcctaatcttagcaaca

SEQ ID NO: 21849 - DNA, 590 bp, Zea mays
  unsure (1)..(590): unsure at all n locations
  Clone ID: MRT4577_119923C.1
gccacgcctgctgctactcccgctcgtgtgcgcgaaatggcatgcgcgtgcggctcctcgactctaccacggccgtccgtcgctgccctggaatggaccaaagagaaagcggtcgccgctgtactcctcctcctcctcttcctccttcctcctccgtcccagcggatgaggtcaggccgcggtgagcccggcctgcgttcggcgtgcgcgccgcgtcctgattccgaaaggccgatctggtgtacccggtacgcctcctccgccgcgggtcgacgatcgccttcccggcgacttcggcgtttgatccctggggcctcggatctgagctgcgagtagcctgcggtggaacgtgcaggcggagctggtgcactgccggcgggagatgctcggcgcggagggtatcttcatcccggagttgctgaccaagatcggcgagctcaacgcgcccttctggtacaccgcgggcgagtagtagtactttgccgacaccaccaccctctttgtcatcgagntcatcctcatcggctggtccgagggacgccgttgggctgacttatcaagcccggaagcgccccaccgatcccatcttc

SEQ ID NO: 21850 - DNA, 459 bp, Zea mays
  Clone ID: MRT4577_119924C.1
atggcaccagtccccatccccaacctccagctaccgcgcacggcggcgctgctagaaatacggcggggcgtcgccggagtacagccaacttggccagctaacggaccaattcccacccgagacttcctacgcaccaaatgcttaacaacgaatgccatggagggacttacagcgcgcacgaacggtggcggaagtaggctacggcgaagtgcggtccgcggcggcagggtaacgacggcgaggaatcctcccggtcccgaggacccacgcacccggatccttccccgagaacaatccacgcccacacccgaatgccagggatcgggtcacagacgcggagtggtgatggagatgagtgtcaacgacggcaatgacagcgcccgcccaacgtttaaatcactggcggagctcggttccgaatccactacctaccggaccgcgattggcgcgggtagttga

SEQ ID NO: 21851 - DNA, 388 bp, Zea mays
  Clone ID: MRT4577_119925C.1
accggccgttgttcgccgccaaggacctaaccacgttttacttgagaaccggccgaagatttttccacaaaaaaagggttgggttgttgccccccttaaggaacctgttgggcttggggcggggccccaagaccaacgggtgtttcttgaccaccaggacaaaagccttgacccacaacttcagggggggggcaccggggcccaacgtattgtgcccgggtttgaagttaaataccttgcagccaatattttttttaccttccagggccaaaaccacgcccttaaaaaaccgcaccttttccacattttgattaaaacgttgggggggcccacctattttcccggggcactttttaaagaccaaggccaccgacggccggcccccccg

SEQ ID NO: 21852 - DNA, 2167 bp, Zea mays
  Clone ID: MRT4577_119926C.1
ccgacaccggcgggcggctcggacgagcggaggaggaagacaggatggctgccggacgagcggttgcggtggcggcggtggcggcggtggcggcggcggcgctgccgctgctcgtgggtggcgcgtacgcaccggatcacccctactacaagaacgactacatgaacaaggacaagtccatgagagactactgattccacacctgcgacaagacctgcgggcccgacgcggcgccccggcgccccgtcgccggactccccataaactgcgctctcgcctgcgtcagggactcctgccacccattccacgcgaatcccgacgccatgaggccatcggcgttgcccgcccacccgttccacaagaagcgagatgttgtctgggcagtctggccggcagcgttgcccgaccatccattccacaagcggcggggccggaccacccattccacaagaagcaggacgctgcctggccggcggcgttgcctgaccacccattccacaagaagcaggaccctggcgggcctgcggtggcattgccagaccacccattccacaagaagctgggcgctgtctggccggcggcgttgcccgaccatccattccacgagaagcaggacgatgtctggccggcggcgctaccggatcacccattccacaagaagcaggacgctgtctggccggcggcgttgcctgaccatccattccacaagaagcaggacactagtgagcctgcggcggcattgccggaccactcattccacaagacgaagcagggcgctgtctggccggcggcgttgcccgaccacccattccacaagaagcaggacgctgtctggccggcggcgttgcctgactacccattccacaagaagcaggacactggcgggcctgcggcggaattgccggaccacccattccacaagaagcagggcgctgtctggccggcggcgttgcccgatcacccattccacaagaagcaggacgctgtctggccggcggcgttgcctgaccatccattccacaaacgacaggacactagtgagcctgcggcggcattgccggaccactcattccacaagacgaagcagggcgctgtctggccggcggcgttgcccgaccacccattccacaagaagcaggacgctgtctggccggcggcgttgcctgaccacccattccacaagaagcaggacactggcgggcctgcggcgggattgccggaccactcattccacaagacgaagcagggcgctgtctggccggcggcgttgcccgaccatccattccacgagaagcaggacgctgtctggccggcggcgctaccggatcacccgttccacaagaagcaggacgttgtctggccggcggcgttgcctgaccatccattccacaagaagcaggacactggcggtcctgcggcggcattgccggaccactcattccacaagacgaagcagggcgctgcctggccggcggcgttgcccgaccacccattccacgagaagcacgacgctatctggccagcggcgttgcccgaccacccattccacgagaagcacgacgctatctggccagcggcattgcccgaccacccattccacaagaagcacgacgctgtctggccagcggcattgcccgaccacccgtttcacacgaagcaggatgctgtcgcgccggcggcgttgcaggaccacaagatccacgacgcggtcaagccggcaggggagccggatcccggatacgtcatgtatccggcatggagccccgtccgcccctaatcgtcgattcgttgttggagaacgacgacgttccgccggcaacggcgaatgccacatgcattacatgctcgtggctcccatgcgatattaagcactactagtagaggaagtgtgtgatgtgtcagacgtgctgctgctactgtatatgcatgcctattctcacgtttatgcatatgggcattagtgtcaattgatcgatgatggacaaatgttccaacagacacaggaatgccgactgcagagagaagagctttgttctacaagtggcaccaagggagcaagtggcggtagatgctatgctaagcgtgccaacgaactcatctcctcctagctagttggctgcttcatgtgtcttctaattacttctagttaaaggttacacgggaacgc

SEQ ID NO: 21853 - DNA, 173 bp, Zea mays
  Clone ID: MRT4577_119927C.1
cgcacgcgtacgcatgcaccctaaactccaggctcgaagactgcctgcctgactcggtggggagaggtctatcttccaaagagccccggagcactccctcgacttcagatgtctattctcaaaaccgctctaactaccccagtcagtgagccctttataatgtcgccaaccag

SEQ ID NO: 21854 - DNA, 1783 bp, Zea mays
  Clone ID: MRT4577_119928C.1
gtgagcggcccggacgagcggaggaggaagacaggatggctgccggacgagcggttgcggtggccatggtggcggcggcggcgctgccgctgctcgtgggtggcgcgtacgcggactgctacaactactgcttcaacgactgcatgaacaaggacaagtccatgagagactactgcagctacgcctgcgacaagacctgcgcgcccgacgcggcgccccggcgccccgtcgccggactccccataaactgccagctcgcctgcgtcagggactcctgccgccgtcgccgtgcagatgccaacgacatgaaggcctgctacgggcagtgctacgaccgctgcgagaccaaggccggcctgccgaggcctctccgcgcaggcggcggcgttggcattgtctggccggcggcgttgccggaccacccattccacaagaagcaggacgctgtctggccggcggcgttgcctgaccacccattccacaagaagcaggacactggcgggcctgcggcggaattgccggaccacccattccacaagaagcaggacgctgtctggccggcggcgttgcccgaccatccattccacgagaagcaggacgttgtctggccggcggcgttgcctgaccacccattccacaagaagcgggacactggcgggcctgcggcggcattgccggaccacccattccacaagaagcagggcgctgtctggccggcggcgttgcccgaccatccattccacaagaagcaggacgttgtctggcctgcggcgttgcctgaccatccattccacaagaagcaggacactggcgggcctgtggcggcattgccggaccactcattccacaagacgaagcagggcgctgtctggccggcggcgttgcccgaccatccattccacgagaagcaggacgctgtctggccggcggcgctaccggatcacccgttccacaagaagcaggacgctgtctggccggcggcgttgcctgaccatccattccacaagaagcaggacactggcgggcctgcggcggcattgccggaccactcattccacaagacgaagcagggcgctgtctggccggcggcgttgcctgaccatccattccacaagaagcaggacactggtgggcctacggcggcattgccagaccactcattccacaagacgaagcagggcgctgtctggccggcggcgttgcccgaccacccattccacgagaagcacgacgctgtctggccagcagcgttgcccgaccacccgttccacaagaaggaggatgctgtcgggccggcggcgttgcaggtggaccacaagatgcacgacgcggtcaagcgggcaggggagccggatcccggatacgtcatgtatccggcatggagccccgtccgcccctaatcgtcgattcgttgttggagaacgacgacgctccgccggcaacggcgaatgccacatgcatacatgctcgtggctcccatgcgatattaagcactagtagaggaagtgtgtgatgtgtcaacgtgctactgctatactgtatatgcatgcctactgtatatgcatgcctattctcacgtttatgcatatgggcattagtgttccaacagacacaggaatgccgactgaagagagcagagctttgttctacaagtggcaccaagggagcaagtggcggtagatgctaagcgtgccaacgaactcatctcctcctgtcctagctagttggctgcttcaattcatgtgtcttctaatctcaaaaaaaaaaaaaaaaatttgcggcc

SEQ ID NO: 21855 - DNA, 1366 bp, Zea mays
  Clone ID: MRT4577_119929C.1
ccggccgcggcggcgttgccggaccacccattccacaagaagcaggacgctgcctggccggcggcgttgcctgaccacccattccacaagaagcaggacgctgcctggccggcggcgttgccggaccacccattccacaagaagcaggacgctgtctggccggcggcgttgcccgaccatccattccacgagaagcaggacgtcgtctggccggcggcattgactgaccacccattccacaagaagcaggacactggcgggcctgcggcggcattgtcggaccacccattccacaagaagcaggacactgtctggccggcggcgttgcccgaccatccattccacgagaagcaggacgctgtctggccggcggcgttgcctgaccacccattccacaagaagcaggatactggcgggccggcggcattgccagaccacccattccacaagaagcaggacgctggcgggcctgcggcggaattgccggaccaaaagcagggcgctgtctggccggcggcgttgcccgatcatccattccacgagaagcaggacgctgtctggccggcggcgctaccggatcacccgttccacaagaagcaggaccctgtctggccggcggcgttgcctgaccatccattccacaagaagcaggacattggtgggcctccggcggcattgccgggccactcattccacaagatgaagcagggcgctgtctggccggcggcgttgcccgaccatccattccacgagaaacaggacgctgtctggccggcggcgctaccggatcacctattccacaagaagcaggacgctgtctggccggcggcgttgcctgaccatccattccacaagaagcaggacactggcgggcctacggcagcattgccggaccactcattccacaagacggagcagggcgctgtctggccggcggcgttgcccgaccacccattccacgagaagcacgacgctgtctggctctggccagcggcgttgcccgaccacccgttccacaagaagcaggatgctgtcgggccggcggcgttgcaggaccacaagatgcacgacgcggtcaagccggcaggggagccggatcccggatacgtcatgtatccggcatggagccctgtccgcccctaatcgtcgattcgttgttggagaacgacgacgctccgccggcaacggcgaatgccacatgcatacatgctcgtggctcccatgcgatattaagcactagtagaggaagtgtgtgatgtgtcagacgtgctactgctactgtatatgcatgcctattctcacgtttatgtatatgggcattattagtgccacttgatcgatgaaaaaaaaaaaaaaaaaagcggcc

SEQ ID NO: 21856 - DNA, 276 bp, Zea mays
  Clone ID: MRT4577_11992C.1
atttcaggggcaatttgttgattcttttgggtaccacgcagagagacttgaggatgacacagtacacaagtatcgtgttaacagatatgaaggtgatgaggagatacatactgtctatttcaatcctgatcaaggtacggtgaattgtagttgctgcctgtttgagagctgtggtatcttgtgcagacacgctcttcggattttcattatcgaaggagtacatgaccttccaaaggcttatattctgaaacgttggacaaagcatgcaaaaaatat

SEQ ID NO: 21857 - DNA, 230 bp, Zea mays
  Clone ID: MRT4577_119930C.1
cctgcgctggcggccacccgtcagcgtactctcttctgcgcgtctacggcgctcgtgctctgcggaccacaatctgctcatcaagcactgctcgcttgcatgctcgcgtctccatgggtctactgtcaaacaggattgcgaaggctagcctctgagccggggatcatatctactcctggacggcagcgtgagcatacacacctcactggatacatgcatgccaccataag

SEQ ID NO: 21858 - DNA, 965 bp, Zea mays
  Clone ID: MRT4577_119931C.1
acgtcgctgcctggccggcggcgttgcctgtactttccatttcacaagaagcaggatactggcgggcctgcggcggcattgccggaccacccattccacaagaagcaggacactggcgggcatgcggcggaattgccggactacccattccacaagaagcagggcgctgtctggccggcggcgttgcccgaccatccattccacgagaagcaggacactgtctggccggcggcgctaccggatcacccgttccacaagaagcaggacgctgtctggccgacggcgttgcctgactatcctttccataagaagcaggatactggcgggcctgcggcggcattgccggaccactcattccacaagacgaagcagggcgctgtctggccggcggcgttgcccgaccacccattccacgagaagcacgccgctatctggccagcggcgttgcccgaccacccgttccacaagaagcaggatgctgtctggccggcagcgttgcccgaccacccgttccacaaggaggaggatgctgtcgggccggcggcgttgcaggatcacaagatgcacgacgcggtcaagtcagcaggggagccggatcccgatacgtcatgtatccggcatggagccccgtccgcccctaatcgtcgatttgttgttggagaacgaagacgctccgccggcaacggcgaatgccacatgcatacatgctcgtggctcccatgcaatattaagccctagtaaagggagtgtgtaatgtgtcaaacgtgctactgctactgtatatgtgttggaataagtgtaaacgagatacagagagtagaaaggaattgacagttgtgttcactttattgcaggaaagttctgattatatacatgtgaaggggtgtatcccaaggggtatgtcccttagggagaatctgtcacaccctttggattggtcacatatacaatatacaatattttgt

SEQ ID NO: 21859 - DNA, 595 bp, Zea mays
  unsure (1)..(595): unsure at all n locations
  Clone ID: MRT4577_119932C.1
ccaattctatgcgtggtcgctcttccgtctctcccagtgcagcagtcgtcttctctaccttcctcgcctatccagtgctcctcatctaacaactgtactaaaactagcagcaagactgcttctgcttgtacgatagcctgtacctgtactgtgctgacattatataccctccccttcttgctcgtgccaatcgccattgccaaccaccacgtagagctgcattgctttgagggatcaaggccatgggaatcgcaacaggagtttgcttcgtagttcttgttctgatctgtacatttctcagagaagggagagcggcgacattcacgttcgtcaacaggtgcacggggacagtgtggccaggcatccagtcgaacgccgggagctctcggctggacccgacgggcttcgtcctgccgccgggcacgtcgcgcgcggtccaggcgccgtcagggtggtccggccgtgcctgggcacgcacgggctgcgcgcaggacgcgagcgggaaggtggtgtgcgccacggnggactgcgggtcgggctccctggagtgcaacgggcagaacgcggcgacgcccgcgacgctggccgagttcac

SEQ ID NO: 21860 - DNA, 247 bp, Zea mays
  Clone ID: MRT4577_119933C.1
gcggcatcagccggcaacactggaccatcatcacatagtgcaacgacagtgacactcatggggggttgcatgagtctgatgagcttgatgcgagctgcaaattctagcattggcagagccatccttgagccacacatgggacagctagtacactcagagcaatgatcattcgtgccccaatggcgaacgaaattagtcatgacattcatgaacatgctattgacatagagtccaggatgccggaata

SEQ ID NO: 21861 - DNA, 712 bp, Zea mays
  Clone ID: MRT4577_119934C.1
gagagattggcactaaagcccatatatatatatatatgcataaacgtgagaataggcatgcataattgcatatacagtagcagtagcacgtctgacacatgacacatcacacacttcctctactagtgcagtagtgcttaatatcgcatgggagccacgagcatgtaatgcatgtggcattcgccgttgccggcggagcgtcgtcgttctccaacaacaaatcgacgattaggggcggacggggctcgatgccggatacatgacgtatccgggatccggctcccctgccggcttgaccgcgtcgtggatcttgtggtcctgcaacgccgccggcgcgacagcatcctgcttcttgtgaacgggtggtcgggcaacgccgctggccagacagcgtcgtgcttctcgtggaatgggtggtcgggcaacgccgccggccagacagcgccttgtttcgtcttgtggaatgagtggtccggcaatgccgccgcaggcccgccagtgtcctgcttcttgtggaatggatggtcaggcaatgccgccggccagacagcgtcctgcttcttgtggaacgggtgatccggtagcgccgccggccagacagcgtcctgcttctcgtggaatggatggtcgggcaacgccgccggccagacagcgcccagtttcttgtggaatccgtggtccggcaatgccaccgcaggcccgccagtgtcct

SEQ ID NO: 21862 - DNA, 505 bp, Zea mays
  unsure (1)..(505): unsure at all n locations
  Clone ID: MRT4577_119935C.1
aaccggttcttaaactacacncacngtgacaagcaaaactttcatagtagnctactaagcgtcaaggcgacagttatcttaagccaaagcaactgaaccataccaaatcaatggctcattcttacaaagacacttttttaacaaactctcactaccataatagtggccttctcattccacacacaaatattcattcaaacaaaacaacttatcatacctaaagttctcatttctaaaaaaaaaaattgtctattttacaaataacaataaatcctctattaactcataaatcacattcttttttaaaattcttcattaacattatatacatagatatgtgggtattattcacttctattcctattatcaatttccaactttttctttaattaacaaaaaaatttttaaataaatcccttttctattctgaatcatattccaaaataatttattaaccaaatcaaacttttattcccttaattcatttttacacataatttttatt
